United States Patent Application Publication US 2026/0103690 A1 - sequence listing, part 35

SEQ ID NO: 162470 - protein, 333 aa, unidentified
MEQRKSIGVDVSKKTLDLAIYAGEFDFSLHLKVSNDSEGFDEIEAWMSEHDMSANDTVFTMEFTGLYAQSLRQWLESKDIPYFMVNPKKMHDFSVPVNFKGLGRSKTDFLDSFKIAYYGFSNCHELRPSKLPLPAILKLKRLLAERRQYVAQACAYKQQRHDIACFESSSSQIRKKSMLADFKSMINKVDDEIDNVISSDATLRTNYDLLTSVIAIGRVVATETLVLTNNFTSITNPRVYAHYLGVAPDKKQSGTSVCSPDKTDCVGFRQEKADLSMVALAAIKLDPQIKAYWKRRKKEGKHGGIVLNAIKFKLILRMFAVVKKQRPFVKLDF

SEQ ID NO: 162471 - protein, 477 aa, unidentified
MVAIVTDKAAGGSQTVSLDKLDIEKPSIVRIRADKNEVSDFVRDGDDLLLRMRSGETIRIGHFFREMDGEHSELVLEDENGNLWLGEHRWANRLRAPSNPPGRRSRTALPMIQVACRKPGTTIMQRSAAMKHYAGLDVSIKETSVCIVDENGKLCRERKVVSHPDDLVAILTDPALSLERVGVEAGPLSQWLFEGLAKAGLPVLCIETRHTKAFLDALQQNKSDRNDARGIAQMMRVGLFKDVHVKTLTSQKRRALLTARSLLQEKAIDLENEMRGLLRNFGLKVGQASGGTFERRILELVEHDADLAEIMEPLLAGRRKLREGLAKLEKRVLAEARQDEVCRRLMTVPGVGPIVSLAYVSTIDIPSRFRHSRSVGAILGLTPVLKQSGEMSRVGHVSLRGDAMMRRLLYEAAQSMMTRVVKWCWLKAWAMNIAKRHGSKKAKVALARRLAVVMHRMWVDGTEFRWTREDTVSTVAA

SEQ ID NO: 162472 - protein, 343 aa, unidentified
MGFYAGIDLHTRKSVVCVIDQKERKLVMERVPNDLPSILSLLKKAPRRPTVAVEATLNWYWLVDGLQEAAYEVKLAHTMGLYMITGAKVKTDRRDAFKLAKLLRLDAIPEAYIYPKEVRPIRDLLRRRNRLVRLRAEAYVAIKRKFQQYGLPYCDKAIQRADEKELLSWFTHPGIRSSLEMELERIRLYSRELKTVEKYIVSTVENQPIFEHLRTIPGVGKILALTIYYEVGEIARFPSARQFCSYARVVPGLAQSGDVIRRGTGSKQGNPHLKWAFNQAAAISVRHYGYIRSFRQKHLARRRSKARRLISLSIVAHKLAIAAYHVLRDEVPFDKEMMFGKAS

SEQ ID NO: 162473 - protein, 330 aa, unidentified
MAKWKYFIGIDVASRSFTATIGGSPWQVLAKPEEFENTLDGFRAFLDWLTEQRVDQRRAVVCLEATGVYGEALAHFLVAQKLAVAIEPPLKVKRAFETSGPKTDAVDSMQIAEYAYRFADELRLWQPRGEILEQIQVLLAAREQFVRQRSMHKNALTALKRKVVQTPAANQAHQQSIEFLTKEIKSLESELRKLIDQDPDLRQRLMLLLSVPGVGLLLGAHLLLLTQHSQNPRKLAAHLGKAPHPHRSGTSVHGKTQSRHYGPSTPRKLLYLAACSLRQHHPMFEEYYLRKIAQGKAPRLVLNNIENRLLRIACAVLRDQRPFIPGYRPL

SEQ ID NO: 162474 - protein, 341 aa, unidentified
MERFIRTAIDLGKNYFQVHGLESEGGRSISRKVKRSKMHEVYSQIDPCRVGMEACGSAHYWARQLTAMGHEVVLIPPAYIKPYVKRGKNDVVDAAAICEAMSRPNMRFVPIKSADQQAVLMLHKTRELLVKQRTMAVNALRGHLAEFGIVAAKGIGRVEELLALAKADAALPHIAGAAVACMARHLEGLDLSIETVDEEIAKAHRQNPISRLLDEIPGIGTLIASATAASVPDPGVFKSGRDFAAWLGLTPRQNSSGGKEKLGAITKQGNRYIRKMLVTGATSVLRVAGKRKGALADWINALRARKPERLVAVALANKLARICWAIMTTGEGFRTDTYVKA

SEQ ID NO: 162475 - protein, 344 aa, unidentified
MKVTTVGIDLAKNVFQVHGVDERGKTVLRKQLKRAQVVQFFANLAPCLIGMEACGSAHYWGRKLESLGHRVKLMAPQFVKPYVKGNKHDAADAEAICEAVRRPNMRFVALKTVEQQGILAVHRARQGFVKARTSQSNQLRGLLAEFGIVIPKGLHHMAKALPGILEDAENGLPGAFRQLLRRLGENLKAMDRQVGELEREIGLWHRGNEASRRLDAIDGIGPITASALVATVGDARSFKNARQVPAWLGLVPRQESTGGKPKLLSISKRGDSYVRTLLIHGARAVIQAAERKPQSDLWLKGLLARRNKNVAAVALANKNARIAWALLAHGRQFEHDYIPVRAAG

SEQ ID NO: 162476 - protein, 363 aa, unidentified
MFTERTSVGLDVHARSVAAAAIDGVTGELFRSRLTPSHEHFRSWVQDLPGPVAVTYEAGPTGFDLYRVLSAAGIRCEVAAPSKLRRPSGDRVKTDARDAVHLARLLRLDQITAVAIPSVDQEAARDLVRAREDCRGDLMRARHRVSKLLVRHGIVYGDGHAWTRRHDTWLRHDAIAQLSTRATRLAFDSDYQNVLAVTARRDRLDVAIGEIAAASEFTPLVHRLGCLRGIGTLTGFALAVEIGDWGRFTGNTIGSFVGLVPSEHSSGSSRVQGSITKAGNTHVRRLLVEAAWHHRPGYVVGKTMRERWELAPAAARARGDEGNRRLHQRWVKFIKRRKKSTIANVAIARELAGWCWSLAILEE

SEQ ID NO: 162477 - protein, 444 aa, unidentified
MIGPQVSKVKLSTQPFGDRPTMTKRSSNPTDAVLVAIDMSKHRQEVLIERPEGGPRRRMTVMATKADYDRLATDLSDIGRPIIVGFEATGNYHRTLAHRLLSAGFELRLISSVALARTREALHNGWDKNDSKDAQVILHMLRIGATQRYVDPLAAGINDLQEMSKTHEAISKAKTQTSHRILTHYLPLYFPEIERFAGNSRSDWFLALLERFPTPASMTVLGQETFSREAWDLVGRKVSKARLINDIYETACASVALPVDEDSVSIAMFRMVIAQARNLIRQRDEIERTAHAMLAENRDYQLLRMIPGIGPINALTILAEAGDLRRFSHHRQFLKFCGLDLATRQSGTFRGRTMLSKYGNARLRRTFWMAAQVAARQRNNSFRDKLGRYTAGHADDADRRRKAMTALTAKMARVAHAVIKTGTEYRPFLERSDARWKDPSLQVP

SEQ ID NO: 162478 - protein, 353 aa, unidentified
MNSLTDLREVVDVVIGVDTHVHTHSAAVIDAATGGVLDEITVEATAQGYGELVEFANNHPRLRAWAIEGTGGHGAGLTRHLEELGEIVIELDRPKRAARRNGAKSDPLDAIRAAREAMARPRLGTPRSGGERQALSVLLAARRSAINASTEAQLQVFSLVIAAPEPIRLRFRGQKLAVMLNTAANLRMHASYDIETTSTVVALRTLARRAHTMLKEARELQKAIVAVIRSWRPDLLEQFGVGPIVAATVLCAWSHPGRIHSEAAFAMLAGVAPIPANSGQVTTRYRLNRYGDRQLNNALHTVVQSRIQYQQTTRDYVARRTAEGKTNREIKRCLARYVARDLYRLLENTATAA

SEQ ID NO: 162479 - protein, 325 aa, unidentified
MILGIDVAKEKVDVALFKNKQFIAAGQFDNTPVGFKKLSTWLKHKEAGQVWACMESTGRYGDALASWLHQQGHQVSMVNPARIKKYAESQLQRNKTDKLDARIIADFCRTQEPALWTPPAPEKRLLQEMVRRLNALIKEKSRENNRLQSGLESEVVKASIVESLEFIGHQIAQLEAQIQEHIDQHPDLKRDQELLTSIKGIGNKTAFNIMGELPDVAHFDNVGQVVAYASLSPQQHISGSSVRKKTRLTKTGNQNLKTALYFPALSAIRFNPIVKALATRLEERGKEKMVIVGAAMRKLLQLVYGILKSGQPFDPNYSANIQDAA

SEQ ID NO: 162480 - protein, 352 aa, unidentified
MPRTTRFHSVTTTIGIDMGKNTLHMIGLDSNGAIVLREKVSRGRIASRLANLPPCLIGIEAGMATHYVARELAALGHNVKQVPPTYAKPFRQGHKNDFRDAHAVAEAVQRPTTRFVPAKTAEQLDLQALHRVRSRLVSERTAVINEIRGFLLERGIIVRQGLRFLRQSLPDFLAKRTDVLSLRMVRIVADLADDWRRLDQRIETVTDEIETVVKSDDNCRRVMTVPGIGPIISSAMVAAIGNGAAFTRGRDFSAWLGLVPKQMSTGDRTILGRISKRGNGYLRMLFVQAARVILRRPTNWSKHNFGGWLVCAAQRLHPNVLAAALANKLARIAWTVLAQERCYEARITKAAA

SEQ ID NO: 162481 - protein, 344 aa, unidentified
MNKLSRVGIDLAKNVFQLHGVDRHGKAIWRRRLMRDKWLRVLLGKVEPGCEIGMEACAGAHHWARQLQKKGFTVKLIAPQFVKPYVKSNKNDANDAEAICEAMSRPSMRFVAVKTVEQQDIQAVHRIRAELIGHRTAKANQIRGLVAEYGLVAPQQLSRLRAALPDWLEDAENGLTSRFRGLLSGLWNDLMTLDHRVSELDHEIDLIAKNDPVAKRLQQLRGVGPMIATALVATVGNAKQFTNGRQMAASLGLTPKQHSSGGKDRLLGISKRGDAYLRCLLIHGARSVIRTAVQKDDRLSQWVTGIAARRHTNVAAVALANKTARIAWAMLRSGTDYEPDYTAT

SEQ ID NO: 162482 - protein, 317 aa, unidentified
MEQRQSSTKIAGIDVGKHRLDVAAHGLEDAAVVENTPAGIAELIVWLRAREVGRVGLEASGGYERRVRQALEAGGFEVVVHQPLEVRLFARLTRRWAKNDRLDARLIAAATAHIETVRAARDPQLAELAERLTAYELVTDKAADLKTLLESIAAKDVAATLRTALRHLERTKAKLLAEVIARLKARPDLLERFRLLLSLPGVGPVVAATLVIRMPELGSMRRGQAAALLGVAPFDRDSGQWSGHRFIQGGRGRPRRMLYLAALAARRCSPALKAFADSLAARGKAKKLVVVAVMRKLIEAANLVLSRAQPWLKQRPA

SEQ ID NO: 162483 - protein, 407 aa, unidentified
MRVLYERCCGLDVHKKSVTACVLTPEGRETRTFGTMTADLLELADWLLGKAVTHVAMESTGVFWKPPYNLLEGTGLELLVVNAAHIKAVPGRKTDVRDAEWIAELLQHGLLRGSFIPERPQRELRELVRYRTQIIRERVRAVQRIQKLLEGANIKLSSVATDILGVSGRAMLSALAAGETDPAALAAMARGRLKSKRPELEAALRGLVGEHQRLLLQSGLRHLDFLEEEIARLDEEVKGRMVPFQKELEALDAIPGCAQRSAESFLAEVGSDVSRFPTHRPPASWARICPGTNESAGKRRSGATGHGNQWLRGTLVEMAHGAARSRGYLGAQYHRIAARRGKKRAAVAVGHSILVMAYHVLRDDTPYRELGRNYFDERDRKAVTKNAVKRLERLGFKVTLEEATKVA

SEQ ID NO: 162484 - protein, 367 aa, unidentified
MSSIAHRDFVHLGMDVSKNAIAVAVLPPDRDRAEVDKIFHDADSVRRLIKRLGPPKRIWACYEAGPTGYDLQRLLNSMGVRCDVVAPSLIPKGSGDRVKTDRRDARRLAGLHRAGELTPVAIPTPAQEGVRDLCRTRGDMVQDLTRARNRLSGFLLRHSVVWRSGSPWTERHRRWLGTLSFDDPAVAITYAHYLATVQLRDTALESVETDLLPWCEKDPFGDQVARLAAYRGVTRIGALCLSAEVFDWRRFPKARPFMSFTGLVPGENSTGLTQRRGSITRAGNAHLRGQLTEAAWSYQHGPNVGVGIKERQAGVPPETVARSWAAQVRLCRRFRQLATHKNVRSVVAAAIARELAGFLWAEMVAQV

SEQ ID NO: 162485 - protein, 340 aa, unidentified
MGIDVHQKDYQVAKVLNGFCLGNHRMESNREKLIEHLKSHYPGATFKCVYESCAWGFTLQRTLQASGMECIVVHAADVSTTDKEKRRKTDKVDALKLAHGYASGSLKGIHVPNEETQKDRSLIRYRKQLTGDINRSKNRLKSLLKYQGIDLPPQYAGNNWSRNFLNWVEQQAEKDALLKETLMLLLEQIKLLRQLLLKTERKLREMRKTKYAQKADLACSVAGIGPTTAMLFLLETGDINRFKGFDSLNDFVGLCPDTDSSGDTHRDRGITTRRHKQLRSALIEAAWQAIKTDPALMDSYQTLLKRMKGTQAIIRIARKLLRRLRAVLLSGRPYQKGVIA

SEQ ID NO: 162486 - protein, 357 aa, unidentified
MSKPTILKQSIGIDVSKDKIAVCFAVEQTDKKFRILATRKFDNNASGFAQLHGWAKKHQKVNLPVNVLMEATGVYYESLAYFLREINFRVSVVLANKTKAFAKSLNYKSKTDGIDAKILAQMSLEREVPEWAPAGKNMLKMKRLCRERVELIMDQTIAKNRLHAKKHSYKGEQSSMKRAVKILAFLKKQIEEVEQEITKLIASDPEIKGKVEKICSIKGIGIITAATIIGETNGFALIKNKAQLVSYAGYDVVENQSGTSINGKTRISKRGNSFIRRALHFPAITTIKYNPSLKELYDRVFERTRIKMKAAVAVQRKLLVLVYTLYRKDECFDPQGLISNKSNLPNKNRQEQQSVPA

SEQ ID NO: 162487 - protein, 384 aa, unidentified
MISVGIDVSKGKSTVCIMKPCGEILESPFDIGHTADELDSLISLIKSFDEETRVVMEDTGHYHLPVATYLSSHNIFVCCVNALRMKKFCSQSIRRAKTDKIDSIKIASFGITYWNELVKAYPSNVIYDELKFLARQYYQVTGMLVKSKVNFSNLLDQVMPKINDVLSNQGENHKLTEFVSRYIHFQNILDMGEMKFTSDYCKWAKKKGYRLNERKAAEILALAQNGIPTLPNSQSVKIAVSEAVKLIHSIEESRNTILAQMQDLCNTLPEYSVVKEMDCIGDTLAPRIIAEIGDVRRFKNKHSLIAYAGIDAPPYQSGAFHASERHISKRGNSYLRKTGYEIMQSLIKHKPADNAVYDFIQKKRSEGKCGKEAMIAGLNKFLRV

SEQ ID NO: 162488 - protein, 346 aa, unidentified
MQKIAYLAIDVHARSCTLGHMDDSGTFKGNLHFTTSEKNIIDALKSVKAQNKLLTIEEGTLTHWAAQVASPHVSQVIACDPRENALIFKSPNKKDKVDTRSLCRLLRLGELKHVYHPQDDDRAIFKAAVQHYLDLRDQLTRLKHKIKATYRRWGIIGVFSNSVYSTSGRDKYLKQLKHRPIRNQLKRLYHLMDQTEALRMSALHSIKQLGLKYPEIREFKKIPGIADINAHVFDAFIQTPHRFAKRNQLWKYCRLSITDRSSDGKQLGYKRLDTSGVGELKALSFRAFMAAMRGNNEVKRFYLDSLNRTHDHKHARLNTQRKILTVMFGIWKKGEIYRPELFSGSA

SEQ ID NO: 162489 - protein, 375 aa, unidentified
MKTLHRRCAGLDVHSDSVVACARVIVRTKVTHEVRRFSTATRDLLEMADWLAAQGITHVAMEATGVYWKPIWHILEGRFELILANAAHIRNVPGRKSDVNDAVWISDLLAHGLIRASFVPPAQIQDVRDLTRTRTQLAREIAQHIQRIQKTLEDANIKLTSVISDIVGMSGRRILKAMIAGETNAAKLAKLGSTRLKCPRAELTAALDGRVTAQHRFLIAHHLSLIEDMERHIAAFDARIEELLVPLRDALAQLITIPGVSRVSAQVILAEIGADMTPFSTSGHLLSWAGLVPRLDESAGKRRSTRIRKGAPWLKPVLVQCAWGAARTKGTYYQAQFLRLKARRGPKKAAIAVAASLLTAVYHMLKNGTFHQLTE

SEQ ID NO: 162490 - protein, 322 aa, unidentified
MSDQSNDRQGMKRIYKWIVSLKEPEVEPLVLLEATGVYHEALAMFLYSSGIDVCIMQSGRVKRYAQSLDQRSKTDLLDSKMLSMLACERSLKLWTPPSKELSQLKGLSRERSVLVTNRSIMKNQSHAMERSTTKNKQTLKRYKKRLKLINDQIAEIEEEMAAVVTADPTLSSKLKYLKSIPGISFIASATVVAETLGFSNITSAKQLTSFVGYDVVIKESGTHKGKSKISKKGNKHIRAVLHMPSMSAVKVNPTLKPFYGRLKEKKEKPIVGLVATQRKLLILMYTLWKKEEYYDPDILKTKTASSEELAAQDSELQMQFAS

SEQ ID NO: 162491 - protein, 343 aa, unidentified
MEHFAGLDVSVKETSVCIVDDTGRIVREAKVTSEPEALLSVLKNPGYHFKRIGLEAGPLSQWLFSALAEAGLPVICVETRHMRAVLKAQINKTDRNDARGMAQMMRAGLYRPVHVKTLRSQKMRMLLTHRKLLQSKAIAIENDLRGTLRNFGLKVGMVGKVKFEARIHELVENLPDLAVLVEPMLTVRRVLREQIVILHRRVLAIVRDDDVCRRLMTTPGVGPVVALTYRATVDVPARFRKSKSVGAVFGLTCAKYQSGESDWSGRISRCGDEMMRVMLYEAAQSMLLHSKKWSWLKAWAMQVARRRGMKKAIVALARRLAVIMHRIWVDGTEFRWTRDVAAA

SEQ ID NO: 162492 - protein, 343 aa, unidentified
MQIRSVGIDLGKTTFHLVALGDNGKVLLKKKFTQKQLITFTANLQTSLIGMEACSGAHFLGRALREQGHDVKLIPAQFVKPFVKSNKNDFIDAEAIAEAVDRHNMRFVPIKTDDQLDLQALHRVRDRLMARRTSVINQIRAFLLERGMVFAKSPIRLREAIPEVLENANENLTPRMRHLVAMLWCEWKDMEQQILEMNDEVERIASSDAACVRLRQIPGIGPLVATAIVASIGNGAAFRNGRQFAAWIGLVPKQHSTGGKAKLYGISKRGNLYLRKILIHGARAVVLRSKRDRIAMGPWMTALERRAPRNVLIVAMANKLARIAWAVLSTGQDYRTVPNAISG

SEQ ID NO: 162493 - protein, 341 aa, unidentified
MDKELYFGVDVSKKTLDLAYYDGETIDWKNAHIKVSNDAAGFKKIGSWVAKVGKDFDTFLFCMEYTGLYNQNFRLWLESKEYIYGMVEPRKMHRFEPDLDDDQRSLDRIKTDELDAFRIAIYCEQNHKKILRNPSKLPSPVYFKLKRLLAERKQNTKQSTLYKQQLHDICAYDTDLSVERKKLLLKNMKENLKAIDKEIDSYMQEDANISKNYNLLTSIPGIGRIIALETIVLTENFTAISNPRKYACYIGIAPFKKESGTSVRKKTGVSKKGFSEAKADLSIAVLSAIRNNPSIRDYWIRKRKEKCGGIVLNAVKFKLVLRMFAVIKRGTPYVETDAYKN

SEQ ID NO: 162494 - protein, 370 aa, unidentified
MLDTTTFIGLDVHARSIKAVSLDVMTGEVRAATFGYDAGAVAEWVRSVDPRARCVYESGVTGFDLQKRLSGLGVDCVVGAVSKMIKPSADRRRKNDRNDAEFLARMLSVGNVVEVWVPDDECEAARDLTRALEDARDDLSRSKQRLSKFLLRHGLAFDERTPTGRRKGNWTRAHWSWIESIRFAEGADNDVLAYYVDAVRRAAEEKARLEGLVEAEARKPRWRRRVDSLRCLKGVDTASAADLVFEAGEFSRFGNARSFAAWVGLTPSEHSSGESDRRGAITKAGNKHLRKALVEAAWHYLTCSGRPKDLAKGQAPDRVARRHAAKGVRRLVERREALLARGVHGNKANVATARELACWVWAVGLMAEEA

SEQ ID NO: 162495 - protein, 326 aa, unidentified
MDPVSIGIDVSKATLVIAVAPTGDTWSSETSPRALEAVVQRLIALTPSVVVVEATGGYERAIVAAAAAAGLPITVVNPRQVRAYAQAVGRAAKTDPIDAAVLADFGARIQPAVRPLADAETQALAALVTRRRQLLEMLGMERNRLAQAPPTGAVTRDLRTHIRWLERRLADVDDDLGTAIQASPLWRVHEDLLRSVPGIGPVTARTLLAELPELGRLDRRAIAALVGVAPFNCDSGQHRGQRHIWGGRAPVRATLYMAALVAVRRNPVLAAFYRRLLALGKPKKVALVAAMRKLLTIVNARLKHHTPWQVASTPGSPADRARAATV

SEQ ID NO: 162496 - protein, 430 aa, unidentified
MKSNTQNAKIEAITEKTLVLGIDVGSETHYARAFDYRGIEYSKKPFKFSNTEAGFVTFKEWILDLKDRHEKEKVVPGMEPTGHYWFNLGKFLQDNEMKPVLVNPHHVKKSKELDDNNPTKNDRKDPKVIAGLVREGRYMIPYLPDGVYADLRTASNIRFQLQAELTRIQNRISRWFNIYFPEYKTVYGKPDAKSGMLILKAAPLPEDILMLGIDGVNQIWRDAKLRAVGKARAKTLIEAAGHSVGSKEGAVSARMEIRMLLEDYESRNTRLQEVMVLIEELVKGIPMAEKLLEIKGVGIRTVSGFLAEVGDISRFNNPKELQKLAGLALVENSSGKHKGETTISRRGRKRLRYLLFEAAMSLVAKNPEFRELHNYYTTRRLNPLKKMQSLMAIAAKLIRVFYAMLTKGVDYDPKKMVSDIRRPEAYLQAA

SEQ ID NO: 162497 - protein, 386 aa, unidentified
MTQHSHVTTSNGLDYDRTLILAVEVSGRSWVVAAQVPGLRQKSAKQQLAPRADALMAAVEGYKRRAAAAGLAVERVIVADESGGSGFWLARWLQQRGVEVYVMQPSSVPVDRRMRRAKSDRIDADMLLRTLLAWLRGEPRVCSMVPVPDEAVEDARRPIREREELIRARVALVNRIEAVLTVLGAGDYNPLRRDCRERLGQLRTALDQPLPPHARAQIERLLDRLDLIRQQVADLEAQRDQAVEGEAAGRTEQMIQRLARLRGIGVQTATVLVHEAFVRRFRNARALGSYAGLTGTPYSSGGTQREQGISKDGNRRLRATLVELAWMWLRYQPGCALSRWFHDRLGGSRGRLRKVMIVALARKLLIALWRYLQDGAVPQGMELKPA

SEQ ID NO: 162498 - protein, 383 aa, unidentified
MIVIGADTHKRTHALAAVDAGTGRVRGQRQIKAEESGHLAAVRWARGLDDGRVWAIEDCRHVSRRLEQTLLAAGERVVRVAPHRMGASGRGEREPGKSDEIDALAIARAVVKDGIEKFPVAYLDEAAMDIRLLLDHRNDLVAERTRTVNRLRWHLLQLAPELERSLKPGSLNQPRVLDRVDRRLRRLPACARVRVAREQVAQIRSLNRRTDELKRELLELVKAHRPHLLAETGCGPLTAAILIGRTAGAERFGSDASFALQSGTAPLPCSSGQRQQHRLNRGGDRQLNHALHIIAITRASHDPATKAYLERKEAEGKTTKGALRCLKRHLARRFHHLLSLPAQTAQPDPGTVKEIPAHPGRRYRGRVDTSIAGAAPTPMPCVT

SEQ ID NO: 162499 - protein, 345 aa, unidentified
MNDITTYGLDLAKQVFQVHWVDVRSGEIQRKTLRRAQVSTFFARAPRGVVAMEACGSAHHWARQLQSLGHEVKLIAAQFVRPFVKTNKTDAADAQAIWEAVQRPDMRFVAVKREQQQAVLSLHRLRAQWVKIRTLQANQIRGLLYEFGVVVPLGWRALLNADLLTATDGPVPTLLRSELIEQLEALRAATARITALDRRIDSWQRAETECRRIAAMPGVGPLIASAVVASVADARQFRSARQFAAYLGLVPSQSGTGGRVKLLGISKRGDTYLRTLLIHGARSVLLSHSRHRRDGPLHRWLAELLKRRPSNVVVVALANKMARTIWALLAHRRTFDAAWNRAVTH

SEQ ID NO: 162500 - protein, 412 aa, unidentified
MKVVYPRCAGIDIHKQSMTVCLIVDRLDGSAPEYHKRKLATHTEGIRDLCAWLEQYQVTDVGMESTGVYWKPVWNALEGKWGLHLCNPQHVRVIPGSKTDMRDGTRIGELLAYGKLPESFIPPQWQRELRDLTRLRARFKQEAARAGNRILKVLEDAQIKLDCVASDPLGVTGRLILNSLVKGETDPAKLAELAVGNLKRKKKELRQALDGKFTDHHRFQIRQLLEVVKEFEDKIFELDRRIDRYLEPYEDLVRRLDRIPGVNRVGVADILAEIGPDVSHWEDSAKLASWSCLCPGSRESGGKRLSGRTRQGNRWLRRIFCQMAWAATHKKGSYFKAQYHRLARRRGKPRALLAVAHTLLTVIYHLLREPNLEYRELTEDYFEQRDAQQTAVNLIKRLGKLGYEVTLKAKAA

SEQ ID NO: 162501 - protein, 331 aa, unidentified
MDEVKRFVGIDVAKAALDVFIGSVGMAFSVANDEVGIRELLRHLAPGDFVILEATGGLETSVASALATGGIAAAIVNPRQVRDFARATGRLAKTDRLDAEVLARFGEAVQPEARPLASEQAQALEALVTRRRQLVEMLTAEKNRRASAPKVLHRSIDEHIRWLERRLSGFDDQLADLIRDTPLWRERDELLRSVPGVGKVLSSTLLAHLPELGALNRKQIAALAGLAPFNRDSGSLHGSRCIWGGRAQVRRVLYMATVAGVRSNPVIKNFYTQLRARGKYPKSALTACMRKLLVILNAMLHNKTHWQTPALTSPTSNLSPLLGAVSEHGCC

SEQ ID NO: 162502 - protein, 333 aa, unidentified
MIKSETPFLPCGIEISAAILVVDLSGKAPCEFPNTPAGHESLIRWLQRAGSEIRVCMEATGLYGLDLALALHAAGIAFMIANPRSVRNFARAMMQRSKTDRLDAIVLREYAVRMPFEPWRPPSPQALHLMAIAHRLQALTRMITAEKNRLHAASLSRAWPAVVRYDLARSIQSLERALKRLTLAALERVMSDPQLARRNELLLSVPGIGGTSALNVLAEILRLGPDCGVRQWVAFAGLDPRHYTSGTSVAKKTIISKSGNAHLRRALYMPALVTVQHEPHFRAFYQHLLDRGKTKLQALVAVMRKLLHAIFGMFKHNQLFDGTKVYALETSCA

SEQ ID NO: 162503 - protein, 340 aa, unidentified
MRKLYAGCDLHSNSNFWGIRDETGEKVFHKKLPNDLALMLAMLEPFREELVGIVVESTYNWYWMADGLMEKGYQVHLANPSAIQQYEGLKHADDKHDAFWLAEMLRLGILPEGYIYPKQERPVRDLLRKRGHLIRLRTSMVISLENILCRNVGRKVSANDVKRLGEDRVTPYLEGQEDLALAGQVSKNTVDFLSEQIHEIEKAVLTRVRLKKSYRLLLTIPGVGKILALVIMLETGPIRRFATVGDYGSYCRKVPSQWRSNEKKKGSGNRKSGNRYLAWAYAEASEFARRYYPEPRVYYQRKMQKTNAAVAHSALAHKLARAAYYIMRDQVPFRMEKLFG

SEQ ID NO: 162504 - protein, 477 aa, unidentified
MPAGQQVEVEVDEHEEIVGRVAAIDVAKASGMVCTRVPHATKAGRRVTTVWQVPSTTNQILELAEQLAGEGIERVVVESTSDYWRPFVYVLEARGLVVWLVNARDVKHLPGRPKTDKLDAVWLCKLNERGMLRPSFVPPAQIRRLRDYTRLRADLTADRTRHKQRLEKLLEDALIKLGTVATDIFGVSGRAMLEALIAGQRDPKVLAELARGRLRVKHAALVQALTGRFDDHHAELARMLLDQIDTLGGQIDQLTARIEQMITAIPAAQPPAPATGPGGDAAATLHAGMESAESVPDHPNSDGVDPETGELLAAPLPVVDRLDEVAGIGHHAAQVIIAEVGLDMGQFPTPAHLVSWARLSPRTIQSGTRHRAGATGKANPYLKSVLGEAATAAAKTDTFLGERYRRLVRRIGKRKALVAVARSILVIVWHLLADPTARFHDLGADYHASRIDRDRKTRNLVHQLQALGHKVTLQPAA

SEQ ID NO: 162505 - protein, 349 aa, unidentified
MREGSLSEAFIIGLDIAKYVFHAHGVDERGRAIFSKRISRKKLLDFFAAQPSCTVALEACGGAHHWARQLSQLGHEVRLIPPAYVKPFVKRQKNDAIDAEAICEAAQRPNMRFVAVKSEQQQAAGLVFRTRDLLVRQRTQLINAIRGHLTEFGWIAPKGPSHVAMLAGLIEEEEMAGSLPEAARAMLRLMLDLLADLDGKIADLDKEIARRAREDEVSRRLMTVPGIGPISATAIAALAPPAETFAKGRDFAAWLGLTPLQRSTGGKHKLGSTSKMGERTLRRLLIIGSSAVVLQASKRGAPKGSWLEQMLARKPRMLVTVALANKTARIIWALLVKKESYRAPVVAKA

SEQ ID NO: 162506 - protein, 396 aa, unidentified
MLLFSFTVKKEATAVKKKVADWHARGKGLAVLKGEDLFVGVDVHKKTYSVSVWSAQRGLVTRWVQPARVGVLAGRLEPIKSQVVRVVYEAGPTGFGLYHGLRALGFPVDVVAPSKTPSVPAALGKSDRRDADTLAFLAWKGMLQAVAVPSLEEEADRQVSRRHKQAVQDAKRAKHRIKSLLLQHGVAEPAGLEHWSRGAIEALRQLPLRDGVRFTLDGLLSDLRHAQEQVDLAKAELAKLAESERHATAVRLLRKVPGVGLLTAMTYRTEVLRPERFRTAEQLASFCGLAPWVSRSGSTTRKGPISKAGNARVRTVLVEAAWQWVRRDPGARRLYRHLVANTASRQKAVVAMARRLAVLLWGILVTGEAYCPEAPPQETAVAAGGPETQAPILEAR

SEQ ID NO: 162507 - protein, 310 aa, unidentified
MKKEKVYVGIDVAKAHLDVAWEQMSWRVSNDAGGHRELVKRLEKTSSISIHVICEASGGYERALLLALGRGGIDFSLVQASRVRQYARACGLLAKTDAIDAQLLARFGHAIAPPPTKTLPPAQRQLRELEDHRRHLVRLLVAQQNRRVQLSNKTLLRLNTRLTVQLRKQIAQIEALLNAAIEQDQALSCKARQLTSIVGVGPRTATLLLAQMPELGQLNRREAAALAGLAPFNRDSGSLQGKRVIFGGRRAVRCGLYMAALVAARRNPILAPFYQRLRQAGKPPKLALTATMRKLLIVLNSVLKTDPIPA

SEQ ID NO: 162508 - protein, 338 aa, unidentified
MQFKHFFGIDVSKNTLDLTVLDIQGNQIAYEHLTNDLKSIKKCFLGVLKRQQILMEDCLFCLEYTGIYNLPLVQWLTSLEAHIWLESGSQILKSQGIVRGKSDKVDSQRIAKYAFLYRNEVRLWKAPREIIQHLASLMSLRSRFIKNKKQLEVPVKELNGFLNKETIRSINKHNKAPLNAIKLQIDKIEKEILEVIKSDERIHQLYKIITSVDGVGLVTATQVIITTNEFINITEGRKYACYSGVVPFEHRSGTSIRGKTRVSHMANKKIKTLLHLAAISAIRVKGDIQDYYLRKVAEGKHKMSVLNAVRNKIILRIFACVTQERMFEKKINFCLEKP

SEQ ID NO: 162509 - protein, 355 aa, unidentified
MNQEKYIGMDVYQATISVAVMDSSGKLIMECILETKAATILEFIAGLRGTLSVTFEEGSSTAWLHDLLKPHVSHLVVCDPRRNALLKDGSKSDRIDARKLAELLHGNKLHAVYHGEHGLRTLKELGRSYLTITKDLTRVMSRIKALYRSWAIPCSGATVYAPRHRAEWLAKILEPGVRLRAERLYQQLDLLQPMRQEARRDLLVESHKHHAVKLLRQIPAIGPIRAALLVALLQTPHRFRTKRQLWAYSGFAVETHDSGEYRFMRGKLVRNRERITVRGLNHNHNHDLKNLFKGAALSASTRPGPLCDFYVALVEKGMRPTMARLTLARKMAAITLTIWKKGVEFDAKQLHRQAA

SEQ ID NO: 162510 - protein, 335 aa, unidentified
MLYSGIDLHKRSLVIHTLDADGTTTREAQLKSDRGAVLAYFGTLAGPHRAVVECVQSWYWLRDLLAPAGVDLRLAHAKYVKAISYAKVKTDRVDARMLAQLLRAGLIPEAHMIGAEHRETRDLLRSRLQLVTRAVRCQHAVGSLLEKYNVATPAELPELARMQATLQDEQRTLLRTHIKRVEATLKQRLLPTADVQRLVWVPGIGKLGAYALVLEIDDVTRFPTVRHFHSYCRLVPGADNSAGKTRHKRSRDGNRYLKQVFHTAAIRAAQYHPEIRQEYRRLARRKGKIIARALIAKELASIVYFVLRKQEAFNGRFRGHVLTPKPAVWPRLASP

SEQ ID NO: 162511 - protein, 346 aa, unidentified
MENDTLVAVDIAKEVFEVAVSDRPGRVALRKRLLRDRFAAFFAQRPQATVVMEACGTAHYWGRRIEELGHVVVLLPPKYVRPYVVRNKTDRTDVDALLEAFRNEQIRPVPIKNVTQQVIATLHRLRSGWLADRVRSINTLRGLLRELGFFIPEGRKHVLPEAWEIIQDRHRGLPEALKPSLAALCEEIASLSTRIEDVEAQLEALAQQIPIVARLRSVPGIGLLSATALYAFIGDPSRFPSGRHMASFVGLTPREYSSGLRRRLGGISKRGDAYLRLLLIHGARSILYHAKRMKHRDRLRAWALRLERKVGHNKAAAAVANKLARITWAVWKNDRNFEPVFEPQAA

SEQ ID NO: 162512 - protein, 400 aa, unidentified
MRTVFGIDVSKASSEVAILVNGERVHGYTMPNDIIGFSHLLKDLKTVSNPEIIFEATGVYSRRLQAFLEENSYDYTRLNPLEAKKQLDSLRVRKTDKIDAEKLASSQFVLNRKPTYVQEEVYQNLHDLSRFYQNLTEDIVRTKNRLHKVLQVAFPEIENILSTPTGEQYWNLVSIFPTKHWVLELSEVELKETIRNSTSKRISENRVGNLAEKLVGLAKQSYSAISKTSPMIEEVKYNAQELIRLTNRREQVLQQLIALAEPLPEYEILLSIPGIAETTATSIIGELGDIRRFKSANQINAFIGIDLKHYESGDFLGQEHITKRGNPYARKILYKCIHNIASASHTNPCHIADFYEKRKRQSQITSTKPHTIASIHRLIRTMYYLIMHNKLYDYTLAQSH

SEQ ID NO: 162513 - protein, 454 aa, unidentified
MREPPHKKTNIMNPTHPYDLVIGLDRSDKKADLCLIDTRTGQRRAEIIDTAPEALWEWLLELRQQHPQARVGLCLEQPAVHLIPFLEAYDWITLHPINPITLQKYREAFVTSRAKDDTKDADFLADLLLTHHAKLPVWAPEDSATRAVQQLVFHRRAVVDERTGLSNRLIALLKSYFPQALILCGDDLWRPLATAFLLKWPSLQAVQKAKAATLKPYYYLHGSRSAKLVEQRLALIAKAVPVTDEKAVIGSFALRVQLVCRQLQLVQQSVSEFDRQIAAAYAAHPDRMIYASLPGAGPVLAPRLMASMGSQRERFAAAENLQHYTGIAPVTKRSGGSCYIHRRYRCPKFHRQSFHEYAKESILWSRWAAAYYLQQRSKGSPHHTAVRALAFKWQRIIWRCWQDHKPYDEPTYEAALQKNGSPLVALFDRVELGKSPFKNPANKLKKSVDGLPQR

SEQ ID NO: 162514 - protein, 338 aa, unidentified
MNNCIGLDISKSTINVHIPKCSLDLEIENSKKDIKSLFSKLKKIYKKEIDNLIFIYEPTGSYSYWITQFCALKEIQVFMVNPKQSHNFAKAIGQRGKSDKVDAKMLSLCKSIAREGEIRVPVINKVEQEIKELISYYKFTTKQRVQASNHLESIQIKDGSVYAIKDLEKEIKNFRLKEKAVIVKIKEIIKNDTILDSKFTNIKSIIGVGDVAAIALIHLFIKYPKANQREIVSLSGLDPVERTSGSSIRGKSRISKAGSRLYRGSLFMSAMVAIRYNDEIKQFYDRLKNNGKHTTVAQVAVMKKMIVIAHSLYKKSCDYDAVFYQKQCGKCEEIALVA

SEQ ID NO: 162515 - protein, 345 aa, unidentified
MKILALDLGNYKSVGCIYEMSSLNHRFTKVVTRPKALHDLLVEEEPDRVVIEICPLAGWISDLIRSLGIELEVASTTHEAWRWKNVKRKNDRQDALKLAQLSALGQLTLVHVPEPGVRQWRALINYRGRLVSRRTKIQNHIRALLLRQAEPMVNGRSAWTRGGIAQLEALARPLNEVEREELWRGELALELEGLKALAEPLRQVEAKLDELGAVDARVQLLRTIPGVGPRGAEALAAVIDKAQRFKRGKELGAYLGLVPKQIQSGESNRLGRITRQGNRLLRSLLVEISWSGLRYNSWMRSVYERVRRGSKARKKIAIVAVARRLLIRCWAMLRDGTTWRPASST

SEQ ID NO: 162516 - protein, 330 aa, unidentified
MYKFFIGIDISKLTLDIAVINNGIFVDAFQVKNSTKGMVEMLKLVKSKYKCTRLNTFFCAEQMGIYGRFVELELSKKKYFFCMEVPLQIKLSLGIQRGKSDALDAQRIAGYACQNHAHLKLWKPPRPALETLKTLVSMRNRLIKAKVMITNFAKIETYYLPKDILAANTAFYQLSKSSIEADIINIERKMDEVITRDDKLNNLMALITSVPRIGKITAIQMILFTNEFNSITCPRKFASYCGVAPFPFNSGTSIKGRTKISSIANKEIKKLLHLAAIGFTGNSQTFLGRYYRRKIAEGKQKMIVINAIRNKLIHRVYSCVKNNKAFEDLK

SEQ ID NO: 162517 - protein, 398 aa, unidentified
MHYIGMDVHAKVTYLCVLNENGKKLKEPIVKGPLKDLVAYLKNLKKELGGPVKVCYEASGACGWLCDQLVALGMKVQVAHPGKLRLIFQSKHKNDRADAHKLATLLFLDQVPLAHVPSAEVRDLRAFIEYRSRMVVQRGACKNRLRALLRAHAIVAPRGLWTKKGLAWLSQQELPPLQSVKRDMLLMELAGLQQQIRKAEKELKVFTDKLPGVTLLMTMPGVGIRTAEAVVAYIDDANRFRRNKSVGCYFGMTPSEDTSVKVRRGHITKEGPGLVRKLVIEAAWMAIRRDEGVRAFFEQVMRGDPNRKKIALVATAHHLLRIMHAMLRDGTPWRSTATPPAAAQDVTAQPAMPATETPVAENAAAAEKKNVADTEKKKKAVAASKRPAVAAAPPGAAA

SEQ ID NO: 162518 - protein, 343 aa, unidentified
MQIHSVGIDLGKTTFHLVALGAAGKVLVKKKFTQRQLLTYTANMHTSLIGLEACSGAHFLGRALRKQGHDVRLIAAQFVKPFVKSNKNDFVDAEAIAEAVERKNMRFVPIKTDDQLDLQAIHRVRDRLISRRTAVINQVRAFLLERGMVFAQTPAKLKAAMADILENAEADLTPQMRNLIDMLWGEWKMVEQQIEELSDELERISAADAGCTRLRQIPGIGPIVATAIVAAIGNGAAFRKGREFAAWLGVVPRQYSTGGKAKLLGISKRGNVYLRKVLIHGARAAVLRIKRDRAPIGAWLDRLDARAPKNVVVVAMANKLARIAWAVLSSGEDYRPLPNISAA

SEQ ID NO: 162519 - protein, 356 aa, unidentified
MLNKFSKNLDFTGHNVYVGLDIHGDSWAVNIIVDEIEHRRFTQPPNPVVLYNYLCKNFPGASYYSAYECGFCGYHHHRKLLELGIHNIVINPADLPITDKEKTNKRDPMDSRRISRALQNNQLKGIYVFNPDHEQFQSLNRMRWRAAKENRRVKNRIRSFLHYYGINPPEELNPEYWSIAFLSWLKQLRLPTEAGTMALDYLLIAYQNTRTQVLQVTKHIRRQVKLHYSNVYKRLITVPGIGPINAMCMIAEIGDMSRFKSCKHLASFVGLVPRSHQSGSKDPNCSLTYRSNKYLRSALVESSWMALRYDPALLKYYKERIVKHKAQVVITKIAHKLLNRIRNVWLNENTYQIGLS

SEQ ID NO: 162520 - protein, 351 aa, unidentified
MYNVTIGMDLGDKKHQIHILDKNGKTIKVCQVSNTAKSIEKFFSQYPESQVAIEASPHSPWISRLLEKNVAKVLVGNPRKLRMIWDSDNKDDMRDAEMLARIARFDAKLLYPIKHRDEQTQADRSLLKARDILVKIRTSLILHVRGSVKSIGGRVVTCSSSSFHREATESIPELLEQSLHPILEQIEEINKQIAAYDKTIKGISKTRYPETEILQQIGGVGPVTALAYAVTIGDPERFRKSRDVGPYLGMTPRRDQSGESDKQLRITKAGDRYLRRLLVQSAQYILGAFGEDSNLRRFGFKIAERGGKNAKKRAVVAVARKLAVLLHRLWVTGEVYDPLYKPTKVMIQIAA

SEQ ID NO: 162521 - protein, 341 aa, unidentified
MQITTIGLDLAKNVFQVHGIDAAENVLVRKQLRRRQMLEFFKALPPCLIGMEACATSHYWARELTKLGHEVRLMPAKDVKAYIKRNKNDAADAEAICEAVRRPTMRFVQIKSAEQQGQLMQHRARDLLMRQRTQVINAMRAHLAELGIPARQGREGLKELMAIVANDDDTRVPVNARASLMVLAAQLQALQTLIGSIEKRIIKQHRVNEASQRLESIPGIGVIGATAIAATVADPKVFRSGRDFAAWIGLVPREASTGGKHKLGPISKQGDRYLRRILVVGACAVLKLARQKPEKYPWLTQLLARRPFKVVAVALANKMARMAWALLANGGTYRAPRIAAA

SEQ ID NO: 162522 - protein, 358 aa, unidentified
MTNLAEKLDFSGYTVSCGIDVHLKSWTISLYLGKQYLKSFVQSPPSVEGLRNFLLTNYPKASYECAYESGFCGFWIQRAFAALSISCIAVNAADVPRTDKSTKNKNDRNDSRRIAEALQAGQLEGVYVPDPELEADRQLVRLNERYSNDLTRAKNRIKGLLRLMGIEIPQRFAKANWSSAFVDWLKQVSCGESSIRIVLDRQISIMETIRSEKLDTLKEIRKLMCKVRYQSISRLLCSIPGIGPVTAAVLIVEIVDITRFEKSDRLNSFVGLCPMQHSSGEEDRKGSITTRQHRRLRYLLVESAWVGIRTDPALTLCYSRWSARIGSRRAIIKVARKLLQRIRYVWIHSVPYVPGLVK

SEQ ID NO: 162523 - protein, 338 aa, unidentified
MYYTGIDLHKFTSYLTTVDSSGSIVKQADIKNVEHNFVQYFSDLGNENLTTVESTMTWYWLNDLLSSLHIPMILAHAKYVKAIAYAKVKTDKVDSHTLAQLLRMDYIPAAHKISNDKRLLRDALRARLKIVQRHTSVTNSMQLLLAKYNFDSPTQLSGIPNFQYEQLSEVEVLLSEQMLDLEKQLYPYLIPNDDIQRLLWIPGIGKMNAFTILLEVDDINRFPDVKNFFSYCRLTPSARNSGGKSKQRSSKDGNKYLKVAFSDAAIHAVQYYPVIRKYHSSLLRKKNKQIAKTIIAKEIAEIVYYVLKNKSNFNNKFKGQELEHKKSLQWPRVVSPDA

SEQ ID NO: 162524 - protein, 326 aa, unidentified
MEHELHYIGIDTAKEKLDVDVLRPDGRHRTKKFANTTKGHDELVSWLKGHKIDHAHICIEATGTYMEPVAECLYDAGYIVSVMNPALGKAFAQSEGLRNKTDTVDARMLAEFCRQKRPAAWEAPHPLERALRALVVRHQALTDMHTQELNRTETAREVQRPSIDAHLLWLEAELKRLEKQIKDLTDDDPDMKHRRKLLESIPGIGEKTSAVLLAYIGLKDRFAHARQFAAFAGLTPRRYESGSSVRGASRMSKAGHVSLRRALYMPAMVATSKTEWGRAFRDRLAANGKKGKVILGAMMRKLAQVAYGVLKSGVAFDASRHNPVAA

SEQ ID NO: 162525 - protein, 394 aa, unidentified
MIYAGVDIAKTDHVIGAVDERGAEACRPMPFKNTEAGLERAVAWLEGLAESPSDVVVGMEATGHYWMACYSFLVARGYSVAVINPMQVKAVRRLKGLDKVKNDRVDAGLIAETLRIGQYDETRLATDEVASLRSLSRYLQSLRGMVAELKTQCICLMDAHFPEYAGMFSDMFGAGSRAVLSKSPLPFELARRRADSLARDIAEASRRPGRSAGLAAEVKAAAKSSIGVRLGQEAASFQIKSLVRQIEFADSECAKVEARVRELLDEVEPLVLTIPGVSYVTGAQIVSEIGDVSRFRNAPALVSYAGLNSSVSQSGQFDSGGGPITKHGSPYLRRALWLAANRARQYDPGLRAFYDKKRAEGKPHRVAVTAVARKLCHIVFAVMRDQVPYDPERK

SEQ ID NO: 162526 - protein, 449 aa, unidentified
MIKSKRRLKGMPIIHHGAAGIDIGSRFHVAAVPPDLAEQSVRTFQAFTSDVHAMADWLIQVGVTTVAMESTGVYWVPVYEILEDRGLEVILANARDAKGVPGRKTDVNDAQWLQKLHACGLLKASFRPDRPISALRSYLRQRERHLDYCAAHIQHMQKALTFMNLQLHHVISDVTGVTGMKIIRSIVRGQRDPKQLATLRDGRCKATEETICAALSGNYQPEHLFALEQAVLLYDFYQLRVHDCDEKIAAALDTLNQSTTIPDVPLPKPRHKTRQPNALSFDVRVPLYQLAGTDLTQIHGIGPYLALRLISECGTDLSRWPSAKHFTSWLTLAPGSKISGGKVLSSYSRKTNNRITAHLRLAATTVGRTNTALGAFYRRLSARIGKAKAVTATARKIAVLFYNAMRYGMEYKDPGSGHYEQQYRKRVVKGLHRRAAEFGFTLHEIECVS

SEQ ID NO: 162527 - protein, 352 aa, unidentified
MKTVVKQVVGIDVAQDELVVSIGKMYADFSLEIVSRATFGNKLKGFEKLILWLDPLANKAVQLRFVMEATGVYHQSFAYYLNDNGYAVSIVLPNKISNYFRTLSVKTITDKTMSDTITQFGLERNLDDWQPPKGIYRMLQQLTRERSQLTDEKVVIKNQIHAEQAEARPHKKSIERSKKRLVLIEKQIAEIESELKTLIKSDEDVKKIVLLICTIPGIGLLTAATVLGETNGFELIRNKRQLTSYAGLDVKEKQSGTSVKGKPCISKKGNKHLRKAMHLPALSAIRHDERSKAIFVRLVGKHGIKMKAAVAVQRKLLEMVYTIFKTQTAYDKNYFKRQENEVIIEQEVREVA

SEQ ID NO: 162528 - protein, 409 aa, unidentified
MERAFERVCGLDVHKATIAACVRVPDGAGRRLQSVQTFGTTTTDLLALRDWLGTHAVTHVAMESTGVYWKPVYYVLEEHVTCLLVNAAHVKQVPGRKTDVQDCAWLAQLLEHGLLRGSFVPPAPIREHRDLTRYRKSLIQERAREANRVHKLLEDAGIKLAPVARDVLRMSGRAMLEVLVHGTTDPTVLAELARGRMRAKLPALRQALAGQFRPHHAFLATQILGHLDHLEATVATLSERIETLLAPFADAVQRLDTIPGVNQRTAEVLIAEIGADMSRFPSDRHLASWAGLCPGNHESAGKHKSGKTRKGNIWLRGALIEAALGATRTKHSAVAARYRRVLRHRGHKKAIVAVAHNLLVAAYHVLAHHTTYLELGADYYDRRHTQRVTRRAVQTLEQQGYRVTLEPAA

SEQ ID NO: 162529 - protein, 346 aa, unidentified
MLYAGLDLSRKRLDVCLLDEQGARVAVTAAPPDADGLRGLAERLAGHGEPIYAALESMNGARFVRDELAQLGWEVALADAQKVKGLAPLAAKTDRIDAYVLAELARRDLVPAIWLPSPGVRAERERARFRLHLVRHRAALKARIHASLIAHGHPCPVADLFGTRGRALLDSFALPEAWRASTAASLRLIEHLDDEIGACEAELRRLGADHRYVPLLMSTPGIAWILAYTIASEIGEIERFATPKKLVGYTGLCPRVYQSGASDRRGPLAKNGPEYLRWALIEAAMHAARHPAYAAHYEATKRRLGRQRGAKVARVEVARKLAEAIWYMLTRSETFAPAGPRPALVA

SEQ ID NO: 162530 - protein, 428 aa, unidentified
MDEINRNRLEEFRQLRQEIRHSEEYLIVGIDIAKDRHHAFFGTATGRTLLRRLVFSNDHEGFRKLLDQTEALRVGHGLKKVVYGMEPTGNYHKPLGEYLITQGKRVVLVSGVLVKKNRESLDGRWDKHDVKDSANVTDLISQGKCLYYEHPSVELRGLRSLLSLKRRLKKQEHGYRVRIRNHLIAQYFPEMDRDYERLGAAGLSIVRWCLPASQITELDVAPFIERVTSRRIRMETRRRLEEVWEKAGVSIGCEGVPGMDHEAKIMVEGLKQIREMIKETEDKIQELCEQFPEYPSLLTIPGFGLDVSAKVLGAIGDPDRFQNGKQVLKLAGLDLSADRSGKDSDKAIPEISKRGKADLRYALYQAALIASVQNRDVMVYYTNKLRGREREKGIQIKMRVKLAAKLLVIAWTLMKKREKFNPAYLNAE

SEQ ID NO: 162531 - protein, 344 aa, unidentified
MNQIIRIGMDTSKHIFVLHGVDAAEQVVLRKKLSRKQVLEFFAKLPPTVIGMEACGGSQHWARELGKLGHEVKLMAPQLVKPYVMRNKNDGRDAEGLCEAMGRPSMRFVPVKTAEQQAALMLTGIRDGLIARRTQLGNTIRGHAAEFGLIAAKGVDKVEPLLARIAQDETLPALARELFVVLGREYARLEGELGEIEAKLMAWHRSDATGRRLAQIPSIGPIIATMLVMKTPDPLAFRSGRHFAAWLGLTPQDHSTGGKTRLGKITRAGDEDLRRLLVIGATAVIQQARRGRGHHSRWLLALIQRKPPKLAAVALANKVARIAWKLMATGESYDVARMNPIPAT

SEQ ID NO: 162532 - protein, 413 aa, unidentified
MEVLYPRCCGLDVHKKSITACVLRAEVKGKAQKEKRRFGSFTQELLKMTDWLRECGVTHIAMEATGVYWKPVWNILEGQFTEVLLVNAQHIKAVPGRKTDQKDSEWIADLLQHGLLKGSFVPPRPTRELRDLTRYRVSLTQECNRIANRIQKVLEDANIKLASVATDALGASGRQMIQAIIGGQQDSTELAEMAKGLLRNKIPELKLALEGRVTDHHRFLLKEILDDLRRVEAKISTVEREIETRLEPCQEDVDRLCTIPGVDRVTAWGLLAEIGLKMDQFPSAGHLASWAGMCPGNFESAGKRLSGKTRKGSAFLRRHLCQAAWAVSTKRDSYLSALFRRLAARRGNKRATMAVGHAILVIAFHLLKRKENYRELGANYFDRKNANALCRSLVNRLQRLGHAVTLSPVPQPA

SEQ ID NO: 162533 - protein, 350 aa, unidentified
MSANCAPTTIATIGIDLGKNTFHLVGLDTRGAIVLQLKLSRGQIERRLANLPCCLIGMEACSGAHHIGRRLTELGHDVRLIPAQYVKPFLKGHKNDYRDAEAIAEAVQRPTMRFVAIKTPEQMDLLALHRVRSRLVGQRTGVINQIRGFLIERGITVRQGVMPLRKALPDILSSNQDALSPRMVGLIADLAQDWRRLDERIAAVSAEIEALARQDDSCQRLMTLPGVGPIISSAVVAAIGNGNGFKQGRDFGAWLGLVPKQESTGDRTILGKISKRGNKYLRTLFVQAAHVILARRPGTAMRGLWPWIEQASKRLHRNMLAIALANKLARIAWAVLARGRAYEPRVPAHA

SEQ ID NO: 162534 - protein, 350 aa, unidentified
MIIGLDYHPSFQQIAFLDTETGECGERRLVHANQEAESFYRELKERGVSVRVGMEATGHARWFERLMTELGFELWIGDPAQIKAKRVRKQKTDRQDAQLILTLLIENRFPKVWVPSLENRDLRQLLWHRHRLVQMRTRVMNQLQAVALNEGLRRKKGLWSKSGRAQLESFLLAPWATRRRQDLLELLDRLNPNIAELSAAIEQEGKKRPEVVRLMTHPGVGPLTGLAFALIIEPAERFRCGKQIGSYLGLIPCEDSSAGKQRLGHISKQGNSLLRFLLVEAAQIAVRDDPNWRRKFLHLAMRRGRKIAKVAMARRLAVCLYWMLRREWNHQQLLKFGSHAGQLETGHGVK

SEQ ID NO: 162535 - protein, 334 aa, unidentified
MEQITTAGIDLAKRVFALHGVDGAGRVGLRKTVRREQLMQTVAALPPCLIGMEACSGAHEWARRFQELGHTVRLMAPVFVAPYRKSGKNDGNDAEAICEAVSRPNMRFVPVKSAEQQAVLALHRVRQGWIEERTATINRLRAVLTEFGVVLPNRAQHVRRGARAAAEALPELARRAVEDLRAHLGVLDERIAAYDRELEAQARSSEAAQRLMQIRGIGPLTAVAMVATVGCARDFRSGRQFAAWLGLTPRQHSSGGKTRLGHISRRGDAYLRCLLVQGARSVLLTAMRHSDRLSRWALSVQARRGYHKALVAIAAKNARIAWALLSKNQTLQTA

SEQ ID NO: 162536 - protein, 364 aa, unidentified
MAVVHANTVQHPFTDLENEVRFLGEFENSAAAIAKLVKNLAAKYQRLTFCYEAGPTGYGLYRQIKTLGPECIVVAPSLIPKKPGDRVKTNRRDALNLAKLLRAGELTAVWVPDRGHEAMRDLTRARETAMMDLRSKRQQVSAFLLRQGLHYSERKKTWTKTHMNWLASQKLEHAEQRLVLEEMMLAVRQAQERLERLEQAIRVAVPDWSLAEVVTALMAMRGIDRISAATFLAEIGDLSRFQHPSELMGYLGLVPSEDSTGDKIKRGPITKAGNRRARRMLVECAWSYQHPPRVGQDKQEKVAAAPRAVREIAWKAQCRLHGRYRALVRRGKLKTVAVTAVARELAGFIWAVSRAITTARVVAK

SEQ ID NO: 162537 - protein, 357 aa, unidentified
MVTGPKHQKEKRSMDHFAGLDVSVKETSICIVDDTGRIVREVKVASEPEALLAVLADPAFHFKRIGLEAGPLSQWLYSAFAEAGLPVICVETRHMRAVLKAQINKTDRNDARGMAQMMRAGLYRPVHVKTLRSQKLRTLLTHRKLLQSKAIAIENDLRGTLRNFGLKVGMVGTVKFEARIKELVENLPDLAVLVEPLLIVRRVLREQMAVLHRRLLVLVRDDEVCRRLMTVPGVGPVVALTFRATVDVPARFKNSKAVGAVLGLTPAKYQSGESERTGGISRCGDEMMRVMLYEAAQILLVRSTKWSWLKAWAMQIARRRGMKKAIVALARRLAVIMHRIWVDGTEFCWTRKEVTAA

SEQ ID NO: 162538 - protein, 344 aa, unidentified
MEQIIRIGMDTSKSVFQLHGVNAAEQPILRRKLTRKEMVKFFQKAAPTSIALEACGGSHHWARLLRSFGHEVKLIAPQLAKPYVKRGKNDAADAEALCEAMSRPTMRFVPVKTAQQQAALMLVGLRERLIRNRTQLANSIRGFAMEFGIVAATGMCRIEPLLERIAQDPSLPVLARKVFAMHGDEYRGLLHEIKKVEEELLDLHRADECSLRLAQIPGVGPVGATLLMLKTPDARLFESGRAFAAWLGLTPKDHSTAGKTRLGVITRAGDEMLRSVLVVGATSLLQQVRAGRSRHASQWLTGLLQRKKPKLVAVALANKIARIAWKLMVSGETYRRMEEQPQAA

SEQ ID NO: 162539 - protein, 393 aa, unidentified
MYLVGIDIGKLKHSFCLLEKETGEILVEPVFFKNNRDGFNALLSSFKHLPQKDILIGMEDTGHYNLALLKFLLDRNYQVALINPVATNLTRKMQGGISKNDKLDTLTICDVLSSNQRVKSYRISKYSSFDLYEQKQLTREHHNLKEEENQLSNRLQKCIDVVFPEFNSLFKSKYGIVYMNILKEFGSADAIAHADIRTLRKCFDTGRGKHISLTAEELKEAARNSIGFPSSSEATQIKHLVARIELIKEQIAEIDKKIEEFSLQNNSPILSIPGISHFSGTSILAELGDIHNYSKPSQIIKFAGVAPLTYESSQFTAQHTAITKKGCKYLRKTLYQIITPVIQYNPVFRKFYLLKIAQGKGHRCAQGHCVRKLMRVIYHLLSTGAQFDPALLR

SEQ ID NO: 162540 - protein, 343 aa, unidentified
MNSTTIAVDVAKSVFEVAVSEQPGEVRERQRLSRERFRRFLAERPPATVLMEACGSAHHWARQAQALGHRAVLVPPHVVRPYVLRNKTDRTDTKGLLEAFRNEDVRPVPVKSETQQALAALHRLRSMWLAARTVRINTVRGLLREFGLIMPIGAHHVVPHVATLLEDADSAVPGLLRPALADATTDIREIEARLRAIEHQLESVASENVVVRQLRTIPGIGLLTATALVATVGDVARFPSGRHFASYLGLTPREASTALRRRLRTISKRGDTYVRMLLIHGARSVLCHAKTKTAPPPDRLRAWALQLERLRGHNKAAVALANKLARIVWAVWRHGQDYRMPVV

SEQ ID NO: 162541 - protein, 348 aa, unidentified
MAHFVGLDVSVRETSVCVVDDAGKVVLEQKVPTEPSDIIALLTSLGANYGRIGIEAGPLSQWLVNALTVAELPVICVETRHMKALLTAQQINKTDRNDARGIAQMMRVGLFKPVHVKTLVAQEQRMLLTSRKLLQRKLLDVECDLRGTLRNFGLKVGAVSGSRYEARIRELVVGFPRLAAIAEPLLNVRRVMRQQLAVLHKMLLDTVRDDPVCRRLMTAPGVGAVVALTYRATVDQPQRFAHSRAVGAHVGLTPKRYQSGETDYDGGVSKCGDALLRTMLYEAAQVLLTHGSKWSWLKAWGMRVAQRRGIRRAIVAVARRLAVVLHRMWVDGSEFCWSKDSAAAPTVA

SEQ ID NO: 162542 - protein, 427 aa, unidentified
MSEIESVQPEPEFAAFIGIDWADQKHIWCLQVAGSKQRESGELEHSPEAVESWVAHLYQRFGQRPIAVAVEQSRGALVFMLSKYESFHLFPVPAQMAASMRQALYPSGAKDDPRDADLLLDLLLQHRNKLRRLSPDSEATRRVQNLVEERRKLVDEKTAQINRLTDHLKVYFPQMLEWFGRLDSELVCALLERWPALEELQKASPASLRAFFRKHRCRDRERIEGRVEAIRRALPAIQDRAVIEAKSTAVKVIVRLVRVLVEGIEDLDGQIEEAAAAHPDFFIFNSLPGAGPVMAPRLLAAFGSQRERYRSAREIQSFSGIAPVTESSGKRKWVHFRWACPKFLRQSFHEWAGHSIVQSEWARVYYQQQRGKGNTHHAAVRALAFKWIRIVFRCWQDGIAYDENKYLATLVKRGSPLGTGRSCGKTL

SEQ ID NO: 162543 - protein, 370 aa, unidentified
MEKKILYVGMDVHKKSIDVAITDERANGQVRSYGKIDGTLEALDKLIRKLKSNASDLHFVYEAGPCGYPIYRHLTSKGHSCSVVAPSLVPKRSGDRIKTDRRDAANLVRLFRAGELTSIYVPTVEDEAMRDLLRCRVDIRQIERKTRQRLLAFLLRHGLYYPGKKNWTKGHMNWLADLKLTHRAQQIVLQEYIDAANECTRRIQRITEQIQGLVPQWSRAPLVRAYQALRGVSLIVATTVVSEIGDMNRFKNPKQLMAYLGLVPSEHSSGNRIRRGSITKTGNSHVRRVLIEAAWTYNLRARKTKIILKRQQGLDDRICEISWKAQLRLCNKYRRLFARGKSKPAITTAIARELSAFIWAIDKQVQQLTA

SEQ ID NO: 162544 - protein, 411 aa, unidentified
MTSQTLMAGVDVHRKTNTYCLMNEAGQEVMPRFTLANNRPGTEVLVTKIGQAMEANAFEQLKVAAEATGWYWFHLFEALRTAAYPTELFLLNPRLTANFKKSYMDMDKSDDLDAFVIADRLRWGRDVEHPFQYDEKLLALRFLTRYRYRVVHQLAGEKAYCLSILYLKASEYANADKPPFSNLFGAASRAVIQEFASMEEVAALPFDELVEWLDQRGKRHFADPQETARRLQAVARNSYPLSPALQAPVNLVLNLSLKNISQLEGLQKRLDCAIAERMETIPNTLTTIPGIGPVFAAGIIAEIGGIERFHYDEAKVAQFAGLKWRKSGSAEFEAEETPLTRRGNSFLRYYFCEAAFSVQSQVSEYHAYYQRKYNEATKHKHKRAIVLTARKLVRLVVRLLTNNQPFQVRKA

SEQ ID NO: 162545 - protein, 388 aa, unidentified
MEARTVNALPPAAADHAAIRCLLAIELSKKSWVVAINTPLADKISRRTLPGCDWTGLLELIRRVRTRVVRELGRPVEMISCYEAGYDGFWLHRLLEGQGVHSLVVDPASVQVDRRARRAKTDRIDVERLLRSLMAYLRGEPKVWSVVRVPSVAEEDDRRLHRERDRLIAERIQHVNRIKGLCAIHGIYDYQPMRPDRTRRLEQLRTGDGGALPPRHKAEIARELQRMELVLEMLKEIDAERNAIASARMSAHTNAKKIQDLVKLKAIGPEIATVLTGEVLYRPFNNRRELASYVGLTPSHFQSGSTCRDQGISKAGNPKARTTMIELAWLWLRYQPDSAFSVWFRERVGNLKGRIRRITIVAMARKLLIALWRYLETGVLPTGAVLKV

SEQ ID NO: 162546 - protein, 313 aa, unidentified
MAQIVATVGIDVCKDRLDVAVHPSDEQFSVTNDQAGWRELVRRLRPLQARTIGLEASGGYERGPINALLTAELPVHLVNPWKLRRFAQAAGVLAKNDRLDAKLIARFVASMPSREVHRDRAIDHLAELVQGRRQLLDAGQQITCQLEHVRDRTLRRQMTRRIRQIEHDADQLDQLIVRAIEGSPILSARRDLLCSMPGVGPVLAATLLALLPELGSLSNRSIAALVGVVPYDFDSGRMKGLRCIFGGRAAVRRVLFMAAQVAARFNPTLKAFKQRLIAAGKKPKVAIVAVMRKLIVTLNAMTRHNLPWQTAAT

SEQ ID NO: 162547 - protein, 424 aa, unidentified
MSSDLEIAAFVGLDWADQQHVIRLRVAGSAPVEAQLLDQKPETLRAWIGQLRQRFGGRPVALALEQSRGSLLYALMNVDFLLLYPVNPQNLAQFRKAFYPSGAKDDPQDALLLLEMLEKHRDRLRVWVPDDADTRCLRLLAENRRKLVNRRTALTNQLTSLLKESFPQALDWAGPLDSLRACDFLQHWPSLQLLQKTSTSRLRKFYRDHTRLDSDAIHQRLDQIRQAQPLTTDSAVLAAAALMIPALVRQLRCLIESIQQFDQQLKDRFQQHDDYTLFHSFPGAGPVMGPRLLSAFGSNRNRFECAAEVQRLSGIAPVTQRSGKSHWVHWRLACPKFLRQSFHEFAAQSILFSTWARAFYDQLRSHGTSHHAAVRTLAFKWIRILFRCWKNRTPYDEQIYLASLRRHGSPLSAVLPTPTPGATL

SEQ ID NO: 162548 - protein, 385 aa, unidentified
METIANRPDEPIAVGTDLGAIFISLELSRSSWVVTALLPGGGEKMSRHTIPGGDLAGLLARFSRLREKAQARTGRHFPIIVIQEAGLDGFWIHRALLSERIESHVVDPASIATSRRRRRAKTDRLDGETLVRTLLAFKRGEPRVCAMVQAPSPEDEDCRRITRERKVLIAERVEHVNRIKGLLFAQGIRGYEPLRRDRRAGDGRDLPPHLKAQILRELDRLELLLGQIKAVEAERDAMLAGEAQDRDTPEAAKTLLNIRGIGPEVAALLCSEGLFRHFDNRRQVAAYAGLAPTPWQSGAVSREQGVSKAGNPRLRSTMIQLAWLWLGHQPQSALTRWFRERVEQNGGRQRKTAIVALARKLLVALWKYVTSGAVIEGAAMKPQAA

SEQ ID NO: 162549 - protein, 349 aa, unidentified
MKIIGCDFHPGYQQIAMLDLVTGEMTEKALSHERKEEVRAFYAGLEGPVRVGIEASGQSQWFERMLAELGHEVWIGDAAKIRASCERKQKTDRRDAELLLKLLAEDRFPRIWVPTAAERDDRQLLLHRHKLVRMRTQVKNQLQAQALNQGVQRKRKLWSEVGRKQLESLPLLPWASRRRAELLQLLDQLEASISELDRAVAEQASARPAARRLMTHPGVGPVTALAFTLTMGPAERFQRGKQVASYLGLIPSEHSSGGRQQRLGHISKQGNPFLRGLLVEAAQSAVQHEPEMRRAYQRLAQRKCRGLAKVAMARKLAVRLYWMLRLQVNYAQLIQGSHAGQPGTFCGRG

SEQ ID NO: 162550 - protein, 367 aa, unidentified
MVHSDYTIGCDAHKHFSLFAVLDEAGQLAQQVRVGHVPGAIGDFLSQFPDATPVALETVGNWYWIVDEIEASGCIPLLAHAAKAKVMMGNIHKTDKLDAHGLATLLYLGKLPSVWIPPTEVRDERELPRTRMTFAGHRTRVKNRISSTLAKYALSLDGASDIFASRRRSDLEDLLQHLPAETARCTSQQLQLLDALNSHIKQLEDRIVERIQTTPTIQLVQTVPGPAKVLAIVIDREIGSIDRFSAPNHFASYCGLVPKVSASAGRAHYGRMVKQANTYLKWAFIEAANVIVAHRHHANWRRKYVVHLFERNRRRKGHAVAVGATARYLAESTYWVLKKGEPYQEPPHWAPGGMKSPVSLSQGKVRG

SEQ ID NO: 162551 - protein, 357 aa, unidentified
MDKITRIGVDLAKNVIQLHGVDSAERVVVKKAIPRQKFLEWFANLSPCLVAMEACSAAHYWARKLRALGHEVRLIAPQFAAPYRKGGKRVKNDARDAEAICEAASRPHMRFVPVKTADQQNVLVLHRMRDGFVEERTALVNRLRGELVEFGVFLPQGIDAFRARFINALEDGATELNGTARTALLRGWEHWQALDVEIARFDAQIAAQVKHDSDAQRMMAVVGIGPLTASTATATVGDARQFKNGRQFAAWLGAVPSQASSGGKTRLGHITRQGNTYLRTLLFQGARSAVTSAHRRTDRLSRWIVQLQARIGWSRTCAAVANKHARILWAILAKGERFDPSYAQTRPMPAGRGPSKL

SEQ ID NO: 162552 - protein, 457 aa, unidentified
MSQTKRSRKSRDFSTVNPAAAAIDIGATIHVAAVGPNRDKEPVHTFRTFTDDLYRLADWFAGCGIRTVVMESTGVYWIPVFEILEQRGFEVMVVNARDAKHVPGRKTDVSDAQWLQRLHEYGLLRASFRPQAEIAGLRAYLRQRERLLDYAAAHIQHMQKAMMQMNLQLHHVVTDVTGLTGMAIIRAIVAGERDPNVLATHRDRRCHASVETVCQALVGNYREEHVFALTQALELYDVYQTKVTACDKQIEAILKRLKKNAAPPAAKLLPVRRRTRQPNAPAFDARAALHAILGVDLTQIAGIGPSVALKLVGECGTNLAAWPSAKHFTSWLALAPHNKISGGKVLSSKTRRTSNRAASLLRLAAGTVGRTDTALGAFYRRLSARGGKAKAITATARKIAVLFYNTLRHGMSYADPGATYYEDRYRQRVLHNLQRRAKSLGFALTAVPPDPIQAVVS

SEQ ID NO: 162553 - protein, 381 aa, unidentified
MQVLGVDPHKGSHTVAAVGPDGSVLGRTRVVSSRRQAQRLIAWAAPWPQRVWAVEGATGVGRLLAQQLVAAGETVLDVPAALATRVRVLSGQSGRKSDAHDAVAIATVAIHHRRLRAVEAEDHTAVLRLLSVRRTQLIASRTQAVARLHGLLAELIPGGAPKNLAADKAAALLRSVRPVTAVDATRKALARDLVDDVRRLDRKLEANEAAIVQAVRASGTSLTQIHGIAEITAAKILGQTGRISRFEDRAHYASYAGVAPIEASSGAVNRHRLSRRGNRQLNSAMHGIAITQTAHPGRGRDYYLRKIEQGKTEGEARRALKRHIIDLVYATILADTARAQRSPGRQVGATHESSAAGQTPTANTSERSVPGLRKQATPRVA

SEQ ID NO: 162554 - protein, 345 aa, unidentified
MNILKQTVGIDISYKKFDARFGTIDTQQQNALSPSKSFKNSPAGFKLFLRWLKKLIVSQDIPLIFVMEATGVYYEHLAHFLLHHGYQVAVVLPNKIKNYAKSLESKSKTDPLDAAVITRFGLERQLKLWTPPSDTLKALRDVCREYHSIKTNITQIKNQLHALKSSFKPHRESFKRKTQLLKFLERQVSLIQKELRALVKSDPVLAQHLKQISRAKGLGDITILTVLAETRCFDLVTNQKQLTSYAGLDVVFNDSGMKKGRTSISKKGNKFIRKALFMPALSACRANPKMKEFYQRLVAKGKNKKLAIIAVARKLLLLIYTLWKTNSPYIPDYKPVHRVSSGLSS

SEQ ID NO: 162555 - protein, 342 aa, unidentified
MQNMMIGVDLAKNVFQVHGASQTGEVLYRKKLSRKQFSAFMALQEPSLVIFEACGSAHYWAREMEALDHEVRLIAPQYVRPFVKRQKNDAADAEAIVIAARQPEMRFVAPKTIEQQSRAAVFRGRERLVHQRTADVNALRALLYEHGHVFPAGIRHLNRMTALIEAETSGLPMLIREECKDLLAQIAEKTARIIERTAKLKTLAAQSDKARRLQTMPGVGPLTAVAVEAFGPDMAQFKTGRDFAAWLGLVPKQHSSGGKERLGRMTKAGQADIRRLLIIGAMSRLTWLGRRTIPAGSWLSRMLARKPKMLVAIALANKMARQIWAMLTKNENYRDPALAVVA

SEQ ID NO: 162556 - protein, 461 aa, unidentified
MHVDGGVANGVSGLLIQTHLGLKCRPRHLRHPAGQPGWCRLRGSVNRRDPRMTIISSTEGVPMSKSAHLELRVGIDVGCHSHNVAIGLSSGEILDEFSVSHNPEGFRLFFSRVEKQEKKHGCPVSVAMEGFNGYARPLDTLVRARNYRLFNVNNLKLARFKEIFPSAAKTDDIDARKCLELFQLRDHLPTAKDVLQEVAATPEENDILKRLTRRRRRLVNERARVLNNMQTDLQAVCPGLLEITADAANLWFLRFLTSTDSLIKLARLQRTTLLKISGIGTKYARLIQEWQKQAHFSHEAELVGEMIQEDACRILELSDKIKVLEAKFEDIASRSVIAQTLSTIPGFGTVSKSELAGEIGTIDRFKDEASLALYLGMAALDNSSGKKKGTKDPKHVNTRAKAAMMIAVDRHRKCIPESQRYYEKKRSEGKRHNQAIRALGRHLCRVIFKMLKHEKGYEIRN

SEQ ID NO: 162557 - protein, 424 aa, unidentified
MKVTFQTCCGVDVHKSFLVATIIKTSSGIEPSYQKRRFSTFNNSILEFKKWLLENECLYVCMESTGKYWIPVFNILEDEINVTIANPKWVKAIKGNKDDTKDSKWIGDLFRLGLVRGSYIPCKKIRILREFTRYRYKLVSCRSSEKNRYQNALTVCNVALDSVVSDIFGKSSTSIIDYLLEQSGTSIDHEVIASKLLKRLKAKEDAVIESIEGYQMTDSQKYRMHLVRAHMDYITAAINDVDSEIESLIASDPDYENAVELLCTIPGVKYDSAITIISEIGIDMSQFCSSKRLCCWAGLTPGSNESAGKKKSVRITRAGVYLKPALVQCAHAAVKSDKSPYYKKKYESLVKRRGKKRAIIAIARMILTAIYQMLSTGEQWNPSDLYKVDMPEALLEKQKQKAIKQAQKLLIREGLLPPTEPIAS

SEQ ID NO: 162558 - protein, 431 aa, unidentified
MNYNQNHKITQITSETLIVGVDIAKHNHVARAQDFRGLELGKTCFFENTKAGFHSFLVWINQLVKECKLNQVIVGMEPTGHYWLNLAHLLKENNIKFVSVNPLHVKRSKELDDNSPTKNDVKDAKVIAQLVKDGRYAEPTIPQGIYAELRVAKKLRDLLNVDLQVVQGQVHNWLDRYFPEFLTVFKSWEGKASIHFLKLEALPHQLVNYTDEELLLSLRQVVKRSIGLKKIRALKEAANRSIGIRQGATMAKLELRALLEKYDFIQMKFEELDHQLDQLLDHIPGVTQMLEMSGIGRDTVAGFFAEVGDLRDYQHPRQIVKLAGLSLKENTSGKHKGQTKITKRGRKKLRALLFRAAMILVAKNKAFKALHIYYTTRSHNPLKKMQSLIALCNKLIRILFSIGKKQFTFQEDKMLKDIPHMATSVVHQTVA

SEQ ID NO: 162559 - protein, 359 aa, unidentified
MKENSREAEWKQRPEQTVGVDLGDRFSRYCVLDQEGEVIEEGRVKTDREAWRQHWEGEPRQRVVMETGTHSPWASRLLQELGHQVIVANARKLRAITENESKNDRRDAKTLAYLGYCQPRLLSPIQHRSVERQQDLNLLRSRDTLVRARTMLINCVRGLVKSAGGRLPSCSADYFARCVPSAMPAELVMTTQPLLEQIAGLTLQIRRLDQAIEDLSQRYPEIELLRTAPGVGPVIAAAYVLTLDRADAAAHSRSVGAFLGLRPRQSQSGDSDPEHNISKTGNLYLRRLLVQAAHHILGRFGPDSALRRWGLKLALGGKRAKKRAVVAVARKLAVILHRMWRTGKSYQPFPEQNMTVGAA

SEQ ID NO: 162560 - protein, 269 aa, unidentified
MEYYVGLDVSLKHTSICVVNQTGSIVQEGVVESDPEAIALFVRSRAPGTVRIGIETGPTTTWLWTELNRLGLPVICIDARHAKAVLKMQINKSDRNDAAGIARIMQTGWFKEVRVKDLDSHAVKALLASRALLVKIKRDLENQIRGLLKNFGLVIGRGKFNVFAVRAAELIENRPELIAAVRPLLEARKAIEQQVDDLDRKVHKLARHDVQVRRFMTVPGVGPITALCFKATIDDPTRFKRSRSVGAYIGLTTRRHASEEIDWSSMFLL

SEQ ID NO: 162561 - protein, 417 aa, unidentified
MKSARDTLPEEPANGLTCGIDWARDDHAVSVLDARGREILRLTVEHSGAGLRQLRDTLARHGVEEVAIERPDGPMVEALLDAGVTVVVISPNQLKNLRGRYGSAGNKDDRFDAFVLADTLRTDRARLRPLIPDSPATAALRATCRARKDLITHRVAVTNQLREHLKRVFPGAVGLFADLDSPISLKFLRRFDSQDRADWLSTKRLAAWLASVGYCGRVDPAVLHARLTAAPRGATGDEATAAAHITRALLATLDTLVEQIKALTEQITEQLDTHTDAHIFTSLPRSGTVRAARLLAEIGDCRARFPTPESLACLAGVAPSTRQSGKMRAVGFRWACDKQLRDAVTDFAGDSRHANVWAADLYNRAIARGHDHPHAVRILARAWLYIIWRCWHDGVAYDPTKHRALQAFVRTHQQPAA

SEQ ID NO: 162562 - protein, 394 aa, unidentified
MIIIGIDIGKNKHEATLINEKGNIIGKSIKFENSTAGFNKLISSINNYNISNDKFVFSMEATGHYWLALFSKLVESDYNVQVINPIQTDACRKFYIRETKNDSKDSFLIAQVTRFNGYSKTTLPDEVMISLKELTRFRTFLVDDISDYKRKATVVLDKIFFETTLLLSGTFGKTSKEILTKYPLPKDILNEDLESLAKVLSTSSKGRLGYSKAEQLQNLAKESFCIKFATEALVMEIKSILSTIEHLQNQVSKLDEKIAVLLRSLGTTIETIPGIGPVLGAIIVSEIGDINRFSHASKLVAYAGIDPTVKQSGEFNATKNRMSKRGTPYLRRALWTASIVAAFNDPNLHEYYLKKKNEGKHHGTIIGAIARKLIYPIFIVLKDNIPYQCNKCEA

SEQ ID NO: 162563 - protein, 357 aa, unidentified
MAHFVGLDVSVKETSVCVVDDAGTVISEQKVPTEPADIITLLTSLRVTYGRIGVEAGPLSQWLVNALTAADLPVICVETRHMKALLTAQQINKTDRNDARGMAQMMRVGLFKPVHVKTLVAQEQRMLLTSRKLLQRKLLDVELDLRGTLRNFGLKVGVVRGSRYEARVHELVAGFPRLAAIAEPLLKVRRVMRQQLAALHKMLLDTVRDDPVCRRLMTAPGVGAVVALTYRATIDQPQRFVHSRAVGAHVGLTPKRYQSGETDYDGRVSKCGDGLLRTMLYEAAQVLLVHSGKWSWLKAWGMRVAQRRGIRRAIVAVARRLAVVLHRMWVDGSEFRWRQAQRGGSCLNRRRRTQARR

SEQ ID NO: 162564 - protein, 415 aa, unidentified
MKNYAELSHFAGLDWAKDHHDVNIMDRQGQVVARFRFAHTGPGWQQWREKIQAYPALGVAIETSHGAAVEQLLASGVTVYPVHPQAAKAYRQRQAPSGTKDDELDAWALGDALRLDGGHWRALSPQDAIVEELRLLCGDEAALIEQRTALVNQLQAALHEYYPAALEAFEDWTAPFTWAFIEAFPTPQRLVQATVHRRRVFLHTHKLWRPGTAERRLEIFARADQFCGGEAVTRAKSRLAVALCRSLDALQLQLDDYRTAIEKLFAEHPDHDVFGSLPGVGVTLGPRLLSGLGANREQYPEVQGLQCVAGTAPVSFQSGQIKRAKIRWHCDRFLRHTVHLWAGCSLKSCTWAAAYYAAKRNDGKSHACALRCLAQRWLKILWKMWQTHTPYDPEYHARNQQRHGSWVLQLNPKTT

SEQ ID NO: 162565 - protein, 422 aa, unidentified
MNTERIDSDEIAAFVGIDWADGEHEVCLMVAAGGPPERSCLKQSPEALSEWAHALRDRFGGRKIAVAIEQRKGPLIYALMSYEWLVLYPVNPKSLARYREAFSVSNAKCDQTDAELLMEMVRSHRDRLRVWLPEDEDTRLLQMLVEERRRVVDQVTRLTNRLTSVLKEYYPQALEWAGELKSEQALDFLSKWPTLEDLKRARPATVEKFYHQHGVRNKEKLQGRLAGIGAAKHLTRDRAVVRASTMKMRVTVEQLRVLLKATHEFDVQIEELFEQHPDASLFKSFPCAGKVLAPRLASAFGTDRQRWDDAAEVQKFSGIAPVTRASGQTRVVEKRRACPKFLRQTFMEYAAQSVKKSLWARCYYTAMRAKGVKHRAALRALAYKWIRIMFRCWKERIAYSEEAHQAALVRANSPLASRLAGS

SEQ ID NO: 162566 - protein, 344 aa, unidentified
MKYYVGLDVALRSLALCVIDADGKIALERALPCEIKDVADCIRDFGKPVEMIGFEAGTMSQHLFHGLVAEGFEVVCMEARQVSAALSAMRNKTDKNDARGIAQVVRSGWYNPVHMKSRSSHCERALLTSRKTILRKCLDLENEIRGLFKAFGIRLPKAIKRYNFAKQVRPIIEADEGLSHALLPVLDAHETLLVIFVELDRRVKTYARKDPVCTRLMTAPGVGEITALSFKAAIDDPTRFKSSRNVGAHFGLTPRRFQSGEMDNHGRISRAGDEGVRANLYSAANSLLTRSRNPSRLKSWAMKLMRSKGRRRATVALARKLAVILHRMWVAGTDFRWNATEVTA

SEQ ID NO: 162567 - protein, 475 aa, unidentified
MNIKGSKKKNQVLSVNIFEQQEIIAKADAIKAELKASTWHELETKVKFDKNDKLSFVSDDMLILGCDIGSETHYVRAIDTRGRELSKSAFGFSNTAEGFESMLDWSTKLAAANDKKQIVLGLEPTGHYCFCLTTWLVAKGISVVQVNPYAVKQTKEVEDNSQLKDDKKDPKLIANLVKDGNFGMPYLPEKLYADIRRLSMFRDQLNEDRIRNLNRLHREMKIYFPEYKDAFGKIDGAFSLELLKEAPFPDELAALGTEGMKQIWHETKLRGRGYANASSILEYARKSVGIKDGADAGRQAVKWFVSRIIELDEQLSDIENQLNQKCNEIPYAKNILAISGIGENILSGILAEMGDISRFDNVKEIQKLSGLGLVACSSGKYTGETKISHRGRKRLRYWLFQAAKSAVAHSEEFKKLHVYYTTRKQNPLKKMQSLIVIACKILRVIFTILTKGTAYDPKKLLGDIVRPDQSIPQAA

SEQ ID NO: 162568 - protein, 411 aa, unidentified
MTDQRQWYAGVDWASESHHVFLTDRDGRKIGERLFKHGGEGLAEMAAWLMATSGAVEPSQILVAIEVPHGPVVETLIERGFKVHALNPKQMDRFRDRFTLSGAKDDSRDAEVMASALRTDPHCFRLLALADPTIIELREWSRITEDLGAERNRLTNRLREQLWRYFPAVLELEDDLGAPWLLDLCEIVPTPDKAVRVRAATIAKLLKRNRIRRFDAAHVLDVLRRPPVVVAAGTTEAASAHVAALIARIRFVNRQLKEAHGRLDTLTARLIPAEQAEPGQKKQHDVEILASSPGVGRIILATLLAEAFDALQRRDYAALRSLTGVAPVTKRSGKSCIVVRRQACNDRLANAAYHWARVAVQIDPKSRAKYAVLRSRGHSHGRAPRSVADRLLNITCAMLKTGTLFNPSMAA

SEQ ID NO: 162569 - protein, 400 aa, unidentified
MRSIGMDVHRSFAQVAIYDDGQITDSFRVDMEHDAVVAFGRSLGSEDEVILEATGNTSAIVRLLTPFVNRVVIANPLQVKAIAHARVKTDKVDAKILAQLHAAGFLPEVWAADDETLHLRRLVSERDATVRSIRRVKSRVQAILHANLVLKYAGYLFGKGGRKWLGKAPLPKSERDLLGRHLDELDWLARKLEALEKDLIKISLDDTRTRKLMSVAGISSVIATAVIASIGEISRFQTPEKLASYFGLTPRVRQSGDRGAIHGRISKQGNATARTMLIEAAWGASSVPGPLRAFFLRIKDRKGANVAAVATARKIANLIWHLLTKDVPYQWARPAFVAMKMRRLELRAGAPKAHGKAGPGRDYWIKELRHREMELVANAEASYAKMVEAWREKPPKPQNS

SEQ ID NO: 162570 - protein, 386 aa, unidentified
MKRNDLSRSLVAFDLASTIVSVIELGLRTWLVAGLVPGLARQPLKKLGADAEALLMLLRRWQGQATKSGSPISRIVVAFEAGRDGFWLARWLQARGIEAYVIHPTSIPVSREHRRAKTDRLDAGLLMRAVLGWLRGEPKHCSMVAIPTIAQEDARRPNREHQTLVQEQTRVVNRMKATLIRFGIRNFNIKLRKARDHVATLRGPEDELLPPNTIAALLREIALLQLIREQIKAIEKARLEQLKQTPRKGTHPMVLMLAQIIGIGVETADMLVHELLSRKLRDQRAVAGYAGLTGAPDESGTRRREKGLARAGNARVRRGMIQLAWRWLMQQKNTELAQWYLTRTTDAKPGLRKTMIVALARKLLIALWRYVTTGVMPTGVALRPTT

SEQ ID NO: 162571 - protein, 337 aa, unidentified
MVILINCEIMRYIGIDISKATFTVAYSSDKGGVVRDFRNTTADIRKFINTLPAECHCVMEATGPYSTLLLYLLSKSGITVSMENPLKIKNFAKAMLSVTKTDRADARLIALYGERMQPAPFKIPSEALMRLKQKRTVLRQLKKQLSATKNLAHSLEALPVLDKSAKRAVSSVMTSLEKQISNLEKELAEVTEKEFNHQLRLLTSVKGIGITLATALIVATAGFSNFDNSKQLSRYLGLSPTYEQSGTSVNYRGHINRNGDSSLRGLLYVSAWTASRYNKACKDTYIRLRERGKPGKLAMVAVANKLLRQAFAVVKSGLPYEDGFVSEKPVGNRADMA

SEQ ID NO: 162572 - protein, 341 aa, unidentified
MQTTKYFIGFDISAVDFSASCITSPDNLVFPIQKFSNNIDGANEFLTLLSKNNIKQSEAIICMEATGVYSENISYFLASKGFTIAIEAPHKIKNKTKDSPRKNDFIDALSIAEYAYRYFDKLPIWKPINEIIEQIQVLLTTREHLSVQMIANVNALKTLKHKYYQTPLANQIYEQTISKLKEHIKQIDQEIKSLIDKDDSFKNNISLAKSVPGVGLLLSANLLVLTNGFTEHLDYKQIASYTGICPYEQISGTSLHKPPRSRMCGPAKFRKLLYLAALSVRTHNQNFKKYFLRKQAEGKNNRLILNNIENKLLKIICAVINSGIAYTENFKSINPELLKTV

SEQ ID NO: 162573 - protein, 354 aa, unidentified
MSHSSTGTAGLDLGDRYSYLCLLDTESGEVLEEGRIRTNPKAFERRFSGCESMQIAIEAGTHSPWVSRLLERLGHEVLVANARKLRLIYAEGRKNDRLDAQNLARLARLDPRLLSPPKHRGEVAQAHLALIRSREALIEARAKLINHVRGTVKSVGARLPKCSSPTFHKKVGGYVPEPLRLALEPLLEIIASMTARIREYDCELETMASELYPETKLLRKVHGVGTLTALAFVLTLEDPSRFGTSRAVGAYLGLVPGKDRSGERDPQKRISKRGNGLLRKLLVGSAHRILGPFGEDSDLRRHGLKIAERGGKNAKKRAAVAVARKLSVLLHCLWITGEVYDPLRNTNRLKGRAA

SEQ ID NO: 162574 - protein, 377 aa, unidentified
MKRIKFVGLDVHAETIAVAVAEQGGEVRPLGVIPNRVESIRKLVKKLGPVEQLRFCYEAGPTGYVVYWQLTALGTKCEVVAPTLVPVKSGERVKTDRRDALKLARNYRAGELTPVWVPDAAHEALRDLVRAREAAKKDQLRAKHRLGKFLLRHGRRPPTGVKPWTLNYLSWVKHEVHFEQLAQEATLLDYLHEVEHAEGRIARLDLAIEEAVKLTPPQMCAVIEALQALRGVAQVAAVTIVAELGEVSRFTGARQLMGYGGIVASEHTSGESSWRGGITKTGNAHLRRVVVEAAWAYRHRPSVGKSLQKRQEAVSEEIREIAWKAQHRLHTRYRKLMARGKEKEKVVTAIGRELLGFIWAIGVKAEAAQKKTERLAA

SEQ ID NO: 162575 - protein, 357 aa, unidentified
MSKQAQYIGMDVHKAMTVIAVLDSAGKTRAEATVETKASTLVQFLRGLEGDLHVTLEESSYSAWLYEALLPHAAQVVICDPRKNAAYIRMGNKSDKIDAHKLADLLRTNMVSAVYHGNTRVRALQELARAYGCLVEDATRVMSRLKAIYRGRGIPCGGTRVYSVEHRGKWLEQLREAGVRRRAELLYQQLDLLLPLRRQAKDALLAESRKHAVEKLLRTIPGIGPLRAALLIALIQTPHRFRSKRQLWAYGGLAVVTQDSAEYGLVGGRIQRTKKRALVRGLNRNHNPKLKEIFKGAAATGSACSPLWQQFYQKRLAQGMKPELAQLTLARKIAAIVLELWKKGERFDPQHLNAQAA

SEQ ID NO: 162576 - protein, 384 aa, unidentified
MQAPTTDTPTADHCVTIFVAIELSQRTWLVTLHSPDRDRISRHKLEGGDHAGLLSLLEGTRARAAGKLGSAPKVVSCYEAGYDGFWLHRLLTAAGITSFVFDPASIAVEQRARRAKTDRIDGELLLRTLMAHLRGEPRVVRVVRVPSVEQEDARRASRERDRLVKEQTAHSNRIKALLRLLGMAVGNPRRRDWLTWLVKQRDWQGQAVPPQIMAEIKREHARLMLVREQLDALAQAPADLTPAAAQMAQRSELLLRLKSLGPAFATTLTNEVFYKDFRNRREVASYFGLTPSPWQSGGIDRDQGISKAGNPRARCAAIEMAWLWLRHQPDSKLTQQYRRRTLNASKRIKRVAIVALARKLIVALWRYLTTGLVPEGAMLKTTEV

SEQ ID NO: 162577 - protein, 432 aa, unidentified
MEKTGKKAAGIDIGAKKIFIYVEGQEVQSFFTFTEDLEKARDFLLEHKTETVAMEATGVYWNILYEILEEAGLDVWLVDGRQTKQVPGRKTDVKDCQWIQELHSYGLLSRCFVVESEIKELRSYQRLREDHIRSAAMHINHMQKALTEMNLRLPEVLSQIHGTSGLSIIQAILNGERDKDKLLKLCHKSIIKNKKEDVLKSLNGKYTQAGLFALKQAYDAYNFYQNQIKQCDEMLDKILKKMSVNSINEPPKGSRKPIRHNKPEIDNLGSHLMKIFNGKDATVLSGITDYTWMQLLSETGTNLSRWPSEKHYTSWLGLSPGQHWSGKMKKNRRKKGHPAAGQIFRKIAYGLLSSKHIALGAFGRKLKSKKGPSIAVKAVARKLAELYWRVMVKGLSYVEKGIKAYEEIILVQKQKSLLRLAKELNVQVAYNL

SEQ ID NO: 162578 - protein, 340 aa, unidentified
MSLYGGIDLHANNSVIVLINEQDEMIYRKRLPNDLSTILEQLAPYHTEVKGLVVESTYNWYWLVDGLMEADYRVHLANPAAMQQYSGLKYTDDHSDARWLAHLLRLAVLPEGYIYPKAERAVRDLLRKRAHLVRQHTANVLSVQNIMARNTGARFSVKRIQELTKQELTTLLAEETQVLAVTSSLVVLDCLRQQIKMLEQTVHKRLHHTPSYEQLLTVDGIGTILAQTIALETGAISRFPTVGNSASYCRCVDSKKISNGKRKGTGNVKNGHPYLAWAYMEAAQFAMRLQPAAQRFYQRTLAKSRNNTVLARKAVAHKLSRACYDIMRDLVSFEATKAVG

SEQ ID NO: 162579 - protein, 385 aa, unidentified
MQVMIEGQSHFQPFGLPYWGSQDLNKGVGSMTASYEYHIGVDYHKSYSHLVVQDSAGKTLRSGRVKNDRQSLGGFLERYRENSHAVVEATRNWMMIYDWLDDICDDVVLAHPLKVKAIADAKIKTDKIDATVLAHLLRADLVPEAWAPSDKARELRVALRERMFYVRLRTMTKNRIVTVFDRYPEQTAQLKKLSDLFGKAGRQQLAALNVLEIDRIQIDRGLDFIGDIDGRIKQSEATIRALTKTNGNVKLLKTIPGIGEFFARLIDAEIDDIKRFRNPKKLAAYAGLVPSTYSSGGKTFHGKIIKQGNKWLRWAFVEAVAPAVASDAQLRGQYDHLKIRGVNKARVAIARKLLTIAFQILRDQRAYEPRSTTAMEATSTISRLS

SEQ ID NO: 162580 - protein, 334 aa, unidentified
MSKKVIGIDVGKKDLYLAHKYFTTTGKVKVKRKKFSNNLKGYKALIEWSKNIAKKEGSKSLHFIMEATGVYYEGIAYFLFEKGFAVSVINPSYIKSFANSSGVRTKTDQKDALVLVEYGEAMKPELWSPPAEEYRVLLNLCRAISSLKNRRDAVANRIESLKSSRVIAQAVLEEEERLFNEINKSIKRLEKQIREHVNKYPSLKKETKLLMSINGVGWNTAVLMVAIMEGGRRFKSAKEAAAYLGLSVQEYTSGTSVKKRSRLSKKGAKDIRKALYFPAITAVRCNADVKALYERLLKRGKLKMVAIGAAMRKLVHICFGVLKNKTAFQPQTIG

SEQ ID NO: 162581 - protein, 342 aa, unidentified
MNHVAIDLGGRESQICIRLPDGTIVEEWKHPTKKLADAMKAWAASRVILETSAEAFRIADAALAAGHEVRVVPSTLARALGVGERGIKTDERDARNLSKASCQMDIPSVHIPTEASRRLKSTCGTREAVIEARRKLINHISGWLRTQLWRLRRGTTTTFPDRVRAHAASLEQPLPPHVEWALASVSTMSDQLKAADQELAKLAKDNPTCRRLMTIPGVGPVTAVRFLAAIDDPSRFPSAHSVQSYLGLTPGENSSSQRQRRTGITKAGPPAMRRCLVQAAWSAMNARSTEPMVEWARRIADRRGKTIAVVALARKIVGILFAIWRDGTTYQSRLGARPTLPA

SEQ ID NO: 162582 - protein, 343 aa, unidentified
MQMITTIGLDIAKSVFQVHGVDAAGEVVIRRQLKRRYVLAFFQKLPSCLVGIEACASSHHWSRELQALGHTVRLMPPAYVKPYVKRQKNDMADAEAICEAVTRANMRFVPTKTPEQQSCLMLHRTRHLFIRQQTAVINSIRAHLAEFGIIAPVGRKGVTELLHVVADPSDKRVPEVARACLAALGTQLLRLKQQILEFDRMIMAWHRSNQTSKRLHYIPGVGPILATALVASVADPRTFRSGRNFSAWIGLVPKQHSSGGKDRLGSISKQGDRYLRSLFVAGALAVIRYAKIHGTKHRPWLTALLARRPTKVAAIALANKIARMAWAMMAKGERYKQPVALAA

SEQ ID NO: 162583 - protein, 420 aa, unidentified
MSEMFDWYVGIDWASEVHQVCLVDDRGAVRGERAVRHGGEELAALAAWLIETTGAAPERIAVGIELPHGPVVESLMERGFAVHALNPKQLDRFRDRFSVSGAKDDRRDARVLGDSLRTDSRCFRRLKPDEPRLIELREQLRMTEECKHERIRLTNRMREQLWRYYPQMLDLSDDLSAAWFLDLWALAPTPAKALRVRESTIAKLLKKHRVRRFDAAEVMRRLRRPALTVAPGTVEAASVHVSALRDRLRLVTRQIAAAERRVDRILTELAASPEEPEAAPGQPPQQSDVTILRSLPGVGRIVCATLLVEAGGPLTAGDHQALRALSGVAPVTRRSGKSCIVLMRQACSQRLRDAVYHWSRVAVQCDATCKARYQALRKAGHTHGRALRTVGDRLLEIACAMMRSRSLYDPQRTVREPQAA

SEQ ID NO: 162584 - protein, 409 aa, unidentified
MELEVVHPACAGLDVHKKTVVACALTPAGREVRSFRAMTAGLQELADWLAQQQVSQVVMEATGVYWRPVYNLLEGRFTVVVANAAVVRGIPGRKTDVKDAEWLATLLRHGLVPQSFIPSREQRELRDLTRYRTSLLQERAREANRLQKTLEGANIKLAAVISDTLGVSGQRILDALTQGWEDPAALADLAHWRVQRNRVALEEALAGQLSPTLRFLIQVQLGHIRSLDDQIAACDVQVAALLTPFAAALARLRTIPGVGQRTAEVILAELGADMTRFATHRHAAAWSGMCPGNRQSGGKRREAPTRKGSPWLRAAFAEAAWAASHCKDGYLPALYRRLAARRGKKRAIVATGHAILVIAYHLLRDGGAYTDLGATYFDQRDRDAVRRRAIQRLEGLGYRVHIEPLPEVA

SEQ ID NO: 162585 - protein, 420 aa, unidentified
MGALNEIDFVAYVGIDWADKKHDVCIQQANSEQREFAVIPHKVDRIDEWAKALHKRFGSPIAVALELSKGPIVSALQKYDFFVIFPINPFTLAKYRETFTPSQAKDDPTDAELAVDIILCHPDHFKPLKPQSVEMRTLALLVEQRRTLVNDRIRITNRLRFALKQYYPQVLEWFEHIDTVLFCDFIARWPTLMQAKRARKNTLKTFFAEHNMRFAQVLERRVRAIKEALPLTTDEAVIIPHRLQALVFVEQLQVTLKAIKRFDEEIEKLADNHVDYGLFSTLPGAGPLLAPRLLVAFGEDRARYKNAAELQKCAAIAPVTVRSGNKHWVHWRWKCSTFLRQTFVEWAGQTVNKSYWAGAYYRQQRAKGSNHQAAVRSLAFKWIRILYRCWQTRVPYDESRYLKALERRGSPLVKPLAEMA

SEQ ID NO: 162586 - protein, 340 aa, unidentified
MKDVRILGVDLGKNSCSVVGMDAEGRVLLRRRMRRESIVALAAKLPGCIVAMEACCGAHHLGRTLVARGHEVRLMSPEYVRPYVKAQKNDDRDAEAIAEAATRPTMRFVALKSEAQLDVQVLHRVRDRLVGQRTSLMNQMRSILLERGISVAQGRRSLLDALAALSQEDSGIGARMRVLLDDMLCQWRALDERIMALDEEFTEMARNDPAARRLTTIPGIGVMNATALVAAIGDGRTFSRDLSAWLGLVPRQATTGGKPKLLGITKRGSKYLRKLIIQGARAALPSLARTATALGAWLRGLLARAHSNTVVVALASKLARIAWALLRNETGFVAGRLMTV

SEQ ID NO: 162587 - protein, 302 aa, unidentified
MHATTVAVDLAKDVFEIAIAAHGGGVATRRRLSRRQFHRFVSELESGTQVILEACGTAHYWGRQCQARGAIVRLLPPHYVRPYVRRNKTDRTDAEALLEANRCGGMHPVPIKTPEQQALQALHRLRSQWQRTRTARMNTIRGLLREHGIALPVGAQRLRARVIATLDTRGTELPGLVVQMIHWVLDDLQAIEQRLTTVDRDLAQLGKPHPIAVRLQQIPGVGPITATALIASVPHIHAFRRGRHFASWLGLTPRESSSGTRRHLGGISKRGDRYLRCLLAHGARAVLRAATVRARSPERLTR

SEQ ID NO: 162588 - protein, 312 aa, unidentified
MTRIICGVDISSLSLEARIGPEGAFASFSNNPQGIAALAAFCQAHQVELVAMEATGGYEQQALALLSEQGLPVAILNPRAVRRFADSMGQMEKTDRLDAGMIAWYAQTRHSQPVCLTSASQQQLRALVTRLRQLTEVRTAQMNQSRLVTDPAVLALIEELLAVVARQIRELETSIAALIAQDPLWQHLDRVFRTIKGVADRTVARLMAEMPEIGTLSNKAISKLAGVAPLARDSGKHQGKRAVRGGRASVREILFIVASVVGRYEPDFIVFQQRLSAAGKPRKVIRIALAHKLLVRLNAKARQVRQQLEAAA

SEQ ID NO: 162589 - protein, 327 aa, unidentified
MTVAIGIDVSKQKLDVAWLRDPEAGKVKTRVFPNTPEGFTALTEWLVKTTGAQPTEIGVMMEATGVYHDALAYALYEAGMTVFVANPQHVHSFRDSFGKRSKTDKKDSVALARFLHGRSHKPWQPEPAEVRALKALLGRLHALETDLQREQNRLEKASIQRAAEVEESIRKMLDALEAERKRLCQQIDDHFDNHPGLKSDKQLLESIPGIGTVLARELTVMLRSRPFQSANQAAAYLGLVPLADESGLSVKRPPRLSKVGPARLRAKLYMGAVVATRYNPLIQHLYERLLARGKAKMSALGAAMKKLVQIAYGVLKHQRKYDPQWAS

SEQ ID NO: 162590 - protein, 430 aa, unidentified
MKSTQNKKIQQVKETTLVVGIDVGSQKHYFRAFNWRGIELTKKPIPFSNSMVGFNAFYEKVTRIMEQNDLEEILVGFEPTGHYWFNLGQFLSGKNIRFVMVNPLHVHRTKELDDNSPSKNDRKDPRIIANLVRDGRYFYTYMPTGVYAELRNASNRRFVLTEELIRSKNRLQKWIAVYFPEYKGIYTHIDAKGGLMVLKTAPTPEKITKLGVDGIIQIWKDAKLRGNGHKKAMLIVHAASRSIGLTEGLEEARMEIQDLIEDYELQLKRLEKVNSLIENLCRQIKYVDKLLEIKGIGIITVAGFIAEVGDITRFDKAKELQKLAGLELVADSSGKHNGKTRISKRGRKRLRYLLVQAAVSVIGKNEEFRQIHEYYTTRHNNPLKKMQSLIAVACKLIRVFYVILTKGKSYDASRLLEDIKRPVTTKTKAA

SEQ ID NO: 162591 - protein, 423 aa, unidentified
MYIKNTLYVGVDVSLKSLTTCILDTLGSVIFKPANFSNDPSGVDSLFNKILELANDHDVEDIFIGVEATSVYDCHLLYAISDDVELNKFNISSYCFTPKLINNFKKSIGDLPKNDKSDSFVIAHKLKSGHLPDECYINFKQLALQRLTRFRKHTMDSITREKGYLTSLLFLKFSTMAQQNILSDEFGATGETLLTEFCSVDDICNKPIEELIDIIVSASQNSFKDVHAVASKIQEAAKNSFKLPGDMNDSITFVMKNSFEIISSLEKSIRHTDKSIASLLEKNFKNESIILQSIDGIGPVISAGIIAEIGNIKRFDDDAALAKFAGLVWSQYQSGEFEAEDTHLKKSGNQYLRYYFCLAASSMKMHNDRFNEFYSRKYREASSHKHKRALVLTARKVVKLVFALLRDNKLYIPTKKGGLPIED

SEQ ID NO: 162592 - protein, 381 aa, unidentified
METLHSHCAGLDVHQKEIVVCVYIGTSDIELTKEIRTFPTFTKHLFEMLQWLEELHITHLAMESTGIYWKPVFNILEDYFDITLANAQRIKNVPGRKTDVADAEWIAKLLRYGLIEKSFVPPADIRELRDLTRLRKKMIGNMTAEKNRIQKTLECSNIKLGSIISDVFGVSGRKLLTRLVEQGYVNSHEVEENIHGSMMPKASQITASLFGTLNPHQIFLIRQSWNHILFLEESIEQLEEKIDELLSPYPEQVKLLLTIPGVKKHAAASIIAEIGVEMRQFPSAQHLASWAGLSPGNHESAGKKKSTRTTKGNPHIQSMLCEVAWAISRTRHTWLSGKYWSLAARRGKKKALIAIAHKVIKIIYHILDQRSGFIEYSKVLS

SEQ ID NO: 162593 - protein, 312 aa, unidentified
METKLFVGVDVSKDSLDVAMGAQKEIITFCNDQKGVDSLVKKLKRIDAQLIVFESTGGYELLAASCLAEAGLAVVIVNPRQVRNFAKATGILAKTDAIDARVIARFAEAVKPEVRPLKDHQTSELTAFVTRRRQIIEMIVAERNRLRLANKRNKKDIKDHIRWLQKRLDKIESDIGKMIQSSPIWRCKDDILQSVPGIGPVTSATLICDLPELGVLSPKKIAMLAGLAPLNCDSGKYKGRRRIWGGRASVRSGLYMATMAAIRCNPAIKGFYQRLIAAGKCHKVAATACMRKLLVIVNAMLRDQTLWQQINA

SEQ ID NO: 162594 - protein, 371 aa, unidentified
MKSIIYIGMDVHKKTYSLCALLKETGEIIGETKIPADVSLIIKFIENAKKSVDSDDVQIKTGYEAGCLGYSLYWQLAAKGIECDILAPSTMHRSAKNKVVKNDRRDAKNIAANLANGTYKSVYVPTDEDVEIKEYIRMMHDFKTELKKVKQHINAFLLRFSHQYPGKSKWIPAHIKWLKELELSDMYREILDEYLSQLEILTEKIERFKYRLEELSQKETYNEKIGQLRCIKGIDTTAAMTMHAETSDFDRFPTANAFASYCGLTPGEDSSGDSYHRLGITKQGNSMIRTTLVEAAQVLVRGTIGKKGKKVKSKQKDQDVKVIDYADKAVIRLQKKYHRMIFRGVKRNVAITAVARELACFVWGIETGHIS

SEQ ID NO: 162595 - protein, 354 aa, unidentified
MTIIGVDFHPEFQQIASVDTDTGEFQEKRLAHCEEAEKFYRALAASGQKVRVGMEASGHGRWFERLLAELQIELWIGDAAEIRTKRVRKQKTDRQDAQLILRLLLEDRFPQIWVPSWENRDLRQLLWHRHRMVQARTRIMNQLQAVALNEGLRCKKRLWRERGRQQLESFRLAPWASRRRRDLLELLDRLNPTIAELSQAIEQEVEKCPPAQRLMTHPGVGPLTALAFVLIIGEADRFQCGKQVASYLGLVPLEDSSGNRRRLGHITKQGSSMLRFLLVEAAQVTARSLPEWRSKYLHLMMRRGRKTAKVAMARRLAVRLYWMMRQGWDYQQWNKFGSHAGQLGHRDGVQSNTE

SEQ ID NO: 162596 - protein, 320 aa, unidentified
MTIIGFDVSKKELVGIRTDKSALVRDKIIINNNSESIQTFIAEAKIKYPHLMVASEATADYHRPLAEYCLKSNIPFKLINPILTKQFTRATIRKKKTDLTDAWIIAKLALQGEGSLLNIKSLDPLKSINRTAFKIQRIVGILSAIYQRFERVFPEDRDVLEELAKPLPLLKSTVKNLRSKVNGRTDKNIKELLISIPGIGQTIANTLIAEIGDINRFASGKSLVAYAGLDPKVKQSGVSLKHNTKITKRGSPYLRKSVYISAYIAKRHDPELKEYFDKKISEGKRYKEATVATARKILYRVYAVWKRGTPYVRYPQKMLT

SEQ ID NO: 162597 - protein, 405 aa, unidentified
MKVVHQWCCGLDVHQRSVTACLITPERRELRTFGTTTTELRAFTEWLQEARCTHVAMESTGIYWEPIFNIIEETQIVAMLVNARHMKALPGRKTDVKDAEWIADLLRHGLLRGSFVPTKEWRELRQAVHERRNLIEERARVANRVMKLLETGNVKLKSVISDVLGVSGRAMLEAIARGETDPKVIASHVKTRLKATTEQIEQAAEGLTGPHHQFMLTMQLRHLDQLGEMIDLFDMEIERRMHPFLGEIARLDGIPGVGVRSAQEIIAEIGVDMSRFPSANHLCSWAKMCPGLKESGGKRAKVGTGQGNRYLRSTLAEAAWAASHTKKSYLRSQFWRIKGRRGDKRAVVAVGHSILRICYYLLRDGGTYQDLGPNYFDERARDQATKSAVRRLERLGYQVTLGEAA

SEQ ID NO: 162598 - protein, 423 aa, unidentified
MKFKSQAKQNQLIEKISAQHLVVGIDIAQQTHVARAVNFRGIVVGNPLFFSNDEEGFNSLLRWIQSLQTAHALTAAIVGMEPTGHYWLNLSKWLSNCQFEVVLVNPHLVKKNKENRDNTPSKSDKKDALVIADMVKNGYYSFIRNTPEAFEELRVYLSNRDSVVTRLVSAKNQIHRWVDVVFPEMRQVFKNIMCIGSLATLRLFPTPEELCKLQPQDILRGWKSLMKRHSGDRKARALISLACRSVGSKQATHAYKLHLKQLLDEYDLACLQLQTVETEIIAVLERIPFAKSMLAVKGISAISLAGILGEAGDLSGFVHGNALLRHAGLNLAEASSGKWTGQMKISKRGRSRLRRFIFMMTMSLVANNSEFKAMHAYNVQIKKMKKMRSIMKLCGKLARILVGMARSGEAYNPPKTSPIQLVA

SEQ ID NO: 162599 - protein, 414 aa, unidentified
MALKIVYQICCGIDVHKTFVVACIASTNSKGVTVYKSHRFSTYTKGLKELLQWLSDSNCKDVCMESTGKYWIPVFNVLENSCNIVLAHPKYVKAIRGKKTDKKDAKWIADLFKHDLVAGSFMPPSDIRQLRDLMRYRFKLTCFMSSEKNRLQNCLTVSNIQLGNVVSDTFGKSSQKILDKILENPLDTSFDIESLIHSSMKKKLPELQLAVDGYITPEQADKLKIIKKHLEDLKNRKAELESIITGLVNPYQREIDIILTAPSFKSVFTAITLISEIGANMSVFPTAKHLCSWAGLTPTNNESAGKKKSVRVSKAGCYIKPLLVQCATAIVKSEKHPEIRNRYLRIKKRRGHKKAIIAVARMLLTAIYNMLKNKEPYNAELYKKSDVFPVNREITIDQALLLVQNQGYRIKSAS

SEQ ID NO: 162600 - protein, 482 aa, unidentified
MKPKPKEKTQKATDHPTQSHWHEMNRKQRREMMRKMQSEDINLEVVHPDAAGIDIGNESHYVAVPPSRDSQPVRRFGCTTAELKAMAAWLKRCEIRTVAMQSTGVYWVAVFDILEQAGFEVYLVNARDTKNLPGRKSDVQESQWLMKLHTYGLLRNSFRPSQEIRTMRTYWRQRNDLVQSAGRHILRMQKALTQMNIQLANVLSDVSGMTGQTIIKAILGGERDPHKLATFRDCRVKASEEEIARSLEGNWQEDLLFVLKQEQDGYEFCQQQMAECDRQLAQYLQQQEDRSHGASLPEEKRKGRLKKKRANKPRFDLREALFRITGTDLTRIDSIDVTTAMTVISEAGWDMSKWETEDHFVSWLRLCPDNRISGNKIIGKGRLSTNNPITIALKLAASTLRLSNTYLGAQFRRFRTRLGAPIAIKAMAAKLARLVYRILRYGMKYVDQGTAFYQAQHRNLQIKHLKSKAASLGYQLIQVPAA

SEQ ID NO: 162601 - protein, 344 aa, unidentified
MDHFAGLDVSVKETSICIVDDTGRIVREVKAGSEPEALLKVLGNPAYRFKRIGLEAGPLSQWLFSALAEAGLPVVCVETRHMRAVLKAQINKTDRNDARGIAQMMRVGLYRPVHVKTLRSQKLRMLLTHRKLLQSKTIAIENDLRGTLRNFGLKVGMVGKVRFEARIQELVENQPDLAVLVEPLLIVRRTLREQIVILHRRLLAIVRDDEVCRRLMTIPGVGPVVSLTYRATVDVPARFRKSKSVGAVFGLTSSRYQSGEVDWSGKISRCGDEMMRSMLYEAAQSMMHSKKWSWLKAWAMQIARRRGMKKAIVALARRLAVIMHRIWVDGTEFRWTREQAAAAA

SEQ ID NO: 162602 - protein, 315 aa, unidentified
MMQNNITTAGIDTSKAKLDVAVHSRTERWQIANALPGWRALAADLAKVGVTRVGIEATGGYERGVVEHLRAAGFTVLVLQPIQVKAFGRVHLRRAKNDALDAELIAACTSAIDQPRIAPDPRLAELAGYLTFLEQLEEDIARFKTRLEHIDELGLRRLVNSDIVRLKARKAAQVRDIAKRLRAYSDLARRLDLVLSIPGIGERTALALIIRMPELGCISREEAAALAGLAPFDDDSGKHRGQRHIAGGRARLRRSLFAAALPAAFRWNKALIALYARLIEKGKVHKAALIACARKLLIYANTVVQRGTPWTEKAA

SEQ ID NO: 162603 - protein, 391 aa, unidentified
MTYFVGIDIAKHKHDCFIMNHQGEVIRDSFSFTNDRSGFTSFLELLSKLEPAQAIRIGLEATGHYGMNLKVFLEDHDFSFMEFNPMLVRRFSQATTLRRTKTDQVDAKQIAVHLSSVEYKPYPNKSYHIKNLKSLTRSRDALIKHRSLQLVTLTNILDRMFPEFKPFFKHSLTSATCLYLLDHYATPSKMARMNHESYTKMSGMLRRTFSYARFMELKRLAKETVGLEDPILAFQLQLTLKAYHFAQAQVDELEQRIEAEYAQVHTHIHSIKGIGLQSAACIFAEAAPFERFDSPDQLLAFAGLEPSRHQSGNIEAKGHMVKHGSPYLRQALMNVAESSLIHNPLLYEFYLKKRAEGKHHRVALSHVAKRLVRIIYHLEVHNLDFDFAKMR

SEQ ID NO: 162604 - protein, 408 aa, unidentified
MQVLYPRCAGLDVHKDTIVACVRCVSTPMHHEVRSFDSTTSGLLALADWLALHGCTHVAMEATGVYWKPVWHILEGNFELVLANAQHIRNVPGRKTDVNDAMWIADLLAHGLIRSSFVPPAAIQELRDLTRTRKQLGREISQHSLRIQKVLEDANLKLGSVLSDVLGRSGRAMLKAIVEGEADPERLATLAQGNARKKTAELREALRGRITDHHRTMLKLHLDIIAALEHTLAELDAVVGKALAPIQQRARLLTTIPGVSDLTAQVLLAEIGVDMTRFADSGHLISWAGLCPRNDESAGKRRNTRVRKSGNWLKTALVTAAWAAVRVKASYLHAQFLRIKARRGAKKAILAVAASMLTAAYHMLRDGVDYADLGPDYFARHDTDKTIRRLLKRLADLGCHVDPTPHSA

SEQ ID NO: 162605 - protein, 494 aa, unidentified
MSTQSINPEERLHHLEGHYADRVSAFRQRLARVGLDRVLIVLLDIGKNVHWAAASLASGWELVRPYRLPSTQTGLTQFVQMTDTLIAEHDPLLVLLGHEPTGVYHEPWARALMARYASQLHGQASPTFEYRFFNPYQVKLARLQTHLRHRKTDPRDLAAMLDLMLRGLGQPAFLPTGTELLIRQEIGFIRAQSRLLGHLERQLRQQLDRLWPGAVVNVGQFAKAHPGLPKPTPIIETRPLQRDRLRVLLTHCPNPYDLIAMSDQQILDLYRQHAGRAGPALLNTLHTWAKNAVLLPLEVSAPLSQQLQRLFRQYTAAETLVDEGRGRLVPLLPQTPARHLIAIPGLGEMDAAAYLAGLGSHHRFHRAAEVWAFFGFDPIADGSGDKPERVGHLSKHGDPAARDALYQMGFRVAQNYAPISITFLDAFDRGKSEIEATIHAAHRVNRLCFHLVQNDEPFENRSTPQLLGEKTRRWRDFKAEKRRRGSRRKRGRRR

SEQ ID NO: 162606 - protein, 344 aa, unidentified
MSEVTTIGLDIAKHVFHAHGADERGGTVFSRRLTRGKLLDFFARHPRCVVALEACGGAHHWARELRAMGHEVRLIPPVYVKPFVKRHKNDAVDAEAICEAAQRPSMRFVAVKSEEQQAAALVFRTRDLAVKQRTQIANAIRGHLAEYGWVAPKGAAHLAMLADLLEDGEIGQTLPEAARPMFAMMIGMLANLDKQIAELDKEITRRARQDEVARRLMTIPGVGPITATAIAAIAPAAETFAKGRDFAAWLGLVPKQASTGGKQKLGAISRMGERTLRRLLIIGASAVVLQASKRGAPAGSWLEGMLARKPRMLVTVALANKMARTVWALLVKREDYRAPVAVAA

SEQ ID NO: 162607 - protein, 338 aa, unidentified
MTMFAGLDVGFKRTAVCVVDGSGRTVWRGVVDTHPQAIAAALHRWREELEKVGLETGSMSPWLARGLAVLGFPVVCMDARRAADAVRSRRVKSDKADAFALAEMLRTGWYSAVHVKSEDSHRLKALLGARDQLVRAKRALGNQVRGLLRPFGIRLPSRQGTKKFAEAAHQAVAHDAMLSASVTALMEALAAIEGQLSRLDDRLKELARRSPVCWRLMSVPGVGPIVALAFMAAIEDVRRFARMRDIGVYLGLTPKRYQSGETDVGLGISHQGDAMARHYLYEAANVLLTTVRSPSALKSWGLKLVKRRGPKRARVAVARKLAAVLGRIWKDGTHFAAA

SEQ ID NO: 162608 - protein, 392 aa, unidentified
MTDASRWVGIDLHRRRSHIAIVDEHGEVTESRRIANDRGTFLELLGDPGEGGTHVALEATYGWEWLAELLEEAGYDLHLAHPLRTRAIAAARVKTDAIDARTLAQLLRCGMLPEAYVAPRELRDLRELLRHRATLTRMRSAVKNRVHAILAKHGIIHQHSDLFGKGGREFLAALELRDAPRRRLDSLMALICDFDREIADTTREIEQRAREDDRVDVLCQIRGVGRYTALLIIAEIGDVTRFPTSRHLCSWAGLAPTVRSSDGKARLGHISRQGSPALRWALVEAAQKITTGSGPLREKFERIAKRRGRKIAKVAIAREILTLSYYGLRDGEIRCLARRSRASAKESWRPSHDRPRRALTQQGLRPRQRRDAHARASSMFVMASLTTRRPPT

SEQ ID NO: 162609 - protein, 387 aa, unidentified
MPELNGLSRSLVALEQDSTLIAVIDLSQSSWLVAGIVPGVERHPLKKLPADEAALLQLLQRWRNEAAKAGRAVQRVVVAFEAGRDGFWLARWLRAHDVEAHVIHPTSIAVSREHRRAKTDRLDTELLKRAVLGWLRGERGHCSMAAVPTLEEEDAKRPTREHESLVGERTRVVNRIKASLARLGVRCFKPMLRHAAERLDALRTPEGAPLPPNTLAELQRDIARLRFVREQIKQIEDACVERLQRASGTGGHAMVRLLARVVGVGIETADMLVHEVLLRDMRDRKAVARYAGLTGAPDESGAKRREQGLAKAGNARVRRGMIQLAWRFLLHQKSSALAQWYRARTADARPGTRKTLIVALARKLLVGLWRLVTTGEAPDGVVLRPAP

SEQ ID NO: 162610 - protein, 342 aa, unidentified
MKEASIIGLDLAKRSFQAHGALADGSVAFRRKLTREKVLGFLAEQPRCVVAMEACGSAHHWGRAIRDAGHEVRLIPPAYVKPFVKRQKNDAADAEAIAEAASRPTMRFVAVKTDEQQARAMLFRTRDLLVRQRTQLINALRGQLSEHGVVAPQGPANVAILAQAIDDMTPSLPLLVVELARVYLDQIDGLSEKVAGLEKAIACEAKRGAMTRRLQTMPGVGPITAMAIETFAPPMEVFRRGRDFAAWLGLVPVQHSTGGKQVLGKTSKMGQRDIRRLLITGAMVIVRWACRKGAREGTWLHRMLGRKPRMLVAIALANKMARSIWAMLTKGEDYRGPVAATL

SEQ ID NO: 162611 - protein, 345 aa, unidentified
MKILAMDLGKRKTVVCFYDSETSKASYRTIKTLAQEIHDLIAEYGPGRVVFEMCSIAGWVYDIACALVKEVEVADVNGQAWKWKNVKSKTDRKDALKLGQLSAMNQIHCVHISKKPIREKRALIKYRYTLVRRRTQIKNSIHSILDKEALAYILPKGKNAWTKHNLGKLTEMSREFAKCGLGEAWRGQLRSELKGLEDIERQIAEIETKLDELGKSDKRVQSLKRIKGVGPRLAEAIAAFVDEPGRFRNGKQVGCYVGLTPRQFQSGQMDRQGRISGQGNKLLRSLLVEVCWLGLRHNEWMRQTYERIKRGSRSRSKIAITAVARKLLVRCWAMMRDGTEWREAA

SEQ ID NO: 162612 - protein, 363 aa, unidentified
MRIQQEAKENREGKRSSWVGEPLYVGVDLHKNKSWITAMTKEGQVRFSFELRNKVESWQKVLQLLPEGSKIVFEASWNWFWLLELIGERFEVSLAHPLRTKAIASAKLKNDRVDSHMLAHLLRTQLLPQAYIPPREIRDLRELVRFRATLTRISTIVANKIHALLAKNGLSLAYSQVFGKKSLLWLRNLQLRWPYKSQLEAYILLGEQINRLKEALMEKIKREAEARQEVRLLRTMPGVGDFLALLMVAEIGDIERFASPAKLVSYAGLSPAVRCSGGRRKRGRLAKEGNKWLRWAAVEVAMHIKRLSPHFAAYYNRLAARKGKPTAQVATARKVLQTVWFMLKHKQGYIEKGASEHLLGTAP

SEQ ID NO: 162613 - protein, 373 aa, unidentified
MPKYSTAFGMDVHLRSTTVCALDADTGEAVTRRFPGNPWGEIAGWMDGFPGPSLAAYESGYLGFAPQRELAGLGVECVVAAVSKIPRSAADSASKNDRNDAARMAKAILAHDISPVWVPSPEVEGIRDLAGAYDGATARLATAKQRLLAFLAKRGFVSSGTTPAGNPRKYWTYDFLRWLDKVRPEDDGGVRTLAALRNEVEAAAEARADLLSEYRAAVDAGPIAAEAAALQSIKGCAFALAAAFSAEVGDFTRFRSGRQVTAYFGLAPSQRSSGDSVRLGGVSGAGNALVRKLAVEGSWCYAAARHQPKLMPRDTGVPLEIRMHGRKGSERLLRRREEMLARGMPAAKANAATAAELVRWLWALGTMCREGAE

SEQ ID NO: 162614 - protein, 390 aa, unidentified
MEARTVNDLLPAASQDDAVGCLVAIELSKKSWIVAVNTPLSDKISRHTLKPGDGKELLDLCERIRTRVARETKRRVEIVSCYEAGYDGFWLHRLLEAHGIRNYVIDPASLQVDRRARRAKTDHVDVERLLRSLMAYLRGEPKVWSVVCVPSVAEEDDRRLNRERGRLINERIQHVNRIKGLLAIHGIYDYQPLRRDRMLRLERLRTAADGQTLPPRLKAEILRELQRLEIILGMIKTLEAERDAIASPKTETEHTSAKKIQDLAKIKSIGPEFATTLVGEVLYRSFDNRKQLASYVGLTPAHFQSGAMCRDQGISKAGNGKARTVMIELAWLWLRHQPDSPLSVWFRERVGKLKGRIRRITIVAVARKLLIALWRYLETGLVPKGAILKA

SEQ ID NO: 162615 - protein, 428 aa, unidentified
MENRLHVGIDFSRDRADLCLLSPEGETIVRHRTFRNSPSGYAMARELITQTLETHGYQALDISAEATANYWMPYYWQFDADLAGYDCHLFVLEPRWVRWYKHCHSEDHKRDRTDPFYIADRTRALGNCIPWHADLHGWRLRTFTRLRFHLTQALVHEKGFLRTHLFLWASGYVQEPPLSDIFGHTSRAILARSGLWSQLDTLSDDEVAASLDQLSRHRLRDPRATAAKLRQAHRNSFRPPIELEEPLQEIWDLGIDHLSCLEALIDRLDKDIAREAQAYPGARCLATIPGFGLVLASGIAAEIGNLQRFRTPLKPDRRGGYRPRNLRDVEDAVAKFAGLWWPESSSGDFVAEERRLSKRGNRYLRYHLILGADALRRYVPKYQEFYARKHREANRHKHWRALVLTARQSVGLIVGLLHRNEPWRSEEG

SEQ ID NO: 162616 - protein, 319 aa, unidentified
MAQNGLVVAGIDIAKDKADVCIRALSQRQTFPSTAEGRRQLISWLRKHKVTKAVMEASGGYERDWAKALREKDIEVRIVDPKRVRHFAQSAGRLAKNDVIDADTIAWFAEIFGEAPSQAHDAAREKLQQMVNARQGLLDMKTMLSNKGEHDVPEPVQKSHARLLKTIAVELANLEAAITATIKATPDFAARAEIIESVPGLAGTTSAGLIAAMPELGQVSNQAISALLGVAPYDDDSGKRQGGRQIKGGRRKVRNLFYMACLGAATRHNPALMAFYRRLIAKGKKAKVALVACMRKLIVILNIMIARGEKWDASRYALD

SEQ ID NO: 162617 - protein, 315 aa, unidentified
MTTSSGKFVGIDVAKDKLDIAVLGEKKASQVGNDERGIAKLIKELQMLKPALIVVEATGGYQRAVVLGLYEAGLPVAVVNPSRVRQYARASGLFAKTDKLDAFNLAEFGKQMKPRRFEAKSEAGRDVSALLVRRRQLEEMLKAEKSRLRTVPPKMRGSVERMIEVLKEEIKRLEKELDKFMKENEEWQAQEQILTSAKGVGRITATTLLAELPELGRLDRKKIAALVGLAPMNADSGKKRGYRKTKGGRMEVRNVLYMSTLVATRYNPLIQAQYQQLLKRGKVKKVALTACMRKFLTVLNAMMRDKVPFRQRGNA

SEQ ID NO: 162618 - protein, 344 aa, unidentified
MLYVGLDLSRKRLDFDARLGGGELVERGAVPPDADGLAGLVRRLGHGQVLAVIESMNGARFVHDRLEHEGWDVRIADAVKAKGLAPLACKTDKIDAWVLAELARLDLVPEIWLPNPAVRGERERARFRLHLVKHRSALKNRIHSILIAHGVASPSSDLFGLSGRRMLERLGLPEPWRSTSAASLALIDTLDEEIERCERELRRLGADHRYVPLLMTCPGIAWILAFTIASEIGDIARFPTPVKLVGYSGLTPRVEQSGESDRRGPLRKNGPDHLRWALVEAAHSASRHPLYRPILERNRDRHGRKRGTKIAALTIARKLAEASWYMLTRNQPFAPAGATRPLAA

SEQ ID NO: 162619 - protein, 407 aa, unidentified
MDVVHPKCAGLDVHQQTVVACARIGSGQAVTADVRTFGTTTQELLALSDWLTTHGCTHIAMESSGVSGKPIWPVLDGHFVLVLANAMHIRNIPGRQRDVNDATWIADLLAHGLIRGSFVPPEPVQELRDWTRTRKQLIRESAQHPLRIQKTLEHANLKLPAVLTDTLGVSGRAILQALVAGERNPERLADLAHERVKASRAELVAALHGRVTAHHRFMLKRHLTHIEALDAAVRAVEARVGEALAPVRAAVDRLITRPGISETAARVIVAEIGFDMTRFPTAGHLVSWAGLCPRLHESAGTRRSNRTRSSNPWLTTPLVQAAWSAARTRDSYLRAQVRRIKSRRGPKKTILAVAASMLAAAYPMLKDRVDYRDLGADPFDRRDKTKLAKRLIARLHDLGLTVEVRAA

SEQ ID NO: 162620 - protein, 344 aa, unidentified
MEQYVGLDVSLREISVCVINDKGTILFEGKTAAEPASLAKLIRAKAPEVVRVGMETGATSPWLFHSLTAVGLPVVCMDARQAHAALSMRPAKSDRSDARGLAEMLRMGWYREVHAKSFTSHERRTMLGARHHLVTMRTELDAQIRGVLKTFGLILGVGNSNVLIRRAEELAEGHPVISGLITKLAEVRRHVALQIAAIDRDIRRLVRSEPTLKRLMTVPGVGQITALAFLSAVDDPERFKHARDVGPYLGLTPTRYQSGETDRQGRISKRGDTFTRTCLYEAANVLLTKVQRFSPLKAWGMRLVKRIGTRKARIAVARKIAVILHCIWMDGTEFRWTREEVKPA

SEQ ID NO: 162621 - protein, 410 aa, unidentified
MRRVIGMDIHRTFAEVVFWEEGKLRPAGRIGMTRAGLEGFGHSLGKEDEVVIEATGNAMAVVRVLSPFVARVIVANPLQVKAIAHAHVKTDKIDAGVLASLRAADFLPEIWLPDAETERLRRLVARRNQVVRHRTQIKNEVHSILHAHLIPPCPHADLFGRLGRTWLARQVMPDDERGAIERHLRELDRLGEDLDILDRDIAQGAIDDPAVKRLLTITGVNLIVAAGLIAAIGDVRRFPDPQKLVSYVGLNPRVRQSGLGFAQHGRISKRGRSHARAMLVEAAWAASKAPGPLRAFFLRIRARRGHQIAAVAVARKLAVLCWHLLIKGADYQWARPALVANKLRAMELKAGQPARKGSKPGAAYAYNIKELRDREIDLARHAEQAYERFVSQWQPRRGKRRTDAANEERH

SEQ ID NO: 162622 - protein, 463 aa, unidentified
MQQPVEIRVDEHDQIVARVAAIDVAKASGMVCLRVPHETIPDRRVTTVWPVAATTAALIELGDHLRCERVARVVLESTSDYWRPFYYLLEAAGLTVWLVNATQAKNVPGRPKTDKLDAGWLAKLAERSMVSPSLVPAEPMRQVRDLARARFDLVEDRTRVKQRIEKLLEDALIKISSVLTDVLGVSGRAMIEALIAGQRSPKVLAELAKGRARSRRADLERALHGRFTDHHAQLARMLLGQLDELTARIGEVTELLDAAIAALPPTSPTSPSAGPAGRSNGDNDGDNDGDNDGRPGQAEYNSAVARLCVIPGGGPDSVRAVIGEIGLDMSVFGTPQRLCSWARVAPRTVQSGRKTGRARTGKGNPYLRSALAQMATGAAKTDTFLGERYRRLIKRMPKAKALVALQRSILVIIFHLLADPSVEFTDLGPDFYTRRIDRARRASHLMRQLHALGYQVQLTEAAA

SEQ ID NO: 162623 - protein, 366 aa, unidentified
MRKINTMAMEGMQIFKDDQLTIGLDLGDRTSHYCILNEAGEVILEQELPTTAKGIAPVFSKIPRSRIALETGTHSPWVSRQLTQMGHEVIVAHARNVRLIGESSRKDDQRDARTLARLARIDPALLSPVRHRSAQAQIHLTVIRARAVLVSARTALVNAARGLTKSYGQRLRKCGTEQMNRESAKELKPELREALHPLLAEIESLNARITEYDTRIEQLAKEVYPEVARLKQVKGVGPLIALTYVLTLDDPHRFRRSRDVGCFVGLRPGRRNSGRSEPQLHISKEGDRYLRTLLVQGAHYILGPFGQDSDLRRWGLKLSERGGRNAKKRAVVAVARKLAVLLHKLWVSKEIYEPLRNNRKQMAQVA

SEQ ID NO: 162624 - protein, 313 aa, unidentified
MSKYYVGIDVSRGVLDVYVRPTGRAWQVTNNARGHAALAQRLERLNPKLVVLEATGGLERAAARALTGAGLAVAVVNPRQTRDFARSTGRVAKTDALDASDLARYAEVVQPEPRMLADEETQALAELVRRRQQVVKMATGEKNRLRVCSGELRAAIRTHLAWLEKTREELDREITARVLSDPGWRARANLLKSTPGVGPVLSSTLVACMPELGNVGKKEIAALVGVAPFNRDSGKKRGKRRVSGGRGHVRAVLYMATVTAVRCNPVLRPFYQKLVDGGKEKKVALTACMRRLIVILNAIAQTGTPWDEARAAS

SEQ ID NO: 162625 - protein, 341 aa, unidentified
MGQVSTIGLDLAKSIFQVHAADASGAVVVRKRLRRSQVRPFLAAQPPCTVAMEACGSAHDWAREIAMLGHAVRLIPPAYVKPFVKRQKNNATDAEAICEAAQRPTMRFVAPKSEQAQAAALVFRARDLLVRQRTQVINALRGHLFEFGIVVAKGPAHVPQLVQAVANPDEPLPEIARPVLQILIDTLHRLDEQIADLDREIVQRAKADETAHRLMTIPGIGPVTAVALTALAPPAQTFRRGRDFAAWMGLTPLQHSTGSKQKLGATSKMGERTLRRLLIIGASAVLRWAARHGAPAGSWIARMLACKPPMLVRVALANKMARMVWALMAKGGTYQAPAARA

SEQ ID NO: 162626 - protein, 322 aa, unidentified
MSVSVLGIDIAKQKFDAALLVEGKTKHKTCKNSMEGFEALSLWLERQGVQEVHACLEATGNYGEDLAIYLHAAGHMVSIVNPARIKGFAQSELLRTKTDKLDAALIARFCLAMKPGPWSPPSPEIRSLRALVRRVDSLIDMRSQEKNRISTAHESVALLIKEHIAYLDQEIEQIRQQIADLIRQDPNLKRKKDLLDSIPALGKATIPHILAELDDLEKFTHVRELVAFIGLAPKETLSGSSIKGKPRICKIGHARLRRALYMPALVSIQCNPVMIAFYNRLKAKGKNGKVIVCAIMRKLVHVIFGVLKSGKEYDPNFKPISA

SEQ ID NO: 162627 - protein, 389 aa, unidentified
MIYVGIDIAKDKHDCHIFSTNGEIDEISFTFSNDLDGFKELLNAIPTDNFEMVRVGLEATGHYSFNLVEFLMNNSIEPIIFNPLQINLIRKAQSLRKTKTDKVDAKTIAFLLLDKNLNHHSNSSYHFSELKSLARHRFRLVKRSSEHKVQMNRLVVIMFPELDKLVNSVTQKSVLELLRQFPSKEEIANAHLTRLTTVLKKNSRNRYGKDKAIEIRNAARQSIGSSTKSFSFELKQTIEVLIFIENLIKDVDNEIREIMDLLMTPITTVPGISYTLGSMILSEIGDVNRFDNPGQILAFAGLEPGIHQSGTFDGSKMKMVKRGSPHLRWALFNVSSLIVLHDETFKQYYEKKQSEGKHHLVIISHVARKLVRVLFKLLKDNIPYERQIA

SEQ ID NO: 162628 - protein, 331 aa, unidentified
MDCIGIDVSKQKLVLFDGCKEWVFPNTAGLEKFQAWLEKRFPGGFASLVMIFEPTGPYSHELKAFCAREKIRVHILNPKRSHHFHTALGRRSKNDPIDARTLYAYHLLLPETEFQVPRLNPLAETLRHSLSAYQLAQNSRVRFSNHLEAARQEGNAPPLLLEELAEEVQHQRQREETWLRMTIDWVEQQSELGVAFHRLQTIPGIGPITALCLLQLEETYPDANRQELTALVGLDPREKQSGTSLHPPKRISKNGQAMARRLLYLAALSVTRGEPHFLGLFYRRLVLRGKHKKQALIAAARKLLLVAHAVYRSEEPFRVMVYEGSGGGNGY

SEQ ID NO: 162629 - protein, 372 aa, unidentified
MKKRSSTRQNPKAAVKTKSVRQSVTIGMDLGDKASRYCLLSDEGEILQEGQVGTTKAGMTETFGRIGRARIAIEVGTHSPWVSRLLRSFGHELIVANPRQVKLITESSRKDDRLDAQTLARLARIDPQWLRPIQHRSEKAQTALMVIRVRAALIAVRTSLVNTARGLTKAVGERLPKCDADQMGVIQTESLPPKLRQVLEPLLKEVESITEKIKDSDRDIEQIARRDYPETALLQQVGGVGPLIALTFVLTVEDKGRFQKSRDIGCYVGLRPRRSDSGQSQPQLRISKEGDPYLRTMLVQGAHYIVSRRGPDTDLKRWGLHLAEHGGKRGKKKAVVAVARKLGILLHRLWVTGEVYEPLRNQNLRAAGKKAA

SEQ ID NO: 162630 - protein, 345 aa, unidentified
MSMVRTVIGGVDTHADFHVAAAIDGNGGLLDVESFPADSAGYEALLGWLVGFGAVTLVGVEGTGSWGVGLARFLRDQDVVMVEVDRPNRQARRKVGKSDPTDAVAAARGALSGAAAVIPKTRNGPVEQMRVLLVARRSARRQRIQTLNQLRHLVFTAPEEIRVRFKDRYKTGLVTEAAAMRPRKGSDPVTYTTNLVIRNLARRIQGLNAEMASIDDLLTELVAAAAPSLIALYGAGTDTAASLLVTAGDNPDRLGSEPSWAHLCGVAPLPAGSGKTSGRYRLNRGGDRNANAALYRIVLTRMSSDEETRRYVARRRDEGLSTAEIMRCLKRYVARQVFRQLPRAA

SEQ ID NO: 162631 - protein, 346 aa, unidentified
MMIIGCDFHPSWQQISWLDSETGETGEQKLVHGDGQAKSFYGQLTAPALIGMEATGNSQWFIELVQDLGHELWVGDAAAIRASYVRKQKTDRRDAAHILKLVVEGRFPRLWTPDQEQRDLRQLVLHRHKLVEIRSRVKNELQHLSMNKGMQRKHKLWSQVGQKLLRELPLKPWAACRRADLLGLLAMLDEQIGKLDAAVQQAADEHPQARLLMTQPGVGPNTALAFVLTIGDASRFRRGKQVASYLGLIPREESSGGRQKLGAISKQGNRMVRSLLVEAAQIAVRFDPGMKKQYLHRCHQKPKGVAKVAAARKLAVRLHWMLRTQKPYPEIVRIESSPRVALVGAS

SEQ ID NO: 162632 - protein, 420 aa, unidentified
MQVAQDDQEIIARVAALDIGKAEVVCCVRVPGQGPRARRMQEVRTYTTMTRSLLAMADWLTELGVTRVVMEATSDYWRPPFYLLENTFETWLVNARDVKHLPGRPKTDRLDAVWLCKVAERQMLRPSFVPPPAFRELRDLTRYRVDLITTRTSEKQRVEKLLEDSQIKLSVVASDIFGVSGRAMMAALVAGERDPKVLADMARGSMRGKTARLEEAFTGRFTDHHAFLLRTMLARIDSINTDIDIVQGRIDEQIAPFAAAVTRLDEIPGIGITTAQVIIAEVGLDMTRFPTPDHLASWARFAPGISESAGRKKGGSSTGKGNRYLARALGEAAVGAGRTKTFLGERYRRIAKRRGKKRAIVAVGRSILMIVWELLSDEEKRFVDLGPGYYDSRVNRNRSTRNHVRELQALGYKVTLEPAA

SEQ ID NO: 162633 - protein, 310 aa, unidentified
MDVCVGIDVSKHHLDWVLGAEGNASRVPNTAAGVRRLVARLAKASVDRIVVESTGGYERALTEALSAAELPIVRVNPWRVRRFGEGLGVLAKTDPLDARVLALFGERARPPRRPLPGPRQREMADLVRRRRQLIAMVVAEKSRLDTASSLIRRDIQSLVQVLERRVSKLDDRIDHAIVEDPERAETWHRVQTAPSVGPGVARALVIDLPELGALGRRQITSLVGLAPFAKDSGKKSGYRRIRAGRAAPRTALYLTAMNGARFNPVLKAMYERMLAAGKPPKVALIALARKLLTILNAMVRDRSDWQHATT

SEQ ID NO: 162634 - protein, 410 aa, unidentified
MEVLHQRCAGLDVHKKTVVAAVRLVEGNKVITEVRTFATTTAGLLALADWLTQNGCTHVAMEATGVYWKPVWHVLSDGEIELVLANAAHVKNVPGRKTDVNDATWLAELLAHGLIRASFVPDGQTQELRALLRTRKQLVRERSRHIQRIHKVLEDANIKIDAELSDMLGKSGRAMLNAMVAGETDPVRLAALAHPNVKSPQAKLAEALRGRVTHHHRFLLQLHLQQIDGLDTALGTMDGEIEANLAPFRTAVDIVSTHPGIGQLSAHAIVSEIGTDMSRFATAGHLLSWAGMCPRNDESAGRRRSNRLRKGAQWLKTTVVQCAQAAKNKKGSYYQAQYLRLRSRRGPQKAICAVAASILTAIYHMLKNGTVYQDLGADHFNRRSKITQTQRLVKRLEHLGYAVEIQPLAA

SEQ ID NO: 162635 - protein, 337 aa, unidentified
MIGGVDTHADFHVAAAIDSNGGLLGIESFGADAAGYEELLGWLVSFGAVTLVGVEGTGSWGVGLARFFHDHDVEMVEVDRPNRQKRRKVGKSDAIDAEAAARAALSGEASVTPKRRNGAVEQMRVLLVARRSARQQRIATLNQLRHLVFCAPEPIQVRFKDRYKTGLVTEAARMRPRNGSEPVTFTTNTVIRILARRIQGLNTEMASIDRMLSELVKTTAPSLLALHGVGLDSAATLLVTAGDNPERLHSEGSWAHLCGVAPLPASTGNNARHRLNRGGDRQANAALYRIVLTRMSNHPETRAYVTRRRNEGRNTTEIMRSLKRYVARHVFKHLQTT

SEQ ID NO: 162636 - protein, 411 aa, unidentified
MLFVGDDWAEDHHDLEVQDDQGRVLARKRVTDGIAGVVGFHALVAEFLGDDDGPGQVMVGIETDRGSWVGALIAAGYVVFGVNPKLAARHREVISLSGAKDDKTDAHSLADMVRTRRHQLRRVEPDSQVAAGVKVLARAHQGLIQEQTRHMLRLRSALREYFPAALSAYQLGSLTLTGSDVLALLDKAPTPAAAAKLTIAQITAALKTAGRRGDIPARAAAIQAVLRTEHLGQPDLIAGAYAITIRSTIAILQTLNTQIPALQDGVEAYFGQHPDAEIYRSQPGLGKILGARVLAEFGDASGRYHDAKARKNYAGTAPITRQSGKQKTVHARFIHNNRLVNTLGLQANAGVLHDPHVRAYYHQLRDRGLGHHAALRQIANRLVGILHGCLKTHTPYNPHTAWAHRTTTTAA

SEQ ID NO: 162637 - protein, 408 aa, unidentified
MNLLHGRCAGLDVHAKNVVACVRIEEDAKLTEEVRTFDTTTKGLLALSAWLELEGCTHVAMEATGVYWKPVWHILESRFELVLANAAHIKNVPGRKTDVKDAKWIADLLAHGLIRGSFVPPTPIQDLRALMRTRKQLVREAARNTQRIQKALEDANIKLTGVIRDILGKSGRAVLDALAAGETDPEKLVDRTGSRLKATREELVEALRGNVREHHRFLIKLHLDQIDVLGRAIDDLDARVASHIDPFRKDIETLTTMPGISETAARVIVSEIGHDMSRFPTAGHLISWAGLCPRSDESAGKRRSTRIRKGAQWLKTVLVQCAWAAIRAKDTYLRSQFHRIKGRRGPMKAIIAVAASMLTSAFHMLTTGADYKDLGAAHLDKRDHAKIARRLVRRLEDLGLKVTVAPAA

SEQ ID NO: 162638 - protein, 379 aa, unidentified
MRDHSEAFVAFDTSKLRNAVAIAEAGRSGEVRFLGEIDNTAGATANLVKKLAAKYDRLSFCYEAGPTGYGLYRQIRQLGHDCIVVAPSLIPKKAGDRVKTNRRDALGMVTQFRAGELTAVWVPDARHEAMRDLTRAREAAVDDLRSKRQQVSSFLLRLGLHYAGKKTWTRMHMNWLAKQKLDHAEQRIAFEEMLLAVRQAQERIARLEEAIRVAVPDWSLAEVVAAAMAMRGIDMISATAFLAEIGDLSRFRSPRELMAYLGLVPSEHSTGDTVRRGAITKSGNGRARRILVECSWSYRHPPRVGKKKQDKVAAAPRAVREIAWKAQHRLYGRYRALTRNGKHKSVAITAIARELSGFIWAINREITTAGVAASSSGIR

SEQ ID NO: 162639 - protein, 402 aa, unidentified
MITCGIDIGKGKHAVAIIDELGRQLVRTRFYDNTMAGAEKLMEELARHAEPAQVHVGMESTGNYWRAYYDFLSKKGCVVDVINPIVTSASSAGDIRGRKTDKRDAESIAEVVMRGKYVRRRDEGLQERKLRALTRQRGFIVEERSAAKLHLSSMVAEAFAEFESLFEDPYGPLALAVLSKYPTACHMARARKPSLAKIMRAHTRGRDADAEARRLVDAAKDSISLACEITDALARCIVSSIQTMTALDERVKDIEKAIMDFDPPDLAAKLMAIKGSGKVMPMVVASEFGDISRFRTNPKNGSETGMHKRLLAFAGCEPRIRESGKWRGRKFISKRGNRQLRTALYLIANNIRQWDPYFKAVYDRKVEAGKHHNVAVFYVVAKLLEVLCALYKSGRSYAATQP

SEQ ID NO: 162640 - protein, 375 aa, unidentified
MTKISTIGLDLAKNVFQLHGIDASGTVVLRRQVRRAAVEKFFAQLPPCLVGMEACGSAHHWARVIGRFGHEVRLMPPAYVKPYVKRNKNDGRDAEAICEAVSRPSMRFVPVKSVGQQAALAVHGTRALLVRQRTMAANALRAALTELGIVAAKGLDGLRELIAGLEEPSAEIPEIMRSALLILAKHWQALDAAERILEQQIAKAARCDRQASQLMAVPGVGPIIASTILAKVPDAKVFRSGRDFAAWIGLTGRDRSTGGKHRPGHISKQGDRTLRVLLISGASAHLRQQKRRGVSDPWLRELLGRRPYKVATVAFAAKTARIIWAMLVKGEPYRNRASAPAAAYEGDSRRARAHSVRKGNQGVMANGQETGIDLG

SEQ ID NO: 162641 - protein, 343 aa, unidentified
MGEVSTIGLDIAKSVFQVHGVDVDGAVVIRKRVTRAKVLEFFAALPPCLIGIEACPTAHHWSRELQALGHTVRLMPPSYVKAYLKRSKNDANDAVAICEAVTRPSMRFVPTKSEQQQSGLMLHRSRQLLVRQRTMLSNAIRGHLAELGIISAKGRNGTAELLKVIANEEDDCIPASARFSLNVLARQFAAIATEIGAIEKRIHAWHRCCEESRRLEEIPGVGPIVATALVAEVGDWKAFSSGRNLAAWIGLVPRQHSTGGKQRLGGISKQGNRHLRWLLVAGAMAVIRYARQHGTRRLWLARIMERRPIKVAAVALANKIARMAWAMMVRGERFKEPRLLPAA

SEQ ID NO: 162642 - protein, 404 aa, unidentified
MEHNAVGIDVSKGKSTVCISRPMGEIIASPFEVKHTKHDVDELIKTIQGLEGETKIVMESTGRYPLPLLTKLSDAGFFVSMVNAKLIKDYNPDNTLRKVKSDKADARKISAYTIDKWLLIKQYGTMDTLREQLKTINRQFDFYMQQRVALQNNLTALLDLTFPGISNCFSSPTRADGHIKWADFAYTYWHVDCVCGKTMNAFTEHYQNWCRKNNYNFSSVKATELYNTAKELIPILPKDKGTQLLIHQAIDMFNAMSATVESLRKQMDQIASQLPEYPVVIGMTGVGHTLGPQLMAEIGDVERFTKRSAITAFAGVDPGVNQSGSYNQESVHASKHGSPELRKTLFQIMQHLIQFAPKDDPVYDFMIKKRSEGKQYYVYMTAGANKFLRLYYGKVKAYLAEQKQ

SEQ ID NO: 162643 - protein, 351 aa, unidentified
MVVVVGADVHKRTHTFVAVDEVGRKLAEKIVVATSVGHAEAVMWARERLGTQVVWAIEDCRHLSARLERDVLAAGQQVVGVPPKLMAQTRASARTKGKSDPIDALAVARAALREPDLPVASHDGVSRELKLLVDRREDLVAQRTSTINRLLWRVHELDPERAPRSRSLHLAKHRRLLGEWLATQPGLIAELARDELADITRLTAAINAVAKRIGERIRHVAPALLAMPGCGELTAAKLVGEAAGVTRFKSEAAFARHAGVAPIPVWSGNTAGRVRMTRSGNRQLNAALHRIAVTQIRLHGLGQTYYRKRIAAGDSTTEALRCLRRRLARVVFRHLHTDYQNRIQPSQLAAA

SEQ ID NO: 162644 - protein, 413 aa, unidentified
MRAEIGSLSFTLCGVGGVEHEVELISALTPLCDPCVSQVEYDDSRRATVPPSRRPKGKSLRESEGDGIEAPAGARTVDRARSPDIARKSQAGASSRRKGDVMRIGIDVSKETLEVAMSDGRRETVANTKAGIAAFVKRLRGESIALAVMECTGHYERDVLYALVEAGIPATAVNPRRVHNYALSQGRLAKTDRIDAEVLCDFAQKIEPPVRALPSPELVVLQERVLRRLQLVEMRTAEKNRLEHLTDEKTQKNVAAHIEWLSRCIKDTEHDIDKQLRTSKVWDAKLKILESAPGVGKVVAATLIALLPELGEIDAKPLTALAGLAPFNDDSGKHSGERHCSGGRTNVRNALYMAALTASHRDTPLKQKYARLRAKGKPAKVALVACAHSLLIILNAMVTKAELWSPPLTPSHS

SEQ ID NO: 162645 - protein, 337 aa, unidentified
MSVYVGIDVHRKRSQVAVVTEDGKVQLNKNVVNGSEPMLRLIGDLPAGTPVAFEAAFGWGWLVELLEDYGFDPHLVHPLRCKAIASARLKNDKVDAAILAQLLRADLLPEAWIAPPKVRQLRALLRHRVGLVRLGTQLRNRIHAVAADHGYDRSASYWTGPGRGWLAELDLPAASREIVTDCLAVIDGLAPVIDRIDGELHQHAKADPRVTVLRTLPGVGEFTALVMLAEIGDITRFGSARKLASWAGLTPTVRGSDLKVRHGNISKQGSAWLRWVMNQAAQTAKRSPDFAATYSSIARRRGKKIATIAISRKLLTRAWHLLSEIQAADASTPPRRP

SEQ ID NO: 162646 - protein, 331 aa, unidentified
MENSQYLGIDISKKSFDVALLKENKYKHKAFKNNEKGYEELKKWLEYNQANEVHCCMEATGVYGEKLAEYLYKEGYKVSVENAAKISAFAKAQLSRNKTDKADSKLIAQYCQACKPGFFTPTPKEVKELKELVIYLTELKEAKSQQSNRLESVESKVVIESVKSVVKTIEKEIEEIEKLIKKHIDSNPSLKADKELLKTIPGVGEATASLILAEIPEIKNFESAKKLAAYAGLSPSQHLSGASVRKRTRICKIGNSRIRKALYFPAITAMKHNPILAAFSQRLASRGKHSFAIICAVMRKLLHLAFGILRSGKEFDPNFSSSSFSSISANP

SEQ ID NO: 162647 - protein, 389 aa, unidentified
MKIFVGIDIAKLNHFAAAISSDGEILIEPFKFTNDADGFQLLVSKLDSFDKNSIIIGLESTAHYGDNLVRYLVAEFYQVCVLNPIKTCQMRKNNIRKTKTDKVDTYVIAKTLMMQDDLRFVSFYDLDMMDLKALGRFRQKTIKQRTRLKIQLTTYVDQVFPEIQYFFKSGLHQNAVYALLKEAPSPKEIASMHMTHLANLLKVNSHGHFTKEQAKELRVLAQKSVGANDSAISIQITQTIQQIELLDSQLEKIEAEMTDIMKFNDSVIMTIPGIGYINGGMILGEIGDIHRFSNPNKLLAFAGLDPSVYQSGNFQAKTTRMSKRGSRVLRYALVNAAWNVVRNNATFKAYYDAKRAEGRSHYNALGHCAGKLVRVIWKMLTDKVEFNLE

SEQ ID NO: 162648 - protein, 321 aa, unidentified
MEPAIVGVDIGKKEFSVALLLDGGEKNGTFRNTAAGFAMFSRWLGKHGVERAHICMEATGTYGEDLAQHLHHAGHVVSVVNPARVKGFGQSELSRTKTDKADARLIARFCRAMKPEPWQPPTPQSRELRALVRRLDELKGMLIQEKNRLPSADDVVRPSIQDMIDLIESRILQLTQQIRDHVDRHPDLSARRDLLETIPGIGPGTSAMILAEFGDVSRFPDAGSMASFCGLTPRHRQSGTSVHGRSMLSKTGSSRIRKALYMPALSAIRYNPVIRAFRARLMANGKHKMIIVGAVMRKLVYLAYGVLKSGKPFDPVVAGLA

SEQ ID NO: 162649 - protein, 356 aa, unidentified
MNKISKLDFEGQQIYVGMDVHKKSWSISVLTDKFEHKTFTQPPEVSTLVNYLKWNFPGASYKSVYEAGYCGFWIHDCLQEHGVQCLVVNPADVPTKDKERRKKTDRVDCRKLAKSLRSGEIEGIYVPCRPKVEDRTLIRTRHSMVKKQTRCKNQIKSILQFYGIQIPEEVADSHWSKRFITWIEAIRMQRASGNVALKAYLEELNNVRKIIADLTRSIRSLANAEEYRQNVCLLKSVPGISILTAMTILTELYEISRFRNLDKLCSYVGLIPDTNSSGETDRDMGITKRRNTQLRGILIESAWVAVRKDPALLMTFNTLCKKMPKNNAIVRIARKLLSRIRYVLKNQQKYESAIVQ

SEQ ID NO: 162650 - protein, 350 aa, unidentified
MKQHSETREVKVMGIDLAKNSLHVYGVDDNGLKAVGKKFSHQKFKEYVANLPVCTIAMEACASAHYWARLLKSYGHEVKLIAPQFVKPYVKSNKNDAADAEAICEAAQRPNMRFVPIKTIEQQDIQSVHRMRSLSVERRTAQINQIRGLLLEYGIKVPKGRSQLLKGLPEILEDAENGLTELFREELFGLYAELRHLNERIAHYDEKIEQIARADERAQRLQTIPGIGPKIATALLVATGDLHAFKNGRQLAACLGLVPRQHSTGGKATLLGISKRGDVYLRQLIIHGARSLLLTVDRKDDRTSRWAATLKERRHTNIATVAMANKMVRIAFALLKNGDTYRAASTPAIA

SEQ ID NO: 162651 - protein, 340 aa, unidentified
MQIAVLGIDLGKNSCSIVGWDASGAVVLRRRMRREGVIKLAGKLKPCVAAMEACCGAHHLGRVLRALGHQVRLMSPEYVRPYVKSQKNDDRDAEAIAEAATRPTMRFVELKAEEQLDMQTLHRARDRLVGERTALINQLRAILLERGITVAQGRRKLERFLAGLNALEGLSQRMRVLIEDMRQQWCELDRRIVELDKDFVEWARNEEAARRLMTIPGIGVLNATALIAAIGQAESFARGRDLAAWLGLVPRQITTGGKPRLVGISKRGNKYLRKLLIHAARAALPTLLEGTTPLAAWLRGLVARMHKNAAVVALANKLARIAWAVLRHNETFRFVAAATA

SEQ ID NO: 162652 - protein, 369 aa, unidentified
MPQVRFIGLDVHKKKIAVAIAEEGRNGEILSCGSIDNTRAALAKLLQKLGKESATLHLCYEASGCGYGVYRQILDAGHLCDVIAPSLIPRATGDRVKTDRRDAVMLAKLLRAGELTPVWVPDPAHEAMRDLIRSRGAAMSQRQVARQQLQAFLLRHGRIYSGIKTWGPVYHRWLGGQKFELPAHQAVMQDYANAVLDADGRIKERDKQIAELIPQWSMHPVIEALCAMRGVSTIVAASVVASTGDLTRFESPRQLMAYFGLVPSERSSGGTVRRGAITKTGNNEVRRVLTQAAWAYRFPARVSRARMDAFCAGSAAVRQIAWKGQLRLTRRYRKLAAKGKPIQVVVTAIARELLAFMWAIGQVVTPANA

SEQ ID NO: 162653 - protein, 309 aa, unidentified
METIVGIDVSKDRLDVAVLPQGEAFAVDNDDAGIGELTGRLKAIGADAIALEATGGFEMQAVAGLSSAGLTVLVVNPAQVRAYANAIGRKAKTDPIDAAVIAAFVLATKPEIRPLRDAETQALSELVARRRQIVQMIVAEENRLRMVLARQAQKSIKRLLAALRRELDSLDADLDDHIRKSPIWRVRESLLVSVPGVGPTTARTLLAELPELGSLDRRQIASLAGLAPWTRQSGKWKGKSFIGGGRGKVRAVLFMAALVASRHNPGLKEFRDRLVAAGKPKIVALVATMRKLLTILNAIIRDAKPWQNA

SEQ ID NO: 162654 - protein, 492 aa, unidentified
MAAEEKRKDADGTDGPAAVPGGHGGDGAEVSEDQARVIERAAAIDVAKGFGMVCTRVPGSRADRRLQKVWRVEATYRAVVALMDHLRAEGIQRLVLEATSDYWRIWYYLAEAAGLEVWLVNARDVKHLPGRGKSDRADCVWLCKLNERGMLRRSFVPPRAVRDLRMLTRTRSRLAQDQARHQARVEKILEDALLKISVVISDLFGTSGRRFLDALVAGERSPQALAALGDYRLKATREELAEALTGQFRDVHALEIKTHLAILDVINEQIGRLDEAIEAQLALVPRTAPACTSCGEIGGGHAPGCAGEHEVLLSLAERLDEITGVGIINARVMIAELGTDPSQFPTPGHAAGWARLTPRTRQSGQTVKPGRTGKGNSYLRGALGQAAMTAARTDTRLGAMYRRIARKRGKQKAIVAVSRVICEIAWILICDPGARYAELGADYYAPRSRERRTRDKIRELQRLNPGTKVLLVPAGGAVPAGQAAVPDAGTAA

SEQ ID NO: 162655 - protein, 400 aa, unidentified
MRTVFGIDVSKASSEVAILVNGEKIHGYTMLNDAIGFNRLLNDLKTVHNPEIIFEATGVYSRRLRAFLEEYGYAYTQLNPLEAKKQLDSLRVRKIDKIDAEKLAHSQFILNRKPTYAQEEVYQHLRDLSRFYQNLTEDIVRAKNRLHKVLQVTFPELENLLSTPTREQYWNLVMAFPCKEFVLSLSQSNLCEIIRQSTSKRISEKRIAYLTDKLIKLAKQSFCAVKKISPILEEVRYYAQELLRLSEHRQVVLDDMVALAQPLPEYDILRSIPGIAETTATSIIGELGDIRRFQSTNQINAFIGIDLRHYESGNFLAKEHITKRGNPYARKILFKCIHNIASASHTNPCHIADFYEKRKRQSTIASTKPHAIASIHRLIRTMYYLITHNKLYDYSLTQNR

SEQ ID NO: 162656 - protein, 362 aa, unidentified
MQVRHIFVGIDLGDKNSVARMAVDREKTERLGFVNNRQGRARLLREAKAKAAQAGGAKIVMAYEASSCGFVLSDEAEAAGIECWVLAPTKMEKSVEQRKHKNDDRDADDVVEKLRGHILAGNRLPTVWVPDPQRRDDRELIRTRLELTDKQTQIKSQIQMLLKRHGMEKPSGLGAGWTIGYRRWLEALQESDSLGCGSRQALSRLMRQLHFMEAEIERMQKPVERLAGEPRHKPIIDELIQETGVGLLTAMVYRTEIGYAGRFRRGRQAGKFAGLTPTSHESGQQNDRKGHISRQGPPRLRKVLCQASWVHVRHDAGARQIYQQLVLRNPKKKKIALVAIMRRLAVRLWHRMRKIELQLAEA

SEQ ID NO: 162657 - protein, 349 aa, unidentified
MSEAYDGPQVVGMDLHRRRSVLVRMTADGRKLETARIANSPAGLRGVIARAGKRPKVVLEATYGWYWAADTLAAAGAQVHLAHPLGVKAFSYRRVKNDEKDAADLAGLLRMGRLPEAWIAPAEIRELRELTGYRIKVVRLRTSCKDQVHAVLAKLGIEVTCSDIFGVAGSAWLDGLELPQPYAGKVASLRTLAAELTAEITLLEAAIADLLAHHDGYHAVQALPGIGAVLAAVLVAEIGDITRFSCPARLCSWAGLTPRHRESDTKVSRGHITKQGSPLVRWALVEAIQHVPAGHPLRQRKEDILARRGDQAKHIAKIAVARQLLTWVFYAMRDGQVRALAPATGQQAA

SEQ ID NO: 162658 - protein, 385 aa, unidentified
MSSKAFVPRDYDVFAGLDVDKKSISVTFTNHQGFIRSLHMPYSVEHLVNHVRKHFPDQKVAFAYEAGPTGYGLYDGLVANSYPCLIASPSMIPKAPGQRVKTNRIDSVGLAENLRGGQLKSIHVPSPVYRELRHLTQLRDTFVSEMVGMKQRIKSLLLLEGIGFPPAPAGSQWSFMVKAKLRKLPCSGTVRFKLDELLDSLEFNEKRVVKTTQQIRRFCQTDPELSRCMKYVMSVSGIGSIVASQLLARIGDWRELKNIRQLGGFLGLVPTEHSTGDRTDRGSITHTGDGRLRSKLIQASWSAIRQDSELREFFASVCKTHARHLASRVAIVAVARKLSVRISVVLMKQRPYVVREKVQSAPLTQEETSPQGTTRRQAEPGNKNS

SEQ ID NO: 162659 - protein, 316 aa, unidentified
MTDNSMICAGIDVGKSHLDIAIHPGNARLRVTYDTAGLKALDAFLQQHDVSRIGFEASGGYEWRLMVHLRAGKRPAARLQPAQLRFFAKSRLRRAKNDRLDAALIALFTASLEQLPALPEARFDRLAAELTYLEQIEQQIALVKTFAETALSEAVKRRHTREIARLETCRKARLLRLEKTVRDDCDLAQRLDLLISIKGVGLRSALCLIIRLPELGHAGRPEIAALAGVAPYDDDSGKHHGRRRIQGGRERLRKSLFMCAFTATRHNPDLASFYARLRSNGKEHLCAVIAVARKLIILANAILIRKTEWTPQYRQI

SEQ ID NO: 162660 - protein, 433 aa, unidentified
MKLPHPYDLIIGLDRSDKKADLCLLDTRTDQHQSITIDTSPEALWEWLLQLRQQHPQARVALCLEQPAGHLIAFLESYEWISLYPLNPITLQKFRETFVTSRAKDDAKDAFYLAQLLYSHHDKLKLWAPEDSATRAVQQLVFHRRSVVDERTGLTNRLQALLKQYFPQALVLCGEDLWRPLATRFLLKWPSLEAVRKAKPATLTQFYYLNGSRSQKLIDERLALVQKAVPVTDEQTIIHSFALRVQLIARQLQLLQQTIANFDQQIALAYQQHEDHAIFHSLPGAGPTLGPRLLGSLGSQRERYARAGSLQSYTGVAPVTKKSGGSCYIHRRYLCPKFHKQSFHEYAKESILWCRWAAAYYLQQRTKGASHHTAVRALAYKWQRIIWRCWQDRTPYSDQIYEAALRRRNSPVVKLFDKVELGKSPMKNPAKKI

SEQ ID NO: 162661 - protein, 346 aa, unidentified
MEHYVGLDVSLKLTAICIIDRTGKIEREGVVASDPEAIATFIKLHAPHVVRIGLETGATSTWLWTELNKMGLPVICIDARHAKAALKMQINKSDRNDAVGIARIMQCGWYKEVRVKDLDSHATKALLVSRALLVKIKRDIENQIRGLLKNLGLVIGRAKMNTFAARAAELAQDRPELAAAVDPLLKAREAVEQQILDLHRKVLRLARNNARVRRFMTVPGVGPVTALCFLATIDDPARFKRSRSVGAYAGLTARRYASGEIDWTGRISKCGDKMLRSYLYEAANVLLTRVAKWSALKAWGVRLAKRSGLRKAKVAVARKLAVILHRMWIEGTEFKWSSKEAANQPA

SEQ ID NO: 162662 - protein, 334 aa, unidentified
MWHVGIDLHRQTVVIAAVDDSGTAHAPRRFECRDCEALTTEMRSLQPFRAVIEATGTYRWLYDLLSPLGTVLLAHPLRLRAMVQRRSKTDKLDSQLLANLLRINQIPLAYIPPANYQQLRELMRHRARLSRQAATAKTQLRSLLARHNMQSPHRFAFGVRGCRWLSEQDFGRTDNLVRDELLLRLVHYRKQLTLIDNQLEQLRIEFPQVEALLDIYGIGLYTALLVIGELGEVHRFRTARQVGSYAGLTSRVRQSGDHCYQGAITREGSPWLRWILVEAAMRVIREDPPLKKFYQRIRKRSGAKKARVAVARKLGEICWKRLVRWEKQQLSLVA

SEQ ID NO: 162663 - protein, 351 aa, unidentified
MTRKTDAVVASTIGIDTGKNTLHLIGLDDKGAIVLREKLARGRIAARLANVPKCLIGIEAGMATHCVARELIALGHEVKQVPPVYARPFRQGHKNDFRDAHAVAEAVQRPSTRCVPVKTDDQLDLQALHRVRSRLISERTAVINQIRGFLLEHGIPVRQGLRFLRQQLPDILAKRIDVLSSRIIRIIEDLSGDWRRLDERIENVTEEIEGLAHGTEGCRQLMTVPGIGPIIASAMVAAIGSGTAFARGRDFAAWLGLVPKQMSTGDRTILGRISKRGNRYLRTLFMQGARVILLRPANWAKHSFGPWLAAAAKRLHHNVLATAVANKLARIAWTVLVQARSYETRVTSEMA

SEQ ID NO: 162664 - protein, 345 aa, unidentified
MDKIIRIGMDTSKHVFQLHGVNAGEKPVLRKKMRRKEMIDFFTTCPPTLVAIEACGGSHHWARLLTSFGHEVKMIAPQLAKPYVKRNKNDAADAEGLCEAMSRPTMRFVPVKTVDEQAALMLISVRTRLIANRTQLANAIRGYANEFGISAAKGLAHIPLLLEKVQADGTVPELAQELFMSQAEEYAQLEKKIADVEAKVKAWQRNDERSIRLNTIPGIGPIGSALLIMKTPAPELFKSGRQFAAWIGLTPKDHSTGGKLRLGGITRAGDEALRAVLVAGATAVIHHARRSGKASRWLAELLKRKPPKLAAVALANKMARVAWKLMVSGETYSAQSGPALTGCVA

SEQ ID NO: 162665 - protein, 318 aa, unidentified
MKMAKPNIISAGIDTSKAKLDIAVHGGSSAFTVTNDEAGWKLAAVQLKRGGVSRVGIEATGGYERGVTRFLQKSGLTVIVMQPVQVKAFAKLHLKRAKTDRIDALLIAACTHVLDAGNKLPTDARFDALADHLTFIEQLEEDIVRIRTRLEHIYDKRLRRVVQADIKRLEKRSAEERQRLLAALRQHDDLAARFDLVESIPSIGERTALCIVIRMPELGRVSREEIAALAGLAPFVRQSGQHKGQAHIGGGRAKVRRALYIAALPGAFRWNPELKALYHRLIARGKCHKAALTACARKLLIFANTVAARRTPWLAIRS

SEQ ID NO: 162666 - protein, 355 aa, unidentified
MKYYTSTTEFNCGIDLHARQMYVCVMDRQGKKLVHTNVLNNDFKYFLKLVEPYKHDLTVCCECMFGWYWLADACQAAGLTFVLAHALYVHLIHGGKNKNDRVDSEKLTHLLRSNLIPQSYVYPADKRPLRALLRQRIFYVWRRSELLARIYSHQLAHKRTPAKQTRRVRDSWEEQLLAAEDNPLRQIALKNDLAMIRHFDHQIFQLEEQLQRQTKQVACREYALLQTVPGIGETLGLIILYEVGDINRFPTVKDFLSYCRLVKGTVASAGKIKGLRGAKLGNPYLRWAFGEAAVIAKRDHFRIRPLAQRLEAQMGGNKIKANTVVAIKLARAVYFMLKKKTVFDPERLIAALAKK

SEQ ID NO: 162667 - protein, 343 aa, unidentified
MSVVRPLLGSCPEQMMGSKSRMQGKDRSEQETKTKSSVGIDVCKLWLDIHILPSEEAFRVPNTKAGSNEIIRRLAHRDVQLIAIEATGKWHRDLHRHLADRGYPVRVVNPLRARLFAEAMGLLAKTDRLDARMLAIFAGSLTETRPPAPEIIEALKELVQARSTAVEEQTSLTNQFKSATTVFLRRQLKLRLTQIAKHIKALEKESLKRIKGEPGLARRYDILVSIPSFGDVVAMTLLARLSELGSCNDKQIATLCGLAPWPDESSDRVGARHIRGGRQLIRNILYLAAITAKTFNPPLKAFFTRLTANGKAKKQALVAVARKLITILNAILRDRRPWQPIPA

SEQ ID NO: 162668 - protein, 391 aa, unidentified
MIFVGIDVAKDKHDCFILNSEGTVLADVFTIANNRIGFETLLSRIQSCSQGESKIKVGLEATGHYSYNLLGFLLDSGLATYVINPLHTNLYRKSLSLRRTKTDRIDARTIAMMLMSDVDLKSYSNTAYHNEELKSLTRYRFDKVKERAKLKSSVARLVNILFPELEKLVSSLHIAVVYALLSNYPGASYIANANTEELAETLCTASKGRYTKSKTAEIQVAAGVSIGSKMPAKSMELKHTIALIRELDKEISEVESAIDKITSQMDSPIFTIPGIGRHMGAMILAEVGDFSNFASADKLLAYAGLSPSTYQSGQLQNCYAHMEKRGSRYLRYALFNAAKYVCLWCPTFSAYLEKKRSEGKHYNVALSHAAKKLVRLIYALEKSRQPYRRAA

SEQ ID NO: 162669 - protein, 367 aa, unidentified
MKKISTATAHAIRKVESQRLTIGLDLGDRSSWYCVLDETGEVLLEQKLSTIPKTMREVFGEMPRSRIALETGMHSPWVSRLLSELGHEVIVAHARKVRLIGESRRKDDRLDARTLARLARIDPQLLAPVKHRSAKAQADLTVIRARAGLVRARTSLINTARGLTKSYGERLRGCNSRNMKPEKASGLSPELQAVLEPLLAGIESLSEQIREYNEQIEHLAQESYPQVALLKQVKGVGTLIALTYLLTLEDAHRFRKSRDVGCYLGLQPGRRNSGESEPQLHISKEGDPYLRTLLVQGAHHILGPFGADSDLRRWGLKLAERGGKNGKKRAIVATARKLAVLLHRLWVSGEVYEPLRNSSQAMLPAAA

SEQ ID NO: 162670 - protein, 349 aa, unidentified
MRADKKRGKKKGCKMNSIIVGIDLGDRESLTTVLSPIGDVADRFSFSMNEEGYAFFASRVPKDARIAFESTIMAYPISRALRTHGYNDITVAHPKTLTWIVRSKKKNDRVDSLKIAKLHMAGMLPESHLLSRDEQIVRDLLVQRVKLGVEIGRLKNSLIGYLKREDIYNSLPKTKDNFSVRRRRAIHSLRFDDKRDLILRTMMDRLEFLERQCIPLEDSVRENARVSDDVRLLMSITGVDYYLASLLSSFIGDVERFPSDDHLASFFGIVPTSRDSADVKRRGKMTKDGSSIARWALSVMVDTVMQHNAPIREHYQSVKKRTGSGKLAHVSTMRKLTRMLYHMLKTKQH

SEQ ID NO: 162671 - protein, 340 aa, unidentified
MTIVMGLDRHRAQITAEWIDTETGEIGRTRVRPADRAGVRRFLGRFGGQQLEAALEATTGWRFVVQELQAIGAHVRLAEPAETAARRGRKKRPKTDRADARHLRELLMVDRLPESWIAPEHILDLRARARLRHTLVDQRGEWQQRIHAVLYHHGCPHHHGVGLLTANGRAWLDGLGLPSTAREQVTVALRMIDMLDVQLAPIDKELRAYARRQPGCRALMGHYGIGHLTAVTILAELSDARRFSSSRDAVRDAGLDITVKQSDRRRAPGHLSRQGPPALRWALYEAAQSARRHSSPDRDYYQQAAERLGGNRACLAVARKLLKRSYHTLRELGDEALQPA

SEQ ID NO: 162672 - protein, 406 aa, unidentified
MPVYLGIDWSQDKHDAVMLNAAGSRLAQVTFPHSPEGFSRLEATRHVLGVRPQECLVGLETSHNLLVDFLWDREYSQVYVLPPKMVQRSRERYRLSGARSDPSDAFVIADVLRTDRGRLQPWFPDTLLTRQMRAKVSLIDHLTASTVRLSNRLRAVLLRYYPAAVYVFSELTTPLALSFIQTYPTPEAAAGLTFTEFQAFARQHRYPRPRALVKPFARLQAPHPEANPQTILVYQGEAPLLAELVLSMVSAKKEALRELRGLFQQHPDAAIFSSLPGAGDFLGPALLAKFGDDRKRFPSSASVQALAGTCPVTKSSGKWKRVSFRYACDREFRRIAIQWARCSLRQSVWANAYYDRVRPHCRSRSHAYRCLANRWLAIAWKLWQTGQVYIEEYHLRQRALRSLPRN

SEQ ID NO: 162673 - protein, 475 aa, unidentified
MNTKGRKAKKQATNNNKINVLSKEELGSRIAAIEADLKSSTWKDLEVGAKFDKNAKLTFISDDMLIVGCDIGSETHYVRAIDTRGRELSKEAFSFSNSADGFQSAKAWAMQIAAEHDKKQIVLGLEPTGHYWFCLTAWMITNGVSVVQVNPYAVKQTKELEDNSQLKDDRKDPKLIANLVKDGNYGMPYLPEDTYAELRRLSMLREQLTEDRIRNINRLHRELKICFPEYMDAFGKLDGAFTLMVLKKAPFPEDILALGTEGLREIWHEAKLRGRGYSRADQIVRLASESVGLKYGTSGSREAVRCFVEQILYLTGKLDEIEVSLHQKCREIPYAENLLEIGGVGENILAGILAEMGDVSRFDGVKEIQKLSGLGLVACSSGKHKGETKISHRGRKRLRYWLFQAARSAVSHAEEFKTLHVYYTMRPDNPLKKMQSLIVIACKILRVIFAILRTGQKYDPAKMLRDIKHPAVVAA

SEQ ID NO: 162674 - protein, 309 aa, unidentified
MEIVVEIDVSKERLDVAILPQEEVFAVGNDHAGIDELVERLKGIGVDAIALEATGGFETLAVAGLSSAGLTVLVVNPAQVRAYAHAIGRRAKTDPIDAAVIAAFVLATKPEIRPLRDAETQALSELVARRRQIVQMVVAEENRLRMALAKQAQKSIKRLLTALRRELESLDADLDSHIRKSPVWRVREALLTSVPGVGPTTARTLLAELPELGSLDRRQIASLAGLAPWTRQSGKWKGKSFIGGGRSKVRAVLFMAALVASRYNPDVKAFRDRLVAAGKPKIVATVATMRKLLTILNAIIRDGRPWQNA

SEQ ID NO: 162675 - protein, 464 aa, unidentified
MTDKKLWRNRKERKEWARRLQSEDPGLEVVHPHAAGIDVGNGMHYVAVRPDRDPQPVRRFECFTADLHRLADWLRSCGVKTVAMQSTGVYWIPIYEILEERGIQVYLVNARHTKNLPGRKSDVQESQWLLKLHTYGLLNNSFQPPSEIRVLRTYWRQRGEHVHGAATCVQRMQKALTQMNVQLANVISDVSGLTGQTIVRSIVAGEHNPRKLAELSDPRIQASREEVAKSLEGNWRPELLFVLQQEVAMYDTYQQRIAECDQQLQKHLASFADTIPLQPTAEEPKRKKTKPAKNAPRFELRSELQRITGVDLTRIDGIDVMVAQTLVSEVGLDMSRWKTEAHFSSWLGLCPDNRTSGDKVLARGTRRVVNRAATALRMAAVTLMRSRTYLGAQYRRLRTKLGAPKAITAMAHRLARLVYRMLKYGQRYIDKGAEYYEHGYRRQQIEFLRKKAAKLGLQITPAQA

SEQ ID NO: 162676 - protein, 349 aa, unidentified
MELYYVGLDIHKRTISYCRKKSDGRIIDEGRIGSSRSCIDALIGRLGEHWIGGMESTMFSGWVYDHFYRRGHKLRVAHPYEMSWISKSKKKNDRIDAAKIADLLRCGLLPEVVMLTPEQREMRKIMRFRTMMLQLAVKMKNCTSTLLMENGIEYDDRRLHGKHYFESLADEIEGEVPDSVSALLGLSRSAVEYFDAGQKRLIRELANHPSLKDRLALLMTIPGVGIITALTWALEVGDPHRFSRTRHAVSYCGLCSAQKESAEKSNRGPLSKQRNSRLQTVLIEAAKLAPRFSPALREVHDRELTKGNRNRATVAVARKLVSYLLYVDKNHKEFEPILNSNSSPVLASQ

SEQ ID NO: 162677 - protein, 364 aa, unidentified
MEAYVGLDTHSKRSVYVIANHAGDVIARGEVPTTPAGLSRLRSEHGLAAGTPVALETGTLAFFVARQLQALELAPVVIDAHEVRLKAYRPQHKSDRRDAEELCEGIRRGIYRTRVHVPPIAIAQLREYLSRRRHFVRMQTSEVLAAKRLLRAEGLGHLTRSGLRSDVGWQKLLATVPPGLLLAHVERHHTVWQAAHAQVLAIEDLLVPAFAPFTEAVRRLQTIPGVGPIVALTAIAVLSDASRFPSAKHAASYTGLVPSTYQSGSRDAHGHITKRGSGELRAMLCEAGHQAARIENPLHPYFAKLTARCGYKRAVVAVAHRLCRIIYAMLRDGAEFDIGKIGVEVGPFTQTIKRLYRLQPVRRL

SEQ ID NO: 162678 - protein, 353 aa, unidentified
MQKIYIGVDFHARQQTICYLTTDSGELVLHQLKHQDKAAVRAFYAQFSGDVIVGLEASGYSPWFERLLEELGCEVWLGHATEIRRRARWRHKNDRRDAELILELMLHDEFPRLYLAPLQSREVLRMLRYRQKLIKIRTIGKNSLQALALQAGLAKGPHLFSKAGLQQLRQASMSAAMQWQREQWLQLLEPLDARLLETRLWLKQQSHADQRISRVRTHPGIGLLTALCLVHSLEPVSRFANTRKVTAYAGLDPLERSSAQRQRFLGISKGGSRVLRFLLVEAAHTAIRKDAELRRFYQRLAERHGRPKAKVAVSRKLLIRAYIMLRDEIDYAEFQRRAVAARLARQSSRPPCL

SEQ ID NO: 162679 - protein, 393 aa, unidentified
MICVGIDVAKDKYDCFILSSEGEVLADVFTIPNNAEGFDTLLQTIRRCARPEDKIKAGLEATGHYSYNILGFLLNEGLDTYVINPLHTNLYRKSLSLRKTKTDRVDARTIAAMLMSDVDLKSYTDTAYHNEELKSLTRYRFDKVRERAKLKQSVSRLVTILFPELEKLVSTLHTASVYALLSEFPGAKQVAGAHLTHLKAALYDASKGRYGRDMATTFRDAARCSVGSVMPAKSLELRHTIRLIHELDAEIEDIEAAIQSMMDEIQSPITTIPGMGVRMGAMILAEIGDFSRFDSPDKILAYAGISPSTYQSGQLSLSGAYSHMERRGSRYLRYALYNATKYVCLWNPTFAAYLAKKRAEGKHYHVALSHAVKKLVRLIYALEKSKRPYSTAA

SEQ ID NO: 162680 - protein, 338 aa, unidentified
MKTYAGIDLHSSNSFIGVINHKNERLHSRRYDNNLKTVLKVLLKYKRSLQGVVIESTYNWYWLVDGLMENGYKVHLANPAAIQQYKGLKHRDDKKDAFWLAHLLQLGILAQGYIYPKKLRSVRDMFRRRMMFVKQRTTQTLSLQSMIARNRGVEQSASAIVRFRDDFIKQMFDCPHLVSTALHQMETIRFLGKHIEAIESEVETMVELDSAYRGLLTIPGIGRILAMTIMLEVGDIRRFEKVGHYSSYCRCVKAQSLSNGKKKGNNNRKNGNRYLAWAYVEAANHNKRSCSQARKFVERKIAEKNYTVAIKALANKLSKASYFIMRDQTTYDPALLFR

SEQ ID NO: 162681 - protein, 318 aa, unidentified
MHNTINGATSTNKFFIGIDLHSTNAVVCIKINQLNQNGQIAGKKIWQGRISIMDGSDRLIQILEPYCNDTNHIAVVESTYNWYFLADAFESRGWKLNIADPSTVSQANLKSSDDYTDAEYLAERLRTNSLKHYEPLNKNTRAVRDQCRYRMDLMQRRASCKIKLVNLYRNHLSKKISADNLFKRIESHLTETFLIAQDLFKEFTNENTRREVAMELEQIGLLNRQIQELDERIRADCKENELAALCRSIPGCGPVLSSIVSSEIGKIERFATAGNFVSYCRLCPTSKLSNGKSKGLGNAKNGNAYLSWALTEIATLCV

SEQ ID NO: 162682 - protein, 428 aa, unidentified
MNCNTQNAKIASITEKTLIVGIDVGSETHYARAFDWRNYEYTKKPLEFSNTEAGFQTFKAWMEDMAAKHGKTAVIPGMEPTGHYWFALGKFLQDSGMRPVHVNPHHVKKSKELDDNNPNKNDRKDPKTIAALVNEGRFSYPYIPTGIYAEIRSLSNLRFQTQEELTRIKNRIARWFSIYFPEYKDVYGDLKAVSGRMVLKAAPLPEDIRKPGAEGVNQIWRDAKLRGAGMKRAKTLVSAAEHSVGSKEAPEAARIELRNLLNDMDVYAARLEELLHGIEEKLKGIPYVDKLMGIKGIGLVTVSGFIAEVGDIGRFDNPKQPQKLAGYAIVSNDSGKHNGESRISYRGRKRLRYVLYEAAISLIGKNHEFKEIHEYYRAREKNPLKKMQSVIAVACKIIRVFYTILTKGVEYDGNRLLGDIRRPQVQAA

SEQ ID NO: 162683 - protein, 289 aa, unidentified
MEYIAMDVHKKYTWARVENERGDKLYECKLSHSHGTIENFVKRWTAGSGVAVETVGNWYWVVDEIEAGGGKPQLVNARLAKLMMGMVNKSDKLDAKGMNRLQRTGTLPTVWIPPSSVRDARELPRTRMVLSKQRTQLKNRVHATLGKYGFVVEGASDAFGKRGREILTELMAKLPPHTEQALGRVLDQLDHVCENLQWIEEKMIEVFVPCPQTLWLKSLPGVGDILAVVIWTEIGTIERFSRAEQLASYSGLVARENSSGGKIRFGPVRRDVNVYLKWAFVEAPLCQYE

SEQ ID NO: 162684 - protein, 326 aa, unidentified
MQGKESSERETKAKSNVGIDVSKCWLDVHVLPSGEILRVPNTPEGIRRLKRWILRFELALVVIEATGKWHRLLHRSLHASAIPVSVTDPYRVRMFAKAQGVLAKTDRLDARVLAQFAAVMAPTVRAPASEVMQELAELVRARDSAVAEETALKNQLSAATGRFLKRQLERRIGRIAKDIAALAKEILAQIAADEVLARRYAILTSITGFGPVVAATLIACLTELGTCGRRQISLLAGLAPIADDSGERRGIRVIWGGRPPVRRSLYFAALAAARHTPAMRAFYLRLTANGKSAKLTIIAIARKLVVLANTLIAQDRLYARQPPKHA

SEQ ID NO: 162685 - protein, 371 aa, unidentified
MFGDQATFHQKGGTPMNYVGIDYHKKYSHVTAINEEGSVIRSKRLENKPEPFQEFFKRLEGPSEAVLEASRTWGVMYDLLEELEEVESVQLAHSQKVRAIAEAKIKTDKIDSHILAQLLRADLIPGAYIPGKETRSFKEMIRQRVFLVRMRTRLKNRIHVLLDRLHIPLPSVTDLFGKRGTDYMRGLNLPGVDGEILRENLKLLEAFNTLIKEAEREIEMLLREDPRVKLLRTVPGFGPILAAVAALEIDRIERFISPSKLASYTGLVPSTYASGGRIFHGRLLPMSNKWLKWALVEAAWGSIRTSPYCRVYFENHKRHKGPHTAAIALARRLSEIIWHVLKENRVYEERPFQRQRRTCITATSPAALTAT

SEQ ID NO: 162686 - protein, 458 aa, unidentified
MEEPQEVPADEAHERVWERVAAVDIAKASGVVCTRVPDEDRPGRRKTHVWTVQATTGAVIELGDYLRARQIQVVTLESTSDYWRIWFVVLEAAGLKVQLVNARSVRNVPGRAKTDKKDAVWLAKLTEKGLLQPSFIPPYEIRRLRELTRLRTSLVHDKSRYWARLEKLLERAQIKISAVLSTLDTDTARAMIEALIAGQRNPRVLADLAIGKARAKRAELAVALEGRWEEHHSIQARILLDNIDALNRQAEQLTGTIGELISQIPAAWGIDADGSTGPHAGTGPDAPVLPAIAQLDAITGCGIIAAQAVIAEIGLDMTVFGTPGRLVSWAKRCPQTRQSGKKTSSGKAGKGNPWLNGILGEIAASASRTDTFLGERYRRLARRRGKRKAMVAISRSILVIIFCLLSDRSARFCDLGPDFYDTQLNRDRKIRNHIRQLQALGISPDDLAALLTKNPPAA

SEQ ID NO: 162687 - protein, 356 aa, unidentified
MSHDVKYIGMDVHKEAIVIAVQNESGKLVMESVIETKASSILQFLHGLRGELHVTWEEGTWAAWLYDLLQPHVQHIVVCNPRRNALLKEGNKSDKVDAGKLADLLRTGMLRPVYHGENGLRTLRELGRSYQTISKDLTRVMNRLKALYRGWGIPCAGTQVYAARAREQWLSKIPHTGVRRRAELLYQQLDGLQALRRNVRPELLAESRKHKAAKLLRQIPCIGPIRAARLIGLMQTPHRFRSKRQLWTYSGLGIETHDSAQYCFVRGQVQRSKKPQQVRGLNRNHNHEMKEIFKSAATRASCGRGPFHDFYTGLLAKGMKPEMARLTLARKIAAITLTLWKKEERFDVEQLKTQAA

SEQ ID NO: 162688 - protein, 419 aa, unidentified
MTRKEDSRILGIVHPICCGLDVHKEKVSACVISSDRKGNEQIVIKEFETFTDDLIDLRGWLLDLGCPVTAVESTGIYWRPVYNILEGYMRVVLVNAREIKNVPGRKTDIADSKWLAGLLRYGLLRGSFIPEIEVRQWRDLTRLRKKYVLSIGDYKRRTQKLFESANIKVDSVVSDLFGVTGRNLMNLLSSNRQAITQEEVASCVRGKLKGKEDELYRSIQGFFTEHHRFLLKTLLRTIQSLESDVARLEKRISVAMKPTDDIADRLQKIPGISETASHDILSELGPNLATFSNASSLASWAGLCPGNNESAGKRKSGRSPVRKHHLKTIMVEAAHAAVRKNGSYYKDKYYRLKAKCGARKAIVAIAHRMLKAVYYIIKEGATFIDLGESYLALRNKERKLKYIRKQAGLLGFQLIPENA

SEQ ID NO: 162689 - protein, 346 aa, unidentified
MEQISRIGMDTSKRFFQLHGVNAAEKVVLRKKLRRKEMVAFFEKLAPTVVGIEACGASHHWARLLRSFGHTVRLMPAQLVKPYVKRGKNDMADAEALCEAMSRPTMRFVPIKTAEQQAALMLVGLRDRLIRNRTQLSNAIRGYAAEFGFTAAVGMANLRPLLERIQADEGVPDLARELFATQAEEYAQLEEQIAEISAKLMAWHKANECSRRLAKIPGIGPIGAALLMMKTPAPELFRSGRQFAAWIGLTPRDHSTAGKVKLGVITRAGDEALRAVLVSGATAVIRHAVGCKGRASPWLIDLLKRKPPKLAAVALANKLARIAWKLMVTGETYVATSAPIASAATA

SEQ ID NO: 162690 - protein, 299 aa, unidentified
MLIIGCDFHPSFQQIAFCDTTTGECGEGRLEHGGEAEALYRRLQGQAVRVGMEATGGTRWFERLLADCGIELWLGPPGKIRAAAPRKQKTDRRDAELLLDLLLQQRFPRLAVPSPEQRNLRQLVGHGHRLVQMQTRVKNQLQALASNEGLRLRRGRWSRKGQAQLQALTLPRWAEQKRCDLLELLADLQRRAAVLDQAVEAAAQASPVVRCLRRQRGVGPVVGLAYELTLLDPTRFQSSRQVASYLGLIPAEHSSGGKQWLWGTSASRAMLCCAACWWERRTWRCAGSRSGGASTCVWR

SEQ ID NO: 162691 - protein, 395 aa, unidentified
MFIVGIDVAKRSHEVCMITSDGRTVQRPFSIRNNCTGYNLMLEKIRKHTNIKSQIVFAMESTAHYWLALFTRLRKDGYHVILLNPIQTSAMRDMFIRKIKTDAKDSFIIAELIRFGRYAESNVAQDRLLALKELCRNRFYLVDMAGDLKRKLIALIDRVFPEYEAQFDTIFCKSSVALLKKYPTPQKLSNAHLDKLTELLWNSSNGHFGEWKARELKELARNSFGVEDCDGAYSTLILLMLDQIQSLSGKADALEKEISRLFQSFDTTVTTIPGVGPIIGAVILSEVGDISRFSSADKLAAYIGVDPSVNQSGEFQAVHAHMSKRGSPYLRRCIWMASQVAVQRDPMFRAYYEKKAAEGLKYMTIIGHVTRKMTAVIFAILRDHKVYEPVLPTAA

SEQ ID NO: 162692 - protein, 450 aa, unidentified
MGLQTINPHAAGIDVGSEQLYVAVVDGSVQVFEAFTESLHALRDHLLAAAVKTVAMEATGVYWIPVCDVLEAAGIEVCVVNGAHVKSLPGRKSDMEDCQWLAKLHSHGLLRGGFVPAPLIRRLRDYQRLRQDHVRMGSAHIQHMQKALDRMNVKIHDVLSNLTGMSGLAMVRALIEGVRDPLLRLDLGDVQVVKRKREPRLKALRGNWQRAHVFALQQALAGWEFYQQQIEQCDAETALVLQELAAAAPPPAPPASPGPAAAPPPPLAPAKRIHHNAPHIGDLKTLLVRITGGHDLSALPALTDYTVLQLLSEIGTDMSRWPTVKHFTAWLGLAPSSRRSGKRRRREKRFRGRAAQILCVGARSLARSKYLALGGFYRRLRAIRGPQVANIATARKLAVLVYNTLVHGLDYVEQGLERYEATYRAQCMKRLERNARDFGLTLVPLSHQNA

SEQ ID NO: 162693 - protein, 354 aa, unidentified
MKRTTKYVAFDVHQATTVASVREESGRVIARSVLPTDSGALTEFVRGMRGARHVTFEEGTQAQWLYELLAPLVDRVIVCDRRGAPRQGNKGDQVDADQLSELLRRGALRAVYHGSADRVTLKELTRTYRNLVEDATRVMLRLKALFRARGIATAGTAVYHPRHRARWLAQLLEDGARFRADALYAELDVLRKLRPKAKAVMVTEARRDPAWRVLRTIPFLGPVRVALLLATMQTPWRFRTKRHLWAYAGLAVVSRSSADYTLVAGAPVRRRRAPMTRGLNRNHNRVLKDVFKGAATAATARPGPLQDFSHRVIARGTREELARLTLTRKLAALTLRLWKKGERYDPIKLTTPAR

SEQ ID NO: 162694 - protein, 407 aa, unidentified
MEVLYRRCAGLDVHAGSVTACVRIAVAATVTYEHRTVSASTRGLLDLGQWLTAHGCTHVAMEATGVYWKPVWHVLENDFTLILANAMHIRNIPGRKSDMNDATWIADLLAHGLIRSSFVPPAPIQELRDLTRTRKQLMREIGRHTLRIQKTLEDANLKITRVVSDILGASGRAILTALVAGETDPERLTDRTGGRLKATRAELVDALHGRVTSHHRVMIQLHLTQIDALDAAVRDLDARVGDALGPFRAAVSLLKTMPGLSDTAARVLVAEIGTDMTRFPSAAHLISWAGVCPRLDESAGKRRSTRIRQGAPWLKTTLVTAAWAATRKKDSYLRAQFLRIKSRRGAKKAILAVANSMLTAAYYMLRDGVEYHDLGSQHFAHRDKDQMTKRLLQRLRDLGVVVEVKAA

SEQ ID NO: 162695 - protein, 441 aa, unidentified
MNIQANIKRITPTTIIVGIDVAKENHYAQITDCHGLALVKPVKVHNSINGFENLLSKTKELAERHGCDQVMIGMEPSGHYWRALGWYLMLHESKPVVLGVNPYHTKQAKELDDNSQTKSDPKDALIIAHLIRNGNFYDTYLPEGEYAELRQLNTERQRIMKQIVRTRNILIALIDEFFPEYATVWESVTCQASLEFLKTYAFPSDIMSVSKSKLLEDIGEITKGRKNDELLGKIIQAASRSIGVKEGQNAVRMRISNLIDDLLHFDRQKDAIEVEQETVMEALQLGKLLQGMRGVGPVIAAGFIGEIGDVSRFANWKQVRSLAGLNLVENSSGKHKGNTKISKRGRPYLRYVLYMAGEQGCKWNPEMHDYYRCLTERKSNPLKRGQALVAVGLKVMRILFHMAKTGEAYDPSKALGAVRAQQASSLGIAANLPANDGNMVA

SEQ ID NO: 162696 - protein, 412 aa, unidentified
MEVIYQRCAGLDVGKDEVVACTRVPAGAGGGRRQEVRTYKTFSSGLAALADWLADQGVTQVVMEATGQYWKPVWYVLEERGVELLLVNARHVKILPGRKTDVGDAAWLCELLEHGLLRGSFVPPPAIRELRDLTRYRKRLIQAHTAEAQRIHKTLEDASIRLGSVASDVLGASGRAMLRALLAGERDPRVLAELARGRLRSKLPELREALAGRFDAHHALLVRLALDHVEQLERSITTLDQEVDRVIAPFARARDRLDTITGVGKRAAECIIAEIGIDMQVFPTAAHLASWAALCPGNNVTGGKRRSGKTRKGNVWLGEILVECAWAAARSRDTYLAAQFWRLARRIGKKKAAVAVGHSILVIAWHLLDGDCDYAELGGDFFVRRDADRARQRAIAQLQALGYHVTLQPTAA

SEQ ID NO: 162697 - protein, 469 aa, unidentified
MRTYGNKKRHANKKNARRQEKFDVVHPKAAGIDIGSQEHYVAVPADRASQTVQCFGCYTADLRRMAGWLRDCDIKTIAMESTGVYWIPVYEYLEREGFEVLLVDARQTKNVTGRKTDVLDCQWIQRLHSYGLLSSAYRPTREIAVMRNYWRHRSTLVQECAHQIHLMQKALEQMNLQLHKAVTDIMGVTGRMIIEAILHGERNPLTLAKLRHATVKSSESELAKALEGTWEPAHLFALRQSYECYKFLQGQLVQCDDEIEQYMATLRSNAKGETAKPQQGSAPEKSRRGKPKKNQPHFDLRSEQIRIAGVDLTAIPGIDALTAQMILTECGTSVEGFPSEKHFTSWLGLCPNNRKTGGAIYSRRTRKVNNRLATAFRVAAFGMCRSQTAIGAYYRRIRSRVGAPKAITATARKLACIVYRMLKYGEEYMERGADYYEQKYKKKIVKTIAKKAKDLGFQLVELDTGEVVS

SEQ ID NO: 162698 - protein, 353 aa, unidentified
MHEKQKHIYVGVDLHKQHHVAVIINCWQEKLDEIKVENKPSAFSTFLLDIDKLTEEGLTPVFGLEDVGGYGRALAQYLTDHGQVVKEVNPALSYAERKSHETVQKSDSWDAECVARILVRQLSQLPDAKPHDLFWSIQQLVTRRNALVKAQGALKNQLHIQLSHHYPSYKKFCSEVDGKTALAFWERYPSPSCLEGVSIKQLTTFLLEVSHNTCSVKKANEILKLVIEDGNTTKEHQETRDFLVRSIVRDITFKKKEMNYVEGELKELMSLLDFQLDSMPGIDLVTASALIAEIGDVRRFPNANKLARFAGIAPVYFGSGGKGKEQKSKQGNRALHALFYNLAVQQVQVAKGS

SEQ ID NO: 162699 - protein, 370 aa, unidentified
MKKNSSQKQNSGKSNPQREKEGFASYIGIDLGDKYCDVCVLDGQGEVHEQFRLRMKGPELEGYFTSIRRSRVAVEAGGQSRWVAEIIQRCGHEVYVSNTRKVAYIHQSDDKNDPGDAYKLAELVHFKPRLLHPIQHRSLEAQADLSWIRAREVLVESRTQLVNAVRGMSKAFGERLAKCSVESFTAKMAGQVPEAIRKAMAPLLETIDHLNEQIYYYDLMEAHMARERYPKYWLLEQVNGVGVHTALAFMLTIGDAERFAKSRQVGCFLGMRPKKQESGESKPQLGITKAGDVYLRKTLVNCAHYILGPHGKDSDLRRFGLRLCARGGKNAKKRAVVAVARKLAVLLHRLWVSGEVYEPLRNSKAREVAA

SEQ ID NO: 162700 - protein, 333 aa, unidentified
MDTDTGEFQEKRLTHREEAEKIYRALACAGQKVRVGMEASGHARWFERLLAELQIELLIGDAAEIRTKRVRKQKTDRQDAQLILSLLLEDRFPRIWVPSWENRDLRQLLWHRHRMVQARTRIMNQLQAVALNEGLRCKKKLWRERGREQLESFRLAPWASRRRRDLLELLDRLNPTIAELSQAIQQEVEKCPEARRLMTHPGVGPLTALAFVLIIGEADRFQCGKQVASYLGLVPLEDSSGDRRRLGHITKQGSSMLRFLLVEAAQVTARSLPQWRSKYLHLMMRRGRKTAKVAMARRLAVHLYWMMRQGWDYQQWIKFGSHAGQLGNRHGVQ

SEQ ID NO: 162701 - protein, 412 aa, unidentified
MLYSTSIGLDVHARSISAAAFVFETGEVVQRTFGYDPDAVAAWAASLPQPAGCLYESGPTGFDLQRRLVALGLPCHVGAVSKMVRPSGDRVKTDRRDALFLSRLLAVGEFVECAPPTPAMEAARDLSRAREDAREALMRARHQLSKFLPGKGHVWPRGRSTWTRAHREWLRSIELDDPCERLVLEEYVAQVRECEERRDRLDSAIAERSGADDLAGVTSRLRALRGVSTVTAFGIAVEIGDFSRFASPRALMSYVGLVPSESSSGETTSRGGITKTGNSHVRRLLVEAAWHHARPLSPASETDVASSAGLPAEAAGIAARANRRPRRRYLDLRARGKGANVANVAVARELVGFCWALALCGRAAEPRNHPPARAARPRRVGHPAIRLCAARPGLATRDPRPAELPSRSVGMR

SEQ ID NO: 162702 - protein, 365 aa, unidentified
MGKVCRAKQRCLSGADEQRETVTIGVDLGDRKSHICVLDNRGEIMREEAITTSPASFREYFRKLPPAVVALEVGMHSRWANQVLRDCGHEAIVANPCKVKFIFSNDGKNDRVDARSLARLARVDRQLLFPIHHRSEGAQTALSVIRARDALVRARTRLINCVRGLVKPTGARLPVASAECFPARMALRIPPDLRLSTALMLEQTQSLNDAIGVYDQYIEHLVATRYQKARLLQQIPGVGSLTALAFILTLDNPERFSKSRQVGCYLGLRPRQDQSGNCNPQLGITKGGDEFLRRLLVNAAHYMLGQFGPDSDLRRWGLKIAARGGRRAKKRAVAAVARKLAVLLHHLWVTGEVYEPLHNSREEAA

SEQ ID NO: 162703 - protein, 364 aa, unidentified
MTKQLFAGIDLHSNNLVIGLVNQDGQRVRHQRLACDLKLVTDFLQPYRKRLKSLAVESTYNWYWLVDGLRADGYPVQLANPAKMEQYDGLKYTADTHDAYFLADLQRLNILPTGYIYDPQLRPVRDLLRRRLGLVRQRTALMLSFQSLYTRTTGRELNLNRLKSMPAVAAQLLYEHPANRLIAQIQKEHMEQLDQSIGTIEQTVQASARPLPCYGPLTTLPGVGRILGMTITMEMGESSRFKTAGDFASYCRTVDAQRLSNDKKKGDNNQKCGNKYLAWAFVEAANFAKRYDAGCRQWFDRKAARRGKVIATKALACKLAKAAWHVIHQHTSYDPQRMLPGMAPASAPAILESRRQPVKGLEKP

SEQ ID NO: 162704 - protein, 348 aa, unidentified
MKKIVKQVAGIDVAQKELVVCLGKMYEGQDIDLCAYKTFANTAKGFLNLVAWVNKLTDCSVPVRYIMEATGVYHESLAYFLDDQGSELTIVLPNKISNYAKTLDTKTVTDKTASEAIARFGLERKLDCWKRPKKIFKTLRQLSRERGQVIDQRTMSKNQLHAEAAEAYPNKSTLDRVKKLITLLNKQEKEITAEIAEVINREQKLKHSVALLKSIPGVGVLTAAVVLAETNDFELVRNKRQLTSYAGLDVKEKQSGTSVRGKAKISKKGNKYLRKALHLPALTAIRHDQRFKSVFVRLVSKHGIKMKAVVAVQRKLLEMMYTIYKSQQPYDKKYLQNNEEELIQQEII

SEQ ID NO: 162705 - protein, 426 aa, unidentified
MNESTPFACTIGLDWADQKHDLWICPAGSSKSEHLRLDQTPEALHEWVAKLRARFDNQRVAIGIETSRGPVISGLLAYDFIVLFPVNPKALKDYRAAFSVSGAKDDRTDAMLLEEWVRLHRDKLKALEPDTELTRKLAGLAENRRRLVDERTRIVNQLHSALKTYYPLARSLLEGQMTKPMATEFLIRWPDLEALKKTSAQTLRAFFYKHNSRSAPLIEQRLQAVQQAKALTTDPAIVEPARVLVSALAGMLRPLHKALSHLDQQIQHAMDQHPDAALVRSWPGAGPALAPRLLVAFGTHRERFGSATEVAQFYGIAPVVQQSGNTKTVHMRHRCPKFGRQTFHENAACALKKEPWAKCFYENHKNRHDGKHHQACRALAYKLVRIYFRCWKDRKPYQPDQYLQALQKHGSPLHKSLADQPQSPCE

SEQ ID NO: 162706 - protein, 391 aa, unidentified
MTKHKTETVNDFSRCLDPLDMDATLIVVIEMSQSSWLVAGIVPGVERQPLKKLAIDEHALLNLLSRWRAEAEKKGHRITRIAVAFEAGHDGFWLARWLAARGVEAHVIHASSVAVTREHRRAKTDRLDTELLKRGFLGWLRGERGHCKMVAVPTLAEEDAKRPSRERETLVGEASRIITRLKAAFVRLGIRSFNPKLKAAAEHLGTLRTPEGELIPPNTLAALKRDLERHQIVKKQIREIEQMRLEHLAQAPAKGPNVMVLLLARVVGIGVETADMLVQEVLSRNMRDRRAVARYAGLTGSPDESGAKRREKGLARSGNARVRRGMIQLAWRFLMFQKDSALAEWYRQRTANASSARKTFVVALARKLLIALWRLAHDGVVPEGMRLRPAA

SEQ ID NO: 162707 - protein, 345 aa, unidentified
MLTNSLKKTRRFTVSNCIGIDVSKASINVHISKNSQDLVLENSIKGFKSLFSKLKKIYKKEIENIVFIFEPTGSYSEALRKYCSEKEIKCFIINPKQFSNYAKALGVEVKNDVEDARVLSQALPLAIDGQIKIPVFNEDVEHIKELMSFYKFTKKQTTQQKNHLESLTSKDGDKFSIRELKKSIKESQEKELRIIEQVQTLIDSTDEYRVAYENIISIKGVGQIGAIVLLYLFLKYPEANQRQITSLVGLNPIYRQSGTSIQSGYKIAKTGSGLYRSIIFMSVLTAVQYDKNFKTFYERLKSNGKHTTSAQIAVMRKIILTAHSLYKNNRKYDENFNTNQAADME

SEQ ID NO: 162708 - protein, 362 aa, unidentified
MQIIGCDLHARQQTLAMLDTGTGEVVNRTLRHEGNSVREFYSALPGPVRVGIEATGSMKWFLQLMEELGIDCQVGHPATIRAAEPRRQKHDQRDAELLLKLLVEKRFPSIWQPSKELLDLRGLLLHRHQWVRLRTRIQNALQAIALANGLRRGSSLWSESGQRDIASLPLATHTAHRRSELQAMYARFEAEIERLNQQVLEQAVQRPTAELLMTHPGVGPITALATDVFLGDPKRFSDGKALASYIGIIPRENSSGGRQRLGGLSKQGNPLLRFLWCEAAAHAVRRDPELRRFYRRKLVQKGLGKARVAAARKLGIRLWIMLRDQIDYNEFCRRGQMQQKSGDACAGMPGARYGAKSHRLID

SEQ ID NO: 162709 - protein, 351 aa, unidentified
MIPVASDVHTGRCWMAMIPPGEDVKMLEPIECTREAWRQRLAELPPEAEIAREVSTSGYFVMSVLEEAGWRERAHWVHTAGIDSLRKQKSDRLDTRRLVKKLAVHDVDPLPEAWFPPPPIRELRLLARQRCGLARLRAQTKNRVNRLLEMHGLRPQRCVFTAKGRAWIQQQALSAGAQLCFARMFRLYDFLTAERETSEAELTAAAAAFPQVALLMTIPGLGHMLAAVIWSEMGDLARFDSADALLNYTGLVPSSYDSGEVSMHGPITRQGPVWLRWALVTAANPSADGQQESARPALLAFAALPQVAQCGQDGRGGFRRPLRLWSFETRSTFPGRTLGPESRQVGTVNLR

SEQ ID NO: 162710 - protein, 360 aa, unidentified
MDVHKKTITIAIAEEGREKQPRVYGTIANDLDAMNKFCRKMVSTSSQLHFVYEAGPCGYNIYRHLTEKGFDCMVAAPSMIPKKSGDRIKNDNRDAVMLARLHRAGELTAVYVPDAQDEAMRDLTRAREDAVAVAKKAKQRLKAFLLRNRVIFAGKSRWSKAYFYWLSDIAMPYPAQQVALQEYIDAVHESIKRVERLTDQIRQLVPGWRLAPIASALQAARGVSLVVAVTMLAELGDLSRFETAPQLMAYLGLISSEHSSGDNIRRGGITKTGNGHARKVLVEAAWSYRMQARVSRILLKRQQGLPDHVCRIAWKAQLRLCARYKRLVAKGKNKQKVVTAIARELSGFLWAIAKQVQPLA

SEQ ID NO: 162711 - protein, 422 aa, unidentified
MDEVTDEPLYRDRVCGIDIGKAGMVATIRVPSDRDPARRAAETRSFGTTKNQVLALADWLRCWQVPAVVMEATGDYAEGFDCVLADAKQVKHLPGRPKHDPGDSRWLAACFERGAVTPCFVAAPEFRVIRLHTRYRRDLTEERTREKQRAEKLLESAAIKLSSVVTDLHGVTGRDIMDHLIAGERNPKTLAQLARARARRKITELEQALEGAEFFTAEHAALLSAMLGRIDQATAEIGRLTAVIERLLAPYEEQLTQIESMPGWGRRSAQDAIAETGADMARFPTGAHLASWAGRTPLDNQSGKRKGRSKSKKGNRYLAAITGETAVAAGKTQTREGARYRRLARRRGTAKAQVALGNTQLKVYHALLSHPGTRYQDLGHDYYERQRDIRRQIAHHVGKLGALGFEVTLARLPDPEPTDQAA

SEQ ID NO: 162712 - protein, 380 aa, unidentified
MSFNNTIHIAIELSVSSWLVAVRTPGGSEKARLHRIEGGESAALLALITSVRTRESAKSGHSDIGVACCFEAGRDGFWLHRLLTAHGVDAYVLEPTSILVNRRARRAKTDRLDAEGMLRVLAAWLAGDRQVCSMVRVPTPEEEDAKRPHRERERLVQEKQRIENTIEALLFTQGIRGRPSLRSWERDVEALQTADGRPLPPLLRAEIDRLRRRLVLALEQIREVEAERTARQAATFDDTIVQKISALQRIRGIGENFSAVLVREVLYRPFDNRRQLASYVGIAPMPYQSGSMVRDRHIGRAGNPRARTTLIQLAWLWLRYQPGSALAAWFRERVGTLQGRTRRIAIVAMARKLLIALWRYVETGLLPDGVEIRAQADTMA

SEQ ID NO: 162713 - protein, 464 aa, unidentified
MASKKSKHRGKKQIRPLQALPVIRPNTAGIDLGTTEHWVCGPAREEDSANVKIFGTTTPQLYELVDWLIAEGVESVAMESTGVYWIPVYELLESRGIEVVLVNARHLRGVPGRKTDMIDCQWIQLLHSCGLLRGSFRPAEKICALRAVQRQMGNLVEERSKAVQWMQKALDQMNVQVHRAVTDITGKTGMAIIRAIVAGQRSPKILAKLRDKRCKKSEAQIAEHLIGNWRQEHLFNLSWALRLYEHLEKMIASYQRNLIEQIEALQPKVRRNLKVKRHPNATKQKDILRRGEQPMRQALWRLCGKDLTRIDGISAGAALSVLTEVGADLSAFPDERHFVSWLRLSPKMAFSAGKALKKRRNGLGASRVAAILRMCALTLRHSKSALGACYRRTARRHSGSVAVFAVARKLAILIYRMLTYGHDYVDEGADRYEERFHQRRLQTLRFSARSLGFKLVAKAETAAA

SEQ ID NO: 162714 - protein, 350 aa, unidentified
MTTMTEARPVVTGGVDTHLDLHVVAALDPIGGVLGTASFPTTASGYRQLLAWLRSHGQVGRVGVEGTGSYGAALARHLAAEGITVIEVLRPNRQVRRRQGKTDVIDAIAAARAVMSGEATGTPKSHDGAVEALRTLKVLQRSANKARTQAINQLRNLIVTAPDELRTQLRGLKIADLIKVCSHFRVAADDDSLGGIIRLSLRELAQRILFFDASREQIRRRLNRITQALAPELLAVTGVGPDVAAALLMTAGDNPERLRNEASFAALCGTNPIPASSGKTTRHRLNRGGDREANSALWRITIVRLSSDQRSKDYLAKRISEGKSKPEAIRCLKRYIAREVFRALPIQHAV

SEQ ID NO: 162715 - protein, 401 aa, unidentified
MIGIDPHKGSHTAAALNEAEAVLGELRVRSGPAQLEQLVTWAAQWPDRTWAIEGAGGLGYLLAQQLLTAGERVLDVQPKLAARVRLLATSSTNKNDPNDARSVAIAALRSPEAKEVRAEDHAAVMKLWAKRRHDLVSARTQVVCRLHAVLCELVPGGISGQLYASKAARMLDQLEPENAVAAARHELGRQLLEDLRRIDEQMREAKKRIAQAVAASRTTLTEIFGVGPIVAATVIGYVGDVTRFASSDRFAAYNGTAPIEVSSGPREIYRLSRRGNRRLNHAIHMEAVTQIRNLKSEGRAYYDRKLAEGKTGKEALRALKRRISDALFRQLQIDVQRARRSIMGPGGQTGNDSAACVTDSHPDGRLFGEATPEPKTTLRPVATAFRSGRSKTPTRSARRAS

SEQ ID NO: 162716 - protein, 343 aa, unidentified
MTHFVGLDVSQKMTAICVVDNAGHRLWRGQCPTVPEQITVLVHRHAGDEARIGIETGAMTPWLVHELRNLGLEVVCLDARHARGALKMQINKTDQNDAEGLAQIVRTGWYRSVHVKSFESHRARALLGARTQLTGMTTRLSNHIRGVLKTFGLLPGAMRGLPFDRKVEALLLDRSDVALIVRPMLVAWRQLREQIVAFDKAIRTLVKSNSACRLLMSVPGIGVLSALAYVSTVEDPARFTRSRSVGAHLGLTPRQYQSGEVDRSGRISTCGDTLARTLLYEAAVVILSRVKRASRLKDWARAIAKRSGNGKARVALARKLSVILHSVWRSGEPFRWSEHARAA

SEQ ID NO: 162717 - protein, 393 aa, unidentified
MEQLIERVGGLDVHKPTVAACVRMPGVKGTREQHVRTFGTTAAELLALRDWLEALGVTQVAMESTGVYWKPIYYVREERVTCLLVNPAPMKQVPGRKTNVQDCAWIAQLLEHGLLRGSFVPPAPIRELRDLTRYRKVLIQDRTREATRLHKFLEDAGIKLASVATDVLGASGRAMLEALVHGTTDPDVLAELARGKLRAKLPALRQALAGRFRPHHAFLVSQLLAHVDYLDETIATVSERIEVTMAPFAEELARLDTIHGVARRTAEVLIAELGVDMRQFPSERHVASWVGLCPGNNDSAGKHKSGKTRRGNRWLRAALTEAALAAIRTSNSAFAARYRRVMRHREHKKGVVAVAHAILLTVYRLLTRHTTYHDPGTDYYARHHAERVRRRAV

SEQ ID NO: 162718 - protein, 413 aa, unidentified
MEVMYPRCGGLDVHKETVVACVRLAAGSDTSHVVRTFATTTADLIELSEWLEENGCTHVAMEATGVYWKPVWQVLVDSSCFELILANAAQVKNVPGRKTDVNDATWLAELLAHGLVRASFVPEPAIQELRGLLRTRKQLVREKASHVQRVQKTLEEANIKLESVLSDVMGRSGRAIIQALIDGETDPAKLAALAHWKVRASTETLSEALRGRIKRNHRFLLRLHLQQIQALDAGIAEIDREVDDGLACFRDAVDRLSTIPGISQLSAQVIVAEIGTDMSRFATDAHLRSWAGLCPRNDESAGKRRSTRLRKGAPWLKSMLVQCAWAAIRSKGTYLHAQYVRLRGRRGPKKAICAVAASILTAAYHMLKDGTFYNDLGPTHFDRRRPETQARRLIKRLAELGFSVELKSMATAS

SEQ ID NO: 162719 - protein, 373 aa, unidentified
MNVVGIDIGAAQHVAAVCREGKGEAERAVLRISSRRAGFDELDMWMTRQGGVQLVVMESSGHYWMPLASHLRHRGVPVAVVNPLSVKYFAKSRLQRTKSDPADARTLAVLGMTTHPATREPLVGVELREASRFCMTLVAEQAKVCQRIQRLVDLGFPELRDAFDDPTCDSALAVLRQAPTAGAARRKRAATLAQAARPGLRRRAIGARRAEQLKTLAQRSVAPELHIEQADQRVADLLDGDVARWLQTIPGVGPSTAATLLAEIGDIFRFSDVDQLLAYAGVHPREASSGQKGANPETSWHMAKTGNAHLRAALYRMAMVGVRHNPVIAAHYTRKRAAGKSKMNALGHCMTKALALVWGVWRGDRDFDPAHAA

SEQ ID NO: 162720 - protein, 388 aa, unidentified
MKGMNKREEGIRQEKKTPPFERTQIKSAPNFKDRRPIKGAIKKGEPMNYLGVDCHKRKSFLTAMDSGGSVIGRWSIRNDGKELDRIFDKIGHDFEAVLEASSTWPVMYDLLDERVKKVLLAHPLKVKAIAEAKIKNDKIDSGVLAHLLRADLIPEAYAPSKETRYKKCYLRYRSSLVQLQTSVKNRIHAILMRNHVSVEEQDAISDLFGTKGREYLASVQLGGSDNEMLTGYLDLLDFLADKIKLADKRIKEIIKEDELIRLLLTMPGIGPVFAPLIRYEVDRIERFRNCGKFLCYCALVPGLFSSADISRTTGIIKQGNKYLKWAFIEAVSPATRTSVSLRAFYGRIYNKHGHHAARVATARKLAKIAYHIMKDRKPFKEELIKEQN

SEQ ID NO: 162721 - protein, 367 aa, unidentified
MKQYVGLDVAQKETAICVIDEQGRIVHEGKAPTEPGALARLIRKRAPSAELVGFETGAMASWLWHELKRLDVPVVCVDARHAHAVLSVRMNKSDENDARGLAELMRVGWYRQVKVKSQVSQFVRSVLIARARLVSIRRDLENQVRSMLKESGLQFPRAINGRFRIQVINLLGDSHPLRSVIDVLLAVHERVGDEQAILDKQVRQAAKADETTKRLMTVPGVGVVTALAFQHTIDDPARFKSAQSVGAYLGLTPRRMQSGETDRQGHVSKWGDRLLRTYLYEAASVLIHRTQRWSALKAWGVRLMKRMGARKAKVAIARKIAVILHCIWTDGTEFVWGSERKPPDRLRNRIPARSESRAGASLPGRRC

SEQ ID NO: 162722 - protein, 340 aa, unidentified
MQVSIVGIDLGKNSCSLVGLDAVGKVILRRRIRRDGVATFLAKLPKCVVAMEACCGAHHLGRTLVEAGHEVRLMSPEYVRPYVKAQKNDDRDAEAIAEAATRPTMRFVALKSEAQLDMQSLHRVRDRLVGERTALMNQIRGLLLERGLVVPQGKAKLAVALADLLDGDADTLAPRMRTLMRDLREQWRALDERISAFDAEFAETAKADDGARRLLSVPGIGVRNATALVAAVGDAAAFARGRDLAAWLGLVPRQITTGGRPKLVGITKRGSKYLRKMLIQGARAAMPTLRTGDTKIGAWLRGLLARAHSNTVVVALAGKMARIAWALLRRGQIYSAAPAA

SEQ ID NO: 162723 - protein, 345 aa, unidentified
MELHTIGIDLGKTVFHLIGLTQSGEVVVRKKFSRIQLLRFTSNLHVQLIGMEACGGAHFLGRALREQGHEVRLMPAQYVKPFVKTNKSDYIDAEAIAEAVGRPTMRFVPIKTDEQLDMQSLHRVRERWIMRRTAVVNQIRGLLLERGITLRKGRCHLDAALPGILEDAATTLSGAVRFLLLELKRELEQLAIHLEEVEALIQKAADESEACQRLDAIPGIGPLTATALIAAIGNGAAFRKGREFAAWVGLVPREHSTGGKQKLLGISKRGNPYLRKLFVQGARAVLQFREKQSSGLRTWLAQLTSRTHYNVVGVALANKLARIAWAVLAKGELYRPPALAESSAA

SEQ ID NO: 162724 - protein, 368 aa, unidentified
MKQVTTYVGVDAHKKDLFIAMLVGDRTVPVTWQVANEPHTVRRLVRKLEREAPGPVRVCYEAGPCGYALQRQMTTTRVECQVIAPALIPRKPGERIKTNRRDARKLVELHRAGLLTEVRPPTPEEEAVRDLCRARDDAREDLQRSRHRLGKLLLRRGLHFSGRNWTKAHRRWIESLEWMHAPERVVVDDYLLAIDHLEARLIELDAQLTDIAQRDPYREPVGWLRCFRGIDTLTAMLLLAELHDFRRFQSPRALMAYIGLVPGEDSSGEKQRRGRITRTGNALVRRLLVETAWHYQHRPGVGVALTRRRKGQPSRVIAIADKAQQRLCRRFRRLADQHKPAPKIAVAIARELAGFLWAALQPAAEPAT

SEQ ID NO: 162725 - protein, 373 aa, unidentified
MAGSREAFVGIDAAKLRNAVAVADEGRDGEIRYLGEFDAAPESMRRLVARLAAKYDRLHFCYEAGPTGYGLYRLIVSLGHSCTVVAPSLIPRKPSDRVKTNRRDATTLARRLRAGELTAVWVPDPAHEAMRNLVRARTAAVETVRVHKQQVGAFLLRHGRISPLKKSWGARYRRWLQEQAFEHPADQIVLQEYVEAVRLAEERLGRIERAIAEFLPGWSLAPVVEALMALRGVDLVVAVSFAVEIGDVRRFESPRQLMGYLGLVPEERSTGETVRRGSITKMGNARLRQLLVESAWTYRHPPRVGKGKLAKIERVPPKVREIAWKAQSRLTARFRAFAARGKKLTVTCTAVARELAGFMWAVAWEVQPASSVA

SEQ ID NO: 162726 - protein, 345 aa, unidentified
MQLHTIGIDLGKTLFHLVGLNQRGEVVVRKKFSRKQLLHFTANLQVKLIGMEACGGSHFLGRALREQGHEVRLMPAQYVKPYVKTNKSDYIDAEAIAEAVERPKMRFVPIKSDDQLDLQSLYRVRERWVMRRTAVINQIRGLLLERGITLRQGRRHVDEALPGILEDASTKLSGAVRLLLAQLRLELDHLQMRIDEADAVIQKIAGENEACRRLVAIPGIGPVTATAIIAAIGNGAAFKKGRGFSAWLGIVPGEYTTGGKQKLLGISKRGNSYLRRLFVQGARAVLQQSTKQSSGLSAWLAQLTSRTHRNVAAVALANKLARMAWAVLAKNEPYRPPMLAVAATT

SEQ ID NO: 162727 - protein, 319 aa, unidentified
MNYLHFFGLDVSKGWFDVAIAGSASRPRRFANSAEGIAAFLQEFAGELPSSLVVLEATGGYETALIVALVTHKIAVHRAAPWQAHSFNRSLGKQAKTDGLDARSLARMAAERHESLRLFVVASREQSQLSELLMRRADLLAIQVAEKNRVGHPRYAEATETVRQSLATSLDFLAAQITLLDDQIKTLVTTAPEMHARFKIMTSVIGVGDKTAVLLQGLLPELGSLTRRQAASLAGCAPHARDSGVTRGHRSVFGGRALVKRALFTAAMSARTHDPSMREFFERLTKAGKPKMVALVAIMRKIIVRINAKLKPPAIAPSW

SEQ ID NO: 162728 - protein, 407 aa, unidentified
MDVIHPKCAGLDVHQQTVVACARTGAGKAVAYDVHTFGTTTAELLALGDWLTAHGCTHVAMESSGVYWKPVWHVLDGHFELVLANAMHIRNIPGRKSDVNDATWIADLLAHGLIRGSFVPPEPIQELRDLTRTRKQLVREIAQHTLRIQKTLENANIKLTGVLADVLGSSGRAILRALARGERDPERLAELASDRVKASRAELVAALHGRVTPHHRFMLTLHLTQIDALEAAVREVEARLGDALAPFRAALDRLITMPGVSETVARVIVAEIGFDMTRFPTAGHLVSWAGLCPRLHESAGKRLSNRTRSSNPWLKTTLVQAAWSAARKKDTYLRAQFLRIKSRRGPKKAVLAVAASMLTAAYHMLKHDVDYRDLGADHFDRRDKAKLAKRLIARLHDLGLTVEVRAA

SEQ ID NO: 162729 - protein, 418 aa, unidentified
MGEVVRVEVVHPRCAGIDVSKRDAKVCVRVQGSGRRPTKSTVTTWGAMSNQILALREHLIAEEVTCVVMESTGDYWKPFYYLLEDALGVMLVNPRDARNRPGRKTDVSDAAWLADLGAHGLLRASLVPPPPMRRLRDLTRARTDLNRDRVRQIHRLEKVLQDAGIKLSSVATDIMGQSSRAMLDALIEGKAHPAAMADLAKRRMRSKIPTLTEALTGRFTAHHGYLIRMHLDLIDRITAALTDLDAKITEALEPPLTAARDLLCSIPGWSTTVAEIFLAESGGDMTAFPTPGHLASWAGVCPGANESAGRVKSTKTRDGNRNLKGALGIAALAAARSKDTYFAAKYRRICTRRGPMKALVAVERAMVVAAHGMLTNGDFYRDPGADYFTARRPAMAKARAIRQLQALGYAVTLQPLTA

SEQ ID NO: 162730 - protein, 359 aa, unidentified
MARTSQPDTTRHVIVGVDTHKYIHVAVALDQHGARLGELSVSADSKGYQQLHDWAQTYGRAKTFGVEGTGSYGAGLSKFLRRAGVRVLEVNRSDRQLRYQHGKSDPLDAESAARSVLNGTAINTPKSADGACEMIRQIKVARDGARKARSAALIALKDIVVNAPSELRESLTPLTTVALVQRCASYRPGDIDSVHGATKYTLRSLARRWVTLGEEIVDHDQLLDRLTEEAAPTLREAFGIGPDVAAEMLIVFGDNPERIHSEAAFAKLCGVCPIPASSGLTNKHRLYRGGHRQANAAIYRAIVVRMQYHAPTIAYVSRRTEEGLTKKDIIRCLKRHLAREIFQRVMEDHRARLSLAQAA

SEQ ID NO: 162731 - protein, 348 aa, unidentified
MARKANNQVTTIGIDIGKNTFHLIGLDAVGNIALRRKLSRSQVMVRLANLPPCLIGMEACVGAHHLSRQLQALGHDARLMPAQYVKPFLRGQKNDFRDAEAIGEAVQRPRMRFVPTKSVEQLDLQAMHRVRARLVRHRTAVINQIRALLLERGVAVRQGVRFLRAALPDVLGLHAELLSPRMVRVIAELSGDLRHLDERLDEVTAEIETLAKADDACQRLMTVPGIGPIISSAMVSAVGDGAAFGKGRDFSAWLGLVPRQMSTGGRTILGRISKRGNSYLRTLFIRGARVILLRPENWLKHSFGPWLEAASRRLHRNVLAVALANKLARIAWSVLAGERYYEARRAAA

SEQ ID NO: 162732 - protein, 348 aa, unidentified
MRILALDLGKSKSAVCMLDTADMKASYTTVRTTPLELSVMLERQQPDRVVFEVGTLAGWVHDLVSRRGLPVEVANPNHEGWRWRNVKRKTDRLDALKLAKLSAAGQLPTVHVPTPPVREHRALIAYRCQLVGRRTRIKNTIRSMIARQGRTMVAGAGAWTEKERAVLRGWSRSWDQVVGEELWRGQLQEELTALEQIEEQLLRVEQKLDALGRRDPRIVRVQTIPCVGPRTAEMLVAVLDDPHRFKGLKEVGSYVGLTPRQFQSGQTDRRGGISKQGHRQLRRMLVEVSWLALRYNPYLRSMYLSVCRGTPSRRKIAIVAVARKLLIIAWAMLRDGTVWRPRGACRVA

SEQ ID NO: 162733 - protein, 353 aa, unidentified
MDNGSRYVGLDVHRDTISVAVLDSRGKLMLERVIPTSAAAVLELLELLRGKLHVAFEEGTSAQWLAGLLQARVAQVLVCDPRKNDRRGSKNDRIDARELADLLRCGRLWPVFHQDCGLTALQELARTYLVLTKDQTRVMNRIKALYRSWAIPCAGQSCYSLRQREAWLAQLPNSAVRGRAQIYYLQMDNLQALRQQVRTQLLREGRKHPALRLLCQIPYIGPMRATLLIVFIQSPHRFRTKRQFWAYCGLGIETHDSGEYRFRQGQLQRKRQPTVMGLNRNHHHLLKYVLKSVAARCCSGSGPIRDFAQTLLDQGMRPEMARLTVARKIAAIVLVLWKKGVSFDAHYLKAQAA

SEQ ID NO: 162734 - protein, 378 aa, unidentified
MATTRSVLRHELTAKSGDLYLSLDLGDKRWHISIGDGRCGLSHYSVGAGQTDELADCIAKARARLHLSRKAIVHSCYEAGRDGWWLHRWLTEVGVDSIVVDPASIEVNRRARRAKTDRLDADKLVAMLVRHHSGERVWSVLREPSPKDEDARRTHRELQRLTHERVAHTNRIGSLLVLHNLRPNVVIGGRYWSVWWERHRAQVPSSLAAELEREVMRLQLVKQQVRAIEATRSQELLEGKQPLVAQLTRLRAIGAKGAWVLVKEMFGWRTFANRRELAGSLGLVPTPYASGDSQLEQGISKAGNRRVRGLLVELAWGWLRLQPSSALAQWFDRRFASGGKRLRRIGIVALARRLAIALWRYLKNGEIPAGAQLKPAGA

SEQ ID NO: 162735 - protein, 375 aa, unidentified
MGKHTELFVAFDTSKLRNAVAIADGGRASEVRFLGEIENTAAATTKLVHKLEAKYQRITFCYEAGPTGYELQRHIQGLGHECIIAAPSMIPKKPGDRVKTNRRDAVSLVKLLRAGDLTAVWVPDRRHEAMRDLTRARETAVIDLCAKRQRVSAFLLRQGRWYSGGKKTWTKAHMNWLASQKFEQPERRIVFEEMMFAIRQAQERVERLEQAIRAAVPEWSLAEMVTAFMAFRGIDLVSSAGLLAELGDLSRFPTAPELMGYVGLGCSESSTGDTIKRGPITKAGNRRARRTLVECAWSYQHPPRVGVAKQAKVAAAPPKVREIAWKAQCRLNRRYRALLRRGKLKTVAITAVARELVGFLWAAAREVASAEHVAK

SEQ ID NO: 162736 - protein, 408 aa, unidentified
MNTLYVGIDVSSKSNVVYLMLPNGDKHSNFSVANSHEGSTQLVKRILSALTSHSLDTVLIGLEATSVYGDNLVYFLREDATLAPFNRKIHVLNPKQVKKFHDTYNDLPKNDYVDSFVIADCLRFGRINKEVYMGDYRYKALQNLTRARFFAVQNLVKEKQRFMNVLFKKYSTMTQEKVFSDTFSTTALAVYDEFESAEALANMDLHELTDFIIEKGKNRFPDPDAVAKAIQKAARSSYRLPKTVNDSVNQVLSISITSMKALESQIKEFDKAIKSQMELLPNVLISIPGIGPVYSAGIMAEIGDINRFNSQAALAKYAGLAWKQHQSGGFESEVTRLIPSGNRFLKYYLCEAAFSLVRCDKEYSNFYHLKYKEVNRCQHKRALALTARKFVRLVFRLLKDNRLYCPAK

SEQ ID NO: 162737 - protein, 366 aa, unidentified
MKKISTVRVNGNMIFKGHKLTIGVDLGDRWSCYCVLDEAGEILLEQKVATTPEAMKQIFEKIPRGLIAMETGTHSPWVSRLLKELGHAVLVAHAQKVQLITKSNRKDDRHDARTLARLARIDPQLLGPVRHRSAKAQIHLTVIRARAELVSARTGLVNAARGLAKSYGERLRKCGTQQVSRELAAELSVELREVLEPLLKEIESLNERIKEYDVRMEQIARESYPQVELLKQVKGVGTQIALTYVLTLDDPQRFPKSREVGCFLGLRPGRRDSGESHPQMHISKEGDPDLRTMLVQGAHYILGPFGEDSDLRRWGLKLAARGGKSAKKRAVVAVARKLAVLLHRLWVSGEVYEPLRNSQKAMRAAA

SEQ ID NO: 162738 - protein, 341 aa, unidentified
MNHYVGIDVSLEASSVCVVDGNGKIVCEGKIASEPDALIAWLKGLKLELTRIGLEAGPLSQWLYAAMRQAGLAVELLETRHVRNALKTMPVKSDRNDARGIAQLMRLGWFRPVHCKSIPAQETRALLTARKLVQVKLHDIEMSLRGILRGFGLKVGPTTPARFEGRMRERVAGHPSLEAIAQGLLAVRVALRREFDRFEKQVHAMARSDTRARLLMSVPGVGAIVSLTFAAAIDDPARFKSSKQVGAYFGLTPTKYQSGETDIDGRISKIGDASVRTVLYEAANIILTKPLKGCAALKSWAMKLARRSGMKKAKVALARKIAVIMHRMLADGVSFCNVAAV

SEQ ID NO: 162739 - protein, 337 aa, unidentified
MTEVHILAIDLAKRSFQVCATAPGGAVLFNRMVSRAKLETVLREQAPCIVAMEACATSHFWGRFAQGLGHEVRLIPPIYVKPFVKRQKNDAADAAAIAEAVLRPNLHYVAVKSAEQQARAVAFRTHQSFVGQRTQLINALRGHLAEFGVVVAQGPANLKGIAGMIDDDAISLPDEVRDIVRLYLDQIALLTQKIDDLHFKLRAATKVDDAMRRLCTLPGVGPVTAGAIMAFAPDLSNFASGRNFAAWLGLVPRQRSTGGKTRLGGVSKMGQADIRKLLIVGAMSRIRWIVRKGTLPDNWLGRVLGRKPRMVAAVALANKMARMIWAMMTRKEDYRMA

SEQ ID NO: 162740 - protein, 419 aa, unidentified
MAKKRRKTDEVEEVVYERCCGMDVHKEDVKACLNINGKKEVKTFSTMTDDLLAMAKWLKDNNVQMVAMESTGSYWKPIFNILECTDVPAMLVNPQHIKNLSDPKTDVRDAKWISSLLRHGLLRASFVPKRDMRELRELIKYRSSLSDDLTRTFNRIDKVLQGANIKLSNVISKTGTKTELAIIEALANGECDVEVLSQMAQGTLKNKIPELKRALNGLIGGHQRLLLKSMYNHLKQIHKEMTAIEAEIDKRMEKDSDIIERLDEIPGVGKLTAQAIIAEIGTDMDQFPDEEHLAAWAGVCPSQNESAGKRKSGKTKKGNSNIKKTLVIAANSAAQTKDTYLSAQYKRISARRGAKRAKVAVAHTILKICYFMIRDGTRYKDLGSDYFDKRDKQGIVLRSIKRIKSLGFDVVVTPRDEAS

SEQ ID NO: 162741 - protein, 367 aa, unidentified
MSSITYIGLDVHTSNYTICAYTIENDKTFAETTIKPDIKELEKYLNRLKELQGENSRFICGYEAGCLGYSLYHQLTVKGYECIIIAPTTMPKTPNEIKTDKRDARKIAKCLACGTYSKVFVPSSDDNAVKEYVRMRDDAKTMLKQTKQQIIALCTRHNKNYDGKTNWTQKHIDWLKHLELGNDILKETLTEYIITLEQLTDKVERFDKRIEEIAQQDKYRENAKKVQCFRGIKAHTALSFLVEIGDFKRFPTAQQFSSFLGLVPGEHSSGNTQHRMSITKAGNSHLRRLLIEAANSYSRGVAGAKSKAVKQRQEGNVPEVIAYADKANERLRRKYIKIALRSNSNVAKAAVARELACFIWGMMNNKI

SEQ ID NO: 162742 - protein, 366 aa, unidentified
MIKTKIKCKVMKKFLIGIDISKEKFDVTVIKSLGEGFECEQVHYDVYDNKVRGYSAMLKDMTTLGVRCGDSLFCMETTGAYELHLCDYLYGKGYDVWRESALQIKWSTGVAKSKNDKADSERIARYALRHQDAAVLYVPVNETLRTLKALSLYRERLVDERRAKEVSIKEIRATQKMNGDLQWIRTNSEQSVKRLKKDIMECEERIMAVIEGDEELKRTYGHITSIKGIGAVNAVAMIVSTGNFKTIPTARKAASYYGIAPFFAQSGSSVHHRKNVSNLSNRRLKGTLTQAAMCAKRFNEDMKAYYDRLLAAGKPRRVAVNDVRNKLVRIMYALVQNDCDYEPKHEVRRTERVLQTTERHIDKAVG

SEQ ID NO: 162743 - protein, 350 aa, unidentified
MNILALDLGKYNTVSCDYNSTNGEHEFGKVKTTPQAIHDLIVQKEPQRVVLEVSNIAGWVVDIARALGKETETANTTHDAWRWKNVKKKNDREDALKLAKLSAMNQLPTVHIPTKQVREKRALIKYRQRLVKHRKGIKNAIRAIFSREGITTVPRGKNAWSKDGLRWLRTHAKPLEEIADIEQLWRGQLHVELETFEAVSESLKKVEDKLNKLGACDARIKRLRTIPGVGPRLAETVVAFIGDPKRFENGKQVGSYAGLTPKQYQSGQMERQGRISGQGNKLLRNLLVEACWMSLRYNPWARDTYNRLLRGSPSRKKIAITALARKLVVRCWVMLRDEQDWKNDIQKNVA

SEQ ID NO: 162744 - protein, 371 aa, unidentified
MQDFSTDTVWVGMDVHQDSITAAILFGNDAEPRVERLPGDLNAVRKMFRRLSQQGSPRSCYEASGAGFVLQRCLENDGFHCEVIAPSLVPRKPGDRRKTDRLDALHLAHHYRAGNLVPVTVPSAEQEEIRQLVRTRLAVQSHVVRLKQRIVRVLATHGHRHTGTKSNWTKKHRTWLRKLHRELEGPLQTVLAFHLEHLEYLEAQKNALEKEIDHYARSAPFRNRVEALCCFRGVKTLTAMTLLTELGDIRRFAKATGLMAFAGLVPSERSSGNVQRRGGITKSGSQELRRVLVEAAWHYRKRATSDLILQRRRMGQNPQVVAIAIKAQHRLQKTFWKIASRKHSCTAVTATARELCGFIWSALWALESQED

SEQ ID NO: 162745 - protein, 400 aa, unidentified
MPQPILAVGVDPAKRLHRAVAVLFPDEVVLDVELPNAFDAVANLDLRLCELANQHGADLVYGLEDHRRYGRLFCQVLTERGRDVRVVNPLWTNRQRAFYGQDKDDAIDGRSIAAVVLRRHHQLPLASDFGEVAQAIREAERSLQDLGKVRTQLGNRLHLQLSDTYTAAYEEYFGKLKSPLALRFFRRFPLPQDLVGHNVEMLASLLLDLAGGKVGPHKGGNRLIAMRSKAQAILETSGAMRALPRTLALELKAELIRQLCDELLANHDRIIRLERMLREQLLPATKQTITTITGISTILAATIIGETGSITRFRSPAAFAVYNGTAPARNSTGGRDHHKARRDCNHRLKRAFYLAARQRFCMIRVRTLSWAASPGGRSPRTTQSSIRARCSSGSSHGSPR

SEQ ID NO: 162746 - protein, 339 aa, unidentified
MIGIDIGKNSFHVVGLDDRGAIVLRQKWSRGQIEARLANMPPCLIGMEACVGAHHLSRKLKTFGHDARLMPAKYVRPYSKGQKNDFRDAEAIAEAVQRPTMKFVATKTAEQLDLQALHRVRERLVSQRTGIINQIRAFLLERGVAVRQGLRFLRAELPRILATPPEVLSPRMVWVISDLAEDWRRLDERIDQLSNEIAVLARQDAGCERLMSVPGIGPIISSAMVAAIGTGDAFAKGRDFAAWLGLVPKQMSTGDRTILGKISKRGNRYLRVLFVQAAWVVLIKPMSWERHGLKHWIEVARKRLHRNVLAIALANKLARIAWGVLAGSRAFEASKLQAA

SEQ ID NO: 162747 - protein, 403 aa, unidentified
MNAVGIDVSKGRSMVAIIRPFGEIVSKPFDIKHTPKELTELASFILSIEGESRVVLENTGKYSAPVVKVLSEAGVFVCPVNAKLIHDYGGDTIRRAKTDKIDSLKIARFCLDKWSRLEQYSPVDELRKTLKTFNRQLDEYMKIKVMLKNNLISLTDQTFPEVNKLFTSQARESDGHEKWIDFLTRFWHCDCITSISDEAFTERYKKWCKKHGYNFSSAKAKFIYEAATNQQPTLSKNYFTKTLILQAVEQMNSICSSIAKLKAEMTKIAKMLPEYETVLLMHGVGKTLAPQLIAEIGDIRRYPKRASLARFAGIEPPENQSGTYNQHSRRISKQGSPQLRKALFQVMRCVLQNSNLDEDVFQFIDRKRSEGKPFKVYMIAGANKFLRIYYARVKECFDALTLA

SEQ ID NO: 162748 - protein, 343 aa, unidentified
MKQISTIGLDIAKNVFQVHGIDVNGKVAVRRQLKRRRVLTFFAKLPSCLVGMEACATSHHWAREIAKLGHEVRLMSPRYVKPYVKRNKNDAADAEAICEAVTRPTMRFVPIKTPEQQSVLMLHRTRQLFVRQRTTLINAIRAHMAEYGIVAGVGRNGVEVLLELIAKGEDERIPPAARECLMALAAQLHLVRRQILEADRRVLAWHRTSKVSKRLEAIPGVGPLVATALVANIPDPSIFRSGRDMSAWIGLVPKQNSTGGKEKLGNISKAGNRYLRKLLVVGALSVIKRAKILGYTRHPWLVRLMQRRSTKIAAVALANKIARMAWAMMVRNESYRTPLSQPA

SEQ ID NO: 162749 - protein, 361 aa, unidentified
MAQAKTWAAFDVHVSGVLAATLDRDSGELRVQRLSGRSEEVAAFAAGLAGPVRATYEAGPTGFVLARRLAAAGVDCVVCAPGLIPRGASDRVKTDRRDAERLVRLLAAGELHRVAVPSVEEEALRDLVRAREDLRGDLMRARHRLAKLLLRHEVRFEGTQANWTQAHLGWLAGVTLEQPASQRALEDYRGGVSALMIRREQLEAEIARALPKSPWAQTARRLMCLRGIDTLTAAGLCAEIGDFNRFEHPAQVMSYLGVVPSEHSSGERRRRGPITKSGSQHARRLLVEAAWHYRRAPRVAGSLARRQRGGEPEILALSWKAQRRLHHVWNRMEQRHKRRTIIAVAAARELAGFCWAVATAD

SEQ ID NO: 162750 - protein, 423 aa, unidentified
MEVMHERVAGLDVHKTMIVACVRLMAGGKISRECRTFETSTAGLEALLGWLTVSGCTHVAMEATGVYWKPVWNILSQGEFELIVANAAHIKNVPGRKTDINDAMWIADLVACGLIKASFVPEPQIQELRSLLRARKQLIREQTSHIQRVQKTLEEANIKLDSVISDILGASGRRIIAAMIAGVTDPLRLAELADRRIKASPKALSDALHGRLTDHHRFMLKLYLGQHDPLSEAIASIDRQVHGLITRMDEEVKLGQATFRALIILLCSVPGISTLAATVILSEIARDMSRFPTAGHLLAWAGMCPAQNESAGKRKSSRLRKGAPWLKTMLVQCAWAASRKKDSYYKAQFNRLRSRRGPKKAICAVAASMLTAIYHMLKDGTNHQDLGANHFDRRSTDLKAKRLVAQLSKLGFQVELQPLAAAA

SEQ ID NO: 162751 - protein, 378 aa, unidentified
MDRATNSTAPADRLFCAVELSKNSWLLGIQFPDRQKASVYPIKGGDSEGLMAKLFAACDRWTKVSGKKPSIIVCYEAGYDAFWLARFLKARGIECLVVDSGSMQVNRRSRRAKTDRIDLAKLLRALIAWCGGEQHVWSVVRTPTVDEEDLRRSHRERNRLITERTAHVNRIKGLLFAQGIRGINVKAGYKTLRIDKLVTGEGRSLPPRLAREIKREIDRLELVQQQIAAIEQERDESPTTCKETEKKRAQLLLLKGIGPTGSAVMAREVYYRQFSNRRQIAGFLGLATSPYDSGQVERSQGISRAGSGPVRATMIQIAWLWIKYQPKSEISRWFVQRTADQSGRIKRIMIVAVARKLAIALWRYLEQGLVPQGAALTR

SEQ ID NO: 162752 - protein, 369 aa, unidentified
MKDNITYVGLDVHKNSIDVALADSEKTGEVRHYGTIDGDLGSLEKLIRKLVSQGRELRFVYEAGPCGYEIYRHLSHQGLDCIVVAPSLIPKKTGSRIKNDRRDSEMLARLHRAGELTAVYVPHLEDEAMRDLCRAREDAKSAERKAKQQLGAFLLRSGFRYSGKTNWSLAHWRWLSDIKMPHPVQQIVLQEYINAVRACTERMDRLAEQIRVLVPEWRLASVVEAIQALRGVSLIVATTVVAEIGDIGRFDNPRQLMAYLGLVPSEHSSGETIKRGSITKTGNGHARRVLVEAAWAYRLPARVSRRLLERHQNLPEVIRSIAWKAQLRLCGRYRRLVAKGKQAQIVIIAIARELAAFIRAIARNVPATT

SEQ ID NO: 162753 - protein, 334 aa, unidentified
MQNVALIGIDLGKHSFHIHCQDKSGNALLRKKFTRTKLMQFLVTCPSSVVVMEACAGAHFMARRISDIGHDVKLISPQFVRPFVKSNKNDFIDAEAICEAASRPSMRFVQPRTETQQAMRALHRVRESLIRDKVKTTNQIHGFLLEFGISLPTGDAVIKRLSLVLAEHEIPEYLSRLLMKLHAHYLYLIEQITELESELNQSIKADATAQRIMTIPGVGPITASLLSSQLGDGKQFSCSRDFAASTGLVPRQYSTGGKSTLLGISKRGDKNLRRLLVQCARSFMMRLEHQQGRLAEWVRKQLDNKHSNIVACALANKLARIAWAITVQQKEYQA

SEQ ID NO: 162754 - protein, 374 aa, unidentified
MADYSEVFVGIDTSKLRNAVAIAEGGRNGEVRYLGEIANTEAATSKLVKKLAAQHRRLTFCYEAGPTGYGLHRLIKTLGHECVVVAPSLIPKKPGDRVKTNRRDALNLAKLLRAGELTAVWVPDARHEAMRDLVRAREAAVDDLKSKRQQVLSLLLRLGRHFTGKRTWTRAHMNWLVSQKLAHREQRIAFEEMLLAVRQADERVIRLERAIAAAVPDWSLAGVVTALMAVRGLDLISATIFLAEIGDLSRFASPRQLMAYLGLVPGEESTGDRVWRGGITKAGNHRARRILVECSWSYRHPPRVGKKKLAKVEAAPPAVQEIAWKAQARLTARYRALARRGKRPTLVVTAIARELSGFIWAVSRAVSTPAAPTM

SEQ ID NO: 162755 - protein, 387 aa, unidentified
MGYKVAGIDVHKKVLMVVVYEVSDSKSEPERRRYGTTTSQLQCLSAWLREQGVHEAVMESTAQYWRPVWYELEPYMRLNLAQAFSNRAPRGRKHDFRDAERLVRRLVAGELTLSFVPEPEQRTWRSMARMKMQLTRDKSRLHSQLECLLEDMRIKLSSVISDLVGVSGYRILHALAKGETDAKKLAALGDERLKCTEQQLLDALSGSPQPIHLRLLALYLDRHQKLVEQIAKLDGMIAEAMKPHQEAVARLAAVPGFGPDSAQQVIAEVGPQATTFPSAADLTSWVGTCPGQNESGEEKHGSRSAKGNKYMRRILNQAAQAAVKKKGSHFQAEFRRLLPRLGYNGAIWAVAHRLCRLVWKIWHDRLPTLSKAANPIPGPSANAHKDY

SEQ ID NO: 162756 - protein, 482 aa, unidentified
MKKRNIFQNRSQQLLALFEKAGDRLKMMCIPIDYAKKDHMVMFCNGYGDILRKPFSVKNTLDGVKYLTDQVMRSCRQRHIKKEHVFFGGEDTNSYAENFANALRSKGFLVANVNAHDAKKQRENLQASTDRIDLMGIATMLLNLRAKCSPAQDGIYRNLRTLVRHRKKLVVMKTEVKNRMHTLVDRLFPGFLNEKNTGINPFSKSSLVLMEDRFSAQQIRRRRHPALIKILKRCATPDAENVAAKLHSYAAQVITTPDEYAATLQLSLQHHIKHYRCLQENIDQLLSEIALVLAQTQAAFLTSIKGVGIVLAAGVSSEIGNPFEQKPLNNLTSYSGIIPRVKQSGGIEGHSHTGRVSKRSNHLLKDYLVQSAFQMGLRGPQPLLQDYKRREAAGQHADFGIGRRFLRMAMCLMRSSQVYLPPKLRSPKTQMQERAGYYLTTWPLLRDKWKKAHAHQVAFAKDQPLGQWRQMVQELYDIKLKL

SEQ ID NO: 162757 - protein, 384 aa, unidentified
MQASTIDTPTAVHCGTIFVAIELSQKSWLVTLHCPDTDKISHHKLEGGDHTGLLALIERMRERAARTLGAVPAVVSCYEAGYDGFWLHRLLLAAGITNYVFDPSSIAVDQRARRVKTDRIDGERMLRTLMAYLRGEPRVVRIVRVPTPEQEDARRASRERGRLTKEQTAHTNRIKALLRLLGMAVGNPRRRDWLSWLVKQRDWQGQVVPPQIMAEIKREHARLMQVREQLDALAQAPADLTPAAAQMAQRSELLLRLKSLGPAFATTLTNEVFYKDFRNRREVASYFGLTPSPWQSGGIDRDQGISKAGNPRARCAAIEMAWLWLRHQPDSKLTQEYRRRTLDASKRIKRVAIVALARKLIVALWRYLTTGLVPEGAMLKTVEV

SEQ ID NO: 162758 - protein, 346 aa, unidentified
MHYIGMDCHITTLDFAVVNEAGRLVKANSVATSVTGFIEFVKTVPPPRTIYMEEGTLAAWALETCVRFREKLVITDAKKNHWIGSSGQKDDSIDALKLAQLARGGYIKEIHHPIGQRRRFRELMIAYHDTVRSTTRIKNKIKAKFRQNGIQCTGITVYSETHREEWKGKLPPETTLLLILEGLWRQLEQSEQTEKELLAAAKAQAKHYPEIKHFEALPGIGFIHAATISAILETPHRFAGKKKVWMYAGLGIMTRSSGGKTYSEKLSTDYNRLLKYTLKQAAEAAIQAKDNPFRRKYLDMTLLHGIAPHRAKLTIARDMLATMWAIWRKGEKYNPEIREKAAYKQG

SEQ ID NO: 162759 - protein, 519 aa, unidentified
MSRTISSKRARSHRLVTVHKPHGQLHPRVERVGPEHFGVVSVDCAKHRSKWMLCDFYGNVLAPPTELPHSQGHFDMAIGQLRELLAQHALQDVVVAIERTGDYHLPIKRAFADAGFEARIVHPFATKQFRQPANPGIKTDDNDLAAIFRATINGFGFLEPLCDPTAKQLRLLVRHRRDLVQKRSAVCCQLHEHWQATLPGFAACFVDLWTAPAALCVARHFASPQAVREAKTAGLAAVVRQAGHLCHARSLERMLAWSQTAPKPDPEFLMHHQIATTLDDDRIAKTRQIAGLERQLVGLLVQTPYVLLLSIPGINVVSAAEFAGEMGPITHYANAKAITGRAGLFPARYQSDQLDLKDGALIRCANRSLRAAILMAADCLIKCNAYFRAKAEVWTALKRDARHVRVQVASRFCRIAYLMVAGGQVFRHPCCQKRDYILDKLVAFHRDHGISSVETLHNLQSAVGQLPKSEHAVEATPLTAAWLAARAKKHRGPQPIGDVLLAVLAKLGASPLQSNMSGD

SEQ ID NO: 162760 - protein, 353 aa, unidentified
MKTYYVGMDVHRASIMMVVLNGAGKVVMQAVIETGAERVRGFLKQLRGKVYVTFEEGTQANWLHEVVRGLVTEVVVCDPRHNKLLQSGNKSDRVDAQKLAELLRNGALKAVYHGDNGVRVLKELVRTYDCLVSDTTRVMNRLKAIYRGRAIGCAGHDIYRQDRREQWLEKLPERGAKQRASFLYQQLAALKPLRHEAKRMMVTEARRQPAYLWLLSVPQFGSVSVAQLLAIVGTPHRFRSKRQFWTYIGLAVVTRTTADHEVVAGVLRRSQRPVSTRGLNRNHNHVLKRVFKNAAKGACHGGPFKAAYDVRVAQGMVPSLVRLTVARQLAATTLALWKRGEQFNPERMKQQAA

SEQ ID NO: 162761 - protein, 342 aa, unidentified
MEYGAIDLHTQDSQIRIVTEDGTVVLDRRIRTRTDRFAAVFGDRAPMRILLETGTESEWVAQCLEGLGHTVIVADPNYAAMYGARVRRIKTDRRDVAALAEANRRGVYRATHRASAEAQQVRRQLQVRAHLVTMRTELINLVRAQVRAAGYRVPSGGADAFGARIARLDLPAALQATLAPALAALAALQPLIATEDRKARATATADPIAPLLQTAPGIGPITALLFRATLDDVRRFAGPGPVTSYLGLVPRERSSGTHQRQGGITKTGPGQLRALLVQSAWTIWRLPASSPRLHDWVHRLAARRGRAVAIVALARRLARILYAMWRDGRPFVAARLHDRVAA

SEQ ID NO: 162762 - protein, 339 aa, unidentified
MKFAGCDLHKQTITICVVDQLRRVLERRTVRCGEERSILAFFERLGEFEAVVEATASYEWFVRLIEPVAHRVLLAHPKKLRVIAESTRKSDRLDAQILAEFLALDMIPTSYRATPRQHEHRRLVRQRGGVQRRLTSVKNRLRRILCDYNADRPSLFTVDGLAYLAQVPLLGADRFAVDQIVEELHFGRRQLLAVNARLKEFAEAAPLCEQEARTLLRTIPGVGFVTTEVVLAELADIDRFGSQKRVVAYAGLSPGQRESAGKSRELHLEKNGSTLLRSTLVEAAWRLVQHSLRWRRIYERLKLRVRAKKAIVAVARRLLCLMTAILKTGQPYSLSQQPT

SEQ ID NO: 162763 - protein, 364 aa, unidentified
MNFYNSTHKHYCGIDLHARSLYVCIISQQGETLLHKEIPAKPDALIELITPYLDDLVLGVECMHCWYWIADFCDDHDIEFILGHALYMKAIHGGKTKNDRVDSFKIAALMRGGNFPLAYVYPRSMRATRDLLRRRTNLVRHGADMKAHVANTTSQYNLPPNKVNLKNVCAREQLNTTFHDPVVQRNINLDIAVLECYHRELSQVEWFLEKQAKKHQPTYFYLLKTIPGIGRILELTILYEIGDIQRFESVQKFASYARLIKCKAESAGKTYGTQGNKIGNAHLKWAFSEAAVLYLRGNTGAQQLLQRFQKRMSKAKALSALAHKLGRAVYFMLKNEKIFDELRISVIPNSDSGVIRSPVSRSFS

SEQ ID NO: 162764 - protein, 351 aa, unidentified
MEEYIAFDSHKRYTWVEHQQANTGEIRQYRLEHAPGAIRQALAGCSPGTPVAIEATANWYWITDEIEQAQCVPRLVHPRKAKLMMGQINKTDKLDTHGLNQLQRNGTLPTVWIPPGPLRELRELTRTRVVLVAQRTRWKNRITATLAKWGLPASDYSDPYGKKAREELETRMEHLPEQTGWATRQMLKQLDSLSEQIREFEKRLGELVEVTPEMQWLETLPGVGVILSATIALEIGEIGRFLSAERLASYAGTVPRVHASGDRVRYGRTRPDVNRYLKWAFAEAANSAAVNYRRCPERHVSQLYARLRARKGHHKAVGAVARHLAEAAFHVLSRQQGYRDPTATAGRTSEV

SEQ ID NO: 162765 - protein, 330 aa, unidentified
MNKYTHYFGVDVSKKTVDITHAKENEFTHRQFTNDEAGMKELMEWFKELDISYPETLFCMEATGLYCFTLTHFLAIHSIDTWIEHAAQIKKSTAMARGKNDKVDSQRIALYATKYPERLRLWKPVSNTLEKIKHLAALRDRLVETQKRLITPIQEFEDIGDAAMAKLLTKSIKSSLASIEKDLKNVEVKIIDVVNEDDNLKLLYKLVTSVVGIGFVTAINLLIHTNGFTMLNDTRKLACYCGVAPFEYSSGSSVRGKTKVHYMANKKLKCNLHMASLTAVKLDADLKHYYERKVAEGKNKMSVLNAVKNKLLARVIAVVNKQQEYVKKTA

SEQ ID NO: 162766 - protein, 422 aa, unidentified
MSNEVVCHKIKRELLLEIIFCGGLILFYCGIDIAKNNHEASIIDARGKLLTESISFPNSQKGCEKLFKLFEKFEITPENVVIGMEATGHYWLSAYSFLIENKFKTKVINPIQSEAFRKMYIRQTKNDSKDSFIIAQIMRFCQYSETKLSEENIIALRQLSRYRLALVDSCSDCKRRVIALLDQVFPEYQKFFSDTFGVSSKEILLKCPTPEDVLAIPTNKLSKILEKASNGQFGMEKAKSLKSIAETSFGISFAKDAFSFQIKQLIQQIIFIENQIEDLKKQISILLSKTNQVITTISGIGETLGAIIISEIGDIFRFDSPSKLVAFAGLDVKVNQSGEFSGTKNKISKRGSPYLRRAIWLAANRAAFCDPILSDYYQSLKSRGKHHLTAIGAVARKLCNIIFVILRENRPYQINPPLNLKI

SEQ ID NO: 162767 - protein, 452 aa, unidentified
MMAPGYNSLGVPTDALITNIGGATKMKNSTARKLRQIPAGYLIVGIDAHKKKHAAVVKTQDAFTRAKFKVSNSRDGFVELLERTKAQMVKTDSRGTIFAIEAGGRYWRTLAYFLEERGIPFRLISPFTLKRRREGEDIDRRKNDYRDADMAAELLRTGKFTETRLPQGIYADLRAAYHTYYGLGRERSRATNLLSALLDSLFPEFYTVFKDISTKTALAVLAAYPSPHVIAEMSMEKFMDTMMTKYKGQHITRKKVSAIYQAAHNSVGIHAGTGVICFEISLLIERIRLLTEHRRKVEDLIVTLVEWIPESKYLLSIPGLAHITIAGILGELGPLNHYRSGKQLVKMAGINPMQSESANKQASKTPMSKKGRPLLRYCLWEVSLNILRYNQEFKAWAKRLQERPLHQNPLKKREARGAVCKRLLYLVFALFNKHSFYEKNYKVETERELVVA

SEQ ID NO: 162768 - protein, 361 aa, unidentified
MGNEDGAKPQVGLTIGVDVGDRFSQICVLGADGEVVEEARIRTTPATFGQWFGSATSSRVVLEAGTHSPWISRLISESGHETIVANPRRLRLIYQNDRKSDRVDAESLARLGRLDPRLLCPIKHRGAEAQADLALLRSRDALIRARTLLINHARGSSKAVGARLPKCSARSFHQKAAGHIPEVLADSLSPELETIGRLTAQIRALDRRIEEMARAKYPEIAALRQVFGVGPVTATTYVLTLEDPGRFPRSRAVGCYVGLRPRQADSGDQKPQLRITKAGDEALRSLLVCAAQYILGPHGPDSDLRRWGLALAERGGKAAKKRAVVAVARKLAVLLHRLWETGEIYEPLRNARMRGEMGPAI

SEQ ID NO: 162769 - protein, 352 aa, unidentified
MTTMTETSTAVTGGVDTHRDVHVAAVLDARGGELGVRQFPTTPAGYRQLLEWLGSFGPVDRVGVEGTGTYGKALARHLTAAGVAVVEVDRPNRQDRRRVGKTDTTDAIAAARATQARKATVVPKDADGPVEQLRVLRVVRQSVRRERVRVINQLRALIVTAPDELRADLSGRAAVGLCQHVAKYRVADPTTPTGTIKYALRSLGRRAETLRSEAKTLDTMIRGLVEDIAPELLDQPNVGPDTASALLVAAGDNPERLHSEAAFARLCAAAPLDASSGLQQRHRLSRSGNRQANAALYRIIIGRMKHDPATRAYIARRRQDGKTKAEAIRCLKRFVARQLYPLIVTPKHHLTN

SEQ ID NO: 162770 - protein, 501 aa, unidentified
MIAVTVCADGSNTYNAEYAVQIYTHRISKAVSKGIRTLCPLKQPLLLNYCNAVYPYNAVLQDVTLGCMNLENSIYEGDEIMTHKKMQWTYVGLDLHKDHHTAVFIDYFFDKLGEIKFKNRPSEFGAFLAKAETLKMEGTQLLFGLEDVSAYGRTLAIFLQENGQKVKHVNAMLVARERKNQNIVQKTDSIDAECAAKILLTKLNELPDASTDDDYWVLRTLVNRRDFIVKNNICLKNSLHTLLTQNYPNYRRYFTNIDCKTSLAFFMRYPSPGTLKGVTAPELTGFLHEPSQKKVGAVKAQEILNSLEDTAVEFQETRDEAVKSTIRQLEFNMKELESVEASMANFLKKFNCPLTSMTGIDVVTAAQMLSCIGNINKFSTPAKLARYSGIAPVTYASGKKDMQFANQRGNRELHSIFYNLAVRVSSTVGPTNKVLNSHFYDLYHRKLSEGKTKRQSLKCVERRLVNIVWTMLVRGEEYINPPMFEVPKKEVKETGLQKHAK

SEQ ID NO: 162771 - protein, 416 aa, unidentified
MKVIQETRAIQRYIALDIHKEYVLAGGMNAAQEWLLPPRKIEMGRLGEWAVKHLCETDAVVIETTTNVWDIYDIVQPLVGRAVVAHAGAVRQIAEARVKTDKEDVKRLIRLLIADIVPEVWVPPQHVRELRGLISYRQRLVKTGTIIRNRLQSLLHSHNLLLPEEGLVNQEWWTQQEKISTLEKMQIRQELSMLEEIERHKAEVDQELGRQSLGETWGREAVRLMQLPGIGVVVAMTVLSAIGDIQRFESADKLVGYSGLGAGVHDSGKEHIEKRITKSGRKELRWAMVEAAWRAVRMSPYWKEQYEKFLRRMRRPNQAIVVIARKLLVTVWHVLSKEETDLHASEEDLAYKMLLWSWSLAEDVRLGLTHKQFAKYALMRLGVQNDITRFVRKNVPRRIAPKDEVLARMAELGLTC

SEQ ID NO: 162772 - protein, 419 aa, unidentified
MSFKILKFNCCGLDVHKTWIYACIGITDSNNRTEYKQARFSSFTKGLNELCDWLAKYNCKDVCMESTGKYWIPVFNILEQHEIWVTLSHPKYTKPMKGNKTDRKDAKWICDLYMCGMVKPSFIPPADIRALRDLVRYRFKLTCMITSEKNRAQNCLTVSNLKLDDVFSDVFGKSSRSITEQILQHPGEKFDVSPFVDGRCKTPIEEIQAAVDGAISKEQAVKLRQCLDHIDELQKHISEVEREILRLSDKYEAALNLIRTVPGFDKNPMTAIQVLSEIGGNMSVFPTAKHLVSWAGCCPRNDKSDRKIKSTRISRAGSYFKPVLVQVANALIKSKKHPEFSTRYRRIKARRGHKKAIIAICRMILTAIWHILTDLKPYTPEGFLDSRPVNKEKVLTTSQALNLLKQRGYFIKDDPLSVS

SEQ ID NO: 162773 - protein, 317 aa, unidentified
MEILYKRCCGIDVHKNMLIACVFMGVRKKEIRQFGTMTDDILQLTKWLNEVDCEMAAMESTGNYWKPVYNIFEDEEIPIMIVNAQHIKGVPGRKTDVKDAEWIADLVRHGLVKASFIPNREQRELREITRYRQELIEERARELNRIQGVLEGCNLKLGSVLTDISGKSGIAILRAIVSGETDPVILSKFAKGKAKNKLAELQRALKGSIHPHQQLMLKHQLEHIETLSRIIEDLDSDIDEKTESMKKQIQLLDEIPGIGRKSAERLLAEIGTEMEQFKNQSHFSSWAGLVPECKESAGKKMSTRIRKGNKHVKSQCH

SEQ ID NO: 162774 - protein, 417 aa, unidentified
MKIVYPICCGIDVHKSFLVATIVSVTELRTLKYKKERFSTFNKDLKRLKHWLMENYCYDVCMESTGKYWVPVLNVLEPELRVVIVNPKWVKAIKGNKDDVKDSKWIGELFCFGLVRSSFVPEKSIRILREFTRYRYKLVNMRSSEKNRFQNGFTVCNIALDSVVSDMFGKSASRITDYLLSDGNPDAEHCVTFLQRSLKKKAVAVVESIEGFQLTEEQKFRMLQVRQHMEYLDSAIEAVDRKLEEMASPYAAAIKLLCTIPGMKHDSAVTVISEIGTDMSQFGSSKRLCSWAGLTPGNNQSAGKKKSVKITRAGVYIKPMLVQVAHAAVKCTSQPYYKVKYESIARRRGKKRAIIAIARMILTAIYHMFCTGEVFNPTDLRQIDMPKELKKKNVANAIRLLKQQGVLPENFTEASYA

SEQ ID NO: 162775 - protein, 428 aa, unidentified
MLDRVAAIDVHKKMLAVVVADVAGEGEYPFERRKFGTTPEQLELLTRWRIQQEVEEAVMESTAEYWRPVWGTLEQHGKPERQKREGATQMSGALPLCQAKSNRGRRGRKSDFIDAERRVKRLVAQELVLSFVPDPEPRLWRTVTRRKYQLTRDKVRFQNQLESLLEQAYIKLSSWVSDLLGLSARRMLQALADGESDPAALAALADHRLRATPAQLRDALGACAHLHPVYRRLLKMALEELKLLEDQIAKLDGEAAELLQEHQETIQRLAEVPGLGASSAVQIVAEVGPKAEAFESAKEMSSWVGVCPGSNETAGEAHSTTSPKGNRNMRRLLNQAAQAAVKVKGSIFEIAFRKFLSRKMPYKEAIWAIAHRLCRLIWLLLRRKVRYEERGPAVSAKSQCTRTTRMIKELRKLGYRVDGGPLPAAIPA

SEQ ID NO: 162776 - protein, 369 aa, unidentified
MPGEGSWIGLDVHARSVVGCVIDETTAEIRSQRIGARTEQIVDWVRAQPGPVVACYEAGPTGFGLARALSAVGVHCEVVAPSKLERPAGDKVKTDRRDAERLARLLRIGEVPGVRVPTEAEEAVRDLVRAREDCRSDLMRARHRLSKLLLRQGLVWEHSAWTGAHEDWLRGQRFDRRGVQLAFDEALDTVFSVHARRDRLDAAITEMAATDPALAGPVGRLRCLRGISTLTATGLCVEVADWHRFTGSTIGAYLGLVPSEFSSGARRVQGGITKTGNSHARRLLVEAAWHHRRPLRASRDRARRADGQPAAVRDRAEAGNRRLHQRWCRLEQRKKRPTVSVVAVARELAGWCWSLAMLDGDQHHEHAAA

SEQ ID NO: 162777 - protein, 428 aa, unidentified
MNNTLTAALFIGIDVSSKSNYVYGMDFFGNKLLSFQTSNNNPGAEVIAHEILQCLKKNSLTHLNIAMESTSFYSWHIANFLSCHEKLLWFKPKVYCLNPKVIANYKKTFIDIDKTDPKDAMVISDFARVGKITTAPWKGSQYIALQRLTRCRLHIMENITREKSYILSNIFLKFSELAVLDKSDRPFSNKFGFTASAVLTEFMSTEEIANTDINQLVDFLVDKSKNRFKDPMATAKILKRAARDSYRLDKSLYNPLNAAIAASFNCIKALEKEVKTLDKAIERAVKVLQTHEFECLCSIYGIGPVFAAGITAEIGDITKFNNQASLAKYSGLTWRKKQSGRFTAEDTYLTKTGNKYLRYYILEAAGSILRFNREYNDYYHKKYNEALIHKHKRALALTGRKLIRLIFALLSRNQLYTMNDDADKEINS

SEQ ID NO: 162778 - protein, 349 aa, unidentified
MFAGVDTHKDTLAVAVIDHAGRVVRQLELPNQDSDYVRLLALLSSHNVVRVGIEGSGNFGWPAAIYLLKRDLNVVEVPPLMTSRERLSRPGQGKTDPVDAVAIARITAREPSLPPVRPMTGHAADLRVLTEYRDQLVNERTATANRVHTDLLWLRPGYQHQLPHLTNTAHLRAALELLSGDDSVRAAVTRSRLDRMLTLTDQLAELRIQIDALVKASGSTLPDVYGVGPVVAATIIGHVFDVRRYPTRHHFATANGTAPIPASSGRTVRHRLNRSGNRQLNRALYTIAITQIRADTEGRAYYLRKRAEGKTSREALRCLKRRLSDLIYRTLRADLANAAQRTPTLSIAA

SEQ ID NO: 162779 - protein, 382 aa, unidentified
MPSSRNPAPTSDGPDTVFLALELSGTSWLVALHAPDADKVERHRLASGQARDLLDLIARIRSRVQRRLGTVPRVSCCYEAGRDGFWLHRLLEREGIASHVMDPTSLQVDRRARRAKTDRLDAEALLRALMAWSRGERRVCSMVRPPSPEQEDARRPSREREALLKERIRRVNRIKGLCAAQGVYDYEPIQADRRERLAQLVTGDGRPLPRELAAEIGRQLEQLELVLRQLAEVEAVRDQRAAAARAEPGSKLGALLRLRGIGPELATVLQMEVFYRHFASRRDVAAYAGLAPSPFASGGRQREQGIAKAGNPRARKALVELAWLWLRHQPESALARWFHGRVGAAGGRVRRIAIVALARRLLVALWRYVETGVVPTEAQVKA

SEQ ID NO: 162780 - protein, 380 aa, unidentified
MTCKECGQVVRLTRTMNKCHSNTELSSHEGTRCQFNGGKAVIKLGIDVHQDFYVVVEQVGGSNPKPPQRFQKEAFLFWAARLKQKSGAQVYALYEACGFGFSLQRKLSALSIKCYVVCPQKLDEQNRRVKTDGLDAKALCLKLDRFVQGNRDALAIVRVPSEEEEQARAIHRQREQLVKARKQLEAQGRSLMVNHGLEPVQNWWKPRTFTALPMPQWMKELLANSQPILVALQQKIMALTVQLQSAASPEQPCGLGKMTSVVIDREIGDWNRFSNRRQIASYTGLCPGEYSSGNTRLRSCVTKHGNPRLRAALVELAWRLVRFQPNYKPIVKWRATLAKGALATGAARKKAIVAVARQLAVDLWRIKTGRLHAEELGLIN

SEQ ID NO: 162781 - protein, 316 aa, unidentified
MNTSTISSYVIGGVDTHKNIHITAIVNDSNQELSSEYFPATRHGYKEMLKWMSSFGKISRVGIEWSGTYGLGLLRYMQSSGIEVLEVTAPDKVDRRKRGKDGTIDAENAAHAAYSKLRTVTPKTRDGMVESLRILKGCRKTAMAARTVALQMIRTSIVSSPDEIRDTLRHMTRMTLIRTLASSRPDLTAYKNISSAYRIVFKSLARRYLELHDEIADLDKMISSIVDMLALELIEQKTVGYESAAQLLITLGDNPERLNSESSFAALCGVSPIPASSGKTNRHRLNRGGDRAANSALHIIAIGRLRTEQRSNVVVN

SEQ ID NO: 162782 - protein, 320 aa, unidentified
MSKKKSTSFIGIDVSKRLLEVAAHQSDYQFRCANKASAFGELIVELIALRPARIVLEATGGLEIPVVAAVHAAGLPVVVINARQVRDFAKALGQLAKTDRLDARVLAHFAAAIKPPLRPIKSKDELELDALAARRGQLIEMLTAEKNRRGSAATETVRKEIKEHIDWLEDRIAELDQQLQTLLKSSKLWRVKDEVLQSVPGIGPVVSFSMIADLPELGTLNRQQISKLVGVAPLNRDSGQQRGTRHIYGGRARVRSMLYMAALTATRCNPVIKEFYERLLANKKLFKVAITACMRKLLAIINVMVRDCTRWKTKDDPVSA

SEQ ID NO: 162783 - protein, 354 aa, unidentified
MNKIKEVNFEGKVIYCGLDTHKTNWKVNARMEGVEMAAFSQNPDPLLLKNHFSKNYPGAELKVVYEAGFCGFEIQRSLTSLGIECIVVNPADVPCSDKDRKRKDDKRDARKLSMELAKGNLKGIYIPDKQMQAARSLVRQRHRLVQDQTRCANRIKHLLLSNGIKTGEKSERLSLRFIRKLQQLDCGSISLKISLQFAIEQYVQLRHILKEITLAIRELSKQEPFSNAQAVLQSIDGIGLISGMVIQTEIGDINRFKRLDSLCDYAGFVPDIYSSNDKMVVRGISKRGNEFLRETIIESSWTLIRKDPAMLMKYNEYRSRMNANKAIVRIAKHLLSRIRFLWKNGQTYVRGIVG

SEQ ID NO: 162784 - protein, 342 aa, unidentified
MGEVSTIGLDIAKSIFQIHGVDADGVVMIRKRIRRAKLLEFFAALPACLVGIEACPTAHYWSRRLQILGHTVKLMPPSYVKAYLKRSKNDANDAAAICEAVTRPSMRFVATKSEEQQSGLMLHRSRQLLVCQRTMLSNAIRGHMAELGIICAKGRNGTAELLRIIADEHDDRIPAVARLSLDVLARQYTVVRAEIVAIEKRIHAWHRSCEESRRLEEIPGVGPIVATALVAEVGDWKEFTSGRSLAAWIGLVPRQHSSGGKQRLGRISKQGNRHLRWLLVAGAMAVIRYARQHGTKRLWLARLMERRPIKVAAVALANKIARMAWAMMVRGERFKEPKLLPA

SEQ ID NO: 162785 - protein, 426 aa, unidentified
MLSGGSYLSFKIFKFNCCGLDVHKTWIYACIGITDSNNRTEYKQARFSSFSKGLHQLCVWLAKYNCNDVCMESTGKYWIPVFNILEQHKIRVTLSHPKYTKPMKGNKTDRKDAKWICDLYMCGMVKPSFIPPADIRELRDLVRYRFKLTCMITGEKNRAQNCLTVSNLKLDDVFSDVFGKSSRSITEQILQHPGEKFDVSPFVDSRCKTPIEEIQAAVDGNISKEQDVKLRQCLDHIDELQKHISEVEQEILRLSDKYEAALNLIRTVPGFDKNPMTAIQVLSEIGGDMPVFLTAKHLVSWAGCCPRNDKSDRKIKSTRISCTGSYFKPVLVQIANALIKSKKHFEFTTRYKRIKTRRGHKKAIIARCRMILTAIWHILTDLKPYTSDGFLESRPVKKEKVLTTSQALNLLRQRGYLIKDEPSPVS

SEQ ID NO: 162786 - protein, 337 aa, unidentified
MKVTLIGIDLAKSIFQVCGVNQAGKRVFNRQVRRARLMELLMQHPDATVAMEACSGSNYWGRELQQRGFKVMLIPPQHVKPFVKGNKNDRNDAFAITEAARRPNLKCVEPRTLAQTDMIQLHRVLDRMIRQRTALINQIRGFLNEYGIVVAQGKERLSAAMPDLLEDAENGLTLSSRALFQEMHEQWRQANEAIGRIEKGLRSQTKSDEAAQRLMKMRGVAVKISTATIAHAGNGHGYKSGRHFSANLGLVPKERSSGGKQNLGGITKRGNQYLRRLLIQGAWSVIRNADKNDDRMSRWARQLVERRGKHKAVVAVANKMARIMWSMLYHQTEYRAD

SEQ ID NO: 162787 - protein, 359 aa, unidentified
MLNAKINSWDGQKLHIGLDVHKKSWTVTILGPHYEHKTFSQNPDPQMLARYLEKNFPGGEYYSVYEAGYNGYWISKKLKELGIHNVIVNPADVPTTHKEEDNKNDEVDSRKLAHSLQSGDLTGIYEPSDYCLSVRQVVRQRGQLVKELAREKNRLKSFLAFIGRPIPDRFNQTETRQWSRRYIQWLEEQGFSDQGNKMVLESKIRIVQGLRKELLQINQQIRQLSREPNYRQDVELLMTIPGIGLITAMTMLTELNPIDQYKTLDQLNKYVGLVPRIRSSGESAYIGRMTIRGQRRIKEKLIESSWVLIRKDPAMMLKFEQLSKRMQKNKAIIRIARKLLSRIRRILLTQEPYVTGVSK

SEQ ID NO: 162788 - protein, 323 aa, unidentified
MDSHKDTLAVSDVDQAGRQQQTQTFPNTRHGHRRLLVWLQGQPGVVRVGIEGAGGYGRAVAMCLVQAGLVVVEVTPSLTVRERRRLRQRGKADPTDALAIARVVAREQDLPPVRRQDLSEDLRLLVDYREQLLGERTRIANRVHADLVALRPGYQRQLPGQVSVRAELVRRRLDQLDRLDAEIRALKARIGDLVQATGTSLVQVHGVGPLVAARILGEVGDVRRFADRHKFAAATGTAPIPASSGRTQRHRLNRGGNRRLNRALYTVAITQARSDHPGRAYLAGKQRQGKTRREALRCLKRRISDAIYRQLLADLQPDPGPAP

SEQ ID NO: 162789 - protein, 449 aa, unidentified
MQELRLGIDVACEAQHRAALADETGQLLWSNRRFITISTQLEALWAAVRAAGDLPVTVVMEPTRNAWVPLAAWLRARGATVRMVAPEQSADLRKYYSKHAKTDRLDCELLARLPLLHPDGLLATPGLGPAEALRRAVAHRANLVARRTAGLQRLEALLELLGPGWSAALGSELGKAAAAVLEHYADPHALRRLGRARLTRLLIRTSRGNWREDKADELLDAAAETLRLWPPGAIDFAELGEDIAAEARLLNGLTGEITALEDRIAGHYQAADPAGIVTSAPGVGPTLAAAILGRLGDAKRFTDLAAVRNYTGLVPMVDQSGVSDKRPGVTKAGDHLLRQALFLAADHARKIDPTLAARYQRLRAAGKHHNSALCTLAAVLITRIAACWRTDQPYQLRDLHGRLITQAEGRAICATLTPVTGTGRRSKESHSAPSTGPSTTQARSARKNA

SEQ ID NO: 162790 - protein, 348 aa, unidentified
MAMLADTVELVIGVDTHKHTHTAAVVTATTGAVVEQLTVSATPAGYRQLLRRADRHDGRRVWAIESTGGYGAGLTRFLHAQAEQVVELDRPKRAARRHGAKSDPLDATRAAREALGRDQLAQPRAAGHRAALSVRLAARRSAVQAATDAQRQLHALVVAAPDTLRGRLRSLTTRKLVTACGRLRLQATWDTETTTVAASLRALARRVQLLEAEVADHTRAITTLVRAWRPDLLSRCGVGPIVAAIVLCAWSHPGRCGSDAAFAMLGGAAPIPASSGQTVRVRLNRSGDRHLNQALHLVVLTRLRYDPATRAYAERRRAEGKTNREIRRCLVRYVARQLYRLLEAQPTL

SEQ ID NO: 162791 - protein, 387 aa, unidentified
MAQVNDLSRSLTAFDPISTLVVVVEMSKASWLVSGAVPGVERQPLKKLEPDATALLRLIERWRNEAVRAGRPISRIALAYEAGRDGFWLARWLLARGIEAHVIHSASVAVSRERKRAKTDRLDAAMLMRVFLGWLRGERGHCGMVAIPTMEEEDARRPSRERESLVNERSRITNRMKSALARLGVRGFKPHLRKAPERLAGLRTAEGTGLPANMIEEFQRDMARLALVREQINSIEKTRAERLARAPDKGPHAMVRLLARVIGIGIETADMLVREVLSRKLRDRRAVARYAGLTGSPDESGLKRREKGLAKAGNARVRRGVIQLAWRFLMFQKDSALARWYRTRTEGPSGARKTTMIVALARKLLIALWRLVTTGEVPDGVELRAAA

SEQ ID NO: 162792 - protein, 374 aa, unidentified
MEEYSEYVGLDVHKDTIAVAVASAGRSKPRSLGIIRNTKKSVLNLLSKLSPEGEVLGLCYEAGPCGYELYRWVERTGHDCVVVAPSKIPKKSGERVKTDRRDAVKLASLFRSGELTPVWVPDTEQEATRDLSRAREEMKRVELQLKQRLGAFLLRHGKRYTAGKCKWTQRFYRWLSDVKMELPLQQIVLEEYVDAVRQAESRVRELDNELVRAVEGWNLKPVVESLMALRGVNFLTAMSIVTELGDISRFETPRQLMGYLGLVPSEHSSGGKAKRGGITKTGNGRVRRLLVETAWCYRFPARRSYHMEKKSEKATKEAQAIGWKAQKRLCHRYREFLRAGKHQGKVTAAIARELSGFVWAIACAVTEVPTKASA

SEQ ID NO: 162793 - protein, 378 aa, unidentified
MGGRAVIEHTTTYVAFDNSKDTLAVAIAAGGLRGEVRFWGTIPNQAEAVRKLVTKLVAKHPVLSFCYEAGPCGYGLYRQILALGHSCVVVAPSLIPTKPGGHIKTDRRDATMLASLFRAGELQGVWVPDADHEAMRELIRGRQTAMQEVRRSRQLVLSFLLRHDRAMPTRQHWTRPHRAWLARQSFSHPAEQIVFEELIQRMEVACARQGRHEDAIRKLLPAWSLAGVVAAIQSMRGVALMSAVTLATEIGDFGRFASPRQLMAWLGLVPKEHSSGRKVARGNITKAGNIRARRVLVEGAWTYRLPARMGEDITRRNEGLPEAIRAAAWKAQVRLCTRYRRLQNTGKPQNVIVVAIAREMAAFVWAIARMAQPAAVPA

SEQ ID NO: 162794 - protein, 408 aa, unidentified
MQSDFQYFVGIDWGSEKHRVCLMDRDGQTLEERWIEHSGGSLADLADWLRQRTPESARALAAAIEIPRGAIVETLLEHGFAVFSINPKQLDRFRDRYSPAGAKDDRRDAFVLADSLRTDRHCFRAVRLDEPAMIRLRELSRLEDEVGEEQNRATNRLREQFHRFFPQLLQLSESADEPWLWALFESAPSPARAARLSEAKIAGILRQHRIRRITAAEVRAILKAKPLRLAPGAAEAAAEHALLLLPRLRLLHRQRTDLGRRIGALLEELTAPVEGQPEHRDAAILLSLPGLGRKVAATMLSEASQAIAERDYHALRCYSGAAPITRQSGKKKVVLMRRGCNERLRNALYHWSRTSIVWDAASKKRYAALRACGHSHGRALRAMADRWLKVLISMLRNQTLYDVQRRAA

SEQ ID NO: 162795 - protein, 433 aa, unidentified
MHEAEDEPLFAERAAGVDIAKAGIEVTVRVPSETRRGGRQQDTRSFRTTRKDLLALADWLRVWGVAKIGMESTGDYWKPVLFLLESEGFDCVLYHAAQVKALPGRPKTDKLDSAWLAKITERGALPGCFVPPEDIRRLRTHTRYRRHLTQARTAEKSRVEKLLEDAHLKLSSVISDIHGVSGRAMLEAIAAGERNPGTLAQLARGTMRGKIARLVEALDCSFVTEEHAAVLTMMLSTIDYYTAQIGELTAKIAVLCQPYEQQIAQLDAVPGTGVITGQDIIAEIGTDMTVFPTAAHLVSWAKWCPQVAQSGGRRKGANASGRGNRYLSAALGEAAVNAGRTQTFPGAKYRRLVRRMPKKKALVATGNSLLAIYYALLSDPAAAYTDLGADYYERRANIRRQARNHVRGLERLGYKVTIEPADPATGATGEPAA

SEQ ID NO: 162796 - protein, 396 aa, unidentified
MALIWAGTDIGKTHHHCVVLDSEGRRLLSRRVLNDEPELLDLLADVLALDEDVVWAVDVADGMGALWVNVLLNHGQQLIYIPGLAVNRASAGYRGTGKTDAKDATVIADQARMRRDLTTLRPQDEQVVELRVLTNRRADLVADRTRKINRLRGQLSSIFPALERALDLGNLGPLILLTGYQTPAALRRTGRKRLETWLRNRKVRGSEALAAAALDAAERQHTALPGEKVTAHVVHTLAKEVLDLSEEIAEIDKLIEARFRAHDLAEVLGSMPGIGPLLGAEFLAVTAGDLSRFGTPDRLASLAGVAPVPRDSGRLSGNLHRPRRYHRGLQRVFYTSALISIRTCDVSRRFYERKRAEGKRHTQAVLALARRRVNVLWALIRDGRCYDPAVSVTNAA

SEQ ID NO: 162797 - protein, 490 aa, unidentified
MPERRLVGIDLGITSEHTVCVLRADGSQVCRRRCRPTPDSMAELERAALTGAPDGTRLEVVMEPTGPAWRPVAVYFVRRGHLVHRVSSAKAADLRRFLSRHAKSNSIDAMTLAKLAYLDPAGLIPLDLGDREQAALDRRVRACHRLTRLAGEHKTRLRDLVRQLLPDTPLEGALGQADLAILERTGADPHRLARLGKARLARLIAGASHGQLGELRALRWLDAAHSALELFADHPALAFDDLAEEIKTEVRLLRATEAELSTHASARDLAYAQVDPEGLARSLPGLGEVGAPSLVAALGRPARFPSGRHARSFSGLTPRSSETGETDRKGQPISKAGPSRLRTTLVLAADHARRQDPQLARVYYLQMTERGGCHAKAICVVAAKLAERARAVLVRRLPYELRDSDGRPVSAEQAKAIIAEQWTVPEEVRRRRRSRKTRGKAPQQVGTRHVNASARGAATRRPSPPPILAPELVQIKEVLSTIAQRTIVRP

SEQ ID NO: 162798 - protein, 344 aa, unidentified
MQVITFGIDLAKNVFQIHGVDAAGHTVVKKQLKRDQLAPYFANAAPATIGMEACSSAHYWARKLQSLGHSVKLMAPQFVKPYVKGNKNDANDAEAICEAVARKSMRFVPIKNVEQQALLSLHCVRQGFVAERTAYANRIRGLMGEFGFVIPQGIHHISERVHDLIEDASNELPGLFRVTMERLLEHFKELHRQVRELELQIQAWHRSNDASRKLEAIPGIGPITASALIASIGDAKNFKSGRELSAWLGLVPRQHSSGGKQNLLGISKRGDMYLRMLLVQGAHAVINACCRKGVEASWLAGLLKRRNHNVAAVAVANKNARIVWALLARERQYETGYIRDTALV

SEQ ID NO: 162799 - protein, 420 aa, unidentified
MKAWKEITHYAGFDWARDHHAVVIVDSDGQIVADFEFEHSLEGWKSFGEKTAPWPHLAVAIETNQGAAVDQLLQREYTVYPVNPVASESYRKRKAPSGTKTDPVDGWGLADALRVDGHGWKPLQPMNPLTHQLRLLCRDEVSLIEQRTLLVNQLQQALVEYYPAALQAFDDWTQAFTWDFIIEFPTPQVLTKAGKRRWEKFLHTHKLWRPETAERRLSLFAQADQFQASAPVVAAKNQLAVSLSKLLRTLDEQLAQYRRQIEALFNDHPDHDLFGSLPGAKKVLAPRLLAAIGSDPERYGNHQVLQCFAGTGPVKFQSGQIHRTHMRWACDKFLRHTVHLWANSFRKASAWGQTYYQKKREQGMSHACALRCLGQRLLKILFRMLTDKKPYDAELHALNQKKHGSWVLDLVIKPATAASE

SEQ ID NO: 162800 - protein, 348 aa, unidentified
MGMLAHQVDHVIGVDTHRDSLTAAVTDTTGAVLAQTTLLADGFGYRRLLTFAKLNAPGRRVWAIEGTGSFGSGFCTYLLEKGEWVVEIDRPARPATRNGAKSDELDAARAAREALSREHLAQPRRRGDREALRVLMATRESAVVARTKAINLLKGILVSAPESLRNSFRNVSTDQQLVRCARLRVSVARSEEHRCTVMALRAAAKRALLLQEEAHDMEAEIERIVTKLAPRLLAEPGVGPICAAQILCSWSHPGRIRSEAAFAAIAGVAPIPASSGSTVRYRLNRGGDRQLNRALHTIVLSRIGHHEETKAYVARRTAEGRTSREIRRCLKRHLARRLFKLLESSVAA

SEQ ID NO: 162801 - protein, 411 aa, unidentified
MDVVNARCAGLDVHKATVVAGVRVPGPQPGARRGETKTFATTTRGLRDLTNWLLTHGVTVVTMESTGVYWRPVYEALEGLVQLVVVNARHVKMVPGRKTDVKDCEWLAQLLECGLLRGSFVPPRAVRDLRDLTRLRKALIRERGHHVNRIAKTLELAHLKLSCVVTDLMGKTGRAILQALSAGIDDPERLAACAQGLLRKKQAALREALGGRLTPHYAFLLQQHLSLIDGLDAHIATLDTRIEAAMAPFAEAAALVQTMPGVAARAAQAILAETGVDMDLFPTPAHFASWARLCPGNHESAGKRQNTTTGKGAPWLRATLQETAWAAVRSKKSYYRALYHRLKGRRGAKRAIVAVQHAMIVALWHMLKHRVAHQDLGADYFERRNIARIRRHHVRRLEQLGYDVTLRGKAA

SEQ ID NO: 162802 - protein, 373 aa, unidentified
MKRILKIAMDVHSTNYTLCAMEPTIGSEDRIYGEIQVAPDYKEVLRFINSLKMKLGLDNEYSIECGYEAGCLGYTLYHQLTEAGVKCVILAPTTMLTQQGKRVKTDRRDAHLIAQCLCYGGYHPVYIPTGEDDAVKEYLRMRDDHKLALKKLKQQINAFVLRHGHQYTGTKWTIKHVAWLHKLELAPMYRETLDEYMASYEEQEAKIERYDKRIEEIAAEARYQENAKKLSCFLGIRTHTALSLIVETGDFKRFAKGSTYAAFLGLAPGEHSSSTNVNRLGISKAGNTHLRCLLIEAAKGICKGAIGHKSKELRSRQNGQSAEIIAYADKANTRLRSKYYKMIRHGKKKNVAVAAVARELACFVWGMMTGNIA

SEQ ID NO: 162803 - protein, 417 aa, unidentified
MSEIRWFVGVDWASQEHEVCVVDRSGQRVAERACKHSGQAIVELCQWLLDLTQAEPAEIAVAIELTRGAVVETLLERGFSVYGINPKQLDRFRDRHSVAGAKDDRLDAYVLADSLRTDTARYRRLRMDDPHVVELREWLKMREDLTQERTRLTNRLRDQLWRYYPQFLELDEDIGAAWLLDLWERAPTPRKAAKLRRATVERILKEHRIRRHTAADVLERLRVRALSVAPGATEAAVAHIEALSERIRLVDRQRKGCERRIGAMLDDLGRSGEVPGQPTGQPSEQRDVAILDSLPGVGQIVLASLLAHAGQPLRERDYQKLRTLAGPAPVTRRSGKSKVVRMRYACKRELREATFHWARTAVQTDRAFADHYRELRGRGHTHGRALRSVADRLLRLACTMLRNQTLYDPKYREPKAA

SEQ ID NO: 162804 - protein, 456 aa, unidentified
MKIPQSTIRLLTGRVVKILLNREVSTMKSNTQNKKIEAITEKTLVIGIDVGSETHYARAFDYRGIEYSKKPFKFSNTEAGFVTFKEWILDLKEKHEKDKVVPGMEPTGHYWFNLGKYLQDNEMKPVLVNPHHVKKSKELDDNNPTKNDRKDPKVIAGLVREGRYMIPYLPDGVYADLRTASNIRFQLQSELTRIQNRISRWFNIYFPEYKTVYGKPDAKSGMLILKEAPLPEDILTLGIDGVDQIWRDAKMRAVGKARAKTLIEAAEHSVGRKEGAVSARMEIRMLLEDYESRNMRLQEVMVLIEELVKQIPMAEKLLEIKGVGIKTVSGFLAEVGDISRFNSPKELQKLAGLALVENSSGKHKGETTISRRGRKRLRYLLFEVAMSLVAKNPEFRELHNYYTTRRLNPLKKMQSLMAIAAKLIRVFFAMLTKGVDYDPKKMVSDIKRPAVYLQAA

SEQ ID NO: 162805 - protein, 363 aa, unidentified
MSNTTYVGLDVHNESITAAILVDGSDEPEVLRLPADLMKVRQLFIRLSDRAPVRACYEASGAGFVLQRSLAKGGFHCDVIAPSLIPRKAGDHRKTDRLDAIMLARLYRSGHLTPVHVPTEEHEALRRLLRLRRSYHAQVTSTKHRISGTLRNHGHVFTGTKSAWTKKHFLWLGKLRQTLQGHLQTALAIDLEHLEYLESQIRAIDAELELAARDMPYRPKVEALCCLRGVKSLTALTLLCEIDDISRFASPTQLMAYFGLVPSEHSSGSVERRGPITKAGNTHARRLLVEAAWNNRHGASAELVLNRRRQGQPPAVVAIALKAQHRLHRKFVRLDQRKHRHVAITAVARELCGFLWAILKAMN

SEQ ID NO: 162806 - protein, 408 aa, unidentified
MNAVGIDVSKGKSMVAALRPMGEVALLPQEFLHTEVGLEQMAYAIIALGEDTRVIMEATGRYHEPVAAALHEYGIYVCVLNPLFIKQSGGGSIRKVKTDKADAMKIAKYGLDNWVDLREYTPMDTVRQQLKLCSRQYNLYMKTVVSLQNNLISLTDKTFPGVNELFSSPERADGHQKWVDFVITFWHCDCICRVSEKAFTERYQKWCKRKGYHFSAEKAQDVYLGSCGHFTTLPKNDNTKLLITTAAQQLLAGKMTLAALRTEMTRLAKQLPEYDIVRAMYGVGETTAVQLMAEIGDVRRFPRRSSIVGFAGVDPAVDQSGKHSAKSVPTTKRGSPHLRKTLYQIVCTYLKKSPVDEPVYQFLDKKRSEGKPYFVYMTAAQNKFLRIYYARVKECLEAFDAQQDTSQR

SEQ ID NO: 162807 - protein, 346 aa, unidentified
MGSQIIGGVDTHLDVHVAAVLDGHGGLLATASFATTPAGYGELADWLVSFGEVAVVGVEGTGSYGAGLTRHLHARGIQVVEVDRPNRQRRRRAGKSDTHDAVTAARAALAGDALGAPKTRDGNVEAIRVLRLARSSARRDRTRALNQMRSLITTAPDELRSQLRALTITKLVHIAAAFRPAGRTDVASANRLALRTLARRVLELDAEVDSIDAVLAPLVAETAPAMLERLGVGTDTAGALLVAAGENSDRIHNERSFARLCGAAPLDASSGKQQRHRLSRAGDRQANSALWRIVVTRLSYDPNTRRYVQRRCAEGKTKTEAIRCLKRYVARELYACLPQQTLLDAT

SEQ ID NO: 162808 - protein, 393 aa, unidentified
MICVGIDVAKDKHDCVILNSEGKILAGVFTIPNNADGFDTLLHKIRSCTSSDDKIKVGLEATGHYSYNILGFLINQGLPTYVINPLHTNLYRKSMSLRKTKTDRVDAKTIATMLMSNVDLKSYTDTAYHNEELKSLTRYRFDKVRERAQLKQSVSRLVTILFPELEKLVPTLHMSSIYALLIEFPGAKQITEAHLTHLKSLLKDASKGRYGRDMATEIRDAAKHSIGSVMPAKSLELRHTIRLIRELDSEIEDIEAAIEAIMEELQSPITTIPGMGFRMGAMILAEIGDFARFDSPDKILAYAGMSPSTYQSGQLSLAGTYSHMEKRGSRYLRYALYNATKYVCHWDPGFAAYLAKKRAEGKHYNVALSHAAKKLVRLIYAMEKSRQPYKRAA

SEQ ID NO: 162809 - protein, 356 aa, unidentified
MGLQGKKEKSAVNHVAIDLGSKESQVCVRSADGAVLHEKKHPTRALEPWLKSLPPSRVILETSSEAFRVADAAKAAGHEVRVVPGTLAKQLGIGERGIKTDLRDARKLSEVSTRIDLPSVHIPTTEARELRSLVRSREALISTRTKLVNHARGWLRTMLLKIRGGATNTFPDRMRAAATQHQQSIPPHIEQVLVVIDALNLQVLASDRQMRQRVQASELCRRLMSVPGVGPVTTLSFVAAVDDVSRFKHAFRLQSYLGLTPGEDSSSERERRTSITKAGSSSVRRTLIQAAWVALLRRPNDPMVQWATKIAARRGKFIAVVALARKMAGVLYALWRDQTTYRPNRAAQVLDEAPTT

SEQ ID NO: 162810 - protein, 358 aa, unidentified
MTATSIADVSATVTVGVDTHKHTHTATARDGLGRGLGEIVVDTTPRGYAALVAWAIGFSGEVTFGVEGTSSYGAGLARYLRARGHPVIEVLRPTRQDRRLRGKSDRIDADAAAAAVQTGKARAVPKAGDDAVETIRALKIAKTTAIKARTQCMNAIKALITTGPDEIRTQLRDLKPKALIATAGAFRVSEVADPKSAAKWSLRSMARRYAALDDEVTELERQLDQLTQRFAPDLRQRMGVGQDVAAALILAAGLNGDRIRTEASFSMLCGASPIPASSGVTHRHRLNRGGDRQANAALHRIVLVRMRYHEPTKAYVAKRRTEGKSKAEIFRCLKRYVAREVFTALIKPTGSQVEVIAA

SEQ ID NO: 162811 - protein, 395 aa, unidentified
MTKHTLYVGLDTDKRHIDVAVAEPLPGGEVRYWGQVGNTPAALDRVIRQLQKGGRELAVCYEAGPCGFGIYRRLNHKRGVRCQLVAPSMTPRRPGSRVKTNRRDSLTLVKLLRAEELTAAWVPDVEHEAMRDLTRARSATTQDLTRCRQRITGFLLRQEIVYVGKPWTKKHRTWLGRLEFSAPAHRLMFDELLSAFDATRARCDRLLADIAELLPGWSLCWLVTALQALRGYQLINAVSLVAEIGDPRRFENPRQLMAYVGMVPSEHSTGDSVRRGGITKTGNRGARKVLIEASWTYARRAKSLPRRAEGQPEEVRIIAEKALHRLSSRYRRLTAQGKLAQVAITAIARESLGFVWAIAHAAGAVNAARPSSLGGRSWAGGKPSQGGPLAPAAGG

SEQ ID NO: 162812 - protein, 380 aa, unidentified
MTAATLAPERPVVTVGVDTHSDVHVAVALDQLGRRLGTVSINTTPDGYASLEHWAEKFGEIAVFGIEGTGSWGAGLVRHLRDQGYRIVEVNRPDRSARRRQGKSDPLDAEAAARAALAGTATSTPKAGEGHVEMIRSLQLTRRSAQKARSQAANQLRALLVTAPADLRQELRSLSLTELVKTATRWRPGREPDSHLTVVKHALRSLARRHERLTEEIHDLDKHLTRLVTETAPALIAVKGLGPLTCAALLVAVGDNPQRMRSESAFAHLCGVAPVPASSGKTNRHRLKPRGRPTSQLRALHPGSHAHGLGPAHPSVRRQAARRRQEHQGDHSLPQTPHRKRAIPASRPASAPARGTRTTRPQGRLTPIGASARSNASTAP

SEQ ID NO: 162813 - protein, 390 aa, unidentified
MQVIGHRREAPSAIRNDLGAIFVSLELSRSTWLITSLSPSGGEKMSKHSVPAGDICGLLARFSELRRKTFARTGKSFPIIVIQEAGLDGFWIHRVLQNEGIESHVVDPASIATSRRRRRAKTDRIDGEALLRTLLAYKRGEPRVCAMIKAPSPEEEDRRRLCRERKVLTNERVLHVNRIKGLLFSQGVSGFEPLRRDRRQRLDELRTGDGRPLPKHLKAQISRELDRLELLLVQIKAVEVERDALLAAQQVAALAPAAMLLDIKGIGPEFAAVLWSEGLFRHFDNRRQVASYAGLAPTPWQSGSVAREQGVSKAGNPRLRTTLIQLAWLWLRHQPQSALALWFEERVRRNGGRLKKTTIVALARKLLVALWKYVTAGVVIEGAVMKTVGR

SEQ ID NO: 162814 - protein, 343 aa, unidentified
MKLMRIGVDLAKNVFQIHGVDCHEQPIWRQCLPRDRWLQTVLEKIEPGCEIGMESCGGAHHWARQLQARGFRVRLIAPQFVIPYVKSNKNDANDAEAICEAMSRPSMRFVAIKTIEQQDIQATHRIRAGLIEQRTAKANQIRGLVAEYGLVAPKELPMLRRAIPCWLEEADNGLTVRFRRLLDGLWGDLRTLDERVGELDSEISAIAASEPMAVRLQQLRGVGPMIATALVAAIGDARQFANGRQLAASLGLTPRQHSSGGKDRLLDISKRGDAYPRTLMIHDARSALRTAKFKDDRLSQWAVRLAERSHPNVAAIALANKTARMAWAMLRNGTDYQPDRAAA

SEQ ID NO: 162815 - protein, 372 aa, unidentified
MKKHSSKRQTARARIDARETGTTVGLDIGDAHIHVAVLNQNGELIWEGRIRTREVELRRWLAELPTSVVALETGPHSRWIAAAARQCGHDVIVANVRRVRLIYGGEIKTDQLDAEKLARLARADRKLLFPIEHRPEKEHADLAVIAAREALVKMRTEAINMVRGVVKAAGARVADCAAEAFTGRANEVLPALLRNALGPILEEIDGLNERIREYDEGIEHLARTEYPETELLTQVAGVGTLSALTFRLTIGSGERFSRSRDVGGYVGLRPKRDQSGERDPDLGITKAGNPRLRRTLVNCAHYILGPFGPDCDLRRWGLELARAGNRKGAKKRAIVAVARKLAVLLHRLLVSGEVYEPLRNSRGIPGKAVTAA

SEQ ID NO: 162816 - protein, 373 aa, unidentified
MKYTTVFVGMDVHKESFTLACYTNEKEEAEYVQRTEAHYSKVISYLEAMRFHYGNDVTFICGYEAGCLGFTLYHQLTNHHVRCVILAPTSMPVQQGKKKVKTDKRDARKIAKCLAHHDYSAVHVPTAKDEETKEFLRMRDDHKLALKKIKQQILAFCLRHNCRYPGGTKYWTQVHLKWLRDLKPGGMYQEILEEYLLTYSNLVDKLERLDKRIEELASDEVYAESVHKLSCFLGIKTQSALSVITETGDFKRFGNAQQYASYLGLVPGEDSSGDDQNRLKITKAGNRHLRMLLVEAAQSYGRGQIGHKSKELKKRQEGNSPEVIAYADKANERLRRRYYRMVLSQNKRSNVAKVAIARELACFIWGMMTGNVA

SEQ ID NO: 162817 - protein, 341 aa, unidentified
MSKPNTYLGVDLHKKTCYITVMSYKGTIKKQVEISTDTDQVSKFFKKYIDASIAVESTMNWIPFYENLESLGCKVVLSNPLQTKAIASARIKNDKVDSKVLADLLRTNLLPTAYIQPQDIRDLKELVRQRVYYVGIRTKIKNKIHSVLFKTNTKHCFTDLYGKAGMKWLKQLELRNIYKNELNRYLETLYLLDKQIDELSKTIQNTAKLDYDCKLLMTIPGISYYSALMIKSEIGDISRFPNANKLCSYAGLIPSTYASAEKIRHGRITKRGSKWLRSALVNAVTSGSRNHNRIASFYKKLKKSKGTGKAKVASGRKLCTIIFAMLTDQTSFQNFVPVKQR

SEQ ID NO: 162818 - protein, 354 aa, unidentified
MSQKLNAAIAVIGIDIGKNSFHIVGHDHRGAIVLRQKWSRGQVEARLANLPPCLIGMEACVGAHHLSRKLQMLGHDARLMPAKYVRPYSKGQKNDFRDAEAIAEAVQRPTMKFVATKTADQLDLQALHRVRDRLVGQRTGVINQIRAFLLERGIAVRQGLRSLRSELPGILATRTDVLSPRMLRIIEGLAGDWRRLDERIEGLSSEIETLARQDKACERLMTVPGIGPIISSAMVAAIGTGDVFSKGRDFGAWLGLVPKQISTGDRTILGKISRRGNRYLRSLFVQAAWVVLVKVKCWERYGLKSWIEAAKKRLHHNVLAIALANKLARIAWAVLNKGRAFECVKTEETASRPA

SEQ ID NO: 162819 - protein, 391 aa, unidentified
MSWVAGVWKVQSPSTDAREGGKEPAVMSSLAASAGAIHLGMDTSKNTIVVAVLMPGEEVPVIDRMWNEEGSVRHLVGRFADRAALRACYEAGPCGFELHRLLTSMGVACDVVAPSLIPRRAGERVKTDRRDASRLARLHRAGELTAIRVPTEAEEAVRDLVRARAALLADRKRAQLRITAVLLRHGRAWRGTCWTAAHEQWIAAQRFGEPALASALAHYRAALDTRRAELEAVEDELAVWAVRPPLAAAVARLGCYRGIAGLNGLTLAAEVVDWRRFPSARAFMCFTGLVPSEYSSGERTRRGSITKAGSAAARTALIEAAWAYRFRPAIGVTLRRRQHDAAPDTLARSWQAQRRLHARYKAMTARGKPAAVAVTAMARELAGFVWAEMTS

SEQ ID NO: 162820 - protein, 371 aa, unidentified
MADYREAFIGIDVAKLRNAIAMADAGRDGEVRFFGEVDASNSSMRHVVQRIAAKFDRAHFCYEAGPTGYGLYRLIRSLGHECTVVAPSLIPRKPGDRVKTNRRDAVSLARLLRAGELTAVWVPDEGHEAMRDLVRARAAAVETLRVHRQQVSAFMLKHGRVYPRKKGWTMRYLCWLQEQKFDHPAHQIALQEMVEGVRIAKERVERLERVIEEFVPAWSLAPIVQALRTLRGVDLIVAVTFATEVGDVQRFENPRQLMGYLGLVPEERSTGATVRRGGITKAGNGRVRHMLVESAWTYRHPPRVGAKKLYRIEQAPSKVREIAWKAQTQLTARYRALSGRGKKTTVVCTAIARELAGFMWAVSREASAAKP

SEQ ID NO: 162821 - protein, 338 aa, unidentified
MKLYGAIDLHSNNNVTVLIDEQDQVVYQKRLPNDLPLITQQLSGYRDRLQGIVVESTYNWYWLVDGLMDQGHRVHLANTAAIQQYEGLKYTDDHSDARWLAHILRLGVLPQGYIYPKEERAVRDLLRKRGQMVRQRTANLLSIQNLITRNTGSSIRSNRIKTLDAEQVDDLLPNSDLALAVKANLAMIQCADGQIDILERTVTDRIKLRAAFGFLKTVPGIGQILALTIMLETGEIKRFPTVGDYASYCRCVGSQKLSNGKKKGSGNTKNGNKYLAWAFVEAANFAIRYNARIKSFYQRKKAKSHGVVAIKAVAHKLCRACYYIVRDQVPFDVAKAFA

SEQ ID NO: 162822 - protein, 347 aa, unidentified
MRFYNRQHRHYCGIDLHVKTMYLCILDAAGQVLLHRNLPSTPEAFLEVVGPYRDDLVVAAECMFTWYWLADVCAAEGIPFVLGHALAMKAIHGGKAKNDKIDSHKIAGLLRGGLLPQAYVYPTAMRATRDLLRRRLHLVRKRGQLLTHIQNTRAQYNLPPFAKRLAYPGNRDGVVEHFPDPSVRKSIEVDVALIDHYDALVNDLELTIVREAKRHDADAFHRLRSVPGIGKVLALTILYEIHDVTRFDRVQEFASYARLVKCVHQSAGKKLGTGGAKMGNVHLKWAFSEAAVLFLRHTKDGKKLLAGIEKKHGKGKALSILAHKIGRAVFYMLSRRTVFSMEKFRAA

SEQ ID NO: 162823 - protein, 419 aa, unidentified
MKIVFPVCCGVDVHKNVIVATIAITDKSNITQYIVESFSTINADLYRFRTWLLEHRCFNVCMESTGKYWIPVFNILEEANIKVLLTHPKYVRAIKGKKTDKKDSKWISDLFKFDMVRSSFIPPKDIRALRELGRYRYKLVCMLSSEKNRYQNCMTVSNIGLASVLSNPFGKSAKDIMRYVLSSDVFSEEHCKTLIQKSAKKKTELILASIRGSRIESDQRFKMNEASAHMDYLEQAILRTEVELYTRIQPYYHLVEHLSNQLPGISQLSAALIISEIGIDMSVFESDKHLNSWAGLTPANNESAGKKKSVRISKAGQFLKPLLVQCVLAAVKSTKQPYFATKYQRLKKRRGHKKAIIAIARMMLTCVYHMIQTGEPFNPSDLESFNNPAPHKVALNDENAIAFLAAQGYDVSSLTKTAV

SEQ ID NO: 162824 - protein, 393 aa, unidentified
MYLVGIDIGKLKHSFCLLEKETGEILVEPVFFENNRDGFNALLSSFKHLPQKDILIGMEDTGHYNLALLKFLLDRNYQVALINPVATNLTRKMQGGISKNDKLDTLTICDVLSSNQRVKSYRISKYSRFDLYEQKQLTREHHNLKEEENQLSNRLQKCIDVVFPEFNSLFKSKYGIVYMNILKEFGSADAIAHADIRTLRKCFDTGRGKHISLTAQELKEAARNSIGFPSSSEATQIKHLVARIELIKEQIAEIDKKIEEFSIQNNSPILSIPGISHFSGTSILAELGDIHNYSKPSQIIKFAGVAPLTYESSQFTAQHTAITKKGCKYLRKTLYQIITPVIQYNPVFRKFYLLKIAQGKGHRCAQGHCVRKLMRVIYHLLSTGTQFDPALLR

SEQ ID NO: 162825 - protein, 386 aa, unidentified
MEVVVERCCGLDVHQKTVVACTLVGNLSTNRPKKVIKTFGTRTFELQELASWLHDQEISTVLMESTGQYWCPIWNVLEKEGFKLILANPQRIKGIPGRKTDQKDAEWIAQLGRVGLVPQSYVPPTDIQELRSLTRTRTHLIVERTQHKNRIHNILQQGNIKLTGFLSDIYGKTGRKLIDLLLSGEKIEEETVLRCLHSRVKASQRDIVESLKGTLTKAHRFEMQVHFDIIDCLEEQITELSKEIRIRTAPYQDIIDKLIKIPGIKESCVEVILSEIGPDISAFQTQSHLASWAGLCPGSYESGGVRKKAHIGRGNKYLRTALYHAGRTAAHSNSHIFSEFYQRLASRGSKQKAVIATAHKILQVIYRTLESANKKSYCDGLGLTSQ

SEQ ID NO: 162826 - protein, 326 aa, unidentified
MKNLFVGVDVSKDTLDVCTLTEAHEVVSKHQLFTNNRKGIKSFLSHLDPHTTWVCIENTGHYGSLFIGLLVAHGVQVAVVNPLEIKRSSGIARGKSDPIDAYRIASYAVTFKHKLENYMLPCAAIRKLKVLMSQRDLYTKILVQCKNNLKGLEIHAQTLEVKEAIQICKATINNQAKAIKKLTASMKEIIQGEQKLKQTYQRITGVIGVGPITAIKCIIETANFEKFTNPRKFSCHSGLAPFSYQSGTSLRGKAKTSKICNKALKGLFYRAATTALSHDPQLRAYYDRKIGEGKHKLSVRNAVANKIILRIFAVAKREEPFVKLAA

SEQ ID NO: 162827 - protein, 408 aa, unidentified
MEVLHPRCAGLDVHKDTVVAAVRCVSEPRHLEVRTFGTTTSQLLELGEWLASHDCTHVAMEATGVYWKPVWHILEGNLELILANAQHIRNVPGRKTDVSDAAWIADLLAHGLVRGSFVPPAPVQELRDLTRTRKQLVREIAQHTLRLQKVLEDANLKVASVLSNILGLSGRAMITALIAGETDPERLADLAQGLARKKKKELTEALRGRITPHHRGLLKLHMQLIDALEAALREVDSSVGKALEPIRVGARLLTTMPGVSDIVANVIVAEIGVDMTRFPSAAHLVSWAGLCPRNDESAGKRRSTRVRKGAPWLKTTLVTAAWAAVRRKATYLHAQFLRIRGRRGAKKAIVAVAASMLTAAFYILRDGTEYRDLGPEYFAQRDQSKTISRLLRRLNNLGLQVEVKPTAA

SEQ ID NO: 162828 - protein, 400 aa, unidentified
MRVVFGIDVSKVSSEVAILVNGEKVHNYTMSNDAIGFSRLLGDLKTVHKPEIIFEATGVYSRRLQAFLDEHGYAYTRLNPLEAKKQLDSLRVRKTDQIDAEKLAQSQFVLNRKPTYVQEEVYQNLRNLSCFYQNLTEDIVRAKNRLHKVLQVTFPELENILSTPTSEQYWNLVIAFPCKDFVLDLSKDELSESIRQSTSKRISDKRVAYLAEKLIALANQSYCAVKKNSPMLEEVRYYTKELLRLSEQRQAVLDEMVELAQPLPEYDILLSIPGIAETTATSIIGELGDIRRFQSANQINAFIGIDLRHYESGNFLAKEHITKRGNPYARKILFKCIHNIASASHTNPCHIADFYEKRKRQSQTTSTKPHTIASIHRLIRTMYYLITHNKLYDYTSTQNR

SEQ ID NO: 162829 - protein, 413 aa, unidentified
MDILHSACAGLDVHKETVVACVRRVTAKGKVQRQTRTFGTMTADLLELADWLADEGVTHVAMESTGVYWKPIWNLLEGQFEILLVNARHIKQVPGRKTDVKDAEWIAELLQHGLLRASFVPCTPQRELRELTRQRRQLIQAKATVANRIQKVLEDANIKLGSVASDVLGVSGRDMLEALVAGKEDPEVLAELARGRLRAKLPELRLALQGRVTGHHRFLLRLLLDDLTHHENLIARLTGRIGEVLPAPFAQAVTRLVTIPGIDERAAENILAEIGTDMGQFPSAGHLASWVGLCPGNHRSAGKRQGGKTTKGNRWLRATLVQVAWAASRTKGTYPAAQYHRLAGRRGKKRALVAVGHTILGIIHRVLKDQTTYRELGADYFDRLDTERLTRTLVRRLERLGHKVVLQRQEPAA

SEQ ID NO: 162830 - protein, 409 aa, unidentified
MRYYIGVDWGDEEHAVWVEDEQGQRVSAGMVPHSPVGFSEWGRQLDEWRAQGLGLWAAIERPEGRVVDVLLDHGVRVYPVNPKALARARDRFRQSGAKDDLFDARVLAGFLRTDHAHLMALEPSSEGAQELKLLTEDYQRQVRTQTRLVNQLTATLKAYYPRALDVAELTTALAAAFLQAYPTPATLMTLTERQWQRWAKGHHLSEVRTTDLWTKLQQPQLPVPPHVVRAKSRLMQALVTELTAVVAAVASYRQAIDDVFATMPAAAWARTLPVGEHGVTVPTLWARLGDAPGRWESFRHLQAQAGMVPITVRSGKQVVVRFRFACDKQLRYAVDQLAWLSLQRSEWARAYYDEQRARGHRHRRALRALGAKWLKIIFIMWQRHVPYSEEHHLATMARQALRHPEKKIA

SEQ ID NO: 162831 - protein, 330 aa, unidentified
MEVQQYLGIDISKKNFDVALLKENKYKHKSFKNNEKGYEELKKWLEFNQARQAHCCMEATGIYGEKLAEYIYREGYKISVENAAKISSFAKAQLSRNKTDKADAKLIAQYCQACRPELFTPTPKEVKELKELVRHLTELKEAKTQQSNRLEAVENKIVIESIKSIIKTIEREIEEIEKLIKKHIDNNPSLKADKELLKTIPGIGETTASMLVAEIPEIKSFESAKKLAAYAGLSPSQYLSGSSVRKRTRICKIGNSRIRKALYFPAITAMKHNPILASFSQRLASKGKHNFAIICAVMRKLLHLAFGVLRSGKAFDPNFSSSFSSLSANP

SEQ ID NO: 162832 - protein, 344 aa, unidentified
MNKLSRVGIDLAKNVFQLHGVDRHGKAVWRRRLVRDQWLNVLLGKVEPSCEIGMEACAGAHHWARQLQANGFTVKLIAPQFVKPYVKSNKNDANDAEAICEAMSRPSMRFVAVKTAEQQDIQAAHRIRAELFGHRTAKANQIRGLVAEYGLVAPKQLACLRVAVPAWLEDAENGLTTRFRGLLSGLWNDLMTLDHRVAELDHEIDLIAKSDPVAMRLQQLRGVGPMIATALVATVGNAAQFTNGRQMAASLGLTPRQHSSGGKDRLLGISKRGDAYLRSMLIHGARSVIRTAKQKDDRLSQWVSNLATRRHPNVAAVALANKTARIAWAMLRNGTDYEPDYIVA

SEQ ID NO: 162833 - protein, 427 aa, unidentified
MSYRLAAVDVHKKMLAVVIADVAVEGNYEFERRKFSATPAQFQALAEWFVERGVEEVVMESTAQYWRPVWATLERYWKPVVQKREGAGPKSGTLHLCQAKSNKGPKGRKNDYGDGERMVKRLVAQELTLSFVPDPEQRLLRTVTRRRYQLTRAKVGFKNQLESLLEQAHLKLSSFVSDLLGVSARRMLKAIAKGETDPAALAAMADRNLRATPEQLRDALGACAEMNGVFRRLIQMALDELDVVESHIEKLNQEAMELLKGQEEVVERVAQIPGFGVASALQVIAEVGIDATAFPSEKALASWVGVCPGNEESAGESQSTRSPKGNRHMRRLLNEAAQSAAKVQGGVFDVTFRRLLPRMGYKPAIWAIAHRLCRVLWIILHKRVRYEERGPAVSAKSKRVRTQRMIRELRKLSYQVVGGPVPANTRA

SEQ ID NO: 162834 - protein, 316 aa, unidentified
MAKLVSKITLGVDVAKDQHVVYNWQTEGFTTVPNQQSDIEAWLRSLSGPLRLAIEPTSHYHLVLVEAALAQGVEVYLVNPRQIAHYRHAVNVRHKTDPQDAWLLARYLEHEVSHLRPFLPQDRRAQRLWALLTRRATVVQSRQQLQQSFAEMRVSIKALLSGFQQLLGRLDQQIMQLIRALGWWPDYRCCLSIPGVGPGNAAALVATYHRGAFASSDAFVAYMGLDVRIRDSGLFKGKRKLTKRGEPELRRLLYCASHAARSYHRFADYHQRQLDKGLSKIAARVALARKLARIAFTLMQKQQMFLKQEKSYCSRP

SEQ ID NO: 162835 - protein, 415 aa, unidentified
MALKIVYKICCGIDVHKNFVVACIAKTDKQGITTYESHHFSTYTKGLKELLKWLLDRNCKDVCMESTGKYWIPVYNVLEKDCSIVLAHPKYVKAIRGKKTDKKDAKWIADLFKHDLVAGSFMPPADIRQLRDLMRYRFKLTCFKSSEKNRYQNCLTVSNIQLASVVSDTFGKSSQKILDKILENPDDASFDIESLIHGSMKDKLPKLELAIDGYITPEQAAKLKIIKEHFDNLESRKAELEELILALASPYQQEIAIILTAPGFKNTFSAISVISEIGTNMEAFPSAKHLCSWAGLTPTNNESAGKKKSVRVSKAGCYIKPLLVQCANAAIKSKKHPEIRDRYLRIKKRRGHKKAIIAIARMLLTALYHMLKNGENYNSDLYKKSDILPTTREITVEQAILMAQFQGYRIKSATE

SEQ ID NO: 162836 - protein, 396 aa, unidentified
MTVAKDPGRCVTRFEPKRTLIAVIEMSQSSWLVAAIVPGLKRQPLKRLEVDEAGLLQQLERWREEATRAGHTVKRIAVAFEAGRDGFWLARWLRARGVEAHVIHPTSVAVCREHRRAKTDRLDTELLKRAFLGWLRGERGHCSMAVVPTLEEEDARRPTRERESLVAERTRVVNRMRACLARLGIRSFRPTLRRAPERLEELRTPEGDALPPNTRAELQRDMARLRLITDQIRELEIARAARIDHAPAQGANVMVLLLARVVGVGLETADMLVHEILSRGILSRGLRDRRAVARYAGLTGSPDESGARRREKGLAKAGNARVRRGMIQLAWRFLRFQEGSALAQWYRTRTAEARGGSRKTLIVALARKLLIALWRLATTGETPTGVTLRPTMVVAA

SEQ ID NO: 162837 - protein, 362 aa, unidentified
MERQSNFIGLDAHSRTCDVGWMTPTGKRREVWKVRTTIPELAEAIERVPRPRKLALEEGPMADWLLRQLRPLVDELVVCDPRRNALIGRDGDKTDALDALALADLYRGGYLRAVHHPDSMDREVFKRHVALYHDRVEHRVGEANKVLALVRRYGVVVRDADLADPERRATVIATLPEDPTVRLDVELLLSGYDSATDQVRRARAVLMKLAKKHEIVRRWTGVPGVRWVRAATLLAYLDTPDRFRNKSALWKYLGIGLQKRASGKGPEVLRPPTRFNRHLKNAILGAAMTAIRGKDNPFADQYKKLSERGVAPRIARRTVARTMAAVMWGMWKHGGEYQPGRVGVPDGKEGARDADRPRPRPQ

SEQ ID NO: 162838 - protein, 435 aa, unidentified
MGSKLQKIHAQGAGIDVGSRQFFVGIENQEVKSFDTFTSGCHQVVEYLQQHSITSVAMEATGVYWITLHDMLRDVGIEVAVVNGRHVKHVPGRKTDVKDCMWISELHSYGLLKKSFIPETQVKEMRHYMRLRENHIEQKVKAVQRMDKALVMMNIRLSSVVSDVQGQSSLRIIQAILKGERYAEVLLNLCDSRILMRKAKQMQECLKGFYKPEQLFALKQSWEQYEFSEKQIADCDVCIEKLLQTLTINKPEPVLNEKPKRIYHNKPNVKNLHKMVQQLYDGKDLTVLPGITSYSMLKFFSVTGNDLTNWETENHFTAWLGLAPNQYQSGKIKKYRRIKMNTEAGQILKECVQPLLRSKHLALGVFGKRIASRRGPSIAIKAMARKLACWIYRMVNNGLEFVENGIKQYEERQKKDTLKWLEKKAKELNLMLTPC

SEQ ID NO: 162839 - protein, 422 aa, unidentified
MQNTAARKLRQVPAGYLVIGIDPHKKKHAAVAITQDLTIHDRFKFDNTREGLEFSVRRIRAEMVKSDCRGVIFAIETGGHYWRNVAYFLDERGIPFRFINQYTLKRRREGKDLNHRKNDYRDSEVAAQLLCTGEFVESTIPQGVYAELRSAHNAYRRLVKERTRITNLIKGLLDGLFPEFVHVFKDPCALTALSVLSCSACPGVITRMSDDEFVALVEAHYQGRCLKRKKLRALHLIAKTSIGITAGSQAVATEISFLVEKYNLIKEQVQTIERTLFRLVDETEEGRYMLSITGLNYVSAAGLLAELGCFKSYRTAKQMIKMAGSNPTESESAGKRGAHTPMSKQGRPVLRYCAWTSVIPMLRFNADFRAWAKQRRERPVHANPLGGREIVGAALNKLLRLAFALVKNQTLYQSPQLALVTV

SEQ ID NO: 162840 - protein, 401 aa, unidentified
MHYLGIDVSKSSHQCVILNNNGESLGKSFTVLSSKDDFQKIITKINKYNISKDDIVCGLEATGNLWENLYSFLTQNGFKAIILNPFQTHKYHQALLKKAKTDAIDAYVIAGLLRSGHASHSHIPEEDIQSLRDLVRLKDGYTKDMKTYKRKALSLINLVFPELLTLIKDPFNVVSSEILTHYQTALDFKGLKPKHLLKIARSHKGNNYDEELAEKIITAAKNSIYSGRANTARSITLKSLITQIKHFKEQITMLETEILNILKPDDSNPNTPADNLLTIPGVGPHTVACVLAEIGDIHRFSSCKDFIGYVGLYPKIEQSGISLNKAKLTNKGSRLLKHALYLASVAGLKHNAYLKNLYHKKVSQGKAPKQALIVVSRKLASIIYSMLKNDSIYDITRLAIV

SEQ ID NO: 162841 - protein, 340 aa, unidentified
MAVTVLGIDLAKNVFALHGVDHKGNTILCKPKVSRAKLLETVANMPPCLIGMEACSSAHFWARLFKNVGHEVRLIALKFVSPYRLSGKAGKNDAADAQAICEAVQRPHMRFVSIKSEEQQSIQCLHRARQGLNEERTAICNRIRGLLAEFGVIAPLSPERLRNEFESMKVHLPALATTCMDELFLHIDSIERRLLKFDRLIKETAEQDERCRLLMQLKGVGPMTASALVTAISDGKEFRNGRQLAAWLGLTPSQYSSGGKPKLGRITKAGDNYIRSLLVQGARSMMASAGRKDDPLSKWVCDVKDRRGYWRAAIALAAKNARHCWAILHYGESFENCYST

SEQ ID NO: 162842 - protein, 311 aa, unidentified
MNNTIGIDISKDTLDAHRLADGQHKQFLNGKTGHAQLVKWIGKQSDPLIIFEATGAYHRQLERVLCTHIIPFVKVNPKQARRFAQASGKLAKTDRVDCEMLAKMGAALQLMPKPFTAENLYDLKELLSARRALIKDRTAAKARKATVINALIKQQLEKRLRQIKNDIAKIDALMLDVAREDQYMSERLDILFSIPGIGVITALMILVDMPEIGALNNKQVASLAGLAPMSQSSGKWMGKARIQGGRPNLRNAIFMPALVAIRHNADLKTKYDQLVTAGKEKKVAITAVMRKLLVLANALLRENRKWAEKAA

SEQ ID NO: 162843 - protein, 402 aa, unidentified
MTQESTIVLGGVDTHKDVHVAAVVNARGKLLDAKEFSTTAGGYAKLLAWMQSFGTVDKVGVEGTGAYGAGLARHLADEGIAVVEVNRPNRQMRRRRGKSDTVDAEAAARAALNDEATVVPKSKDSMVESIRVLRVAYTSARNSRTRSTLQIRDLVLTGSTQLRAVLGPLTSEARAVACSRLRPGDVTDPAEATKYALRSLARRHQSLTTEMADLAASLDELTALANPALRAAKGVGPDVAAILLVAAGDNPERLSSEAGFAALCGASPVEASSGKVSRHRLNRSGNRQANHALWVVAMTRLNSDPATKAYMVRRTAEGKTRREIVRCLKRYIAREMFQLLTNPELVPVGMKLRVTRNNAKVTLQTAATALGTTGVTISRLERGLQHNCELARRYEEWLENAS

SEQ ID NO: 162844 - protein, 353 aa, unidentified
MRRPKDKLIAGLDLHSNNVMIGVINQDGKRVAHRKLSCDLKEVVEFLEPLKPQLQSMAVESTFNWYWLVDGLRAQNYPIDLANPAKIEQYSGIKHADDKDDAYYLAELQRLKILPKGHVYDPQLRPVRDLLRRRSSLVHQRTALLLSFQSLYIRTTGQRLDLSDVKKMEPKEAPKLYEHPANQLIAQVQAEHMRALDKSISRLEKAVLGCAREIPMYGKLLTIPGIGRILAMTITMEVGDIKRFKTDGDFASYCRMVDARHLSNGKQKADNNQKCGNKYLSWVFVEASNFSRRYNEQCRRWYDRKAAKTSKVIATKALGCKLSKAAWHVMAGNCDYDEKRMFPELASKKMKAN

SEQ ID NO: 162845 - protein, 416 aa, unidentified
MDVVHERCAGLDVHKKTVVACVLRSAAKGVIDQEVRTFGTMTADLEALREWLVECGCTHVAMEATGVYWKPVYNILEQSEALTLLVINAQHLKTVPGRKTDVKDAEWIANLLRHGLLRASFIPDRHQRELRELVRYRTALIHQRAAEVNRLQKTLEGANIKLAAVLSDVTGVSGQRILEALLEGESDPQQLAELAHHRVLKYKREALEQAVVGRLSDVLRFVVQQQLQHLHDLEAQIAACDARVEDLLRPFDAELERLHSITGVGPRTAQIILVEVGMAIERFPTARHVAAWAGMCPGNRQSGGKRQQARTRKGSPWLRAALAEAAWAASKSRDAYLPALFRRVSARRGKKRAIVAVGHSILVTAYYLLTRGAMYQDLGETYFDERDRQNVVRRSIRRLQGLGYTVHLESADSNAA

SEQ ID NO: 162846 - protein, 377 aa, unidentified
MGDYSEAFVGLDTSKLRNAVAIADAGRGGEVRFFGEIENTPAATAKLVRKLSARYERLTFCYEAGPTGYGLYRQIKALGYECVVVAPSLIPKRPGDKVKTNRRDALSLARLLRADELTTVWVPEGRHEAMRDLTRARETVMLDLRTKRQHVSAFLLRLGRPYPESRKTWTKAHAIWIASQKLEHPQQRLVLEEMMLAIRQAQERLQRIEQAIAAAVPEWSLAPMVVALMAMRGMDMVSATTLLAEIGDLSRFRTPTELMAYLGLVPSENSTGDTIKRGPITKAGNRRARRMLVECSWSYQHPPRVGQAKQTKVDAAPPAVREIAWKAQCRLYRRYRTLIRKGKRKTIAIVAVARELAGFIWAVARAVTATPVVAGTA

SEQ ID NO: 162847 - protein, 409 aa, unidentified
MKSQLETLHKRVAGIDVHRMKHVFTVLSEDAAGNITRHTREFGGFKRDLKALAAWLREMGVELVILESTGIYWKSVYARLEEAGLVTWVVNAHHVKNVPGRKTDVADSEWLAQLGRYGLVRPSFIPPKDLRELRLVSRYRRKVEANLAAETNRLHKMLDDAGIKLGGLVADINGQAARAMVDGLIDGLAPSELIKLSGRLKAPKETLLASLDGDLSARHRLVLEEIREHMRQLERHLERLDAYLRDAMVPYAWAWTVLQTIPGIGEIAAALILIEIGDDLTHFGNADRFASWAALCPGNNESAGKRKSGKTRKGNSMVRYLLCEAANGAIRTLSVFREKYRGLVIRRGHKKAIVAIAHKMIRTIYFMLTRRETYHDTGFDYAAANVKKNAPRWIKALETHGYVVKLAAA

SEQ ID NO: 162848 - protein, 432 aa, unidentified
MSKFFNSPTVGIDVSADFSYVAILAPNGDVFKKAFRIKHDVSGFNHLLKEIKKVEEEFSMKTAIFMESTGVYHLSLFHFLNKNFDNTFVINPLVTKSNKNVDIRKVKNDKKDALSIAKIGKFQNIKLSQSVSLDIFLLRSLVREYYKLTDNCSLFKKKLSTDLRVIFPNYTSVFSNITTNTSISILSEYPTPQAILNASKETILDILICKSKKGSKWAEDKYSKLISVATEATMIGLPLLGLSIKISSSITLIQALEKEIENLLTEIETLINSCDFPEQIRKNIELVDSIPGVGRLTAITLVAEIGDIKGFIKPKHLVAFFGIDSSINESGNFKGSQNKISKRGTRIGRRALYAVALACIRTNRSGIPINKVLLDYYQNNMNGKKPKVALVAIMHKIINYIFAVLRNQTPFELRDPKLHQKMYLENNYKDAV

SEQ ID NO: 162849 - protein, 436 aa, unidentified
MRGCRCSMIMGFTKPIEHFNLQRKKVITMNTLYVGIDVSSKSNVIYLMLPNGDKHSNFSVANSHEGSTQLVKRILSALTSHSLDTVLIGLEATSVYGDNLVYFLREDATLAPFNRKIHVLNPKQVKKFHDAYNDLPKNDYVDSFVIADCLRFGRINKEVYMGDYRYKALQNLTRARFFAVQNLVKEKQRFMNVLFKKYSTMTQEKVFSDTFSTTALAVYDEFESAEALANMDLHELTDFIMEKGKNRFPDPDAVAKAIQKAARSSYRLPKTVNDSVNQVLSISITSMKALESQIKEFDKAIKAQMELLPNVLISIPGIGPVYSAGIMAEIGDINRFNSQAALAKYAGLAWKQHQSGGFESEVTRLIPSGNRFLKYYLCEAAFSLVRCDKEYSDFYRLKYKEVNRCQHKRALALTARKFVRLVFRLLKDNRLYCPAK

SEQ ID NO: 162850 - protein, 379 aa, unidentified
MPTPTTHTDQPRPDSTLHVALDLGNTSWCLAGAPGVAAPARVRAFPARSLARLHAELASAGQHFGLPADAPVVLCYEAGRDGFWLQRACTAAGIVALVVDSSSIEVSRRARRAKTDRLDATALLRLLFRHTAGERGHWRVLHVPTVEEEDRRQVHRELARLTQERTRAVNRLKGLLALHGIRLTSLRAVPDQLPHLSQWDGTPLPPGVCERIQLIWARLTLIQAQRTALVRARRTLLETATDPAIQMVRRLLQLRGVGEVSAWLLTMELFSWRRFRNRREVAGVLGLTATPQASGDRRRELGIGKGGSALLRGLAMELAWGWLRYQPASALSRWYRTRFAAGGSRQRRIGIVALARRLMIALWRYVETGQVPAGATMKA

SEQ ID NO: 162851 - protein, 350 aa, unidentified
MIVLGADTHKSSHTIAAVDTSTGQVLADKTVAVGARGFAALVLWARGLDGERVWALEDCRHVSGALERFLISRGERVVRVSTRLMAGTRRSSRERGKSDRIDAVSVARASLAAGIETLPTAALAGPELDIRLLVDHRERLVRTRVALNNTLQWNLHDLWPELTLPGGALFSKKWTTKIARRLARAEQTMRVRIARDELHRMRELTQAIKDLKAEITVLVTEIAPQLVAEPGCGPLTAAKLVGEIAGAERFTSDAKLARAAGIAPIPASSGRTDRHRLDRGGNRQINAAIHRMAVTRARCDPETQDYIARKKTEGKTQRDAIRCLKRHLARRIWHLLQPPTPSETSLNLLT

SEQ ID NO: 162852 - protein, 347 aa, unidentified
MRFYNRPHTYYCGIDLHVKTMYVCILDGTGQVLVHRNMPSTPPAFLAVVAPYRDGVAVAVECMFTWYWLADVCAAEGIAFVLGHALAMKAIHGGKAKNDRIDAHKIAVLLRGGMLPQAYVYPAAMRSTRDLIRRRLHLVRKRGQLLAHIQNTRAQYNLPVFGRKLAYHANRAGVVEHFPDPSVQKSIAVDLALIDQYDALVTDLELTIVREAKRHNADAFHRLRSVPGIGKVLALTILYEIHDITRFDRVQEFASYARLIKCARESGGKKLGPGGAKMGNVHLKWAFSEAAVTFLRHNPEGQKLVKRLEKQHGKGKALSILAHKIGRAVYYMLVRGTMFSMDKFLAA

SEQ ID NO: 162853 - protein, 324 aa, unidentified
MKDIVLGIDISKKTFDVALLTDDKVYNKVFNNNEQGFNALSAWLNKHGASNIDACLESTGIYGEALAEYLHGKGHQVYVVNPVRIHSYAKSKQLRAKNDKLDAKLIAEYCRLHDNLRPFTPAPAEIKHLQQLERRITDLKNTLIQEKNRLEAASRQDMVKSSILRTIRFIEAEIAALESDIDDTIGKNPELSKNKELLESPKGMGPVTSRMFLIEFGSFKTFNSARAAAAYAGITPFTRRSGSSLASPGSISRMGNSHIRQVLYMAAQAAARYNPVFKAQYNKLRAAGKAYKVAICAIARRLVHVAYGIIKYQRPFDETLFSVE

SEQ ID NO: 162854 - protein, 337 aa, unidentified
MTHITRMGIDLAKHVFQLHGVDERGHTVLRRRISRAQLRPFIAQLHPCLIGMEACGSAHYWARELAMLGHDVRLIAPQFVAPYRKNDKNDGNDAEAICEAVGRPHMRFVPVKDVEQQAVLTVHRARQLLVAERTALVNQTRGLLAEYGLIVSTGVGVLRRALPDRLETPALPGLAREVFADLADRLRALDERIATYDRRVAALARQTEPAQRLMQAPGVGPVTATALVATVGNARAFKNGRQFAAWLGLGPRQHSSGGTRRLGRITKRGDVYLRTLLIHGARAVMRQLTRRTDATSRWILALKARRGFNKAVVALAAKQARVLWALLATGRPYVACS

SEQ ID NO: 162855 - protein, 321 aa, unidentified
MDAALGIDIAKAKFAVTLRTPDGKTRRKTCRNAPAGFEDLAAWLARQHVTQVHACLEATGTYGEALATWLYDAGHRVSVVNPAVIHAYARVQLTRSKTDALDADLIAQFTLTQQPALWTPPLPEIRALQALVRRLDALYGMHTQETNRLAAGVGVGEVRASIEEVRHHLAAQIAHVKRLIAEHIDRHPGLRQRRDLLTTIPGIGDATAAVLLAELFDKSYESARQAAAFAGLVPRLHESGTIRGRASLSKVGPGRVRKALYFPAIAALRCNPTLGTRRQRLHAAGKPPMVIIGAAMRKLIHIAFGVLKSGRTYDAAAPEIA

SEQ ID NO: 162856 - protein, 347 aa, unidentified
MQFYTNLHPFYCGIDLHARMLYVCILDERGDILVHKKIKDSPEQLLTLLSPFLGNIVVGAECMHCWYWLSDFCKQHNIDFILGHALYMKAIHGGKTKNDKIAAYKIAKLMRGGNFPLAYVYPKEKRAIRDLLRRRTHAMRHSAELKAFVKNALAQYNLPLPEKSDLSYNTGRDAMRGYFPDPLVQRSVDMNLRLIEIYDHEVSSIECHVEKITKNDNGRDYYLLRSLPGVGRVLALTILYEIGNIQRFESVQKFASYSRLVKCKAESAGKTYGTQGNKIGNAHLKWAFSEAAGLFLKGNPPAQAYLAKLQKRMSKAKALSALAHKLGRCMYFMLKNKTERCSKVNAF

SEQ ID NO: 162857 - protein, 402 aa, unidentified
MQQSNTMIRSSITRKRRKARVLPPTAMSGMELLTIRRSTVIGLDVHKHKITVAVLPPAEVHPTESWEIENHPKVVARMATRLAPRGKLIFVYEAGPCGYEVHRQLTQLGYQAVVIAPALVPRRPGDRVKTNRRDAAKLASLYRSGELTKIRVPTREEEAARDLVRAREDTLKDRLRARHRLSKFLLRQGRIHYGTKAWGTVHWAWLRSQRFEFPLSQATFEAYMRAVEEADARLESLEQQVLALAQTEMYRIPVQYLRCFKGIDTLGAVTALVETQDFRRFPKAPMYMDFTGLVGSEESSGDRERRGGITKAGNSHLRRLFVEAAWSYRHRDITSRELAKRRHGCPPAVVQIARNAQHRLHRKFWRLTSRGKLNQVAVVAVARELAGFVWAIAQQFPPQMAA

SEQ ID NO: 162858 - protein, 278 aa, unidentified
MNYLGVDYHKSYSFATMITEEGEIRNKEKLLNRREVFKEYLRGYKDVIAVVEASWGWPVAVELLEGLVREVILAHPYKVRVIAESRIKTDSIDSEVLAYLLRAGLIPEAYKRSREELKRQKVIRPRSFLVKMRMQVKNRIHALMGTQREEVREAVGGYSDLFGKGGMEWLKSLRLEEPGGTILGELIEVYENLCGEIAKQDRVVKRMVAEDPDCRLLKSIPGIGDFFAALIKSEIGDIGRFPSASKLCSYAGLVPSTHASGGKVWHGRLTKQGSRWLR

SEQ ID NO: 162859 - protein, 402 aa, unidentified
MAYDFVIGVDVGKYFHHACVLDPQGRQVLSKRINQHESSLRKLFGQFIADNASVLVIVDQPNNIGRLTVAVAQDMGADVRYLPGLAMRQLSRIHVGNSKTDVRDAYVIAHAGLNLPDALRSVDRVEEVFTQPKVLNGIDEDLARAYTRQINQMRSALVGTNPAFEHVLRGQMIHRKWILHLLAKYGGPTKIRRIGKTRLAAFARSHKARNPEPVIDAMLAAIHAQTVSIAGAEYAELGVAMSAKDALAKLEHRKEIEAQVLKLIQDIPQTEILLSMPGIGPRSAAQILMTAGDMSDFPDAAHLASYAGLSPRTNQSGTSIMSNSPNRAGNKKLKNALWQSSFASIRFHERSRQFYERKRKEGKRHNAAVVALARRRLNVLFAMMRSGELYRDISTVREAAAA

SEQ ID NO: 162860 - protein, 312 aa, unidentified
MKCAGIDVSKDFLDLFVPQVGFQRFEYSEKGLEQLVALLDDQRVDLVVVEASGGLELEAVDRLYICDHTVFRLNPRAVRAFAESIGRLEKTDRVDAEVLCLFGPTAQATYPAYEPATAHIRRLKAMWTRRRQLVEMRADEQRRRRRADQGMADSFDAIIGVLSEHIDELEARMQALLKHDELRASADRLRSVPGVGKMTTIVLLAHLPELGKLGPKKIAKLVGVAPMADDSGRRKGHRHTRGGRQQVRNTLYMATLSAIRYNPFIAAFAERLDRKGKHHKVIRIACANKLIRLLNAMERDKLTWQQTQAAAA

SEQ ID NO: 162861 - protein, 447 aa, unidentified
MPELANSVEPEFVACIGIDWGDKKHAWALQIAGSTKIEQGEVLHTPEAIQEWAMGLRQRFPTGRLAVALEQSRGPLVFALSKYGHLVLHPVHPTSAADYRKIFRPSGAKSDGPDAAMLLDMLVRHRDKLRPLNPDTPETRALQLLVEDRRQLVNERTRLSNRLGADLKSYYPQVLQWFEDPYAPVALDFLERWPTLEQLQKAKPATLQKFLQKHQCRDEAKNRARMEAMRTAVAATTDFAVVTVGCAAARAAVRLLRDLSQSIREYDQQIEKLAKAHPDFAIFDSLPGAGPVLVPRLIAAFGTQRDRYQNAAELQQYSGIAPVTEASGQQHWVHWRWSCPKFLRQTIHEWAAQSIQHCEWAAAYYQAQREEKNKSHHAAVRSLGYKWIRIVFRCWQDRTLYNNSRYEAVLQSHYKKAAARPNQPSRFEAPIQWVSCGSFQKIAFKNA

SEQ ID NO: 162862 - protein, 347 aa, unidentified
MEQISRIGMDTSKHFFQLHGVDAAERVVLRRKLRRKELLAFFAKLPATVIGIEACGASHYWARELAQLGHTVKLIAPQHVKPYIKRNKNDGRDAEGLCEAMSRPTMQFVPVKTQEQQAALMLMGMRERLVARRTQLSNAIRGYAAEFGLTLAKGLDKIEPLLAEIAADEALPALARELFAMHGREYAQLQLELKATEARLMAWHRANADSLRLAQIPGIGPVVATALVMKAPDPRLFPSGRHFAAWIGLTPKDHSTAGKTRLGTITRAGDEMLRSVLVAGATAVIQQARLGRGRPSPWLLALLARKSSPKLVAIALANKIARIVWKLLVTGESYHAGCKPIASAHAA

SEQ ID NO: 162863 - protein, 354 aa, unidentified
MNGVGTEAAPSIIEGTTMDHYAGIDVSLESASVCVVDAKGKIVRECKVASEPEALVGCFCALGLPLSGIGLEAGPLSQWLCAGMRKAGFAVELLETRHVRAAFQAMPVKTDRKDARGIAELMRLGFVRPVHCKSVGAQEMRTLLNARKLIQSKLKDVEMSLRGMLRGFGLKVGRTTERRFADRIRELVAGQEALEFVAGSLLAAHAVLLCEFNRLDKRLRTQARANPAVRLLMTAPGIGPLVGLTYAAAVDDPRRFKSSRTIGAHFGMTPRKYQSGETDYSGAISKVGDGAVRTALFEAAHVIMTRPIKGGWLKSWALKLAKRVGQKRAKVALARKLAVILHRMWMDGTAFRFA

SEQ ID NO: 162864 - protein, 319 aa, unidentified
MLGIDVSKDTLACTLFDAQTQKPLWSRTVPNTTAGINRLLRQTPAESPWALEPTGRYSLLAATSAHQAGREVLLAQPKKARHFLRSIQSRAKTDALDSYGIGLFALCRPLPAYPLKSEVVEQLDQLLSVRKSLSASLAAFGLQARELPHAAAALEPVIAALEAQKAEVDEQIAQFTASQAEFSIAAELDRVPGIGPVTAATLASRLAGHTFGHSDQFVAYCGLDVGVRQSGKKHGQTGLTKQGDGELRRLLYLAAQANLRSKNSPFKAQYEKERAKGLSSTAALCAVARKLARLAWSLHKHRTAYDPQRVYQQNPTTYP

SEQ ID NO: 162865 - protein, 407 aa, unidentified
MKENSSNTGTTAQAMEQSHRATRKRGKSMSFKLWLTLRARIEECSAQVAMIGIDIGDRVSELCVLSHDKQVLVRGGVATDRATMERFFQPLAPTVVVMETGTHSPWMDRLIGQCGHRVLVASAREVSRVLKNKKKNDRRDAEQLARLAAADETLLGLVKHRSQEAQLDLGKVKVRDHLVKIRTELCNTARGLVKSHGHQLPKVAPEAMSRQVGETLAKELQDLIAPLLKHIEQLNESIKELDKEIEELGKEKYPQTSQLQQIYGVGPIVSLAFVLTMDDPQRFGKSRDVGSYLGLTPAQDESGASKPELRITKEGDGLMRTLLVNAAQTVMRKNSPECDLKRHGMKLAAKGDKTAKKKAVVAVGRKLAVLMHKLLVSKAPYNPQHNVQERIRAEQARQQQVARKAVA

SEQ ID NO: 162866 - protein, 343 aa, unidentified
MAIVNRIALDLAKDFIQVLALDENEQEVFNKKLRSNKVLAKLATLKRTDDCEVAVESCGMSHYWRRECEKLGYQTVALPPRFVKAYLQGEKNDANDARAIAEAASRPNRQTVRLKSIEQQDLALMVNQREGFVQTRTQFSNRLRGQLAEYGIILPKRVSTILQRVPEILEDDSNALTLQSRDLINRLYQMLRAVDEEVKALDKRLAAQADNNEDSRRLMTIPGIGPITATSLLALIGDVNEFKRGRNLSEYLGLVPRQNSSGGKDRLGGITKKGNTKLRTLLVHGARSALRVAQKRQDRLSLWAQDVAKRRGNNVAAVALANKHARIIWAMLKNQEDYRMTAA

SEQ ID NO: 162867 - protein, 385 aa, unidentified
MQTPNDLSQSGIVLKQDSTLIAVIEMSLSSWLVAGMVPSVERQPLKKLAIDENALLKLLYRWREEAEKAGRKIERVAVAFEAGRDGFWLARWLRARGIEAHVIHASSVAVSREHRRAKTDRLDTELLKRAFLGWLRGERDHCKMVAIPTIEDEDAKRPNREREGLVGEQTRIINRMKAALSRLGIRGFNPKMKKAAQRLEDLRTPEDEPIPPNTLAELRRDMERRRLISEQIRQIENARLERIEHAPRHGPHAMVRVLARVIGVGIETADMLVQEALSRNMRDRRAVARYAGLTGSPDESGTRRREKGLARSGNARVRRGMIQLAWRFLMFQKDSALARWFRARTENARGARKTMIVALARKLLIALWRLVREGVVPDGVVLRPV

SEQ ID NO: 162868 - protein, 342 aa, unidentified
MEKIATVGLDIAKSVFQVHGVDAAGEVVVRKRLSRARVIPFFARLPRCLVGVEACSNSHHWARELIALGHDVRLMPAQYVKPYVKRGKNDAADAEAICEAVTRPTMRFVTVKTPEQQSVMMLHRVRLMLNRQRTQLSNATRAHMSEFGIVAPVGRIGLERLLAIVADKDDERIPPDARLCLEMLGAQLAIVKEQILENDRRIRASARDTEVGRRLMEIPGIGPLLASAFVASVADPRLFKTGRDLAAWIGLVPRQNSSGGKERLGRISRAGNQYLRQMLVVGSMAVIRHAERHGTKRPWLIELMKRRAKKVAAVALANKTARMVWALMTSGERYREPQVVHA

SEQ ID NO: 162869 - protein, 348 aa, unidentified
MLADEVDYVLGVDTHRDEHVLAVVAAPVGAVLARDVVQADVRGYRKALRFAKRVAPGRRAWAIEGTGSYGAGLARFLAGRGELVLELSRSPRAERRLRGKDDTLDAARTARAALASETLALPRAGERREALRLLLAARRSAVDVRRQALGQLRGVIVTSPDRLRDELRRLPTGKLVERCSRLRRTSAGADELATRLVLRSLARRIQAATGEAGELERGILSHVRALAPTLLDEPGVGPIVAAQLIVAWSHPGRLRSEACFARLAGVAPVPASSGQTQRHRLSRGGDRQLNRALHTIVLHRRQHDPATKDYIAKRIAEGKSRRDATRLLKRYLARHLYRQLQQQQPLMA

SEQ ID NO: 162870 - protein, 345 aa, unidentified
MKYYAGLDVSLEETAVCVIDGEGAIVAEAKVASDPGAIGQYLEAWCGSLEHVGHEAGGLSPWLHAGLQERGLPVVCLETRRMKAYAKASPVKTDRRDAKLIALALRAGLYRAVHVKSEAAHKLRLALTGRQLQLGQARQLQNKIRGDLKVFGIKLGRVGSGGFAARVKACLAGRDDLWALVAPLLQMRAALLAQVRAYERMLRRLARGDALCQRLMTVPGVGLLTALAFRCGIDRAERFTRARSVPVALGLTPRVDNSGELERNGAITKAGDPLLRGLLFEAANALLTRSKRWCALKRWGLDIAKRRGMNRARVAVARRLAIILFAMWRDGTAFRWTAKPAAAQG

SEQ ID NO: 162871 - protein, 390 aa, unidentified
MDVLYQSCAGIDVHQANIVVCILHGPLTSTRPKREMATFDTTTKGLCACHDFLSQFHVEAVGMESTGVYWRPVWHALCDDFELILAQPAHMKAIPGQKTDKKDAHWIAKLTRIGLLPRSFVPDEIIQELRELTRQRKHYVESRNRETNRIHKILQSGGIKLTTYIEDIMGLSGRNLLQLLVDRTPITPRIVHQSVYTSLKKKVPQLLEALDGYFSDHHRFMLKQSLEIYDFYQKQIELLEERINVYLSQYENHVEILDSIPGIDVITASVIISEVGVDMSQFPTAGHLASWAGLCPGNNESAGKKRSTKIRHGNSYLKKCLCQAAFAIKKQKGSPLADRFYQIQSRRGSQKATIALAHQLLKIAYILLKEQITYPEFLAQKKTTRDELVA

SEQ ID NO: 162872 - protein, 347 aa, unidentified
MITELLSVGIDIGKDTLHIVGFNDDGSYAFRKKIRRLSLVATFEKLPRCIVGMEACMSAHFVSRTLRKLGFDPRIIAAKYTKPFVKGQKNDYNDAEAVAEAVLRPNLNYVQEKSQDQLDLQALHRVRSRLVSRRTATINQIRAFLLEQGIAVRTGSSSLRNSLFAILDNRANEISSRMHDILIGLYEDWLWLDERIDATSTEIEQISKYDVGCQLLMSIPDIGPIISTALVAAISNGSAFERGRDLGAWLGLVPRQYSTGDKPILGKISKAGNRYLRMLLVQAAHVLMMRPKLWQNLSFGDWLERASKRMHKNKLAVALANKLARIAWSVLYNCTEFDNHTADMEAI

SEQ ID NO: 162873 - protein, 350 aa, unidentified
MRFYKNQDHQFYAGVDLHARTMYVCILDQADDIVVHKNLRADPKLFLQTIKPYRNGLVVAAECMFAWYWLADLCEDHHIPFVLGHALYMKAIHGGKTKNDKIDSHKIAALLRGGNLAQAYVYPRGMRETRDLLRRRCFLVRQRALLIAHIQNEASQYNLPAFTKKLTYAGNREELGVAEHFSNPSVKRSIQTDLALIDAYDTQIGELELYLHRHAKIDDGDTYHRLLSIPGVGKILALILLYEIHDIARFPDVGNFLSYARLVRGSHESAGKKKGSPGKKIGNAHLKWAFGEAACLLVRHSERGKAWMTRYEKKHGKAKALATLAAKLGRTVYHLWHKRAVFDETRLFAS

SEQ ID NO: 162874 - protein, 393 aa, unidentified
MICVGIDVAKDKHDCFILNSEGEVLADVFTIPNNAEGFDRLLQTIRRYARPEDKMKVGLEATGHYSYNILGFLLNEGLPTYLINPLHTNLYRKSLSLRKTKTDRIDARTIAAMLMSDVDLKPYTDTAYHNEELKSLTRYRFDKVCERAKLKQSVSRLVTILFPELEKLVPTLHMASVYALLSEFPGAKQVAGAHLTHLKAVLYDASRGRYGRDMATTLREAARCSVGSVMPAKSLELQHTIRLIRELDAEIEDIETAIQSMMDEIQSPITTIPGIGVRMGAMILAEIGDFSRFDSPDKILAYAGMSPSTYQSGQLSLSGTYSHMEKRGSRYLRYALYNATKYVCLWNPTFAAYLAKKRAEGKHYNVALSHAAKKLLRLIYAIEKSQKPYCSAA

SEQ ID NO: 162875 - protein, 320 aa, unidentified
MAETKSKSFIGIDVCKQQLEVAAHESDYQFRCANKVSAFGELIAELIALRPILIVLEATGGVETRVVRALQTAGLPVVVINPRQVRDFAKALGQLAKTDRLDARVLAHFAAAIKPPLRPIKAKEQQELDALTGRRGQLVEILADEKNRRASAASDTVREQIKEHIDWLEDRIAELDEQIKALLQTSPRWQVKDQILQSVPGIGPVASFSMIADLPELGTLNRQQISKLVGVAPLNRDSGQQRGTRHIYGGRAGLRRVLYMAALTASRHNAVLKEFYQRLRANHKPFKVAITACMRKLLTIINVMMRDGTTWKIQDEPVSA

SEQ ID NO: 162876 - protein, 458 aa, unidentified
MKEKDQELSMKIVHPHAAGIDIGSKSHWVAVDQSPANVREFGVYTRDHQRLIEYLRLHQVTTVAMESTGSYWQTLFHALQKVGFEVILVQGTQTRNIRGKKTDVLDCMWIQKLHTLGLLTSSFLLSDHLQTLRTYYAHRDHLIEQTAMYINKMQKALRLMNIRLDVAIRDISGKSGRAILDAILAGQRDPEYLASLAHFRVKKTKQEIAAALHGNWRDDLLFELQSCLAFYDTYRREIVTCDQKIETILQQHISHPNLLVLTSEPSDKKIRKQVNRNSPSFNVRHLAFAHLRTDLFQIPGVSHTTILCLLCNMGNDIKRFPSAKQFASWLRLVPNNKVSGGRIISSRTPKGKNVLAIALRNAANSIGNQTEHPLAPFFKRIAYRKGRNAATTATARKLAIIIWNMITKNQPYLQHDSQILFEKRKTAQVKNIKNRLFKLNLTDSEMISLFKRTSLPDT

SEQ ID NO: 162877 - protein, 344 aa, unidentified
MLYVGLDVHSRQSSLCILNANGGTVNQIQLKGPRAAVVDRLRQLDQPFSICYEASCGYGHLYEALRPLAHQIAVAHPGKLRLIYGSKRKNDRVDAQKLAKLLLLDMVPPVHVPSIDVRAWRSLIILRQRVMSQVVRCKNQIRGVLRENDIAGAKWLWSRRQLAWLQSLELHPVARLRLELAVEEFQTLDARIKRIERELQTYADRHPAVTVLMTIPGVGIRTAETFVAWVDDVTRFRNNRQLGSYFGLVPCQDASADKNRLGHITRDGPPVMRKLICEAAWTAIKKDKTFRAYFEQVMGGKPERKKIALVATMHRMIKVMGAMLRSGEPYHGETLKRRCAAVVE

SEQ ID NO: 162878 - protein, 339 aa, unidentified
MDHVAIDLGSRKSQICVRNSEGEILEEKRWETLELKRYLEGRPKSRVIVEICAEVFGVVEVVRELGHETRVVPATLVRTLGVGARRTKTDQRDARVLSEVSCRIDLPSVHIPKAQSRERKTACGMRDALVGARTKVINTVRGWLRGQGRRLGKGSRVTFTARVRVACGPELPDYVERQLRVVEALTVEIDEADKSVEAQTDGDDTCRRLMTVPGVGPLTAIRFVAALDEVGRFANAHQVESYLGLVPGESSSSERQQRLSITKAGPPELRWVLVQAAWALRTRCRQPAAVPLQLWAHRIELRRGKRTATVALARKLAGILYAIWRDGTEYDGARGAQMI

SEQ ID NO: 162879 - protein, 386 aa, unidentified
MDHPTTLSVPDPTGICGDCATLFVSLELSRSTWVATSLALGSRKMSKHTLVGGDARMLLDLLARLKSKAEQRTATPIKIVAIQEVGLDGFWIHRLLEANGVESHVVDPASIAVPRRHRRAKTDAIDGETLLRTLMAWQRGEPRVCAMTVPPSPSEEDRRRVSRERAMLLRERIRHTNRIRGLLFGQGITNYNPLHKNRRKRLEELRTGDGHPVPAHLKAEILREIDRLELVLRQISEVEAERDKMLRPAQASSPAALLMRLKGIGAEFAGVLYLEGLFRHFENRRQLAAYAGLAPSPWKSGSVDHEQGISKAGNPRLRTTMIELAWMWVRYQPASALSCWFRQRVGSERGRIRRISIVALARKLLIALSRYINHGEIPAGAVVKPV

SEQ ID NO: 162880 - protein, 351 aa, unidentified
MGKIITDLSSVTTVGLDLAKHVFQVHCVDASGRVVVAKSVRRNKLLEFFASLPSCLVGLEACGSAHHWARELVKLGHDARLMPPAYVKAYVRRQKNDAADAAAICEAVSRPSMRFVPLRSLENQAALMHHRVREMLVAQRTQVLNAVRGHLAEIGVIAAQGPKNARDLAKLIATDEDTLPYLVRAALAPLVRQLDRLDEDIGLADDAIKAMAKADESARRLMSIPGIGPVTASAIAASMQDVSSFSGSREFSAYLGLTPRQNSSGGKERLGRVSKMGNRYLRKLLVVGAHAVLYNRKGHDDALRTWACKLMETKPFKLVAVALANKLARIAFAVMRDQTPYSAKPFSPAQA

SEQ ID NO: 162881 - protein, 298 aa, unidentified
MSQNDFKTSETMQPQEASPVKHQMSVLGIAIAKRLFHIVGMHERGQLVLRKRLARNALMPFIAALPPVLIGLEACGGAHYWARRFREHHHDVKLMASQFVKPSSKSNKNDMRDAEGIGEAVTRPTRRFVPTKEVAQHDIQALHRVRERLRGARTALVHERHGLLYAYGMVVPTGVSKFRQTVVGKLETDKAKLTPLSQEMFGKLMDEFAAVEKQLAYDQEQLDALATTHPACQRLLTMPGIGPFTATALVAAVSDARAFKNGRQCAAWLGLVPRQHSTGGRNAYSASANAGRSISHTL

SEQ ID NO: 162882 - protein, 343 aa, unidentified
MSLLYAGLDVSLEMTSICVVDADGRIVLETKVASDPEALTCCLGELPGCFERVGLEAGPLSQWLYFGLRDAGLPAVCIETRHAKAAITAMSMNKTDRNDARSLAQLVRSGWFKSVHVKSVESQELRTLLGSREFFVNKLRDHENEIRGLLRPFGLKVGQVSSSGFAGRIRDLVTDRPRLKLCMEALLTARETLMKQLAALHGELLRVTKNDELCVRFMGIPGVGPVTALAFKTAIDRPDRFRRSSDVGAHLGLAPRQHQSGEVDRRGRIAKNGDRLTRSALFAAANVMLSRSTQWTALKHWGVSIARRSSLKKAKVAVAPKLAVIMHRMWRDGSPFRWTAKEA

SEQ ID NO: 162883 - protein, 344 aa, unidentified
MRIAVLGVDLGKNVCSLVGLNASGAVVLRRRAKRETVIALAAKLSPCIVGMEACCGAHHLGRVFAVHGHDVRLMSPEYVRPYVKAQKNDDRDAEGIAEAATRPTMRFVELKSQEQLDMQTLHRSRDRLVGERTALINQLRAILLERGIVAPQGKRKLEQFLFNLMDEQGGPGLSPRMITLVTDARAQWAELDRRIAAFDAEFVRWTKENEDARRLATIPGVGATIASALIAAIGKGETFERGRDLAAWLGLVPRQFTTGGKPKLLGISKRGNSYLRKLLIHGARAALPYVAERDVPLGRWAKSLLSRAHPNVVVVAFANKLARIAWAVLRRGEPFAAKGLPVAA

SEQ ID NO: 162884 - protein, 441 aa, unidentified
MNSKSLEAKRHFINGKTIIGIDPAKKKHQAIIIDPVGVPIGNTFKFNNSFYGFHQELFHKLNLCTSELSPDKVVFAVEISINFWQKLCCFLCNKGFTVLMVSPLFTHHERPKINNNFSRTDPKDALAVANCARQGYFNFYRQYPPDQNAMHRLSITYDKLKVHMTQTKQRIRSQVELIFPEFINALDIDTDTARYLLSKYLSPKDFLRMNVFLEVPEVMKVSGRQHGEATLKALKEAAKQTIGINLTDEELLSERITLNCWLGQYILLKEQIKYVLDQLIALAEQTPYFSIISSLKGISDNTAARFIAELRDLSYFDHYKKIEAISGINLKLSQSGQYTGYRRITHIGNHRLRAIIYSMAEETKNHIPEVRIRYLKRQMKQPRYRKNVIASCSNLLKLIVALVKEEHKYEYKQEKQKQLLELEAKYKEFKEKKKKNYKKSA

SEQ ID NO: 162885 - protein, 396 aa, unidentified
MPKTNLQNSNDFTGQNFYVGLDVHKRSWAVTIRSLGIEVGHFTQEPDAAGLHQYLRRNFPGGQYHSAYEAGFCGTGAHEQLCKAGIDNMIVHAADIPSTDKQKKNKTDLHDSRAIADHLERGNLHGIYVLSQEQQELRSLFRLRECKVKDTTRANNRLKSFLMYYSIVIPEGVSKRGDLTGRALAWLDIELQSAAGTIVLQEYIAELKYQRKQLFQLTKTLREQVMAHDKQTYVNLITIPGMGSITAIGLMTEIGDFRRFDDPDEYSSYLGLYPWEDSSGDCIKTKGMQPRCNSHLRPLLVEASWHAIRKSRNLFAYYSKHAGGKNGKKAIVKVARKLAMIARGVAISGQPYQEDYQKKDNKHEPTKKMKAGRFSSGIAEQHINKQPNYGRMSMPG

SEQ ID NO: 162886 - protein, 415 aa, unidentified
MKKHNNSAKKSEPTSKRTKSPGAVRRDTKEVLAELVAKLKEKLDWKKVAATSGEEDERGELRPNLDRLTVGVDLGDQWSHYCILGLEGETLAEGQLRTTEEDFATFFKGLNTARVVVEVGTHSAWVQEVIRGCGHEVLVANPRLMDGSKRRKRKNDRIDANKLARLGRVDPESLYPIQHRSREVRQDLVMLRARDALVAARTEIINTTRGLVKSMGTRLPKCSSRSFAQKGEEAVAVEMREALLPLVRLAATLSADIKEYDKKIAELGREKYGHTSLLRQVKGVGPITALAYVLTLENPKRFAKSRDVGPYLGLVPKQEDSGESQPQLGISKAGDTMVRKLLVGSAQYILGPFGPDTDLRRYGLRLCERGGKNAKKRAAVAVARKLAVLLHRLWVSGEVYEPLHHAKSVPIAAAA

SEQ ID NO: 162887 - protein, 319 aa, unidentified
MGIDISKDTLSVDAGDLFKGDVPNTPKGRAGLVARLRKAARGAVLHLCFESTGPYGAPLFEACCKAGIRASLLNPAKVRHFAKAMSRSAKTDPIDASVIRHFAQTRKPAPSHAPGANERRIRQLVLARDALTKNVVQLSGTLDSLTDAGAKKHVEKAIRMSKGEIRLLDRQIAETVKGDERLEGLTGTLAGIDGVGALTAAKVVALVPELGTLGRRGSAALAGVAPFKRESGEYKGKAFIHGGRASLRQALFMPAMVAIRCNTVLKAAYEKLVKAGKPHKVALTAVIRKLFAHMDSLAAKWLAEHSAVTGVPAQALSAT

SEQ ID NO: 162888 - protein, 362 aa, unidentified
MAKCIMVGCDLHDRSMLLKIAQDQGVPVVRSWGTNASSRRTMITDLQRRATGAGAARIVFAYEACGFGFRLHDELAEAGIEAYVLAPSKMKRSAKNRKRKTDEKDAGAILDIVRSYVLAGVEMPSVWVPDVTTRDDRELVRRRLAVAEDGAAAQIRVRWLLKGSGIEVSPAQAWTEAYWGWLEQLRQGSLPAGAGAALGSLMRQVQWLWEETDRLDAQVRALSQTPRYAPLVAVLRRHKGVGLLTAMVFLSEMGDLSRFANRQQVGSFLGLVPSTFESGQDDDHKGHITHQGPSRVRKVLCQAVWSRLRSVESERWAYERIVARNPKHKKIAVVARMRVLAVTLWHDGLAAQEAARAQAMTA

SEQ ID NO: 162889 - protein, 321 aa, unidentified
MSRVFIGVDVCKDFLDTHARPAGLQRRFDNTPAGGEQLVAWVRALAPERVVFESTGPYQKAAVGALLAADLPAVVVNARQVRDFAKGIGQLAKTDTIDAGILAHFGEVVATVVRPLPPKEVLEFRDLCDRRGQLVRMLAAEKNHRHAAQSAAAKVVKNIDKHLAFLRRQIDELEGRMDGIVAASEAFKARDEILQSIVGIGPQVSRTLLVHVPELGRGTRQSVAALVGLAPFAEDSGTNSRIRHIRGGRSKARIALYQAAVAAIRYCPTMKAFYAALKARGKASKVALIAVARKLLVLANALLRDGTPYQPRTNSVCPENT

SEQ ID NO: 162890 - protein, 349 aa, unidentified
MKKVVAGMDLHSNNVVIGIMEMEGKRVASRKVPCELKEVVKFLAPYKQRLERIAVESTYNWYWLVDGLRWRGYPVVLANPAGMEQYNGIKHADDTNDAFFLAELLRLKILPTGYIYDEQLRPVRDLLRRRLMLVHQRTALMLSFKSLYVRTTGQEMTLSELKELAIKQAQDLYDHPANQLIAGMQIEHIEGLTESIEKIQKVVLASARELPSYPKLLTLPGVGKILAMTITLEVGDIKRFAEAGHFASYCRTVEAKRTSNSKQKGQNNSKCGNKYLAWAFVEAANFARRYDEQCRKWYDRKAAKTSKVIATKALACKLAKAAWYLMSQGTDYDPQRIFGPPTTPKMKPT

SEQ ID NO: 162891 - protein, 337 aa, unidentified
MDVSTSDPTSPSTAAPPADGPHVGIDVAKDKLDLARSDSVAPATFPNDPAGIGRIVELMVKARPAVIVVEATGGLERPLVEALLEAGLPVALVHPGRVRHFARGLGILSKTDRIDAVVLMRFGQLAAPRLAEKRSKNRTELEALVVCRRQLCVTRAQQSNRRASTASKAALKSIDAVLGTLDKQIDSLDGQIRDLVDADDDFKHLDSLLQSVPGVGPTLSATLAAELGELGKADRRQVGALAGVAPFNHDSGRLRGRRSVRGGRAAVRCVLYMGALTAMRVNPLIKSFAARLRAAGKLNKVIIVACMRKLLSLINAMVRDGLRWDQLDVVKKLSTAH

SEQ ID NO: 162892 - protein, 344 aa, unidentified
MEKHIVIGVDIAKSVFEVAVSNEPGRVSDRRRLSRGAFLVFLAQVPQGTVVMEACGSAHYWGRRIQELGHEVVLLPPHQVRPYVTRNKTDRTDAKGILEAYRNADIHPVPVKSVSQQVLVCLHRFRSGWVSSRTAQVNTLRGLLRELGFVIPEGIEKVLPQVRVLIEDADSDIPDGLRAVLATACDEIQALGESIRMTERQLEAVAEQTPLVERLQSIPGIGLMTSTALVAFIGDVERFPSGRHFASYLGLTPREYSSGLKRRLGRISKRGDSYLRMLLIHGARSVLCHAKKAKEHDRLRTWALALERRAKHNKAAVALANKLARIAWAVWKRGREFESVPVAA

SEQ ID NO: 162893 - protein, 239 aa, unidentified
MDKDGNITREHIFPSSKKALERFLNGIPSPDITIAIEACGLWRGAHKILTEMGYQVKLANPKKTHDIACKKKTDKVDARILADLLRTNYLPEVWIPDEQTLHFRDLTRHKATLTRLKTQVQGKVRGYLLRKGATYGKLSKEETLSTLAEEDPDIKNLVQVYHSLKQEENEVMRRIKKIARNMKQTTMLMSMPGIAEFSSLMILAEIGDIRRFSSPKELVSYSGLCRGIYQTGSTERTVT

SEQ ID NO: 162894 - protein, 342 aa, unidentified
MQITTIGLDIAKNVFQVHGIDGNETVVVRKQLRRGKLIAFFESLAPCLVGIEACATAHHWARELTRLGHQVRLMPAKDVKAYVKRNKNDAADAAAICEAVRRPTMRFVRIKSTDQQCQLMQHRTRDLMMRQRTQLINALRAHLAELGIVAAMGDKGVTELLIIVADEDDGRLPVEARASLALLAAQLNALQMLIGSLEKQIKMQHRANPASQRLETIPGIGIIGATAIAATVADPTVFRSGRDFAAWIGLVPRQESSGGKHKLGSISKRGDRYLRRILVVGAHSVLRRAMEKPGKYPWLTQLMARRPFKVVAVALANKMARMAWALLTYGGTYRAPRLSIVP

SEQ ID NO: 162895 - protein, 399 aa, unidentified
MQVWAGVDAGKTGHHCVAIDTDGTRLLSRKVRNDEEDLTSLIAEVNALGTDVVWATDLNRGGASLMIALLHAHGQRLMYIPGRTVHHASRLYRGDGKTDAKDAAVIADQARMRHDLQPLRTGDEVSADLRILTARRADIAEDRTRAINRLRATLLEYFPALEAAFDYSRSKAALTLLTRHSTPDGIRRCGQSRLQAWLKKQGARSSAAVAEAAVAAARRQHTVVPGQGAGALAVAGLAKEVLRIQDELAGLDALIAERAAEHPHTEVITSMPGFGPLLAAEFLAATGGDLGMFENADRLAAVAGLAPVPRDSGKITGNHRRPQRYDRRLLRVFYLAALSSLKSSPESRAYFDRKRVEGKTHVQAILCLARRRVNVLWAMLRDRSAYAPPGQALVIPAAA

SEQ ID NO: 162896 - protein, 402 aa, unidentified
MGKTKGVIIGVDPHKMSVTIEVVDKRERLLGSGRFATDQAGYKAMRAYVTQWPERTWAVEGANGAGRPLAQRLVAAGEQVVDVPAKLAARVRLFDTGHNRKTDALDAHSIAVVAVRTTGLRVVVADGELEALRMLADRRDELSKHRVQTVNRLQRLLSELLPGQRKSDLSAAQAKAMLATVRPRDIAGKTRRRMAAEEIADLVALDAKLKKIKAELKAAVTARGSTLMDIYGVGPAGAARALADVGDVARFADRNRFASWTGTAPLDASSGEQNRHRLSRAGNRRMNHVLHVAAIVQIRHDTEGRAYYRRKLAAGKTPMEALRCLKRRLSDVLYRQLVADAARADQEPGGADPGGHHGATLQSSAADSHPHIDTSDQPLPGPAEPTLRPEADNVKNRVLSTA

SEQ ID NO: 162897 - protein, 365 aa, unidentified
MKKNSKDQTRRKAAQAKIGKMQVTVGIDLGDEWSQCCFLNKEGEIIAECRVRTTREAMQGRFGKLQPAVIAMEVGAHSRWLSLELQRMGHDVIVANARELRAISGSDRKSDRVDAEKLARYARVDRKILRGIQHRSEEAQVDLLAIRGRAALVKMRTQIVNGMRGMVKSYGYRLPKCAAEEFAQQAKGLIPAQLKEPLEPLRQALEQVQKQIDIYEQRIKKLATEKYVETNQLRQPWGVGEITSLCYVLTIEDKTRFEKSRDVGCYLGLRPRRSQSSGYDPELRITKAGDCSLRSLLVECAQRVISKKAPDSALKRFGLRLAARGKKNAKKRAIVAVARKLAILLHKLWVTGEVYEPFPGDRQAA

SEQ ID NO: 162898 - protein, 385 aa, unidentified
MTNTQYHSTIVPRDYDIFIGLDVDKKRMAVTCVDHGTLQKSLSLPYSGKQLLNYTAKHFPGQRVAFVYEAGPTGFGLHDELSAAQHPCLVVTPAMVPSAPRKRVKTNRLDSKKLALGLRGGDLQGIHVPTQSYRELRQLVQLRDTQAAQVRATKCRVKSLLLFEGIPFPEPHEKWTVAALQGLATLPCNATVRFKLDQLMEALQFHYQMAAKVQKEVRRFCNQDSELRQSVELLRTIPGVGTITATHAIARLGDWRLIKNERQIAGFLGLVSSEHSTGEKEKRGEITRIGDQRLRNKLIQCAWTAIKKDPELRAFYRRIYARHPPKVAARKAIVAVARKLTTRLYAVLKKQRPYEIRADLATTPLTVEETVGLRERLDIAQNDEL

SEQ ID NO: 162899 - protein, 374 aa, unidentified
MIYIGVDLHKDSMTIVCCDEQGNWISQEKIACKCTGKIEKFFAQPQLHPCTVVVEAIGFYHWLFDLLENKVETLILANPVETRKYSWDQPKTDCRDAKKLALLLSGGEFQRNKSLACFVPDKSLRTFRELTRHRHNLVRQHTSLINSAHRILLKNNLAGPKHITGSSLELFLTRFGKKFSIYHKNFLMQISENLFYNERQIKQTEQEIESFLHLDRFKPLYEILTSIPGIGNTVCACLISEIGDFSRFDHPDKLASYAGLCPRVFASDKTVRYGKITKKGSVFIRKALINAAWVAIREDDKPRRIFNRVCKRAGRKKAVVAIARKLLVWIWYLMAENEKWEAISTRPDSLTSNKSGVTLIRFLKHTPSGANSQA

SEQ ID NO: 162900 - protein, 428 aa, unidentified
MAKSKTQPVIQIDDDALYYERCAGIDVHKKILVVCLRIGRKTESREFGTTTSEIREIVAWLKANGCQMVAMESTGSYWKPLYNIFEQESLPAIVCNAYHIKNVPGRKTDWNDAFWIAKCLAQGLLKASFVPNRDQREFRDMTRFRKSQIEERSRNINRLQKFLEGGNIKLSSWLSDIEGKSAQQLLELVIEKPDFTLDEVKSRMHRQMKSTPKEIFASLDGYLTPTQRTFFAHVICVIRQQTEQIEKTDSLIQAAMTTEQVAAVKALDAIPGIGVISAEQIIAEAGTDMSHFRNQHAFSRWTGTAPGNDESAGKRKSGKTTYGNKTLKSTLTQCAKSAVKNKSTFFSAQYSRLVPHRGKNRATMAVAHSIAIAIYFVLSGAEFKDLGADYYTQFNREKKINSHVRQLSKLGVSIPDDVLRIIAVPVPT

SEQ ID NO: 162901 - protein, 406 aa, unidentified
MEGPVITVDVSKGSCHYQAFFEKGRPFRKPKVLHDTIEGFADLTAIIQKVKEKSGCDTVPVVFEATGVYHRCLQKYLDDHKMPYYIISPLLSAAYRNTDLHSNKTDDLDCAHIAKAYYSDEKLLPFHRQEDLFTRLQKMNRYYEVELNHLRMRKVSFRSCLDIIYPRMDKCFKGHASLYDPVPMEVLKQYPHPSLLLRHREETIVKVIVKKTNHKARFVTEVVHKMYECAQHCYSGCDVSEIEVIKFPDMIKELQKQMNYCDSILKEMVEEARNVPYFKSVRSIVGIGDNLAARLIAELGDMSRFTSRRAITAYAGLNPKIRQSGDVDGTHLRISKKGNRHLRCLLYLGVSCNYRLKKNDPIYEFNKKKRQQSQSPLKSKAANIAAAHKLLVVIYALSKSGELYRS

SEQ ID NO: 162902 - protein, 387 aa, unidentified
MSKHNDLSRCLVALEQDATLIAVVEMGQASWLVAGIAPGLDRYPLKKLGADRDALLQLLHRWRSEAAKAGHTIDRIAVAYEAGRDGFWLARWLRSQSIEAYVIHPSSVPVSREHRRAKTDRLDTELLKRAFLGWLRGEPKHCSMAAVPTLEDEDARRPGRERQTLVEERTRILNRLKANLARLGIRGFRPNLAGAPSQLEALRTPEGVAIPTNTLAEMRRDLDRLRFVKRQIKEIEKTRADRLAKAPDERRHVAARALTRVVGVGVETADMLVQEVFSREIRDRRALARYAGLTGAPDESGQRRRERGLAKAGNARVRRGMIELAWGHLVHQKGSPLSAWYRRRTADARRGMRKTMIVALARKLLIVLWRLATTGEAPEGLLLRPAA

SEQ ID NO: 162903 - protein, 343 aa, unidentified
MQTITTIGLDIAKSVFQVHGIDAEGNVILRRQLKRRYMLPFFQKLPPCLVGIEACGSAHHWSCELQALGHTVRLMPPAYVKPYVKRHKNDATDAEAICEAVSRPNMRFVATKTPEQQSCLTLHRTRHLFIRQQTSVINAIRAHLAEFGIVAPVGRQGVEQLLSVAADSNDKRLPEVARACVAALGAQLRTLKAQILEFDRMINAWHRSNGASRRLDDIPGVGPVLATALIASIADPKAFRSGRDFSAWIGLVPKQNSSGGKDRLGNISKRGDRYLRSLFTTGALAVIRYAKIHGTRHRPWLTALLARRPTKVAAIALANKIARMAWAMMAKGERYKEPAALAA

SEQ ID NO: 162904 - protein, 371 aa, unidentified
MEESSKTLYVGLDVHKDSIAVAYAPEDRGAEVVSLGSIGTRQCDIDALIRKLQSKGATLVFVYEAGPCGYWLYRYLTRKGLSCHVVAPSLIPRKPGDRVKTDRRDAVMLARLMRSGDLTSIYVPGIEDEAIRDLSRGREDAMRDLKATKYRLKAFLLRQDIRYEGRANWTAAHLRWLAEVVCPTRAQQIVFQEYVRAVTEQHERLQRLEGELHAEVKGWRLYPVVEAIQALRGVELTSAVILMAELGDITRFDTPRQLMSYLGLTPSEYSSGERRRQGGITKAGNTHARRALVEGAWAYRYPAKVSRHLQLRLETLPAEVRAIGWKAQVRLCKRYRQLSARGKHANQVVVAIAREMAAFAWAIARTVPLAL

SEQ ID NO: 162905 - protein, 342 aa, unidentified
MLDTETGELVEKTLQHDGDEVRRFYSALPGQVLVGMEASGSMHWFLELLDELGIDHQVGHPSEIRKAEARKQKHDRRDAVLLLKLQVENRFPSIWMPSTALRDLRTLLLHRHQWVRMRTRVQNALQAIALSRGLRRGKTLWSQGGQHSIESLSLPPNAAHRRTELQRLYRNLNEQIDERDKGVNDQALQRPGAKLLMTHPGVGPVTALATDVFLGAPARFEDGKAVVSYVGMIPSEYSSGGQQRLGGLSKQGNPFLRFLWCEAAVHAVRRDPELQRFYRRKLAQKGLGKARVAAARKLGIRLWIMLRDQIDYQEFCRRGQMRQKNGGACAGMPEVGHSPAMQ

SEQ ID NO: 162906 - protein, 350 aa, unidentified
MSIVTAGIDLAKNVFALHGIDQSGQAVFVKPKVARSQLLEMVANLPPCLIGMEACSGAHHWARLFRQFGHTVKLMAPKFVAPYRMSGKRGKNDAADAAAICEAVTRPNMRFVPIKDIDQQAILCLHRTRQGFIEERTALYNRLRGLISEFGIVLPQKVERLRREIGAHLEQLPGWANRCVGDLLSHADRLNERITEYAPEKVPLGDDRAIAEAARQDRRSRQLMQLPGLGPTTASALVASLGGGHDFKNGRQLAAWVGLVPGQYSSGGKARLGRITKAGDAYLRSLLVMGARSVLAGLGDKQDRFSRWARALVERRGYWKAAVAIAAKNLRLAWAVMKYGEDFRLTAEPA

SEQ ID NO: 162907 - protein, 367 aa, unidentified
MFKVGDKSKSVSADRDGAEAKSQRRRPFMSKRSIQIQETLYCGIDVSAKSLTVAIQQVHQPVEQRSFPNTSVGHKALIVWLRKAKSPVRVSLEATGLYSLDLAFALDAAEGIEVAVLNPKVANRFAQTIRRSKTDAADAEVLAEYARRMPFTAWVAPSLRSMRLRSIVRHVESLSVQSAQNQNRLHAAQGSTYTPGCIVQDLKRSVASLELRIHKLRREAMALVRQDDLLCKRFGLLVSIPGIAQVSAMQLLAELSTLPSDLTVREWVAHSGLDPAHEISGSSVRKASRISRAGNRHLRRALYMPALVASRCDPHAKAFFESLLARKKARLQALIAVARKLLHAIYGIFRSGLKYEGTKLFPRITLS

SEQ ID NO: 162908 - protein, 414 aa, unidentified
MEVVNARCAGLDVHKKLVVACALTSDVVKADGQPKPVLERFGTMTGDLQALARWLAERGVVQVAMESTGVYWQPIWNILEEHGGFELLLVNAHHIKAVPGRKTDVKDAQWLAELLRHGLVRASFVPDRAQRELRELTRYRTALIEERTAHVNRLQKTLESANVKLGAVASDVTGVSARAMLARLVGGDEDPAAVADLAKGRLRAKLPELERALAGRFSEHHRYLVPRILAAIDFLDGEIADLDERIAELERPFADAVERLDGIPGVGRRVAETIVAEVGGTVHRFPSAQHLASWAGVCPGNHESAGKRLGGKTRKGNAPLRRALVQAAHAASRARQTYPGAQYRRLAARRGKKRAAVAVAHTILVIAYHLLARNTSYTDLGPDHFDRRDADAIQQQLVKRLERLGNKVTLEKVA

SEQ ID NO: 162909 - protein, 330 aa, unidentified
MTHYIGIDVSKNKLDIAWLKDTDKLKFKTKVFKNDHSDYAALINWLIANITDDLNNIHITLEATGVYHENIAYYLFDKKLNVSIINPAYVKSYAASLGSRNKTDKKDSMLLARYTYIAKPKLWTPPPAEARHLKSLLSRLDALQEDLQRELNRLEKTEATDTAPIVKASIEQMIVSLQAAIVKLNGDIDDHIDGHPNLKQDQYLLQTIKGVGPVVSKQMMSLMHNKQFSQASQMAAFLGLVPKHSESGLFKGKSRLAKNGSSAVRAKLYMPALVAIKHNPDIKAQYERLLANGKCKMQAVCAAMRKLVHICFGVVKHQQPYQARVELIST

SEQ ID NO: 162910 - protein, 431 aa, unidentified
MKYKQKVKQNQRILGITEQTLVVGADIAKETHVARAIEFRGIELGKDCVFQNQRDGLTKLVSWMKELQRVHVKTDVIFGIEPTGHYWFPLAEFLQNEGIKVVVVNPHHVNKTKELEDNSQTKNDYKDAKVIADLVRNGKYTEPQLPTEVYADLRIFMNLREKVMVNLGQVQRRIQNWLDRFFPEYSEVFKDWEGKASLITLSEFPTPEEIITLGSLNILKRWKQDVKRAVGIKRAEKLVKAASVSIGITRGLTAARIEMKALLEQYELLTRQLEDIMGQVEVLLEQIPGSSEMLSIPGVGAATLAGFLAETGDLSKYNHGQQIIRLAGFNLRENSSGKKKGKSSISKRGRSRLRALLYRAVMPMVAKNAEFQALHNYYTTRSVNPLKKKQSLVALCGKLIRVLYTLGTKKILYNSQDVLGPVRQAQLQVAA

SEQ ID NO: 162911 - protein, 420 aa, unidentified
MRNAGIHANSLLEVRRMYNAVGIDVSKGKSTVAVLQPGGTVIRKPFDVSHTSQNLNELADYLSSLDGTTKIVMECTGRYHEPMIKALSEAGLFISIVNPHLIKNFGNNSLRKVKSDPADARKIARYTLDNWAELRQYSGMDNTRTQLKTLNSQFSFFMKQKVAAKANLIALLDNTYPGVNKLFDSPTREDGSEKWVDYAYSFWHADCVRKIGLKAFTERYMSFCKKHHYIFQQDKPEKLFNASKELVAVFPKEKTYKLLIQQSIQQLNLASEHVERLRREMNELASTLPEYSTVMGIYGVGKTYGPQLIAEIGDVSRFTHREALTAFAGVDPGVDESGQHKSKSNRASKVGSARLRKTLFQIMTTLLQNAPEADPVYRFLDKKRSQGKPYYVYMTAGANKFLRIYYGKVKECLRNLEQTE

SEQ ID NO: 162912 - protein, 367 aa, unidentified
MRKSSTAFIGMDVHKESIDVAIADEKEARHYGRIGGDAHSVDRLIRKLRGAHRAPLFVYEAGPCGFWLYRKLKAQGLECMVVSPSKTPRNAADRVKTDRRDSLKLARLARAGELEPIYVPDAKDEAVRDLVRAREDAVCMQRQARQRLQALLLRNEIRYVGRSTWTAAHRRWIAHLKLPNPAQQIAFEEYVQAVQEAELRLQRLAMAIGAQLEHWRWRPAVEALQALRGVSAIHAVRIVAELGDFQRFASPRKLMGYLGLIPSEDSSGPRRRQGSITKAGNSSARRALIEAAHAYAHPARVSWVIARRQTKLSKSACDIAWKAQLRLCSRFRRLAARGVPRNKVIVAVARELAGFVWAIAREVKPLH

SEQ ID NO: 162913 - protein, 339 aa, unidentified
MTVKTVGLDLAKDVFQVHGISENGRIIFNKAIKRAKLLSFFEILPPCTVGMEACGSSHHWGRQLRKLGHDVRLMPANYVKPYVKRGKTDAVDAEAICEAVRRPTMRFVEIKTEDQQAILSIHRTRDLAVRQRTQSANMIRSLLREFGHILPIGIEAVTAFAKRHLDGDHPDMPEIANGMLGIQCYQFIGLNERIEGYSKMIEQHALLNADARRLMRMPGIGPVTASAIVATIGDAKQFRTGRDLAAWLGLTPLNKSSGGKERLGKITKQGDRYIRKLLVVGMTSRAVMAKRAPEKVDLWTAKIIADKPFRLATVAMANKAARSIWAMLTKKQEYRQPAF

SEQ ID NO: 162914 - protein, 399 aa, unidentified
MLNPVSLQLRVGVDVGSRCHTVAIGLSDGSLLEEFEIPHTAEGFQEFFARIEACGRRYPVPIAVAMEGYNGHIRPLDSLVRARGWRLFNVNNLKLARFKEIFPAAAKSDRIDTRKTLELFQLGDHLPMAGDVLQEVMATPAENDILKRLSRRRRRLVNERTRVLNSMQADLQAVCPGLLEITRDVGNLWFLNFLTCRRGLLKLARVRRASLLKVPGIGTHFANAIQAWQSRAYFAPDASLVGDMIQQDAARLLELKQQIKALEEQMAQVAQKSSIAGQLASIPGCGAICAAELAGEIGTVERFRNEASLALYLGMATLDRSSGKSRGSKAPRHVNARAKAAMMIAVDHHRKLVPQSQRYFERKRAEGKKHNQAIRALGRHLCRVIFKMLTQDRPYRIEP

SEQ ID NO: 162915 - protein, 444 aa, unidentified
MPTPPPYDLVIGLDRSDKKADLCLITTATGQRQHLVIDTAPEALWEWLAQLRQQCPQARVGLCLEQPAVHLISFLEAYEWITLHPINPITLQKYREAFVTSRAKDDAKDAEYLADLLLSHHPKLPVWAPQDSPTRTLQQLVFHRRAVVDERTALTNRLIALLKQYFPQALSLCGDDLWRPLATRFLLKWPSLQAAQKAKPATVKAFYYLHGSRSQTLIEQRLALLAKAVPVTEEAGVIDSFVRRVQLICQQLQLTQKAIVHFDQQMAQAYAAHPDHALFASLPGAGPVLGSRLLSTLGSQRERFANHAAQLQRYTGIAPVTKKSGGSCYIHRRYLCPKFHRQSFHEYAKESILWSRWAAAYYLQQRLKGANHHTAVRALAFKWQRIIWRCWQDRQPYDEAIYTASLKKHGSPIVALFDRVDLGKSPWKNPAKIIQKPIDGLPQR

SEQ ID NO: 162916 - protein, 307 aa, unidentified
MRFSTKQHQFYCGIDLHARTMYLCVLNQDGEILVHRNMPAGPEPFLKAVAPYRTDLVVCVECIFTWYWLADLCAREGIPFVLGHALYMKAIHGGKAKNDKIDAQKIAVLLRGGMLPQAYVYPADMRATRDLLRRRIHLTRKRAELLTHVQQTNSQYNLPEIGKKIAYKANRSGVAERFADPAVQKSVEVDLALLDYDDQLLRDLEFAMVKMAKQHDANTLSLLQTVPGIGKILSLVLLYEIHDIARFPRVQDFVSYCRLVKCAKESAGKRYGTSGTKIGNAYLKWAFSEAAVLFLRNNPAGQKYLAR

SEQ ID NO: 162917 - protein, 354 aa, unidentified
MESKIYVGVDLHKTQFTTCTLIDDEVIEQGTEYPTDREGYRSFIESTQLLSDTYGRAVSLAIESTANARYFRDTMEKNGFEVTVVNTLRFKVINLSTKKTDKNDAKTLAEFLSRDILPESHLCSAESEGLRRILKTRSLMVEDAVALKNQAHAVLLAYGTITKVAQFQSGKERSRILNSLPDNIAMVIRPIFETIEVVESQRKVLETRLRQITANDNQVKLLLTIPGIGIVNACTIRAYIDDIDRFQDYKHFSAYCGLVPWVQASNDTIHYGRITKRGPQELRTALVQCVVAMVRMEDKTSDFVLMRQYQKLKEEKSSGKAIIATARKLSRIIYIMLKTKKPFCSGRMIREVKS

SEQ ID NO: 162918 - protein, 347 aa, unidentified
MQVTTLGIDLAKNVFRLHGCDARGKAVLRKQVGRRQLLGVIATLPRCVVAMEACATAHYWAREFEKLGHQVRLIGPSFVKPYVKTNKNDASDAEAICEAASRPSMRFVAVKTVAQQDIQAVHRVRHQLVKTRTALINQTRGLLAEYGVIIPQGAGNVRRALPVMLDDPDNRLSGLIHELVGEISERLRFIEGRLHQYDLRIQRLFRQDERCQRLAAVEGVGPLVATALVAAVGNASEFKSGRELAAYLGLVPRHRASGGRTILLGISKRGDRYLRTLLIHGARSAMRTIERHRAARSVWAGRLKLRRGSNVAAVALANKNARVMWALLSRGENYRAAPLAARNNPCG

SEQ ID NO: 162919 - protein, 333 aa, unidentified
MEDKMCLGIDVSKKTLDCCLYDGNDYKHKIFNSNNASIVSKIIKNYKLTKACKVVMEATGVYHTSIFKSFYEKGFNVVVENPLKIKSYSKMKLCRVKTDKADAKLIAEYGYMQVTERTIPHEPYQDELAALLKLIDGYQCDVTRCTNRLEALNNYSINTSIHIASLNRQIISLNKEIQTLKVSIREIIASTCEEQYQLYLSVTGVGPVTASSIIANFGNFSRFEQSKQVANFIGICPSPFSSGTSVKSSGSISKKGNPLLRKTLYMAALTASRKNRACHDLYTRLVAKGKNKKLARIAAGHKLLRQLFAIAKSGEPYDPDYEIKMCENRKNVK

SEQ ID NO: 162920 - protein, 431 aa, unidentified
MKNRTNQRIEEIRTGTLIVGVDVAKSVQWARFVDYRGTEIGKAISFKNDRQGFENIVSKIKEICKLKTLKYRIDNIVIGMEPTGHYWKTLANYLMENGYKVVCVNPYHTKKAKELDDNSQTKNDKKDAITIARLVKDGRFFDPYLPQEEYGELRGLTNARVGVMKRSSGVKNTITAILDEYFPEIWTVFKYPLKGKASRQVLRSCPFPKLIIKMGEDKVHEEIKKAVKKTVGIKKVKQLINTAETSIGVEYGMEAAKMRLYWLLEELELMEKQLSEVEQAMESSLIKTGHANQLMGIKGIGIVTAASFLGEVGDPLRFQNARQIARYAGYNLVEDSSGKSKSGTVISKRGRKQLRSILYQMAFTMVGQNAEMKALYNHLKTRKKNPLKKKQALVVVSKKIITVIYSLLKKQENYNPELVLGAVRKEMMKAA

SEQ ID NO: 162921 - protein, 489 aa, unidentified
MSQRKPAAAKAKSSKAKPVKTKGSPTAARAPHDKPAVLTVLNLHAAGIDVHSDMHMVCVPADSVRPHDADAAEGRPAHVRRFGANSCDLNAIAAWLTACAVTTVAMESTGVYWIPLFELLEARGFEVYLVEPGQLAHCGARPKTDVLDVQWIQRLHSYGLLRPSFRPPDWIMALRGYHRQRQMQVRYAASHVQHMQKALEQMNVKLSEVLADITGLTGRRIIAAILQGERDPCNLAALRDIQCHNDQETIAKALEGTWRREHLFALKQAYDLYQFHHQQMAECDQRIEAELAKLPNRADDKPFVPKPRKGGRKQNNLNFAAAEPLFKALGVDLTEIEGIDVATALVILAEIGVDVSRFPTEKHFASWLGVSPRQCESNKTKKKRGPRKGKNRIAMALRMAAQGLAKTKSSLAMFYKRIKSRIGGKGAITATAHKLACLVYRMLKYGKEYVKQSMEEYERKIKDQLERSLRRKAAALGYELVAKPAPQPA

SEQ ID NO: 162922 - protein, 403 aa, unidentified
MNNVAGIDVSKGKSMVSVLRPFGEVVAKPFSIGHTGSELKELADYLKSLDGETRVVMEHTGRYYEPVARFLHEEGVFVSAVNPKLIKDYGNNTLRKVKTDKADARKIARYGLDNWAELRQHTPMDTIRMQLKTLNRQQSLYTKTKTMMKNNLIALLDQTYPGVNALFDSPVREDGSQKWVDFATAFWHVDCVRNMSLTAFAERYRKWCKRHGYNFSQSKAVEVHTGAQDLIAMLPKDALTKTMVRQAIDALNAVSASLERLKAEMQALAAQLPEYPVVMAMHGVGDSLGPQLMAELGDVARFTHRNAITAFAGVDPGADQSGTHEAKSTRVSKSGPPELRRALFLVMDCLLKTQPQDDPVYRFMDKKRAEGKPYLVYMTAGANKFLRIYYASVKAYLESLEHD

SEQ ID NO: 162923 - protein, 347 aa, unidentified
MLYLGVDHHKRYSHLTAVNARGEVRMSCRLPNERDALAQVLADLREPCCSVLEAGRSWGVMYDLLEELQAQPVLANPYQVRAIAQARVKTDSIDSHTLAQLLRGDLIPRAHVPARDTRYLKNILRQRLFLVRMRTMVKNRVHALLDRNHVVIPRFSDLFGRAGQRYLAALELPAGEGNLLQGHLRLLETLGAHVKETEGWLSEAMKEDGRVSRLRTVPGLGPILAALVALEVDDIRRFTTPAKLCAYAGLVPSVHSSGGKTYCGHLVFHSNHHLRWAMVEAAWIAMSHSPYCRAYYERIRRRKNPNVAVIALARRLLEIVHAVLTEDRPYQERPVVTRFAPAALHIQ

SEQ ID NO: 162924 - protein, 403 aa, unidentified
MERTAGLDLASEEHRLAIVEADGRRLEERRIVHSEEGLAALVRRLRLLRVSRVAIEQPNGLVVDRLLDAGIAVVAVHPNQLAAARDRYRAGGGKSDGFDAYVLAELARTDMHRFRLLEPDSDETKALRALTRTREDLVEQKVALANQLRAQLDAYWPGARRIFADVDSPIGLAFLERYPSPADARSLGTKRLAGFLARNGYCGRRSPEELLARLRSAPEARTGETELEARRAVVLALVATLKPLVEQIKLLTSQIAGAVRAHDDGHIFLSLFRDPKSVVTAAELLAEIGDNRDRHPQSSSLEAIAGQAPVAVQSGKKKVACFRWACNKNLRAAVSVLADSSRHHNPWAADVYQRARARGHDHPHAIRILGRAWLRIIWRLWHDRSPYDPNRHGNLNRLLAAKG

SEQ ID NO: 162925 - protein, 455 aa, unidentified
MPRRAAAPGTKPRKNTRIFKRIFEDTAGIDAGSSEHWVAVADDRDEQPVRRFGTTTRELNDLARWLLSCRVRRVAVEATGVYCQPLLAVLEKHGIETRLVKSSSLKAVNEYQKSDMLDCQWIQVLETFGLLRAAFRPSPEISRIRVLSRERRDLIEQATQNINKMNKALTAMNVRLDLAVSDITGQTGLRIINAILQGQRDPNKLAELRDDRCQKSVAQIADALNGEYDDAHLFVLQNALDLFNSCRTLIARCDARIEQSVQSLEPKASPADVPAPRRKEHVRKNVFAFEAREAFFSVLGTDLTQIDGISTSTVCTFIAEVGTNVDAWSTEKHFCSWLRLSPGSNKTGGKQRSSRNAPTANRLTTALHVAAQTLTRSNSALGAFYRRMRSRMGPDKAIKAAAHHLARQIYFCVKYRRQYVDPGPQYYQVKNRDRAIAALSKRARALGLTLVESPA

SEQ ID NO: 162926 - protein, 343 aa, unidentified
MKTVTTIGLDIAKSVFQVHGIDAAGKVVIRKQLKRGRVLPFFMKLPPCLVGIEACASSHHWARQLTALGHEVKLMPPAYVKPYVKRQKNDAADAEAICEAVQRPSMRFVPIKSPEQQAGLALHRTRHLLIRQLTATTNSIRAHLAELGIVAPVGRRGVDALIALVRSDEDGRIPSLMRACLMTLSLQAQALKEQIRILDRRLLDWHRSSELSKRLDAIPGVGPALATALVASVADPKAFRCGRDFAAWIGLVPKQNSSGGRERLGNITKAGDRYIRSLFCAGALAVIRFVKIHGAKHRPWLTSLMDRRPIKVAAMALANKLARMAWALMAKGESYKEPVALAR

SEQ ID NO: 162927 - protein, 391 aa, unidentified
MLICGIDIGKFRHEACLIDETGKQLAKPLKFANTTDGGEKLIEFLNQRNLDNQVIVVGMEATGHYHLSLYCFLFDKGYQVNVINPIQSDAIRNLFLRKTKNDAKDSFLIAETIRIGRFSSTPLADEDVLSMRQLCRHRMDLVDYIADQKRKIIGVMDRVFPEYQHIFSDMFGKTSTELLNKAVTPEELLSIPTQELCELLKKHSRGRFGEAKAEQLRDAAKGSFGITIATAAFSIQLRQLLEMISLLENQLTELEEEIGEYLRRMDSYITTCPGIGDVLGAVILSEIGDISRFSEPKKLVAFVGVDPSVKQSGEFISTQNKMSKRGSPHLRRAFFLAANVAAYRDPVLSTYYQKKRAEGKHHYVAVGAVSRKLICIVYAVLRDNKPYIPHY

SEQ ID NO: 162928 - protein, 356 aa, unidentified
MSTITLGVDLAKNVFSVCAMDGAGHVLERREFKREAFAVWLSQRPAGTVVAMEACSGAHHWARRCVEYGLQPRLMAAQLVKPYRKSQRSKNDRNDAEAIATAARQGNMRFVPIKTIDQQARLSWHRVREGYKAESLAIGNRLRGLLAEFGIVMGKSDKALRRVLADLDAHTALPAEFRELVRSVDAHWTQVRTAFDACDARIEAHARDDERCVRLRAIVGVGALTADALIASLGKAQEFRNGRQLAAWLGMVPTQHSSGGHTRLGAISCRGDGYLRTLLIQGARSSLQRAKAVATEKATPEQRWIRSLAARLSFGKVLVAIANKHARQLWVMLAHEVDYDPCASQRHPMHRPAQLA

SEQ ID NO: 162929 - protein, 403 aa, unidentified
MSTFFAGLDWASQTHAVCIIDEQGTVREHFEVAHDATGLAELRRRLTAAGLPPVAIERPSGLIVDALVEAGFTVVPIHPNVVKATRPRYRSHGAKSDASDAYLLADLLRTDGHRFKPLAPQGDEIRALRALVRGRDDLVATRVQLANQLRSLLESFWPGAAAVFAEVDSPIALAFIEHYPTPESASRLGPKRIAAFSAQHAYSGRRSPEELLARLHQAASAACGELEMDAKGELARCLARTLARLVEQIRLLTSRIEHHVASLDDGQLVMSFPRAGRVCAAQILAELGSVRERFDSDAHLAAEAGVAPLTYQSGKSKVVTFRWACNHHLRAALTCLADNSRHANAWAANLYAQARDRGCDHPHAIRILARAWVRILWRAWIDRKPYDPALHRGAQRDFQTAIG

SEQ ID NO: 162930 - protein, 409 aa, unidentified
MKLFVGIDVSSQDMKACVMNLDGETLSSLTVENNLTGASYLRNQIVDIARKNLIQEIQIGMEATSVYSWHPAMFFHEDESLKKFNTKVFTINPKLIKKFKESYTDLDKTDHIDAWIIADRLRFGRLRLSAVMQEQYIALQRLTRMRYHLVHNLTREKQYFLQNLFYKCSSFTAEVKSSVFGNAMMELLLEKYSLDEISSMDLQELAHYLQEKGKNRFIDAECIAKSIQKAARSSYRLSKCVEDSIDLLLATSIESIRSITKQIKELDKAIQKLLEGIPNTLQTIPGIGPVYCAGILAEIGQIERFDNQASLAKYAGLTWSKHQSGKFQAEETNMIRSGNHYLRYYLVEAANSVQRNEPEFRAYYLKKYHEVPKHQHKRALVLTARKLVRLVDALLRNDQIYTPRRKVNK

SEQ ID NO: 162931 - protein, 342 aa, unidentified
MTQTILRINKIQTATAVGIDVAKATLSVCIRCREGNERALLIGNIDADIRKKLIPRLAGFSGKIVMESTGHYHWLASLILSESGFDVRVVNPILCKQYTSATIRKVKTDPADASGLARMAELADNLPTSFTLTPQRLHARKKLSIMGSLKRQLQAMSASLNALQEANGILKIGDSPAEKELLKITTTLRRSLAHLEAEFVRDAKKDATQAKRLELLESIPGVSPFCAALSLHWFEAAPSRNPKSWIAYAGLDVSSRESGTWRGKCKLTKRGNNYLRGRLYGSAWGAVMNDPQMKSYYELLRKQGRAYVESIVIIARKIVRIMFMVLRNNAPYDASQWAVMES

SEQ ID NO: 162932 - protein, 425 aa, unidentified
MFAESRDDEQIIERVAALDIGKAEIVCCIRLPAADGERRAQEVSTHSTMVTSLCELANRLVGLGIERVVMEATSDYWRPPFYLFEAHGLDPWLVNAKDVKHLPGRPKTDRLDAVWLCKVAERQMLRSSFVPPADIRRLRDLTRYRIDLVGVRTAEKSRVEKLLEDACLKVSVVASDIFGVSGRAMMTALIGGERDPKALAELARTRMRTKIPQLEEAFAGLRLGTFDDHHRFLLARMLARVDAVDADIAAVDTQIGQHLAPFADAVARLDEIPGIGPTAAAIIIAEIGLDMTRFPTPAHLASWAKFAPGINSSAGKNKGNGSTGHGNRYLARVLGEAVAGAGRTDTFLGARYRRLVRRRSKKKAIVAVGRSMLVIIWHLLADPEARFHDLGADHYDRHVNTHAKRRNHIRQLESLGYRVTLEPAA

SEQ ID NO: 162933 - protein, 426 aa, unidentified
MFNSQKLEAITTNTLIIGVDIAKKLQWARFTDFRGLELGKALKFRNDKNGFETILTSIQTICKLKKLDKVIVGMEPTGHYWKPLANHLILNKITVVMVNPYHTKRAKELDDNSPTKSDKKDALTIARLVRDGRYYEVYMPQDIFAELRVLSNSRISLMKRHNALKNTITAVFDEYFPELVAVFKNPFKGKASMQIMKSCPFPSLILELGVDGVLAEIRKAVKKTVGLKKARQLVETAKDSIGVNYGIASAKLKLGLMIEELELLTKQLEQIEKAMGQALADTGTKETILSIPGIGIVTAASFFGEIGDPLRFNHPRQISKMAGYNLVEDSSGKNKSGTSISKRGRKNLRNVLYQMARTMVAVNPEMKELYQYLKTRPQNPLKKKQALVVISKKVVTVIYNLVKKQTEYKAELVLGAFRKNQMKQAA

SEQ ID NO: 162934 - protein, 346 aa, unidentified
MEHYGGIDVSLELSSVCVVDAQGKIVKEAKVASDIEALVAFFEALGFAVKRIGLEAGPLSQWLHAGLKRAGFETVLLETRHVRAALSAMTVKTDRKDARGLAQLMRMGWFRPVHAKSMRSQEVRALLVARKQLLGRLIDVELSIRGILRGFGLKVGPVTRKGFEARIQELVTGQATLERITTAMLSARATLKAEYEKLHRSVLAIVREDAVCRKLMTVPGVGPLVAITYKSAMDDPNRIAKSKAAGALFGLTPKKYQSGEKDVTGGITRAGDEMVRTALYEAANVLLSRITRFSKLKRWGMDVAKRRGLKRAKVALARKIAVILHRMWVDGTTYRWAAAQPAAAQA

SEQ ID NO: 162935 - protein, 341 aa, unidentified
MSSVTLIGIDIGKHTFHLHAQDKFGKEVMRKKCSRQQMMRFLANHPPCTVVMEACAGSHCLAREIKAMDHEAKLISPQFVKPFVKSNKNDFVDAQAICEAASRPSMRFVTPKSPEQQTLSVSHRMRESLIRDRTKTVNQMHGFLLEFGVSLPTGLAVVKRLASVLEEHDLPIRLVALLQRLHDHFVYLSEQIKVLDKELESQLADDDLGSRLLSMPCVGPITASLLAVEMGDARQYGSSRDFAASVGLVPRQYSTGGRPALLGISKRGDKNLRHLLVLCARVYMLRLKYQKGPLADWVRSLLARRHSNVVACALANKLARIAWAIATRHTQYKTEPDAINA

SEQ ID NO: 162936 - protein, 338 aa, unidentified
MKLYCGIDLHSNNSVVVILDETDKIIYPKKLDNDLALILKQLADYKNKITAIAIESTFNWYWLVDGLIEAGYQVKLVNTSAVQTYSGLKHTDDKDDARWLAHLMRLKILPTGFIYPKEERAVRDLLRKRSQLVRQSTTNILSLQNILARNTAQSLSSYKIKKLDDEQADELIKDPNISLSLKSNLNIIRCLQSTIIDIETAVLKQTRIRKEFKKLLTVSGIGEILGLTIMLESGDMNRFEKVGNFSSYCRCVKSERFSNGKKKGEGNRKNGNKYLAWAFIEAANFAVRYNDKIKAFYQKKKAKTNGIIAIKAVANKLARASYHILKDQVAFDVNKAFS

SEQ ID NO: 162937 - protein, 285 aa, unidentified
MSSHFFCGVDLAKHHFSLHAVDDRGKVILHKSVSRAKLLTTLANMPPMRIGIEACSGAHYWAREFIKLGHDARIMAAKYVGPYRTKGKNDLNDAIAICEAVQRPNTRFVPVKSPERQAIFSIHRMREHWVQERTALINRIRALLAEFGIVIPTGRHAIQRDVPLILEAADYGLPDIARAVLGDSFEHLQVLNQRIDDTELCFDIVTKASPNAQRILKVRGIGPQTATAIIATIGKGEQFDSGRDFAAWLGLVPKQYSTGGKPRLGRISKRGDKYLRSKRVINPAF

SEQ ID NO: 162938 - protein, 465 aa, unidentified
MTKRHQSQVRRNSGSKVSRSLTLLNPDAAGIDVGASEHYVAVPPERDEQAVRRFGAFTEDLHKLAQWLLQCGVRTVAMESTGVYWIPLYQILEDHGLVVRLVNARHVKHVPGRKSDVQDCQWLQQLESFGLLTGSFRPEAKICVLRSYMRQRQMLISNASRYIQQMQKALTQMNLKLHQVISDLSGQTGMRIVRAILQGERDRLKLAALKDPRVKSSSERIAKSLEGDYRAEHLFALRQAVELYDYYQQKIAECDQAIFKEMQSLETRAAPDSVLPTPLKRKARSRHNAIPFDSQAELYRIMGVDLTRIDGLNEATVQLILSELGLDLCKKWPSEAQFCSWLGLCPNNEISGGKVLRRGTRKVINRVTNALRMCAESLLNSKSALGAYARRMRAKRDSKIAISATAHKLARLIYRTLKYGQEYSDIGQAQYEAKYRINALKSLQKRARQLGVQLVDLHPSSVVVP

SEQ ID NO: 162939 - protein, 343 aa, unidentified
MTDISILAIDLAKHSFQVCATTAEGVVIYNRKYTRGKLEQLLTEHPTCLVAMEACATSHHWGRFATELGHDVKLIPPIYVKPFVKRGAKNDANDAAAIATAVRQPGMRFVRIKSQEQQSHAMLFRSHQTFTRQRAQLLITLRGHLAEHGIIVAKGNAALLAFAETLEAEAGLVPDLVLESARLYYHHIDQLAQTVVTLERQMGEATKRDKDMRRLRTMPGVGPISAAAFLAFAPPMESFRRGRDFAAWLGLVPKQLSTGGKTKLGRVSKMGQSDLRRLLITGATVCIRWARWKGIKPDSWLGKLLERKQGTLAAVALANKMARILWAMVTKGQDYRGGLVEYA

SEQ ID NO: 162940 - protein, 354 aa, unidentified
MKRTTKYVALDVHQASTVASVRVANGRVIARSIVPTEEPAIVEFFRGMRGAVHVAFEEGTQAQWLHDLLAPLVDRVVVCDRRGESQQGNKGDEVDADRLSELLRRGGLRAVYHGSASRADLKEFTRTYRNLVEDSTRVMLRLKALFRARGIQTPGKRVYHPARRARWLEQLTERGVRLRAEALYAELDVLRALRPKAKAAMLAEARRDPAWTVLQTIPFFGPVRVALLLATMQTPWRFRTKRNLWAYAGLAVVTRSSSDYVIIAGQPVRRRRAPMTRGLNRNYNRVLKDVFKGAATAATGRPGPLQDIYHGMIARGMREELARVTLTRKLAAITLRLWKKGERYDPTQLTMQAR

SEQ ID NO: 162941 - protein, 363 aa, unidentified
MFESTTVSVGLDVHARSIRLAAVRAEELLDERTLPYDEEAVERLLRRWPAVRCCYEAGPTGFGLYRHLVGRGIDCRVVAPGLVPQRPGDRVKTDSRDARKLAWLLAGGLLEPIHVPSRELEAARDLVRAREDARLDRMRDRHRLSKFCLRHGRSLPTNSWTIVRRKWLGEQRFEFAAEQQTFDTYVHTLDLVDARIEQLERAVRETAEQGPWSQLVARLRCLRGIDTLTAFALAAEIGDFNRFESAEELMAFVGLVPSERSSGEQRRRGSITKAGNSHVRRLLVESAWHARRHPKVSYELARRQRGHDTAVIERSWRCQQRLYQRWQRMAGRGKPQQKIVVACARELAGFVWAIATEQPLRTS

SEQ ID NO: 162942 - protein, 357 aa, unidentified
MFYVGIDIAKNTHWASIMSSDGEVIKEPFSFSNDNSGFQKFISKLESLDKTKILIGLESTAHYGENIISYLFNLDYNIGLINPIQTANLRRSNIRKTKNDKVDTKIIIKALTLGNYSLITSRDINNLKLKGLCRSRRNLVTMRSKAKIQLVSYLDQISSLHLTKISNILHDNSHGRYNKQDAIRLRELAKNSVGIDNPSLSLQIKHSILQIELYNEQIAEVEALYKQILDEMNTPILSIPGMSYNQAAVIIGCIGNINRFEHSCQLLAYAGLDPSVIQSGNFQARSTRMSKRGSGMLRYSLVYSAHNVVKNNRTFRDYYELKRSQGKSHYCALGHVAHKLVRIIFKMLKDNVEFNVD

SEQ ID NO: 162943 - protein, 336 aa, unidentified
MQTIHFLGIDISKKFFNFCLLDEQGKMLAQSQVENRKKDISTMFTALRKAYSVSASNLVVCMEHTGIYSNLVLQYLHVNQIKTCVEPALQIKQSIGMTRGKNDKIDAERIARYALKNRLELKFWKPEREVIQKLKFLLSYRERLVKIRVQLHAPLEDEEHFIEKQFRTQLSSNCNRSLSALNKDITVVDREIRMLISSDQLISRMVELATSVPGVGIMTALNMIIASGEFKRINHPKKFACYSGVAPFEHRSGTSYRGKTRVSKMGNMTLKRHLHLAAMAAVKSTSELKEYYYRKLQEGKNKMSSINAVRNKLIARVYSCVQNERLYQKIYTNQLA

SEQ ID NO: 162944 - protein, 413 aa, unidentified
MSIDPGTAAARVTAGVDWAKDDHAVCVVGGQGEALERFTVRHDAAGLRQMAARLLRAGVLQVGIERSDGPAADALLRAGLAVFVIPPGQVKNLRGRYRSVGSKDDRFDAYVLGDVVRTDIQRLRPMERDSEQTAALRSAVRARRDLVGHRVAAANQLRAHLQIVFPAAAALFAEVDSEITLAFLSRFTTQEQADWLSPKRLAAWLKSVSYSGRTDSAVLHARMLAAPGGKTGRHARLHAGTTLALVAVLRVLNAQIQALAASIGAQMDAHPDAPVFRSLPRAGTVRAARLLAEIGDARGRFPTRDSLTGLAGVAPYTSQSGKVRTVAFRWEADKQLRDALCDFAGDSRRASPWATDLYDKAVARGCDHPHAVRILARAWAHIIWRCWQDHIPYDPAAHNSLQVILKQQQPAAA

SEQ ID NO: 162945 - protein, 418 aa, unidentified
MTDDARWFAGIDWASQTHQVCLIDADGKMIGERAFAHGGAGLADLCAWLLSMTAAEAAAIAVAIEVPHGPIVETLLERGFQTHAVNPKQLDRFRDRFTVAGAKDDRRDAHVLADSLRTDRHCFRRLAAEDALVIELREWSRMTEDLQQERNRLANRVREQLWRYYPQALAVSDDLAADWFLELWAAAPTPEKAARIRESTLERILKAHRIRRITAAQVLRILRQPALTVAPGTAEAASAHIRAVAERLKLVNRQIHEAHRQLDGLCARLAEENTETPPGPEPEQRDVTILRSLPGVGRIVLATLLAEASEPLRRRDYHALRTLSGVAPVTKRSGKRCIVSMRQACHMRLRGAVYHWARVAIQHDELSRRRYAEFRKRGHSHGRALRGVADRLLAVACAMLAHQAAFDPGYRRAREEAA

SEQ ID NO: 162946 - protein, 343 aa, unidentified
MERYVGLDVSLKLTSICVVNQAGSIVQEGVVDSDPEAIAAFVRSKAPGTARIGLEIGPTTTWLWTELKRLGLPVICIDARHAKAVLKMQINKSDRNDAAGIARIMQTGWFKEVRVKDLDSHAVKALLASRALLVKIKRDLENQIRGLLKNLGLVIGRAKFNVFAVRAEELIENRPELIAAVRPLLEARKAIEQQVGDLDRKVHKLARHDVQVRRFMTVPGVGPITALCFKATIDDPTRFKRSRSVGAYIGLTTRRHASGEMDWSGRISKCGDAMLRMYLFEAAGVLLTRVPKWSALKAWGTKLAKRNGLRKAKVAVARKLAVILHRMWIDETEFNWSTKKAVA

SEQ ID NO: 162947 - protein, 414 aa, unidentified
MAVMIGVDPHKGSHTAVVVDNTEAALAEIRVRTGPSQLDRLLSWAAAFPERSWAIENATGLGCLLAQQLVGAGERVLDVQPKLAARVRLLDTESTNKNDPHDARSVAIAALRSPKPKEVHPEDHSAVARLWSKRERDLSSHRTRTVCRLHALLCDLIAGGVPERLSATKAATLLASVEVTDAVAAARVELGREFLEDLYRLDEQIAETKKRLGGVVRASGSSVTQVFGVGPVVAATVIGLTGDVTRFPTRAHFASFNGTAPIDVSSGGKKIFRLSMRGSRHLNHAIHMAAITQMRFAHSPGRGYYDRKLAEGKSHKEALRCLKRRISDAIYDKLMEDARRMASKQGPGGQAGDDSASSAAGSHPAIPALRTSHSRTRRQPTSPRPRRTVRPAATKTTSTRSSSSVAPKITRKAS

SEQ ID NO: 162948 - protein, 343 aa, unidentified
MNDTIYNHYIAIDWSIVNMAIARMTKKSNKITLIDVPSDISEMKIYLKKLKGSKILVVEETTTSQWLYAELRDYVDRMVICDPYRNKLLNDGPKTDKIDAAKLVHLLKAELIKEVYHSTNKFLYLRRFVSGYDDLVKAGVRLKNQRYSLLRACGKRGFEQAGTKLVSGNDQLVLDCIDRQLETHKQEKKDYEKEFARLSKEYPEISHQKSLPGIGPIHAVKIVARIVTPYRFADKGHFLSYAGLVKLEKISGGRSYGRKNSRYCRQVKSVYKISTLAAIGGNNPINDYYQYLIRKKGYPEYNARHKACRKLAILSLGVLKSGKKYQPFRKDNVESNRETIQGL

SEQ ID NO: 162949 - protein, 317 aa, unidentified
MTTTQLFVGIDISKKHLDVAFCPGEQTFTYPNTEAGIQKLIARLKKLSPQIILLEATGGYEFLLLAALREADLPACFINPKLVRSFARGAGIAAKTDRLDAQVLALYACRMRPQPRILPTQQQQELKLLLTRRRQLLEMIQMENNRLDPTPLPRIAQSIRQTIQSLEAQLAALNREIDDFFQQHPLWVQLEQTLTSVLGVGHLSALILIAYLPELGRLNRKEIAALAGVAPFNRDSGQWRGQRHIEGGRSPLRHGLYMATLVATRFNPVIRACYQRLLAKGKAKKVALIACMRKLLTILNAMVKKQQLWCPPAPITS

SEQ ID NO: 162950 - protein, 339 aa, unidentified
MKFTPVGIDIAKSVFQVHYVDERTGEVVNRALRRGVFLEHFANRGRCLIGMEACSGAQHWARALTKLGHQVRLLPARLVKAFNIGNKNDAADARAIWLAVQQPAKSVAVKTEAQQAVLALHRMRQQLVKFRTMQSNGLRGLLTEYGEVMGKSRAALDKAMPQVLARLCERLPAMLIESLREQYARLAQLDEQIAQIERRLRQWLREEVAVQAIAQIPGVGVLTATAAVASMGDPQAFRSGREFAAWAGLVPRQTGSGGKVQLHGISKRGDTYLRTLLIHGARSVLQHAKAPGPWVEQLGQRRPPNVVVVALANKMARTIWAVLAHGRAYQPGHLSVRPA

SEQ ID NO: 162951 - protein, 363 aa, unidentified
MTSLSEIVEVVIGVDTHVRTHSAAAVDARTGGVLGEVTVEATPEGYQALVDFAGAHSLLRAWAVEGTGGHGAGLARLLARRYELVLELDRPERARRRNGAKSDPLDAIRAAREALSRAKLGTPRSAGQRQALSVLLAARRSAVQAGTDAQRQLFSLVIAAPEQLRERFRGQTLPAMTRLAARLRISPRWDLETATTARVLRDLARRALELSDEAARHEKDILAIVRSWRPDLLAQPGIGPIIAATVLCAWSHPGRIRSEAAFAMLAGAAPIPASSGQTTTRHRLNRYGDRQLNRALHTAVLCRLRYDPTTQAYAKRRTTEGKTSREIKRCLIGGLSVVRPARAVVPRSRRGMATLPRRCDGQF

SEQ ID NO: 162952 - protein, 341 aa, unidentified
MEQANTIGLDIAKQVFQLHGADAAGHVLFRKRIIRRKLLAFLAVQAPCVVAMEACAGAHYWAREIGKLGHTVRLIPPAYVKPFVKRQKNDVADAEAICEAAQRPSMRFVPVKSEEQQANGIVFRARDLLVRQRTQCINALRGHLLEYGYIFPQGVTHLATLVALVDDPESCLPESARVVLKLLIDTFTALEAQISQLDGEINRRSKADPTARRLMTIPGVGPIVSTAITALVPAPQNFPAGRAFAAWLGLTPLEKSTGGKQRLGAVSKRGERTIRRLLIIGASAVVQQASRRGAPKGSWLAQMLARKPKMLVTVALANKMARIVWALLVKGGIYRVPVAAI

SEQ ID NO: 162953 - protein, 314 aa, unidentified
MICGVDVSQQSLEARIEQGGPGASFPNTKAGIFQLAEFCRAHQVQLVAMEASGGYERLALLLLSAEQIPVAILNPRAVRKFAEAMGYLEKTDALDAGVIAHFARTRKSQPSSPGSAQLQHLRALVTRLRQLTDLQTAQRNQQLLVSDPTVQHLCQQLLEVVKTQIRSLEKAIAQLVDADPLWQQLNQSFRSIKGVASRTVSRLMAEMPEIGTLSHKQIAKLAGLAPLACDSGKARGKRVIAGGRRPIRDTLYMVAGIVARFHPDFIAFRQRLTAAGKAKKVVRVALAHKLLTRLNAKAREVRLKFAQTTLLEQP

SEQ ID NO: 162954 - protein, 316 aa, unidentified
MDHKQAVYGVDVAKAKLVIGQYEAEALTEIDNAPEPITAWLARLPAGSIVAMEATGTYHRLLAQLAHAMGLTVYVLNPQQLKHYARAVGSRAKTDPIDARLIARYVEHERAKLRVWQPPPPAADALSRLLVRRQALVNARQMLVQSLSGLPALKGCRQTLLASFKRMVANLDLLIRAELARSPDMAALHRRLTTIVGVGEIVAAQLVAALSALHFTRADAFIAYTGLDPRPDDSGERRGKRRLSKHGPALLRCLLYNAGMAATHSKLFKPRYLQLRARGLQSTEAIVILARKLARIAFALYKSGETFDAQRHLKTT

SEQ ID NO: 162955 - protein, 319 aa, unidentified
MCKFIGIDISKQVFDVSFLENSDWKHVVLENGKVGFKKLLKLIGKEDLVVMEASGSYYLPLADFLFNMDIKVVVENPLIIKRYSQSKLKRAKTDKADSKIIAEYAQKNAEDLRLWVPDSEVVSKMRQYFTRVQLLQKQVNQSNNQLEAFTSSGLLDKTLENEMINSVKNLKKSIEKLELLIEKLAKSSYAKSIECLTSIPGIGLKSAVMLIAATNNFEKFENYKQLIAFVGFSPRIYQSGSSVRGKGSICKMGKSQIRKLLYMCSWSAKRWNKSCKDMYERLIAKGKPERVVKIAIANKLLKLAFAIGKKQEKYEVNYC

SEQ ID NO: 162956 - protein, 397 aa, unidentified
MYIVGIDIAKRKHEAAVIDGEGTVIIKPFSFTNNCSGYNRLLAMLAKAKLPLDEVSFAMEATGHYWLALFTRLQKEGFRVQVINPVQTNSIRSFYIRQAKTDPRDALLIAEVIRFGHFSESTLHPENIYELRELCRGRHAIVSMQADVKRKVVALLDQVFPEYETAFTNMFGDTSMAILQTCPTPKELSEMPLEELCHLIEVSSHKRFRMAKAQELQALARGSFGFAMAGDVFSTMIRLYAKHLDFLKQQVREMDRKIAEIMDTLDTPITTITGIGPTLGAYILSEIGDISRFSSAAKLAAYAGIDPTMRQSGEYNGVRNRMSKRGSPYLRHAIWLATSSAVLHDPALKLYFQKKRDEGKPYMASVGHACRKMVSIIYAVMRDNKAYTPCIPNEISA

SEQ ID NO: 162957 - protein, 369 aa, unidentified
MDSEKIAVAVAEPGGEVRSLGTIPYREDSVRRLVKKLGPASRLRVCYEAGPHGYSLYWQLSKLGVHCDVVAPTLVPVKSGDRVKTNRRDAEKLARCYRSGDLTAVWVPDAAHEALRDLMRAREAAKKDQLRARHRLGKFLLRRGLRAAAGVKSWTTKHLLWIKTLRFEHAAQEATFVDYLHEVEHAADRVARLEQAIDQAIESAPADMRALIAGLQALRGIRSVSAATIVAEVGPLSRFARPKQLMGYSGMVSAENSTGNSVRRGAITKTGNAHLRRIAGEAAWAYQYRPAMSPVLKKRQEGLSEEVKEIAWKAQHRLCSRYRRLMAKGKLRQKVATAIGRELLGFVWAIGIQVEREQQGCTKGHRPAA

SEQ ID NO: 162958 - protein, 343 aa, unidentified
MTKITTIGLDLAKNVMQVHGVDKRGKAVVKKQLRRQQVTSFFANLPACQVGMEACGSAHHWARKLEELGHRVKLMAPQFVKPYVKTNKNDAADAEAICEAVSRPNMRFVPVKNGEQQAVLSLHRARQGFVKARTAQANQIRGLLAEYGLIIPQGICHIGKRLPGIVEDGENELPGVFRQLLQRLGEHFHELDRQVGELEEQIQSWHRDNEVSRRLAQIPGIGPITASALVASIGDAKSFDNARQLAAWLGLVPRQHSSGGKQTLQGISKRGDAYLRTLLIHGARSVIRVAERKADHAGSWLANLMGRRHKNVAAVALANKNARIVWALLAHEREYNADYELMA

SEQ ID NO: 162959 - protein, 353 aa, unidentified
MKKVFIGVDVSKEKLDATIIEKTEGQHVVAGYETFDNSKDGIRKLSGWVRKTTKTAKEECLYCAETTGGYDRLLCEQLYAKGHTVWRESALEIKRSSGLRRGKDDKTDSKAIAEYAMRHADKAEPYRPTDRKIEELRELYLYRDSLVEERKVKVTRAKEIKATCASSPSANFMYKTSMEDAKRIESRIRECEKRINRLIASDENLARNYGHVTSVKGISLVNGVALLVYTGNFTRFDNPNKLATYYGVAPFRNRSGSSVDSRADVRCYSNRKLKGQLSQAALIAVLYNPTLKAYYDRLIAAGKPRSVVLNNVKNKLLHILFSLVVHDCDYEENHEWKRKLGNDGIEKTVAVSD

SEQ ID NO: 162960 - protein, 348 aa, unidentified
MNHVAIDLGGRESQICVRGADGTILEEKRHATRSLETLMKRWPPSRVIVETSAEAFRVADAAKACGHEVRVVASSLVKSLGVGARGIKTDQRDARTLSEVSCRIDLPSVHIPTPASRELKSVCGAREELVEVRTKLVNNIHGWLRGRLWRIQSGVPVSFPERVRTHASSLSVELPAHVARNLEVIDLVNEQIRASDAQLREIVKADATCRNLMTIPGVGPVTAARFRAAIDDVSRFQSAHAVQSYLGLAPGENSSSERQRRTGLTKAGPAAVRRMLIQGAWAAFRTRPNEPMVQWARTIAERRGKYIAIVALARKLAGIMFALWRDGTTYRPARSAAAKISTGSVADM

SEQ ID NO: 162961 - protein, 346 aa, unidentified
MKITTIGLDLAKYIFQVHGADEHGKTAVRKQLKRTEMAKYFAKQEPCLIGMEACGSAHYWARKLAEYGHTVKLMAPQFVKPYVKTNKNDMADAEAICEAVRRPNMRFVAIKNVEQQAILSVHRARQGFVKARTAQSNQIRGLLSEFGIVIPQGISQIMKQVPEILEDGENGLPGAMRNLIARLAGNLKEMDRQVKELEAQIQLWHRENEASLKLAEIPGLGPITASAIVATVGDAREFNNGRQLAAWMGLVPKQNSSGGKQNLLGISKRGDTYLRTLLIHGARSVINAAEKKAEPESWLRKLMDRRNTNVAAVALANKNVRIVWALLAHGRTFRADYTPAAGAASM

SEQ ID NO: 162962 - protein, 349 aa, unidentified
MVVLGIDAHKRSHTVVVVDDTGRKLGERTIATTTADHLDLLSWAEQFGADRLWAIEDCRQLSRRLERDLLSIGQRIVRVPPKLMAHVRDSARSYGKSDPIDALAVARAALREPDLPTARLDGPAREVRLLVSHREDLVAERTRIINRLRWHLHELDPSWQPPARSLWRPKHLAATTARLQGIDGMVARLARALLERCRMLSEEIAELDHELEPLVARLAPALIELCGCATLTAAKILGETAGVERFRSRHAYARHNGTAPVPVWSGNRERHRLSRTGNRQLNTALHRIAITQARYHPPAREFLQRRRAGGDTKAESIRALKRRLSDVVYRALLADAARSAPPAAITMAA

SEQ ID NO: 162963 - protein, 398 aa, unidentified
MTESSDYESVQVFIGVDVGKDTHHAVAINRSGKRLFDKALPNDENKLRSLISDLKQHGQILLVVDQPATIGALPVAVARSEGVLVGYLPGLAMRRIADLHAGEAKTDARDAAIIAEAARTLPHALRTLKLADEQIAELSMLCGFDDDLAAQTTQASNRIRGLLTQIHPALERVLGPRLEHPAVLDLLQRYPSPEKLASLGEKKLAAQLCKLAPRLGKRLAADIAQALAEQTVVVPGTNAAAVVLPRLALQLITLRKQRDEVALEVEQRVIAHPLYPVLTSMPGVGVRTAARLLTEVACRAFASAAYLAAYAGLAPVTRRSGSSIRGEHPSRRGNKALKRALFLSAFAALRDPLSRAYYTRKMSQGKRHNQALIALARRRCDVLFAMMRDGTFYTPQGS

SEQ ID NO: 162964 - protein, 323 aa, unidentified
MNKYNETFGIDISKDVFDCYGSKQGHLQFKNTEIGFKEFLEKLSKNSLVVMEATGYYHYRFAQFLYKKNVAVSVVNPLSVKRFIQMKLAKVKTDKSDAKAICDYGLTQEVPLYNALTDTQSECLQLFRLMDNLLKTRTATKNKLHGEEVLGIPSKWVYRCLNRNKKHLDKELRGIEQKLLSLVKQEQQNQLTLLQSIPGIGMKTALFLIVVTDGFKKFETASQLCSYVGITPTIRESGSSVRGRARISKVGNRKLRNLLFLCSFTACVHNKGCREIYQRIVNKGKSKKLALIAVSNKLLKQSFAIAKSGHPYDERYISVLASK

SEQ ID NO: 162965 - protein, 365 aa, unidentified
MASVTSAPGPIHLGMDTSKKTIVVAVLMPGEEIPVLDRIWNEEGSVRHLIGRLGGVGALRACYEAGPCGFELHRLLSSVGVACDVVAPSLIPRRAGERVKTDRRDASRLARLHRAGELTAIRVPTEAEEAVRDLVRARAALMADRRRAQQRITAMLLRHGRVWRGTSWTEAHERWIAGQRFGEPALALALAHYRAALDTRRAELDAVEAELAAWAGKPPLGEAVARLGCYRGIAALNGLTLAAEVVDWRRFPAARAFMGFTGLVPAEYSSGERTRRGSITKAGSAPVRTALIEAAWAYRFRPAIGVTLRRRQHGAAPDTLARSWQAQRRLHARYKAMTARGKPAGVAVTAMARELAGFVWAEMTS

SEQ ID NO: 162966 - protein, 358 aa, unidentified
MYKFMKKFFIGVDVSKDTVDVSFFDDDRMKSPEYLAQYSNSPKGFREMVKDLRMCCHGVSSGQWLFCCETTGRYDHPLCHWLVDHGMVVWRESALQIKWSSGIQRGKNDRVDSLRIAEYAWRHQDKMQKFVKPSESLSNLKAAFTHRRRLVEKRTATRCQLKSMSSEKGLSASVARMIVRDLSREIERLSASIATMDESIQKIIRSDSELDRNYRHIISVKGVGPITAVALIVCSGNFKAITSAKKMACYCGVASFRSQSGTSINRKASVSNLSNRQIKSLLSMAARSASRSNPVFAEYFNRTLSRGKPVALVYNNLRNKIITVVYKLIERDCDFDVDYKRMHSTGQRANDPAIRETV

SEQ ID NO: 162967 - protein, 347 aa, unidentified
MQIIGCDFHPSYQQIAWLNTETGEMREATLEHEGGEAHRFYASLPGPVRVGMEAVGNAQWFERMLAELGHELWIGDAARIRAMAVRRQKTDRRDAVHLLELMTSGWFPRLWVPTPPVRDTRQLLLHRHKLVGMRRAIKNQLQHVALNQGLRRRHKLWSELGRQQLASLPLSGWTARRRDELLAWLNHLDGRIEVLDQAVVAEAERWPAVQLLMTHPGVGPVVGLAYVLTLGPWQRFPRGKQVASYLGLIPREHSSGGRQRLGAISKQGNPLLRSLLVEAAQTAARYDEELSRDYRRLAMRKHRALAKVMVARKLAVRLYWMLRENRPYTPPPEVRKQGRPNHSVVAV

SEQ ID NO: 162968 - protein, 359 aa, unidentified
MSEITRGFIARVGVDLAKRVIQVHAVDAAGRVVVAKALPRDGFMPWCAQLPPGTLIAMEACSGAHHWTRKLRSLGLDARMMAAHFVTPYRMQGKGGKNDANDAAAVCEAASGPSMRFVPLKTPAQQAMLVIHRLREGYKEERTACINRIRGLLTEFGLVFAQRPEVLRRELSDVLEDATNELPALLRMALRQAHLHWLELECHMAWCDERIEAHVRTDEQAKAAAQLCGVGPVTASALVAMVGDFKQFKSDNQFGAWLGLVPRQNSSGGKASLGQITKRGDGYLRTLLIQGAKAAMVHAKKRSDRISLWMVSLIDRIGWQKAVVAMANKNARILWAVLTKGTAYDPNHVSINPGLPATA

SEQ ID NO: 162969 - protein, 402 aa, unidentified
MNAVGIDVSKGKSMVAIMRPFGEIVSAPFEIKHTASDINSLVELINSVEGESRIVMEHTGRYYEVLAHQLSEANLFVSAINPKLIKDFDNDSLRKVKSDKADAVKIARYTLDKWQNLKQYNVMDELRNQLKTMNRQFGFYIKHKTAMKNNLIGILDQTYPGVNTYFDSPARSDGSQKWVDFASTYWHVDCVRKMSLNSFIDHYQNWCKRKKYNFSQSKAEEIYGKAKELVPVLSKDAITKLIIKQAVDQLNSASTTVESLRTLMNETASKLPEYPVVMAMKGVGTSLGPQLIAEIGDVSRFTHKSAITAFAGVDPGVNESGSYEQKSVPTSKRGSSDLRKTLFQVMDVLIKTHPQDDPVYQFLDKKRAQGKPYYVYMTAGANKFLRIYYGRVKEYLSSLPES

SEQ ID NO: 162970 - protein, 340 aa, unidentified
MNVTTIGIDLAKNSFSLHGVDAHGKTRLRQNVNRSKLLSLLAQQPASLIGMEACSGAHHWGRELEKLGHRVGIMAPRFVAPYRKGGKNDGNDAEAICEAVARPGMRFVPVKHAEQQAVLCLHRIRQGLIKERTAAINQVRGLLSEFGLVMPKGRYGAQRHIPRILEDAGNGLPVLARRLLHDVYLRLSAMNEQLLAYDRELEQLARESETARRLMSVPGVGAVSATALLASVGDPKQFQSGRAFAAWLGLVPRQYTTGGKIRLGRITKRGDVYLRTLLIHGTRAVLARVKDKPDRLSAWSRVLIERRGYKRAAVALAAKNARILWALMKHGTTYQLKPLA

SEQ ID NO: 162971 - protein, 343 aa, unidentified
MYYIGLDVHKKTISYCVKDAAGCVHREGKIGSSRHELDAWIRTLPQPRVMAMEATIFTGWIYDYLLPHAEKVKVAHPLMLRAIAAAKKKNDKIDASKIADCLRCDFLPECHMAPTEIRDRRRVLRYRNLVVKQMTQMKNRVSGLLMETGVSYNKQRLHKVGYFGELMSTNADISDAVRPLLNLSRGMIRRSGKLEYDLVSSLERDPLLQERLRRLRTVPGVGSITALTWALEIGDYTRFTSNKQAISYCGLCADERSSADKVMRMPLSKQRNKHIQRVLVEAAKLAPRESPELAMIRARELERGNPNRATLAVARKMVCYLLAVERRQQDFVAAGEFFPTAAA

SEQ ID NO: 162972 - protein, 408 aa, unidentified
MDLLHLRCAGIDVHKTQLQVFVRVVEGQSVHKTVREYGTTTPELLRLREWLESEGVTPVAMEATGTYWKPVWHVLEGAVELLLANARDVKAVPGRKSDVLDCQWLADLLAHGLIRGSLVPPAPIQELRDLTRTRKQLVRERGRHVQRVQKILEDANLKLASVITDLQGKSGRTILDAIVAGETDPARLARLGSRRLHASAADLEAALQGRVSAHHRFMLRLHLTQIDGVDQAITQLEGRVEACLAPFRAVVERLITIPGVSATTAAVLVAETGADMSRFPSAGHLVSWAGLCPQLDESARKPRSRRTRPGQWLKTTLVQAAWAAVKRKDSYFYAKFVRLRQRRGAKKAIVAVASAMLTAAYHMMRDETEYEDLGADFFNRFDRDKIATRLIRRLQQLGYDVKAHPTAA

SEQ ID NO: 162973 - protein, 301 aa, unidentified
MDNIDRDQDVFVGVDVSKKQLDVHVLPNGDSFSVARNGPGLDDLVGRLKSTPPTLVVLEATGGYERVVLAALAGAGLPVLAVNPRQIRDFARACGRLAKTDQLDAAVIALFAQRIRPQWRPQPDAATQALGEIVARRRQIVDMISAESMRLQQTSTRKVAKNIQRHLAWLQKELTSVDGDLNTMIEQSALWTHNEALLDAVPGVGKATARTLIAQLPELGTLNRRSLAALVGLAPFNHDSGTHRGKRSIRGGRSVVRSALFMAAWVGSRCNPILKATYQRLIAAGKPKMVAMIAAARRSAP

SEQ ID NO: 162974 - protein, 355 aa, unidentified
MNQEKYIGMDVHQATISVAVMDGSGKLIMECILETKAATILEFIAGLRGTLSVTFEEGTSAAWLHDLLKPHVSHLVVCDPRRNALLKDGSKSDRIDARKLAELLHGNQLHAVYHGEHGVRTLKELGRSYLTITKDLTRVMSRIKALYRSWAIPCSGATVYAPRHRAEWLAKILEPGVRLRAERLYQQLDLLQPVRQEARRDLLVESPKHHAVTLLRQIPPIGPIRAALLVALLQTPHRFRTKRQLWAYSGFAVETHDSGEYRLVRGKLVRNRERITVRGLNHNHNHDLKNLFKGAAISASTRPGPLCDFYVALVEKGMRPTMARLTLARKMAAITLTIWKKGVDFDAKQLNRQAA

SEQ ID NO: 162975 - protein, 354 aa, unidentified
MKILAVDLGKVKSVACDFASETAEHVFETCRTVPEALEELFVRRRPDRVVIEVGPSAGWITDLAAGLGIELQVANPAHEGWRWRSVKKKTDRVDALKLARLSAVNQLPLVKVPSKEVREWRSLIHYRQALVARRTAIKNTIRSILNRQAIGMPSAKSGWTNAFRKTLDGLAGVGDNLAKFWANLKPHEWWRGQLAEELRQLDQVSGAIGSVEKGLNAYAATKQPVQRLRSAPGIGPRLSEAVAAIIGDPRRFQNGRQVAAYAGLVPRVFQSGSVDRKGRITGAGNRYLRGMLVEVSWLGLRTNPWMKQVFDRVCRGCPSRRKIAIVAVARRLLIWCWAMMRDDRDWHPKALAAA

SEQ ID NO: 162976 - protein, 499 aa, unidentified
MSGHNRKSPPSQRHPRPTPRAPCPGQTDDLRRAARSAAHDRRCVEECAKIVALPVQHEHAAGIDAGDASHWVCVDATPDGSDTVREFPAHTPGLRKLVAWLRCCGVTTLAIEATGAYGHVLFLTLLEAGFTAILTPPQFARQVKGRPKTDRRDCQWIQRLHQHGMLPSVFQPDEATQTLRDYVRQRGNLVRLSGQHIQRMQKALELMNLKLTKVLGDITGVTGLKIIRAILKGRRDPKELAALRDRRCHHSVAEIATALDGRYRPEHLLELRCSLEMWEKYLDMIAEVDQAIAAQLRLMQRQTELAPLPPQTRKRGRKPHDPRFDVRTALYFATGVDLTAIEGIDELNALTLVSELGCDYTKWPTVKQFTCWLGLCPNWKKTGGKVQSSHTRRGKNRAARALRLAAWSLVRSKSYLGAYMRRQRGRLGKPQAITATAHKLARILYNLMRYGVEYTKQSEAAYAEQVHERLEKQLRRRAQELGFELTPITPPPMPVATQQ

SEQ ID NO: 162977 - protein, 338 aa, unidentified
MSLIKVLGIDLGKSTFHVIGHDQSGREQLRRKFNRIKLLQFLSTHPEVIVAMESCGGSHWLARKCQSFGHQVKLIPPQYVKPYVKTNKNDYIDADAIAEASTRPSMRFVSVKTEQAQVMSVIQRIRSGYIKERTACMSRIGAILLEFGMTFPKGHSQMKKLFQWLADNGEPISPLLMQSLVEHHDYYKYLNKQIETQDKKLKQLVENNERAQLLKTIPGIGDLVASRCLSDISNAHDFKNGRHMAAWIGLVPHQHSTGGKSTLLGISKRGNKSLRTLFIHGARALMSRPELAIKLFGNWLLALRARKPFNVTVVALANKLARIAWSVMTTQKPFEVRV

SEQ ID NO: 162978 - protein, 394 aa, unidentified
MNKLFVGIDVSKDSSSARGLDPEGRSCFSLLFPMDSAGFSHLSESIRSHCGDFSEVVVAMESTGCYHLNLYTFLISQGIKTVVINPLIIANFAKLSLRKTKTDKKDALTIARFLVVHKDAISQIALSQDVQDLRDLARERESLSVLIASMKNDIKRILQSTFPELESVCEVFSETMLQFLREFPSARLIQAAPPRRIGKALCHSDRRKRISVSAEQIIQASKDSVASVSVAKEVILPEKISTLFHLIEKQEKITKALIELCKSTRVEDLEIITSIKGISDKTGATFLAEIGRFNDFPSPKKIIAFAGIDPTLHQSGKFEGMSKISKRGNRHLRRVIFLMAKHVSREDTFFKRYYLKRRMEGLSFKEAVLATAHKLIRVIFAMLSNRTYFCPNEN

SEQ ID NO: 162979 - protein, 402 aa, unidentified
MLKNVAQSYIRRELVVKKNTLFVGLDVHAKTIHVAVAENGRDGEVRSLGIVPNRPEAIRKLVKRLFQHGRNIRACYEAGPCGYVLYWQLIGLGVDCEVIAPTLIPQKIGHRVKTDRLDALKLARCHRAGELTAVWVPDAEHEALRDLIRAREAARGDLRSARHRLSKFLLKHGIRYDEQTKNWTLRHLQWLRTVDMGHRTLDYVFQDYLHEMETQSDRLKRIEAAIDIALESGHEHTKEIVAALQLLRGVAKITAAGIAAEIGQFSRFKSPAQLMSYVGVVPSEHSSGGPGKRTQGGITKTGNSHVRRLLIEAAWNYRFKPITNGRMKLCENNVNPKLLPQLKTMASDAQRRLCGRYRALLGKGKSKQVTATAIGRELLGFIWAMGCKVESEINTNTDKRAA

SEQ ID NO: 162980 - protein, 334 aa, unidentified
MALDLLAIDLGKRSFHIHGVDGDGVIISRKVSRAKLIDAVENLNPTTIAMEACASSHFWGRRFQAAGRYVRLINPRFVKPFVKGSKNDASDAEAIYEAATRPTMRFVPVKSVEQQDLQSLHRARDRVIKTRTALMNHLRGLLAEYGIVLSQGPWRLVGQAPGAIATAELSDLARDLFDDLLVQIADLDRRLKKLDGQLLSICRSNDACRRLADLPGVGPVVATALVSAVDDGRHFRSGRELAAWIGLTPRQYTTGGKPRLGGIGRRANHYLRRQMIHGARAVMSRLAKHNDRRSQWLKAVAARRGFNRALVALANKTARIAWAVLARNEEYVAA

SEQ ID NO: 162981 - protein, 355 aa, unidentified
MSNEKYIGLDVHQATISVAVMDSQGKIVMESILETKASTLLEFFAGLRGSLFVTFEEGTWAAWLYDLLKPHVSEVLVCNPRKIPMHKHGNKSDKIDARKLAERLRVHDLKPVYHGNHGVRMLRELARSYLTVVKDLSRVMNRLKALYRSWAIPCAGRDVYYRRHRKEWLEKIPEAGTRRRAEQLYQQLDMLRHLRQQARRELLAESRKHAITAKLRKIPSLGPIRSALAVALIQTPHRFRSKRQLWTYSGLGLETRDSGEYHYVRGQVQRRKKQATIRGLNKDYNHDLKSLFKGAATQASVKPGPFQQFYQRSLAKGIQPTLVRLTLARKIAAITLTLWKKGEDFDIHKLNSQAA

SEQ ID NO: 162982 - protein, 344 aa, unidentified
MTYYAGLDVSLRTVNICVIDDDGERVAESKLASDVQDIVAYLDDLNIEIESVGLEAGTLTQYLTYGLQSADFEVICMEARQVKAALSAMRNKTDKHDARGIAQLLRCGWYSRVHVKSMQSHHIRMLLSSRKAVLSKCVDLENEVRGLFKIFGIKLPPKLGHGAFDARVRDIIEIDEMLSHALLPLLDARLVLYQTFRVLDNRTRKMAHRDPVCERLMSAPGVGFITALTFKAGVDDPTRFKRSRTVAAHFGLTPRRFQSGEMDIEGHISKCGDADVRCALYTAANALLTRSSRWSSLKAWGMKLAKTRGHRKAVVAVARKLAVILHRLWIDESQFCWGTEGARS

SEQ ID NO: 162983 - protein, 403 aa, unidentified
MHYARAFDNRARELTKKVFSFSNDIEGFNSFNQWADGIKTENSKTKVMIGCEPTGHYWFAFGKYVTGHEKELVMVNPFSVKKIKELDDNSPKKTDSKDPKTIAKLVIDGRYSIPYMPEGIYAEIRDLVNSRDRIVKQHNISANRIQRWLAIYFPEYLGIYTRFDAASGLAVLEKAPLPKDMIALGVSGIRKIWHEKKMRGRGVTEDRAKTLMEAAHNSVGLDGGAGTRSELHMLLEEHRLWTSQIDAVEKALKEAVSKVEHVDKLSNIKGIGLITIAGFIAEVGDIRRFKSPKQIQKYAGLELVENSSGKHKGKTRISKRGRRKLRRILYQVMIPLLASNKEFREVYDYYVTRVKNPLKRRQAMMAVGCKLIRVFYAVLTKGVDYDKEKLKTDIHRDSGTIAA

SEQ ID NO: 162984 - protein, 348 aa, unidentified
MKSIGCDFHPSYQQIAMVDTETGELREVRLEHEQGQARRFYEALRGQAVRVGMEAVGNSQWFEQLLEELGHELWIGDAAQIRRLVVRTQKTDRRDAEHILTLLRDGRFPRLWVPSPELRDLRQLLRHRHKLVQIRTQVKNQLQHLALNQGVRRKSRLWSLAGRAVLEQLPLRGWTARRRDELLAMLDQLEKQVGELDLAVRTEAARRPEVRLLMTHPGVGPVVGLAYALTIGPVARFPRGKQGASYLGLIPREHSSGGRQKLGSISKQGNVMMRTLLVEAAQTAARFDEELRRDYCRLAARKHSALAKVMVARKLAVRMYWMLRENKPYWQCSVARRQGSPSHSVVAR

SEQ ID NO: 162985 - protein, 461 aa, unidentified
MAKKAKKVKSAKGAELRIVNPDAAGIDIADGIMQVCVPADRSKDNNRTFGAYTSDLHAISAWLRECGIKTVAMESTGVYWIPLFCRLQEDGLDVVLTNARDVKNITERKTDESDAEWLMLLHQYGLLKASFQPHNDAKRMRTLTRHRDTLSREASSIVLRMQKAMQQMNIKLTLVLSDITGKSGIRIIEAILAGERDPKRLAELADIQCKTPKEEIAKALEGNWEEDLMFVLRQNYDTFKHYCIQLGECDAELEKLMENYRAEVAKVEGTSYSPAKKRRDYKKTRYTVSFDVERKAYEMWGVNVFEIPGISHLTALELMSELGHDFTRKFPSSKQFCCWCNISPNTKISGGKRISSHVPHRRNNVGLIFRSIASSLANAKNQLGNFYRRIRSRAGGKAAVIATAHKVAEIFFAMVANQTTYNPEKVGIDEKVLLEKRITRYKRELERITGTHIEIGNACVP

SEQ ID NO: 162986 - protein, 348 aa, unidentified
MNDVNIIGVDLAKRVFHAHGAHSDGSVAFRKRLSRSQMLTFFAKQPHCTVAMEACATAHEWGRAIGELGHKIRLIPPAYVKPFVKRQKNDTSDAEAIAEAAARPTMRFVAVKTEEQQARSMIFRTRDLLVRQRTQLINALRGHLAEHGVIAPHGPANVKLLAAALNDADRSLQSLVRDIGAVYLEQISTLNGKIGDLEKVLRREAQRGADRSRLQTMPGIGPITAMAIETFAPPMQTFKRGRDFAAWLGLVPVQHSTGGKQRLGRTSKMGQRDIRRLLIVGAMSVIRWASRRGAPKGSWLTRMLARKPLMLVAMALANKMARTAWAMLIKQENYRVPDLPCFFGPVLA

SEQ ID NO: 162987 - protein, 423 aa, unidentified
MDVLYERVAGLDVHKDTVVACVRIMVDGKTTRECRTFATTTEQLVALRAWLEECRCTHVAMEATGVYWMPVFRLLDADKFALIVANAAHIKNVPGRKTDMNDAMWIADLLACGLIQASFVPNEEVQELRALTRTRKQLVREQTRHVQRIEKTLAEANIKLSSVISDIMGASGRRMIQAMIDGVRQPNKLAELAGKQIKASPKELYDALHGRLTDHHRFLLALHLKQWDSIDETIRKLDGELDQRIGRMATAAEDRKIPFRALIELLTTVPGVSAVAAPAILSEIGPDMSRFPTAGHLVAWAGLCPGHNESAGKRKSSRLRKGAPWLKTMLVQCAWAAKRTKDSYYRAQFFRLQAKRGPQKAICAVAASILTAIYHILKHGTEHHDLGSAHFDRRLVEVKASRLVAHLKKLGFNVQLQPIAEAA

SEQ ID NO: 162988 - protein, 459 aa, unidentified
MKKAKSVSKSKAQTALQIIYPNAAGLDIGANEIMVAIPPDREGVTVRGFGTYTPDLAALADWLKEAGVTHVAMESTGVYWIPIFELLEERGFEVIVVNARHIKHLPGRKSDVMDCQWIQQLHAYGLLRGSFRPEAEMCVLRAYLRHRDNLLEDRAKHIQYMEKALLQMNIQLGQVLSDLTGETGLAILHAIVGGEHDPLVLANMRHGNCKHPREDMIKALTGHYRKEHLFVLKQALEMFESFSQRLQECDQEIKCLLEEMQPEVTDDLPPLPPNPKPNSHSKNAPSYNARNLIYPLAGVDLMAIPGMNEILLQKILSEVGLDMSRFPTAKDFCSWLGLAPHNAISGGRILYSHTLKNHNRAGQCFRLAARAVSKGKTVYSEFYRHIRSRSGAKEANLATAHKIARTFYYMLKRRQPFLAPDLQTYLQVQREKDIHRLEARAAKFGFRLQPAEAAQLCYE

SEQ ID NO: 162989 - protein, 341 aa, unidentified
MMIIGCDFHPRFQQIAFVDQETGEYGERRLCHPEEAEQFYRSLVGRQVRIGAEATGNFRWFRQLMQELGHEFVLGDPSAIRAASPRRQKTDKRDARHILNMLVEDRFPAVWQPPVENEDLRQLLLHRCRMVRFRARIKNQLDSMAKNEGLLSKRVWCAMRRKQIEELPVSGWNVERRKDLLFLLEELNKRIEPLDEAVLKAAEENPEARLLMTHPGVGPVVSLFYVLTIGDWQRFPRGKQVASYLGLIPAEESSSDKRRLGHISKQGNTLVRWLLVEAASKAQRYDPSWHRQYLRLSMNKHHGVAKVAIAHKLAVRLYWMLRSGQNYKQVMERGSHAGQSV

SEQ ID NO: 162990 - protein, 482 aa, unidentified
MKKPSIYPDRSQELLALFEKAGNPSKLMCVPIDYAKKDHLVMFCNGNGEVLRKPFSVKNSVDGVKYLIDQVNRSCRHRHIQSEHVFFGGEDVNSYAENFANTIRTNGWLVANVNAHDAKKQRENLQASTDRLDLMGIATMLLNRRANCCPAQTGVYRNLRTLVRHRKKLVKMKTEVRNRIHTIVDRLFPGFLNEKKSGIVPFSNSSLYLMQERFSAPQIRRRQRGALIRNLEKRGTKKAEQVAAKLQGYASQVLTTPDEYTATLQISLASHVTHYRCLYEGAQQIVNEMAQLLAQTKGAFLTSIKGIGIVLAAGVTAEIGDPLAQRTTDQLASYAGIVPKVKQTGGSQGPSITSHVSKRSNHILKDFVVQSAFHIGRYGPDDLKDDFNRREAAGQHADFGIARRFVRMAMCMMRTSQVYLPPDMRSTHLKPVRRADYYLAMWPYLRDKWSKVNALKVAFAKEKPLGQWRDIVQEIYGLKLKM

SEQ ID NO: 162991 - protein, 392 aa, unidentified
MYIVGIDIGKNHHEASIVSPKGKQIGRSLRFATTHKGADSLMSFIFKNIGNSPCVFGMEATGHYWYPIYSFLKAKGYTIYVINPIQSDSLRKMYIRQTKNDSIDSFLIAEVIRFGQFTTTSMADENILAMRQLCRYRDSVISSRTEIKLRISTIMEQIFPEYEKQFSSLWLSTSMGILEKYLTPENIENAPIDELFEIIKDKSHNRLTKAKAISIKEAAADTFGIKIAQDAFSFQLKQLIDRMNFLDKQIEALDCQILEYYEKFDCYLHTIPGIGMIAAATILAEIGDINRFKSSSALVAFAGIDPTVRQSGEFSSTHNHMSKRGSPYLRHAIFLAATTCSFHNSPLNAYYKKKRDQGKHHLTATGAVARKLTSVIYAVLRDSKPYEPKSFC

SEQ ID NO: 162992 - protein, 491 aa, unidentified
MNNSAASHNSAGGRPALARTRSSTSYRKTVGQRLPAEPAALAPTSYRKTPQEGHYISSMGSRAKRRKSQKQQKTMNDSEQWQQHRAFGALDWASEKHSVIVVNQTGKVIEDFEIEHSALGWKKFREKLQPYGSIPFAIETSQGAAVEQLLEAGMIVYPLNPKSAQAYRERKAPSGVKDDRLDAWSFADALRVDGQGWKALKPEEPLIKELRLLCRDEISLIEQRSAFIQQLRHALAEYYPAALEAFKDWTSVSAWMFLERFPTPQALAQAGKRKWQNFLHSRRLWGSEEGPRRMEIFARATEFAGTPPTVKAKSLLALSLVEMLFAVEKQLGLYRRRIEELFASHPDHDLFGSLPGAGPKIAPRLLAEIGDDRERFGGDVQNLQCLGGTAPVTKRSGKYRHVHQRWACDKHLRHALHLFAEKSLPRCVWAERYYQHHRQKDRSHANALRRLGHRWLKIIHKMWLDRTPYDAELHHRNQLQHGSWIFQLKAL

SEQ ID NO: 162993 - protein, 339 aa, unidentified
MFTIGIDPHKGSHVAAVLDEHEVLLDELRIRADRHQRDRLLKFAGPYVPRVWAIEGARGLGALVSQQLVAVGETVLDVPAKLSARVRILDNECADKTDSHDARSAAIVGIRNRRLVAVAPENHAAVLRMLAKRHHELIARRTQSICRLHAVLATLTAGGLPKRLSAERAARELRRIRPADAVGIARRCAAVELLGEVRDADRLLVALRRRIVAAVAAANTTVTEIHGVGPIVAAYLIGYTGDITRFATEGHYARYNATAPLNASSGPNPRHRLNDRGNRQLNHALHMAAVTQVAHDTPGRVYYQRKRADGHSDKEALRALKRRISDAVYARLHLDAQPQ

SEQ ID NO: 162994 - protein, 405 aa, unidentified
MWYAGIDWADQHHDAVVIDEAGKRVGTTRVAHSAAGLDTLVTFLKGIGDIAAHPDHLACIVETNRGLLIAALLDAGLPVYPVNPKTVDRHRKPAGAKTDAIDAYLLARTGRSDLADLRRLTPDSPLIAELKALTRDQDTLIQSQTRLVNQLTACLKAYYPVALDLFGKLQQPTTLAFLQAFPTPEQARAATVEQIATVLKAAGHARAEVKARQIHDRLSQPQLRGDAVVTRTKTRLMLTLAAQLRVLLPEIAAYDNEITRLFRLHSDSRACASLPRAGTRLAPRLLAEWGDERGRYTDAASVQALAGTSPVPFQSGNFAKAHRRYACNKPLRNALQQFAWQSTQKEPWALTYYQRKRRDGKSHAMAVRALANQWVRLIYALWTNHDTYDPATFLAAQQAHAPRAA

SEQ ID NO: 162995 - protein, 341 aa, unidentified
MQKAITYVGLDVHKDSIVVSLAEAGLRGRLREVREYGKVLNTPAALKAMATKLAAGGNELRFCYEAGPCGYGVQRQLSAMGHHCAVVAPSLVPRKPGERIKTDRRDAAKLAKLHRASELTPVWVPDPAHEAMRDLVRARLAAVRNIREARQQLSGFLLRNGYHYHRHPWTLMHRRWMADLKFDQPLHYIVLQDCIAAVEASEQRRDRLEAGIIAALPEWSLAPLVETLQALRGIALVSATTLVAELGDIARFSNPRQLMAYLGLVPSEHSSGRSRRQGGITKAGNAAARRMLIEAAWSYRFPARISRYQLSQQKRLPKLIRDIAWKKLWGRRRGVGIIVAG

SEQ ID NO: 162996 - protein, 411 aa, unidentified
MARNNAGEPPAAGPVIAGVDTHKDAHVLCLLDSLGRRLSSASFPADADGYDALARAIGDPGDCMVVGVEGTASYGAGLARRLAELGYNVVEVLRPKRDRLMVGADKNDPEDAERAARKAASGDGCSVPKAQDGWVEALRQDYVARRQLVKTTTACVDCAKSLLTTAPEPVRERFRHESDAAGLMEALACAEPAGTAVEAAALGSLRSLALAWREARRQAEGCESRMRSLIEANAPALLGVECVGTISAAALAVTAGDNPDRMGGEASFAAVCGVSPVEASSGKVKRHRLNRGGNRQANWALWQIVKARMASDERTKAYVERRTREGKSKREIMRCLKRYVAREVYKVLLDPNPDGAPPHGDGLRRMRRARRVTQREVAEALGVSVTTIANLEHGRARSTRLESGYYAFLTS

SEQ ID NO: 162997 - protein, 307 aa, unidentified
MSEKIYFGVDVCKESLAFCGANVAGQVPNNAPGVRRLLARLPQGAHLIIEASGGYQRELVKVAQQSAVLLSVVNPRQVRDFARGVGRLAKTDPIDAEMLARFGAEVNPPPDAVPTTAELALQELVSARQQLVEQRTVLLQQQSQQLNNVVRRLDRARLKLLQRQIGQLELAISSILEEQSALKQKVERLQQVKGVGFITAVTCVALCPELGSLSKRQTAALVGVAPYDEDSGARKGWRHISGGRPKLRRALYMASISAVRSNPILRRFYQQLRQRNKPPKVALVAVIRKLAILLNRLLRNASFLPAS

SEQ ID NO: 162998 - protein, 338 aa, unidentified
MAIVTIGIDLAKNVFAVHGVDATGKAVLVRPSVARAKLLELIASLPPCLIGMEACSGAHHWAREFAKFGHTVRLMAPKFVVPYRLSGKRGKNDAADAAAICEAVTRPQMRFVPVKTLEQQGQLAVHRARQGFVEQRTATLNRIRGLLAEFGVILPLKAAVVRREATRHLEDLPGWANTVVGDLLSEVTRLDERIAQYDRHIATMASESAEIKQLMQLPGIGPTTATALMSTIGNGRDFKCGRQLSAWLGLVPGQYSSGGKARLGHITKAGDPYLRSLLVLGARAVLQLAKSKTDPLSRWANALAERRGYWRAVVAIAAKNARMCWAVLNKGEAFRLPA

SEQ ID NO: 162999 - protein, 316 aa, unidentified
MQTPLVFVGIDVSKARLDVGVRPSDERTSVPYDAPGIATLLVQLTQLQPTRIVMEATGGLERPLVRALMDAALPVIVVNPRQVRDFAKATGQLAKTDTLDAQVLARFAEVIQPSLRVIPDAQTQELAALLARRRQVLAMQGAEQHRLDRAPDRVRKRIEVHVRWLRDELARLDADLDDLIQQSPVWRAREELLQSVSGIGPVMSRTVLAELPELGLLNRKQIAALVGVAPFNRDSGRLRGHRTIWGGRASVRRALYMAALVATRWNPVIRVFYQRLRAAGKAPKVALVAAMRKLLTMLNAMVHAGTPWQPVVAQAA

SEQ ID NO: 163000 - protein, 343 aa, unidentified
MKHYVGLDVSVKETSVCIVDETGKICRELKATSHPEDLLQILQDPAWRMERIGLEAGPLSQWLFDGLARAGLPVVCIETRHTKAFLKAQVNKTDRNDARGIAQMMRVNLFRPVHVKTLASQKRRALLTARKLLQEKAIAIENDLRGLLRNFGLKVGVVGALKFEGRIHELVAGMPDLAEITKPLLDARRTLREHFASLHRKLLEIVRGDEVCRRLMTVPGVGPVVALAFVATIDIPARFRNSKAVGPALGLTPVQHQSGESKRVGRISLCGDGMMRTLLFEAAQTLLTRVTKWSWLKAWAMNVAKRRGARKAIIALARRLAVILHRVWSDGSEFRWAKAASAA

SEQ ID NO: 163001 - protein, 446 aa, unidentified
MPLDCCERARGSVSWQRSLRTGAVRRWSPHGGRRDVMEVLFDRVAGLDVGKESVTVCVRTPGPRGGRRSETRTFKTMFGSLRVMRDWLIEAGVTIAAMESTSTYWKPPFYCLEEVMVVWLLNAAHMKAVPGRKSDVRDAEWIAQLLEHGLLAPSFVPPPQIRRLRMLTRYRMQLMGDRSREMVRLELMLEDASIKLSSVVSSLKTVSARAMLTAMINGESDPLRLADMAKGRMRRKIPDLAQALTGTFEAHHAQLARSMLRRLELVEQALAELDAVIAEACRPWQHHIELLQTIPGVGETVAQVIVAETGADMSRFPTAAHLSAWAGLAPAMHESAGRQTPAGKRHGNKWLTAMLVEAAGSVGRMHGRNYLAAQHARLMKRRGMGRAQVAVAHSMLVAAYWMLKRDEPYHDLGADWHRRRSDEAHTRRLVAQLEHLGHTVIIDPAA

SEQ ID NO: 163002 - protein, 345 aa, unidentified
MNKLKASSTDLAFCGIDVSAATVSAAVIKPDQHLAEREFSNTASGHRSLLTWLGQCGVVVRISLEATGVYSLDLTLALDAAAHCEVAVLNPKLVNRFAQTLVRNKTDSADAVVLAEYSRRMPFTAWSRPSVEQLQLRALGRYIESLAADLTGVKNRLHAAERSTGMPRAVLHDLKQAQAALVRRLARMRQQARKLVEADKLLARRFDLLRNMPGIAETSALSILCELVMLPPEMTVRQWVAMSGLDPSHRESGTSVHKPARISRAGNRHLRRALYMPALSAARHDPHLRAFYRALRERHKTALQALVAVARKMLHAIYGIFKSEKPYDGQRLFPQLQLEVKSIAG

SEQ ID NO: 163003 - protein, 329 aa, unidentified
MSEVRTFSAVAREIKWLAEWLAEHQVSHVVMEATGQYWKPVWDVLAERGFELMLVNARHVKMVPGRKTDVADATWLAELLEHGLLRGSFVPPRVIRELRDLTRYRKRLVQAHTSEGQRIAKILEDAGIKLDSVVSHLLGVSGRAMLRALIAGERDPEQLAELARGRLRTKIPALAAALEGRFAEHHAIIIGLALDHFEYLERSVVRLDERIDDLMAAHSAARDRLDTISRVGKRAAEIIIAEIGADMSVFPTAGHLASWARMCPGNNITGGKRKSGTTGGGNRSLRETLVECASAASRQRDSYPAAQFWRLARRIGKKKPPWQSGTPSW

SEQ ID NO: 163004 - protein, 310 aa, unidentified
MSLYIGIAVSKATLDVASLPDGETWTVTTDDAGTAALLARLLPVHPHLIVLEATGGFEAAAVAALAKLGLPVVVVNPRQVRDFAKAMGRLAKTDAIDALTLALFGERVRPAVRPLPDETTQLLNALWTRRRQLLEMLTAEKNRLGFARGPVKRDITTHIRWLEKRLADVDGDLTATSAASPAYQAQEELLRSVPGVGRVTALTLLGKLPELGRLSRREIAALVGVAPLNHDSGTWRGKRFVWGGRAPVRAALYMAAFVGMRHNPTLRRFAERLQAAGKPFKVAATACMRKLLTILNAMVRHQQPWAPQNA

SEQ ID NO: 163005 - protein, 395 aa, unidentified
MLKYCVGIDVSKDSFHCCISVIDQQQKVTVKGSRKFSNNKAGFIELDHWISKNYKNKEVPLVVVMEATGIYYENVAMYLFTQNYSVSVVLPNKAKKYLQATGLKSKNDSIDAQGLSRMGAEQSLDLWKPLGEYFYLLRELTRQHQSLQEMKTRYCNQLEAAEYGMYQMKLVTKQLKSSIKLVERQIGELSAAIKSHIECNKEVADKVEGICRIKGLGLTTVAVIAAETNGFALFKNNRQLVSYAGYDVVENQSGKHTGKTRISKKGNSRIRRALHLPAFNMVRYEQAPFVGLFNRTMEKHGRKMKSYVAVQKKLLVIIYSLWKNNLAYDPKYTHKHTGEEEQVPSSQSDGLVQAGTENENSASSKAALHKVDILSNDRSLPPLSNRKNKAKIVWN

SEQ ID NO: 163006 - protein, 404 aa, unidentified
MYNAVGIDVSKGKSTIAVLQPGGTVIRKPFDVSHTSQNLNELADYLGSLEGPSKIVMECTGRYHEPMLKALYEAGLFVSVVNPHLIKNFGNNSLRKVKSDPADARKIARYTLDNWAELRQYSDMDDTRTQLKTLNSQFSFFMKQKVAAKANLIALLDNTYPGVNKLFDSPTREDGSEKWVDYAYSFWHVDCVRKIGLKTFTERYKAFCKKHHYIFQQDKPEKLFNASKELVAVFPKEKTYKLLIQQSIQQLNLASGHVERLRQEMNALASTLPEYNTVMGIYGVGKTYGPLLIAEIGNVSRFTHREALTAFAGVDPGVDESGQHKSKSNRASKVGSARLRKTLFQIMTTLLQNAPVDDPVYRFLDKKRAQGKPYYVYMTAGANKFLRIYYGKVKECLRNLEQAE

SEQ ID NO: 163007 - protein, 392 aa, unidentified
MSQHSRSDASRSLTALEQDSTIIAVIEMSRTKWLVAALVPGVERQPLKKFDAQEEMLLKLLHRWRREAGQAGRNIKRIVVAFEAGRDGFWLARWLRARDVEVYVIHPTSIAVSREHRRAKTDRLDTELLMRVFLGWLRGEKRHCSMVTIPTMAEEDARRPSRERESLVSEQTRIVNRFKAVLALFGIGGFNPKLRNAAQKLKTLCTVEGTPLPENAHAELRHDLERLRLVRDQIRAIESERLRRLALAPMAATGPHAMVRLIARVFGVGIETADMLVNEALARNLRDRRAVARYAGLTGAPDESGKRRREKGLARAGNGRVRRGMIQLAWRFLIFQKDSRLVRWFRERTADGRKTTRKTMIVALARKLLIALWRLVTIGEITEGLKLRPAGT

SEQ ID NO: 163008 - protein, 397 aa, unidentified
MYIVGIDIAKRKHEAAVIDGEGAVIIKPFSFTNNCSGYNRLLAMLTKAKLPLDEVSFAMEATGHYWLALFTRLQKEGFRVQVINPVQTNSIRSFYIRQAKTDPRDALLIAEVIRFGHFSESTLHPENIYELRELCRGRHAIVSMQADVKRKVVALLDQVFPEYETAFTNMFGDTSMAILQTCPTPKELSEMPLEELCHLIEVSSHKRFRMAKAQELQALARNSFGFAMAGDVFSTMIRLYAKHLDFLKQQVREMDRKIAEIMETLDTPITTITGIGPTLGAYILSEIGDISRFSSAAKLAAYAGIDPTMRQSGEYNGVRNRMSKRGSPYLRHAIWLAASSAVLHDPALKLYFQKKRDEGKPYMASVGHACRKMVSIIYAVMRDNKAYTPYIPNEISA

SEQ ID NO: 163009 - protein, 375 aa, unidentified
MFPAPTPQLWEVPTMSESMALVGLDVRQAQTVAAVLDRGTGELRVQRLRGEPAKVVPVFLEELERPVAAVYEAGPTGFALARVAEERGLDVRVVAPGSIPRAPGDRVKTDRRDAKRLVRLFAAGELSYAFVPSETDERFRDLVRCVEDARKDLMRSRHRLSKFLLRRGHRFPSKAWTQPHERWLCQLHFEDAPSQATFLDYLSAVQALVQRRRVLIGALEEAVPGSSHAETVARLRCFRGIDTLTAAGLCAEVGDFTRFAKPALLSGFLGVVPSEYTSDDKRVQGQITKAGPPHARRLLVEAAHHYRHRPAVGETIKARQAGQDPRVVQIAWRCQRRLHDRWTHLAGKRGKRTGTVAIACARELAAFCWEAATLD

SEQ ID NO: 163010 - protein, 338 aa, unidentified
MLSIGLDAHERTSSLCILDTSGRTVKEVTVKGHPRRVLRWLGEVKEPFKICFEASTNYGWLYDELKAFAVEVLVAHPGRLRLIFRSRRKNDRIDAARLAKLLYLGELPLVHVPSVDVRAWRGLIEHRQRCVRERTRVKNGIRALLRTHGIQMACRMRLWARKGHAWLLEVDMPTAVAALRRDQFLDDLEHHTRKIHRLETMLGSIGNRHPGMVLLQTIPGVGVRTAEAFLAYVDDPQRFRGRSIGAYLGMVPRQNASGGVNRLGRITREGPSTVRQMLAEATWQAIRRSPTVRKRFERICQGRPDRRKKALVATAHYLARVMIGMLNTGERWREEVAA

SEQ ID NO: 163011 - protein, 281 aa, unidentified
MQCIAFDSHKHYTWALVQDETGKVLREQRIAHARGALQGFLEEFEQGSPVAVETIGNWYWITDEIEAAGMVPQLVNARRAKVMSGSINKTDRLDVRGLNRLQRSGTLPTVWIPPRELRDARELPRTRMVLVRQRTKLKNRIHANLAKYGLKTGGVTDLFGVRGRRILARCLEELPSETRYATQSLLEELDHLQARIEEFEGRMADVFGEITALETIKTLPGVAFILGVVILTEVGDVERFPSASHLASYAGMTPRVHASGGHIRYGRTRPDVNHYLKVGLR

SEQ ID NO: 163012 - protein, 359 aa, unidentified
MFSERTSVGLDVHARSVAAAAIDGETGELVQARLTPSHDHIRSWIGELAGPVAVTYEAGPTGFGLYRSLTQAGIRCVVAAPSKLQRPAGDRVKTDAKDAVHLARLLRLGEVTAVAVPSVAQEAARDVVRAREDCRGDLMRARHRLSKLLLRQGIVYSGGQAWTGVHDRWLRQQRFDNPATTTAFESDYDAVLTVAARRDRLDTAIVELAAASEFTAVLRRLACLRGVSTLTSFALVVEIGDWHRFTGNTIGSFLGLVPSEHSSGASRVQGSITKTGNTHARRLLVEAAWHHRPAYRPGKTMRDRWELAPPAARARGDAGNRRLHERWISFNLRRKRAVIANVAIARELAGWCWSLAIMD

SEQ ID NO: 163013 - protein, 342 aa, unidentified
MDKMAACGMEVSAQELVIALLGKKGEAVLLRFANTAAGHGQLLRTLTRGGKRVRVCMEATGMYGLDVALLLSAQEGVELMVANPRAVRSFARAMMQRSKNDQLDAVVLREFAGRMPFQRWTRPTENALALWGMARRLEALTKERTAEKNRQHAAGVSQATPECVRRSIARTLRFHRREIAQLRGEALRCIAAEARLRRCYQLLRSVKGIGETSAIQILAELALLPEDRDVRQWVAFAGLDPREYSSGTSVRKYTRISKVGNQHLRQALFMPALVASRREPHLRAFYEHLLASGKKKRQALVAVARKLLHAIYGMFHNDQLYDGARVYTLPASLATSPAAHAT

SEQ ID NO: 163014 - protein, 329 aa, unidentified
MKVQHIIGADLSKRSIDLVYHLSKSHIKINNSTDGFNDLMRWLQKLNIDISEAMIVMEHTGLYSYRFEDFLHQQQIAFCKVSALEIKRSVGLVRGKTDRLDAARIAGYGHEKKARLIINQPLSNDLKRLQVLHSTYQRLVRHRAALINALKEYIYIGIAERDLIIQTQRQLIKNFDKQIKKLMSEIQMIINQQAALKQNFLLLQSIKGVGKILALTVIIKTHNFTRFISARKFACFCGTAPFDHSSGTSIRIKTRVSHLADKQMKTLLDLSAKSAIQYDKELREYYLNRTQNGKSKMSTINVVRNKILYRMFAVIKRQTPFTENYSQAA

SEQ ID NO: 163015 - protein, 355 aa, unidentified
MDSKKYIGMDVHKESVSIAVRNEAGKIVMECVIETKASIILQFIQGLSGSLHVTFEEGTWAAWLYDLLKPQVTRLVVCDPRKNASMKQGNKSDKIDARRLAELLRLDHLNPVYHGEHGLRSLKELVRSYLTLTKDLGRVMSRVKAIYRSWGIACTGKQVYAPQHRAEWLAKISEPGVRRRAEFYYQQLDALRSLRREVRRELLEESKKHPVWKQLCQIPSIGPIRAAVLLGILQTAHRFRTKRQLWTYSGLGIEGHSSADHQVVKGQLQRKKKHVEVRGLNRNCNHDLKNLFKGAAVAAATKPGPFEEFHAALLAKGMRPEMARLTLARKIATIVLVMWKRGVCFDANHLKPQTV

SEQ ID NO: 163016 - protein, 415 aa, unidentified
MLRIIYPICCGIDVHKKFIVACIASTNDKGVSTYKSGRFSTFTKGLRELSEWLHSNSCKDVCMESTGKYWIPVFNILEATCKITLAHPKYVKAIRGKKTDKKDAKWIADLFKHDLVNGSFMPPLAIRQLRDLMRYRVKLINLKSSEKNRTQNCLTVSNIQLANVLSDTFGKSSMAIIERILENPLDTNFDVAPLIHGSLRAKASDLQLAIDGMITPEQAQKLKIIRQHYDSLELCKLDLESVILELADSYQKERSLLTAVPGIKAFSAIAIISEIGVDMSVFPTAKHLCSWAGLTPQNNESAGKKKSVRISRAGVYIKPLLVQCANAVVNSEKHPEFRNRYLSIKRRRGHKRAIIAIARMMLTAIYQILKKSEPYNSELYKNADVLPLHREVTVEQAVFILQRQGYTVSKSDTGT

SEQ ID NO: 163017 - protein, 406 aa, unidentified
MELKALYRCVAALDVHQAKLTVCVLYEDETGQAQVELREFGGFKRDRKAMAQWIASFRPQQVVMESTGNYWQSPYAALEKQGIYALVVNARHVKQVPGRKTDIADAQWLAVLSRSGLLRGGFVPKQNIRTLRLISRQMQKLTGIMSGEKNRMHKVLTDGGIRLAVVVSDIHGKSAREMVRGLLRGETPEQVLQYASGRLKATEEELLDALSGELTADHIFVVSEILDHIEDLERRIALFARQLLTGLDSYKAMIQTLQTIPGIDQMGAAMLLVELGDDMTAFGKAEKLASWAGVCPANRESAGKRVAGKKRKGNPYVRRILCEAANAASRTRCALREKFKSLLVRRGRKRAIFALAHKLLKIVFVLLSRGDYYRDATINYEKLTVERNAPRWMKMLVKYGYIPVTA

SEQ ID NO: 163018 - protein, 348 aa, unidentified
MRFYTEQHQHYCGIDLHARTLYLCILNAEGNVLLHKNLPCDRIRFLEAIEPFREDLVVASECIFNWYWLADLCAEHDIPFVLGHALYMRAIHGAKAKNDRIDAFKTVSLLRGGLLPMAYAYPPEMRSTRDLLRRRTHFVRKRAQLMAHVQNTFHQYNLPRPPGRLVYKYQREPIPDAFDDPILRKSVETDLALCDTYDELIRDLEKTVVRQARVHDPQTLLRLNTVPGIGEILSLTLLYEIHDIARFESVQRFASYARLVKCEKSSAGKRLGTSGHKIGSVHLKWAFSEAAVSVIRHLPQSKRLHDRLKRKYGKGKALSIIAHKLGRTIYFMLKRNQAFDADRFLANA

SEQ ID NO: 163019 - protein, 397 aa, unidentified
MGCAVTIRNRPCILSECGEKAQTRQRRGRSNVLEVNKPVGERDRRAEAKPVENPNSRQGREGEPELRKAGGRPGRKWVKVMGQYTELFVGIDVAKRSLEVALSSGESWAVNNNAPGVARLVKELAARAAALVVLEASGGYEREVWLALIEAGVPTARVNPRDTHHFAQAHRQLAKSDRLDARGLVLLAAQVRPQPDAAPGAADEQLKELVMRRQQLTAMVTAERNRLQQAISAASRRDIKAVIRFLERRREALDHAIEEHLSNHPRLRAISELLQSAKGVRRVVAATLIARLPELGRLTRNQIAALVGVAPYDRKSGDWDGRSHIFGGRVEVRCALYMAALSAVRWDPYLRAFYRRLRERGKEKKVALTACVRKLAVMLNAMVKNATPWSPPCPSLA

SEQ ID NO: 163020 - protein, 320 aa, unidentified
MQTPAVVLNIGVDVAKAEIVVACSEGSFPVRQVANQRPALLAFLKGLPAGSRIGVESTGSYHELFAGLAHQLGFLVFLLNPKDTHHYAKAVGLRGKTDRVDAELIARMIAHEHTKLHAWTPPTAQQRELDRLIKRRATLISLREALEMSLHELDGFGADLKALRTRFNQLIARLDLRVKALVDASPERKQNLTRLCTITGVGPVIGTALVNTLERVPLKSADTFVAFTGLDPRPDDSGQHRGKRRLSKRGPGELRRLLYLAALSGIKTKTWRPLYEHYRAKGLSSTATLVILARRIARTAWSIYTHKTEFDPGRLTKSLT

SEQ ID NO: 163021 - protein, 348 aa, unidentified
MYYVGVDLHKETSWFYIVDSQSKKYDSKNIQNKPETLKKYFEQIPKPFTLAVEATYNWYFFVDLAEQYAQKVFLANSYELKAFAKRHKKTDKIDARLIAHILQKGFLPVVAIADQETRQVRELLRYRLNLVTDRSRNIFRLKALLDKLGLNSQLDFTTYKGLKSVVIEKLPGIYTRLIKNYIERITGLAQKLTGIEKEIGTVSSLDHDMVNLMSIPGVGHFSAALIKSEIIDIARFASFNRLCAYAGLAPRVSASANKTFHGPLNTNRRKNLQWILLENVYHFIRAVPEMKERYGILKQRKGHNTAKVVLARDMLKIIYHVLKEQRPFYSDKKEFQIQSVAAPALCGV

SEQ ID NO: 163022 - protein, 470 aa, unidentified
MKERNAIGIDPDSQGFVCAYVKRSDTKVDTRGYMATDSDLKSFLKWVKGEKDVVVAIEGSNGLSKPLEKALREAEIVFYSFKPTDTDKFRKAVLGQNKNNKKDAESVARYAMALEAQGKLEKYRRVWFADMELQLLTRRHESLNQQLTAEVNRLWKLLRYASADLYLALGGKNPEVECGEKVVKSEGILNLLISTPDVGKWKSLSEKQMLEAMGGGNYKGRRALIQELRKVISSFQSVSKAMALLLSTSAHQIQRLKEEQLDIVRMLEELTAENTAVQELRQMKGIATKTAAKMIAEIIDIRRFAREDSLACYTGLGMREHSTGQTTNMVPTRLFNHRLKDAFMTAARNVVFYDPDSHIAGYYRNLVKAGMSPLAATRRVARAMVRVIYRKLSALTAGTTDVPTGDKQEEGESDMASGSTRSGQSHTSDISLSSPRNHRARSVRKVKREVTLTGRTRELGRRKIISKKIT

SEQ ID NO: 163023 - protein, 337 aa, unidentified
MEYYAGLDVSMEETHICVMDRDGVVAHETRVASTPADIDAALMEAPACQRVVFETGRMAPMLYHGLIQRGVPVVCIESRQAYQALKSLATHKTDRNDARGLAQLARTGFFKPVHVKSLAAHAIRALIIARKKLVGQRVTLENQIRGLAVAFGVRLPRALSPAFIEQALQASNGIDGLSAAMQGLIAARTAVMAAVAAIDTDIKKMTRASDACRRLMTIPGVGQLTALAFAAAVDDPERFRRSRDIGAYFGLVPRRYQSGEVDYTGSISKCGDRRVRTLLYEAANVMLTRCKGPLKLKDWAFAIARRSTIRKARIALARRLAIIMHAMLKHGTEFKLA

SEQ ID NO: 163024 - protein, 351 aa, unidentified
MLIIGCDFHARYQQIAMLDDTTGEVVERRLDHLNREAEAFYRTLPRPVRVGIEATGPIRWFQQLLAELGHELWVGHAAEIRARAVRQQKTDTRDARHILELLLSNRFPRIWVPSPEERDARQLLRHRFQLVGFRTSVKNQLHALAMGQGVCRRKKLWSTQGRVELERLTLDPWAHRRRQELLEIHDRLQATIQELDLAVKQEAQSRAAALRLMQQPGVGPVTALAFVLTIGPVERFRKSKQVVSYLGLNPSEHSSGGHQRLGSISKQGNSMMRWLLNEAAQTAARYDEDLRRDYQRLKFRRGAAVAKVAIARKLAVRLYWKLREAAQPVPPARMQGSPVCPLMDAGGPSRR

SEQ ID NO: 163025 - protein, 413 aa, unidentified
MSVPLQAVPARVCAGVDWAKDDHAIAIIDPDGQVLDRFAVTDDAAGLKSLVRRLLKAGVDEVGIERGDGPVVEALIQAELTVLVIPPAQLKNLRSRYGSAGNKDDRYDAYILADVVRTDRRRLRPLVRDSAATTALRTTVRARRDLVEHRVAAANQLRAHLQIVFPGATSIFAAIDSAISLTFLERFTTQAQADWLSPKRLGTWLSSVSYSGHTDPEILHTRLLAAPRGTTGAEAETHAVTTLAFVAILRSLNTQIEALAASIGEQLAIHPDAHIVTSLPRSGTVRAARLLAEIGDARGRFPTADSLACLAGVAPSTRQSGKVTAVTFRWGANKELRDAVCDFAGDSRHANPWAADLYAKARDRGHDHPHAVRILARAWIHIIWRAWQDNVGYDPIKHGALQALLNSTAQKAA

SEQ ID NO: 163026 - protein, 433 aa, unidentified
MPYLPIIFMNLPVQKGIPMSLKIMYKICCGIDVHKTFVVACIASTNDQGVTTYNSHRFSTYTKGLKELLQWLLESNCKDVCMESTGKYWIPLYNVLEKDCSIVLAHPKYVKAIRGKKTDKKDAKWIADLFKHDLVAGSFMPPADIRQLRDLMRYRFKLTCVMSSEKNRLQNCLTVSNIQLGNVVSDTFGKSSKRILDKILENPMDTSFDIEPLIHGSMKGKLPELELAIDGYITPSQAGKLKIIRKHLEDLESRKAELEELILALASPYQQELDIILTAPSFKSIFSSITVISEIGVNMESFPSAKHLCSWAGLTPTNNESAGKKKSVRVSKAGCYIKPLLVQCANSVVKSEKHPEIRNRYLRLRKRRGHKKAIIAIARMLLTALYNMLKNNEPYNAELYRKSDILPVDREITVEQAILMATFQGYRIKSATE

SEQ ID NO: 163027 - protein, 338 aa, unidentified
MKLYAGIDLHSNNSMVVVIDEQDRVMYEKRLGNELERILLALASFKQWLVGVVVESTYNWYWLVDGLMEAGYNVHLAHPAALVQYQGLKHSADQHDARWLGHLLRLGILHEGYIYPRESRAVRDLMRRRMQLVQTRSAQITCIQTQFARTTASSPSGDAIKRMQPEDVEALLADVNVASGVRANLEVVRTLNGEIRRLECEILDQVKLAAQFVPLLSIPGVGRILALAIMLESGAIERFAKVGNFSSYARCVDSKRLSNDKKKGEGNRKSGNKYLAWAFVEAAHFAVRYNPRIKRFYERKAAKTNKLVASKAVAHKLARAAYHVMRARMPFDEARAFS

SEQ ID NO: 163028 - protein, 332 aa, unidentified
MAHFVGLDVSVKATSVCVVDDAGSVILEQKVPTEPADIIALLTSLGVSFGRIGIEAGPLSQWLVNALTTVELPVICVETRHMKALLTAQQINKTDRNDARGIAQMMRVGLFKPVHVKTLAAQEQRMLLTSRKLLQRKLLDLELDLRGTLRNFGLKIGAVSRSRYELRICELVVDFPRLQAIAEPLLAVRRVMRQQLAVLHKMLLDTVRGDAVCRRLMTATVDQPQRFVHSRAVGAHVGLTPKRYQSGEIDYDGRVSKCGDALLRTMLYEAAQVLLTHSGKWSWLKAWGMRVAQRRGIRRAIVAVARRLAVVLHRMWVDGSEFRWRKDAAAVP

SEQ ID NO: 163029 - protein, 329 aa, unidentified
MVILGIDVSKARLDAALWLPGRRKWYASKAGNDGPGIAKLRRWACEKAGVAPGQLRVLLEATGVYHQACAEQLHDAGCVVVVANPKRVRDFAKGIGLLTKTDTVDARALARYGELGDASPWQPPAPEVRQLKALLARLSAVEEDLQREANRWEQAQIADTPAIVRDSLQRSLVQLKQEKQRLLKAIDDHYDQHPGLKADRDLLQSIPAIGPVSSNQLLCLLRSRSFDSARQAAALSGLVPIEHRSGTSVHGKPRMSKQGNPKLRAVLYMASVVALRHNHQLRAIYDRLLRAGKSKMAALGALSRHLVHIAFGVLKHQQPYNPALVSKIT

SEQ ID NO: 163030 - protein, 361 aa, unidentified
MHATTVAVDLAKSVFQIAIADDKWNVVEQQRLTRSQFERWFHNRDVGMVVMEACGSAHHWGRWFSQRGIPVKLLPAAYIRAYVKRNKTDAADACALLEAARCADIVPVQIKSLEQQALQGLHRIRSRWMATRTSRINTLRGFCREFGLVVPTGARTGIEAMSRALADPNSSVPLLIRESMKLLIEEIRLLELRIAQLEKELTSLARQSPACTELLTIPGIGLLTATAMVAATGGSVSHFKDARHFASWFGLTPKEFSSGNRRTLGRISKKGDRYLRMLLTHGARAILRAAELARRAGKPLDGLRTWATEIQARAHHNKATCALANKLARVCYAVLRDHTPYGSPQPRQEKKLTRTAFAIAA

SEQ ID NO: 163031 - protein, 499 aa, unidentified
MEADRGVPRLRVLSPNTRCLKSESRAAGRALLGNEYSDEVRNKAVKRAHYKDFAGARPASAWVEDKEDEETTRSGKEKVPEPEFVAFVGIDWADQKHVWSWQNADSRQQESGELEHRPEAVEAWVGELCRRFGHGPIAVAVEQTKGALVYMLRKYECLHLYPVPSTMSASMRAGLYPSGAKDDPRDADLLLELLVLHRDKLRRLTPDNEATRRVQNLVEERRKLVEEKTAQLNRLIGYLKVYFPQMLEWFAKLDTKLVCDFLERWPWLEELQQVRAGEVKKFFRHRRGRHGELTEWRMEGISQAMPAIQDRSVIEAKRTVVPVIAQLLRRLREGIATLDRKIGEAVEAHPDFFIFQSLPGAGAALAPRLLAAFGSQRDRYGSANEVQKYSGIAPVTERSGKRKWVHFRWACSKFLRQSFHEWAGHSIGQSAWARAYYQQQRERGKEHHAAVRGLAFKWIRIVFRCWQDGVAYDESRYLAALAKRGSHLISTYAAAAVSM

SEQ ID NO: 163032 - protein, 314 aa, unidentified
MDMFYACCAGLDVHKETVVATVRHRRDNGKVHQQTRTYGTMTAQLLELADWLEAEGVTHLAMESTGVYWKPIWNLLEDRFEILLVNAQHIKHVPGRKTDVKDSEWIAQLLQCGLLRGSFVPETPQRELRELTRQRRQMVHSKASVANRIQKVLEDANIKLGSVATDVLGVSGRDMLRALIAGEDDPHKLAELARRKLRAKIPALRLALRGRVTAHHRFLLGLLLDELTHLEGLIERLTARITEVLPSPFAKAIELLVTIPGIEVRAAENIVAEIGVDMEVFPTDGHLASWAGMCSGQRESAGKRQSGRTRKGNQ

SEQ ID NO: 163033 - protein, 387 aa, unidentified
MKKLNSKVACAGMDVHYKFSNVTFRDASGKVVSHQRLYHPDRKRLAERLSRWPRGIPVVMEASFGWGWLSDLLEEAGMDVHLSNCFKVEQMRKARGWVKTNKKDADLVSLLPFEQSDWWKVWRAPPEVRNRREQMRFRADLVESQTQAKSRIHAVFHRHGIFHEFSDLFGAKGRMFLAELCRDNPANLPSGALLALRGQVKLLDHIRRQLAGVARILHIQLAETRLTILLKTIPGIGLILAHVLAAEIGRIERFKNHKSLASYSLLAPRSNDTGKDDPSHSPKGRHLGFRGNRTLKWAFIEAAHGAVRSGGKWRDIFDRATNGGKINRGRGYIKVARELVKVVYAVWAKGVDYQQTPPVRPGCKRNRKKSRSETGQFLHPMVHALQA

SEQ ID NO: 163034 - protein, 317 aa, unidentified
MEQIYTGIDVAKDSFVVATKLAGKVTTSLHNNDKKGISSFLKSLPSQTWCIMEATGVYSLQLAIALYEKGIKVSVVNPLQIKRFAQTKLKRTKTDKVDAALIAEYGERMQPKLYEPPAPFMRKLQQQRMSRKLLVKSKRSFLNQLHALSQLEEADKAALKACKAVLISIEKQIGRLEEQMQQLAEEHCQELFTLLQTIPGISTKSAIELIVVSGGFRNFTSARQFSAFIGISPCINESGTSVRGYRGISRIGDKNIRAVLYMCAMAAKVHNKACRELYERMVKAGKAKKVALVAVMNKLIKQVFGMVRSGEVYSAEC

SEQ ID NO: 163035 - protein, 372 aa, unidentified
MNYNTVYVGMDVHKESFTLCSCKYEDEKASHYQRTPASYKNVLRYLAFLRTIYGEDTRFVCGYEAGCLGYSLYHQLENFNVECVILAPTTMHEQRSKRRIKTDKRDAEIIARSLAQHNYSPVHIPTETDNQTKEFIRMRDDHKAELKKIKQQILSFCLRQGYQYDGSGNWTAKHVKWLRSLKPAGLYKEILDEYLLTYTILTDKLNRLDQRIEELASKEEYTESVSKLTCFLGIKTHTALSVIVEVGDFQRFVSARKFAGYLGLVPGQHSSGDDRNGLGITKAGNTHVRRLLVESAQSYTRGKIGYKSRVLRSRQAGNSPQVINYADRANERLRRRYYKMVLKDGKKYNIAKTAIARELACFIWGMMTDNIY

SEQ ID NO: 163036 - protein, 320 aa, unidentified
MRNTVGLDISKLTFDASAMVGKTEHSAKFDNDSKGLDQFSDRLKSLGCQNLHICMEATGNYYEEVADYFAQYYSVYVVNPLKISKYAESRFKRTKTGKQDAKLIAQYCRSAQESELVKRQKPTDEQYRLLRMTAAYAQIKSECAAMKNRHHAAKDEEAAKAYAEIIKAMNEQLEVLKEKIKEQTEKPNCKEGVKRLETIPAIGRMTAAVLFHHLTSSKFETSNKFAAFAGLSPQQKESGTSVRGKGKLTKFGNRKLRAVLFMPAMVAYRIRAFPDFIKRLEEKKKPKKVIIAALMRKLAVIAYHVHKKGGDYDPSRYKSA

SEQ ID NO: 163037 - protein, 363 aa, unidentified
MNEITTVGVDLAKEVIAVCAADRSGKTVFTRMFRRDAFAAWAVQLPPCTFGLEACGAAHHWARWLSSHGHTPRLMAAEFVRPFRKSRAAKNDRNDAEAVLTAVRQPNMRFVAVKSIDQQARLSWHRMRQGWSEERTALINRLRGLLGEFGVWRGRSAAVLTRALPELEHDEGLSLLVRRLLAEARPHLARLDEAIARCEVEIKSHVKGNAAAQHITKIAGVGPLTAAAVLATVTDARDFKNGRQFAAWQGLVPRQDSSGSQVRLGRITKRGDCYLRGLLTQGARSALQAALDKEPLLRTRLQCWIVQLHARVGYHKTLVAIANKHARMIWAILAKGEDYDPDAWRRWSPTAPATAAASSDATP

SEQ ID NO: 163038 - protein, 373 aa, unidentified
MQRIYIGVDFHARQQTICYLTTETGELITCELKHQDKETVRAFYAAFRGHVIVGLEASGYSPWFERLLEGLGCEVWLGHATEIRRRARWRQKNDRRDAELILDLMLHNEFPRLHRPAIQSREVMRMLRFRQKLIKIRTMSKNSLQALALQAGVAKRSGLFTRQGKQELAAALMSPAMQWQQEHWLQLLQPLDQQVLEAMVWLKAQSKDDVCIARLRTHPGIGLLTSLCLVHTLQPITRFRNTRKVAAYAGFDPVERSSAEHKRFLGISKAGSRLLRHLMVEAANVAVRKDEDLKRFYQRLADRRGRPKAKVAVARKLLIRAYIMLRDEIDYAEFRRRAVAARLARLGHRPNVPAVVIGQPASTEHQKATPGRE

SEQ ID NO: 163039 - protein, 465 aa, unidentified
MKPNRRPQRKQPSAGPSLLERINPNAAGIDCGSDTHYVAVAPDRDPTPVRAFRAFTADLHRLADWLTASGVTSVAMESTGVYWIPLYEILEARGIDVVLVNARHVKNVPGRKTDIVDCQWLQELHSVGLLRGSFRPAAAIAALRAYLRHRETLVQSAATHVQRMQKALVQMNLQLPIVISDITGVTGLRILRDIIAGQTDPHALAQHRDHRCQASEAEITAALTGHYRPEPVFVLQQNLALFEAYHGQLAACDVAIEAHVLTLAAQAPAPGGPMPPPRTRKKPRNNEPRFDIRTPLHHLTGVDLTQIDAIGPYSALRLLGEIGTDMTRWPTEKHFTSWLTLAPHNKISGGRLLSSKTQPSANRAATILRLAAMNLGRTDTALGAFYRRLAYRVGKAKAITATARKLAILVYRTLKDGLVYQDPGAAAYDAQHRVRVLRRLRQRAANLGFSLLNRETGELLEGAVS

SEQ ID NO: 163040 - protein, 358 aa, unidentified
MDKIKNSKLDCTGQPVYVGLDVHKKSWSVSVFSRYGEFKTFTQPPQPDKLVDYLKRNFPGGEYHSVYEAGYCGFWIHDQLKERGINCTVVNPADVPTKQKEEQHKRDRVDCRKLARGLCNGAMEGIYVPSRQMREDRSLVRTRQAFVKKRTRCKNQIKGMLLFYGIHLSEEQILAPWSGALIKWIESIRMERDSGNIALKAHLEELAYLRHLTARVNRSILNLARSAEYAIPVKILKSVPGISTLTAMILLTELCDMARFASLDSLCSYVGLIPSIKSSGETEYVRGITPRRNAHVRWILIQAAWVAVRKDPALMMTFAQYCKRMRKNRAIVKIARKLLNRIRYVLKHQTPYVPCITE

SEQ ID NO: 163041 - protein, 318 aa, unidentified
MSQSSTLYVGMDVHKETIAVASVAKDHDAEVVSLGTFGTRQCDIDNLMRKLQSKAKHLVFVYEAGPCGYWLYRYLTKKDYVCWVVAPTLIPKRAGDRVKTDRRDAMQLARLMRSGDLTPVSVPAVDDAAIRDLSRAREDTLRDLKAATLRLKAFLLRHDIRSTGRANWSPAHLRWLSEVICPTPAQQMVFQEYVQTVTEQTERLGRLALELYEQVQTWRFHPVVEALQAFGGVQFTVAVTTVAELGDLTRFDNPRQLMNYLGLTPSEYSSGARRQQGSISKTGNTPARRALVEGAWAYRYPAKGSRHLPRMRHAPDGC

SEQ ID NO: 163042 - protein, 452 aa, unidentified
MTLPVRHGVCDRLVRCRATERYPLGRRARLELDGIAVKRHEEVVTLSITCGIDWAEAHHDVALIDEHGVVVARSRIDTGAAGFSALLALIAEHGGGVDDTPVAVETDKNLIVVALVEAGFTVYPINPRGVARYRERYGQAGAKSDPGDATVLAHVLRTDRHMHRRLPANTSQASAIKVLARQHQEAIWALHQTVSRLRSVLLEFYPQALQAFPNLQHHAATTVLAAVPTPAAAGKLTRTRVATLLRRSGRGNQAALAERILTELRVPSLRQPSCVEEAYGHTVQGLVGAVEAMRTAADALEKALACEFDQHPQSDLLRSVPGLGPVLAARVLAEIGDDPARFDNPQSLRAYAGTAPVTIASGRSRYVKARKVRNKRLADACHWWAFTTLTKSGGARAHYDRRRAAGDHHNAALRNLANKLIGRLWWCLANNQPWDEDDAWPNIARTEKATAA

SEQ ID NO: 163043 - protein, 421 aa, unidentified
MQTEPEFTAFIGVDWADQKHVWCLQAGGSTQRETGELEHTPEAVESWVAHSYQRLGQRPIAVAVEQSRGALVFMLSKYELLHLFPVPSQMASSMRQALYPSGAKDDPRDADLLLDILLKHRNNLRRLSPDSEASRRVQNLVEERCKLVDEKTAQINRLTDHLKVYFPQVLDWFGRLDSDVVCALLERWPSLEELQKAQPANLPAFLRKHRCRDQERIEGRMEAIRQGIPAIHDRAVIEAKSAAVRVIVRVVRVLGEGIEELDGQIEEAAAAHPDFFIFNSLPGAGPVMAPRLLAAFGSQRERYRSADELQSFSGIAPLTETSGKRKWVHFRWACPKFLRQSFHEWAGHSIVQSGWARAYYQQQRSKGNSHHEAVRSLAFKWIRIVFRCWQDRVAYDENTYLAALVKHGSPLATIVATGKTM

SEQ ID NO: 163044 - protein, 440 aa, unidentified
MKKRRDRVCGADVHKDLIVATITGDDVLPIQENFGTTRAELERFRNWLVANKCEQVAFEATGVYWIPIHDALSQTIDTIVANPLQIKTIPNDKSDSKDSKRIATLCLNGQIKRSRVFAEEDRDLRMMTRARSGYVKTRTQFRNRIHKYLSSSGIKLSSTMDDIFCKSGRYLLNGLADEKPIEEILKGIPSGKIRKKQDLIRAALENRLNETNRMLVRDALELLDNLESKIENLSHEVLKKVQQKSKDLAIVMSIPGIGFISASVILSEIGNYHDFQTPEQLAKWCGLNPGENESAGKKKKCGITKRGSKHIRLVLVQAAQTIANMGKTKLSRFFQRLIKKKERNVAIIAVARKLICLVYHLLINQELYQEDECKKTRKQSQDKSCQAPSFQEEHLTDKVAAIVDAFYHLNARGRKNALMREIADISEIKVGQKRPSKGGG

SEQ ID NO: 163045 - protein, 403 aa, unidentified
MNAVGIDVSKGKSTVAVLRPFGEIVVPPFDVFHNPNELRELVTLLKSLDGETKVVMEYTGNYYLPIAQFLQNNGLFVSVINAILVHDYGNKSLRKAKTDKKDALKLASFALDRWLDLPVFSLPSNTRKILKSYNRQYCQSNKLKVMIRNNLISLLDQTFPGVNSLFSSPARKNDGHEKWLDFALKYPHSECVSKKSLPTFSKSYLSWCRKNGYYFSEGKAKEIYDFTCNSTPTLPLNESVSLLISSAISQLNCVSETLANLATEMNRLASSLPEYDVVMSLFGVGTILGPQLIAEIGDVSRFHNKHALVAFAGIDAPPFQSGSFNAKSRAISKRGSSPLRKTLFQVMTAILQNSPADNAVFQFLDKKRSEGKHFYVYMTAAANKFLRIYYARVTEHLNSSKSA

SEQ ID NO: 163046 - protein, 379 aa, unidentified
MMTSPATSTGEQVLYCTLELSKNSWLLAIQFPGRDNPSLHPIMGGDADRLMAKLDAARERLGKFSGRVPKVILCYEAGYDGFWLARFLEQRGIECLIMEPASLQVNRKARRVKTDRIDVEKLLHALIAWCRGERHVCSMVGIPSVEEEDLRRSHRERDRLVRERTAHINRIKGLLFGQGIRGINVKRHYKTLVPADLVTRDGRPLPERLAREIAREIERLALLQVQLREIERERDLAPTPCLATERKRHQLLRLNGIGVVSASVLAREVYYRQFANRRQVASYFGMTPSAYDSGESRRSQGISKAGNKLARTVMIQTAWLWLRHQPESDLSKWFHRRTEGQSKRIRCVMIVALARKLAIALWRYLETGLVPKGAVLVVE

SEQ ID NO: 163047 - protein, 340 aa, unidentified
MSLVMGLDQHRAQISAEWIETVTGELSRARVAPADRAAVRRFLAQFKGQALEVALEASTGWRFVVEELGRVGAEVHLAEPAEAAALKGKKKRPKTDWADARHLRELLLIGRVPESWIPPAHILDLRARVRTRHLLSHQKTEWQQRMHAVLYHHGFPQRRNVLSVANREWLAGLALPAAAREQLSIALHVVDALDQRLIPFDRELRAFARSQAGCRALIAQLYGVGELTGVTILAELSDARRFGNSRNVVRYCGLDITVYQSDAHRAPGHLSRQGPPALRWALYEAAQRARFPASPDRAYYLQLAERIGGNRACLALARKLLKRSYHILKALGDQALAPIA

SEQ ID NO: 163048 - protein, 384 aa, unidentified
MRAVCGLDVHKDSVYLCILTGEGELIEKVFGVLTFQLQQMRDLLLAHNVDEVSMESTSVYWIPIWRVLAPHFHMRLVNPYFIRQLPGHKSDVADAQWIAECTLKNLVSGSFVPPEDIQQLRQYDRRIFDLDEEIVRKLSKLDAVMQRCNFRLSNYVSNVDCKSYKDVVRKISEGVTDPESLIGEIHGRIIKHHGRETIPASLAGVISQAEIDVLRQLREELALAEVHKRECLERMLEICQEKYPDELRRLQTIPGVKERTATSLIAEIGTDMSKFETANHLSAWSGMRPRNDESNKKFKSRRITHGNIYLRKNIIQCAWAASRTKGCFFSRFSYHQTQVRKKNKMKVIVAVARKLLVAAWHVIHDKTDYADFQKQDRQAPASNG

SEQ ID NO: 163049 - protein, 418 aa, unidentified
MAMKIVRFNCCGMDVHKNLVVATIGITDRKTNVTEYFQRSFSTLNSDLYRLKDWLRSHHCSDVCMESTGKYWIPIFNVLEDEINVHLTHPKYVKAIKGKKTDKKDSKWICDLFKHDLIKFSFIPPKEIRELREIARYRYKLVCMRSSERNRYQNCMTVSNVGLASVVSDPFGKTASNIMKEVMKSNVIDDDKILKLVHKNCKNKDKILDSLHGYRIESDQRFKMEKSLDHMEYLDQLIDSCEVELIKRAYPFRRSFQHITQIKGISALSAILIISEIGIDMSQFGSDKQLVSWAGLSPANNESAGKKKSVRISKAGQYLKPLLVQCALSAIKDKTSYFGRKYSNIKKRRGHKKAIIAIARMMLVSIYHMILTGEEFQPCDYESFMDPKPNANPSLTVEKALNFLKQSGIDISSIPINL

SEQ ID NO: 163050 - protein, 409 aa, unidentified
MIIIGIDWARSKHDLVLMDPEGQVVARLQVTHNAEGLAQVAAAIAEHESEPWEVRIAVEMHDGALLAWLLEQGYTVFGINPKSAQRARDRYRPAGGKDDASDAFILADMLRTDRGSLRPVQPSSDATIALRKLVDLRTSHVHDRTALFHRLRTRLDEWCPQLSQLCGDFNRIWQRRLLKRFPLQQDLNAAHGQTLNAFIRQHRIGPDTAERIKATRQAMPMPIPAAIAPSLRLEIQHLLAQIELLTQDIAELDKQVRNELDQHPDAQVFQSLPVKGTNTIATLLAGLGEDREHAPGYRQLAAAWGVAPVTIASGRYCSVRRRHAADQTLAQALMHFAFNTAFTAGCWAEDFYRRKRDEGKAHYTALRCLAQRWLKILYRIWKDRVPYDEQYHRNNQQKHAQPTPQPANC

SEQ ID NO: 163051 - protein, 412 aa, unidentified
MDVIVQRPAALDVHKEQVTACVRSAAPDGARAQEVREFKTTVGGLLVLHDWLTAHGVTHVAMEATGVYWKPVWAILEDDFECILVNARHVKNVPGRKTDVKDAEWLCQLLEAGLLRASFVPPKPIRQLRNFTRYRKAQIKERQREANRLHKALEDTGIKLDCVASDILGKSGRAMLDALCQGTTDPEVLANLAKGRLRAKLPALKEALEGRFEPLHALLISSILAHLDFLDEQVERLSDAIEEQLRPFQSAVELLRSMGGIETRTAQNILAEIGTDMSVFPTAGHCASWAGQCSGNDQSAGKRRSGRTRKGSKWLDDALKDAAMGAIRTNDSYLQAQYQRLRPRIGHGRALGAVKHSIICACWHMLSTGELYRDLGGDYFRKRDPERQTRRLVAQLERLGHKVSLEALPEAA

SEQ ID NO: 163052 - protein, 339 aa, unidentified
MGREEIGGCVPEDRDAEPVRPFGTLTPDLYALADWLATCRMATVAMESTGVSWIPVDEILEARGFQVHLVHARPLKQVPGRQTDVKDGQWIQYLQTCGLLRGALRPEAAMCALRAHWRHRAPWLDDRAAHIQPMQTAWQQMHVPLPQVRTAITGPTGLASIRALVAGERDPVHLAPCRDPRGAHSTAAIAQALTGHDRAEPVLALPHALALDDVYTALVRECEVAIERPFQAIMPVWDDDLPPLNRQPKASSPSKHAPAYEARGRLYQLTGVDWVAIPGLHASTGQTLVAEIGLDLGKWPHEQAFCAWLGLAPRHEISGGHVWCRSTLQTRHRAGQAVR

SEQ ID NO: 163053 - protein, 408 aa, unidentified
MNAVGIDVSKGKSMVAALRPMGEVALLPQEFLHTEVGLEQMAYAIIALGENTRVIMEATGRYHEPVAAALHEYGIYVCVLNPLFIKQSGGGSIRKVKTDKADAMKIAKYGLDNWVDLREYTPMDTVRQQLKLCSRQYNLYMKTVVSLQNNLISLTDKTFPSVNELFSSPERADGHQKWVDFVMTFYHCDCICRVSENAFAERYQKWCKRKGYHFSAEKALDVYAGSCGHITTLPKNDNTKLLIATAAQQLLSGKMTLAALRAEMTRLAKQLPEYDTVRAMYGVGETTATQLMAEIGDVRRFPRRSSIVGFAGVDPAVDQSGKHSAKSVPTTKRGSPHLRKTLYQIICTYLRKAPADEPVYQFLDKKRAEGKPYFVYMTAAQNKFLRIYYARVKECLEAFDAQQDTSQR

SEQ ID NO: 163054 - protein, 322 aa, unidentified
MESVGFIGLDVHAETIAVAVAEPGGEVRSLGTIPNRPEPVARLIRKLGKPEQLRVCYEAGPTGYVLYWQLSELGVKCEVIAPTLVPVKAGDRVKTDRRDAEKLARCYRAGDLTPVWVPDAAHEALRDLVRARLAAKRDQLRARNRLSKFLLRHGRRAPEGTTAWSTKHLAWVKRQGFEQAAQQATLVDYLHEVEHAADRIVRLERSIDTAIETLPQKLHAVIDALQSLRGIAKISAVSIMAEVGEPSRFESARQLMGYSGAVSREHSNGEPAHAQAGGLRLTANIRELLGRGTKSQRLGWHTAKENPRALLCDRPSWPDPRL

SEQ ID NO: 163055 - protein, 387 aa, unidentified
MYFIGIDISKFKHDCAIIDEAGDTVTASWSFANNCEGFSLLKQLLDALDGQKKIGFESTGHYGHNLKLFLETNNFSFMEFNPLLVSKFVRSKSLRNTKTDSLDAVSIAQYLMTVEYKPYPPSFYHMDQLKSLTRFRDSLVRQHSRQLVELTNILDKVFPEFKPFFDGRFSATALYILTHYQSPEKIANMNAKSYEALRKKSRGKFSMVKFAQLKTLAKNTVGRSDAFLLKQMEITIDIENQLDAKIDEIESQILECIRALNPPILTIPGIGELTAAIILSEYGNINKFENPAQLLSFAGLEPGYYQSGLAEHQGHMVKHGSSHLRYALMNACLPLITYEPVFAEYYAKKRAEGKSHRVALTHVAKKLLRVIFTLQTKNISYDPTLIR

SEQ ID NO: 163056 - protein, 344 aa, unidentified
MQPMYYIGLDVHKRKISYCVKDSSGQLHSEGSLPATRFDLDRWMKKLPQPWSAAMEATMFTGWIYDHLKPHAAALKVAHPLMLRAIAAAKKKNDRIDANKICDCLRCDFLPECYMASTAIRERRRTLCYRNLLVRQMVQMKIKISRLLMEAGVSYNKQRLHKAGYFRELLATNPHIDEGLRLLLRQCREMVVRLAKTESALIRSLRNEGLLAERVERLMSIPAIGPITALTWALEIGEVQRFSSIKKAVSYCGLCGAQQSSADHVQRTPLSKQRNKHLQTTLIEAAKMAPRNSPELAMIYDKEKQKGNANRATLAVARKLVAYLMAVDRGQRNFQVVEKNCIAA

SEQ ID NO: 163057 - protein, 349 aa, unidentified
MLADELDYVVGVDTHLDEHVLAVVVAPAGAVVAQRSVQTSARGYAAAVRFAEEHANGARVWAIEGAGHYGAGLARHLSSRGETVLEVGRGPRDERRLRGKDDPLDATRAARAALSSETPARPRSGQHREALRLLLIARRSAVDVRREALVQLRSVIVTAPDRLRDELRRLPVQRLLDRCSRLRRSTRATPDELAVRLVLRTLARRIEAATVEADELEHEILAHVRALAPQLLDEAGVGPIVAAQLLVAWSHPGRVRSEAAFARLAGVAPLPASSGQTTRHRLSRGGDRQLNRALHTVVLHRRQHDPATKAYIARRVAEGKSRRDATRLLKRYLARHVYRILDQRTQLIA

SEQ ID NO: 163058 - protein, 393 aa, unidentified
MKQRKNAGSEPTIDTESSSSIFISGLPACLNLDPDSRLTSIVKVIRLSSSPFFTKNFKGKSMENFYFIGVDVSKKKLDFCVMFEGKVVHEEETANHQGAIITLLHQLEEKYGIAGGQMLVCAEHTGQYTFPLACACKAVECKLWLENPAEIKYSSGVQRGKNDKVDAKRIAIYAKRFQDRVQYYERPTEDIERLKQLEAERTLYVTDLAKYKGQIKDQKDYMPRKLYERKMKRLQALMDDLEEAIQAITDEMDEVIASCPVLSRQRELLMSIDGVGCVVATNMIITTEAFTRFDDPRKFNCYAGVAPFSYSSGSSQHSKARVSHRADKVMKRLLHLAAVAVTHRVGGELKKYYERKVAEGKNKMSVINALRAKIVARMFAVIKRNEKYKPILS

SEQ ID NO: 163059 - protein, 355 aa, unidentified
MTVTIVGEARPVTCRAAITGGVDTHADTHVAAALDPVGGLLGVAEFPATAAGYAGLLGWLGTFGTVALAGIEGTGSYGAGLARYVTAAGIRVVEVDRSDRQDRRRQGKSDPLDAVSAARAAQSGRARGAPKGRDGAVEAIRTLMVARRSAAGERTRTINQARALVLTGPDDLRARFTRHRPAALVTGLASLRPRPGDVAGHATRIALRELGRRAQFLDGQLQRLDELIVPLVTARAPGLLAVYGAGPRTAALLLIAAGDHPERLRSEAAWAHLCGAAPIPASSGKVTRHRLNPGGDRQANHALWRIVFTRLGSDPATRAYAERRTAEGKSKAEIIRCLKRYVAREVYRHLRPAAG

SEQ ID NO: 163060 - protein, 478 aa, unidentified
MSKGTCKKEKTEKAGSAKTKVPKPSVVHMQVVRPNAAGIDIGDTIHAVGVPPDRDKEPVRQFGTFTCDLEAIVKWLKECAVTSVAMESTGVYWKPLYGLLIMNGFEVCLVNARHTKNVSGRKTDMSDAAWIQQLHSCGLLQSSFLPDDQTETLRTLVRQRKAWIQDSNRCIQRIQKQFELMNIKIHTVIRDVMGKTGKAIIEAIINGERVAKNFLPLVDGRIQASEEEIEKSLEGNWRSECLFIVKQCYRQYQELQAHISECENEIELILVQMAGAKNEAAPEREQAKGGSKSKDKAGKTAKQKSKNAPKYNVRKYLEQIYEVDVLEIFGISETTALEILSETGTDLSRWPTANHFVSWLNLCPNNKITGGKLVSSKIMKKLPNNAAQAFRAAANGVRRSDNWLGDYFKRMRAKGGHKFAITATARKLALIFYNMVKNKEAFKAVDVEAYKEKQRQSKIQYLEKRLAQLRDASQTVAA

SEQ ID NO: 163061 - protein, 409 aa, unidentified
MERVIERGAALDVHKKSVTACVRVPRADGGRRQEVQTFGTTAAALLALRDWLSAHGVTHVAMESTGVYWKPVYYVLEEMFTCLLVNAAHVSKVPGRKTDVRDCEWLAQLLEHGLLRGSFVPPVPIRELRDFTRYRQVLVQDRTREANRLHKVLTDAGIQLASVATNVLGKSGRAMLAALVEGTTDPAVLADLAQGKLRRKLPALREALAGRFRTHHALLVSQLLAHLDYLDEALDILTTQIEEALAPFAREAARLDAIPGVGPRTAEILIAELGVDMRQFPTARHVASWAGLCPGTHESAGKHRAVRTRKGNRWLRAALIEAALAAINVRDSALAARYRRLVRHCGHKKAIVAVAHKMLTTAYVLLADGRTYQEPGAGYYDAQRKDRSVRRALQTLERCGYRVSLEPAA

SEQ ID NO: 163062 - protein, 315 aa, unidentified
MTTNRKDYVGIDVSKATLDLAILEDKNLKQYTNTSKGIRSLVEEMCELDPALIVVEATGGYERAVVMSLYEAGLPVSRVVANRVRQYARAKGVLAKTDPLDAMILADYGKHIQPRKFVAKSEQGQRLTALLVRRRQLIELRKAEKSRLRLATPETGASITRMLELIVAEIKQMNKKIWDLIDSDPEWREQARLLRSAKAVGPVTAATLLAELPELGKLDRKQIAALVGLAPINRDSGRKRGKRKTGKGREPVRGALYMAALTGTKYNPVIRKQYNHLLSKGKEKKVALVACMRKLLTILNAMVRDQEPFRYAVMS

SEQ ID NO: 163063 - protein, 319 aa, unidentified
MTQDDLAVVGIDVAKDKVDVCIRALALWRTCPNTAQGRRQLVAWLRKHQVGKAVMEASGGYEREWRKVLHDAGIEVRIVDPKRVRSFAQSAGRLAKNDAIDAQMIAWFAETFSETPSQAHDAAQEELAALVKARLALVELKIRLQSQSAHAAPGPVQKAQARVLKSLAAEIKKLELAIAAKVKATPHLAERAEIIESVPGFAETTSAILVAGMPELGQVSDKIAAALVGIAPYDDDSGKRRGERHIKGGRRWVRNAIYMPCLGAATQNNPATKAFYRRLIAKGKQPKVALVACMRKLICILNVMIARRQKWDAARYTSA

SEQ ID NO: 163064 - protein, 392 aa, unidentified
MFYLGIDIAKVNHVASLINEDGSILIKAIKFTNSNEGLQKLIDSISEYDQSQIYCAMEATGTYWLSLFSALTDKGFNVSVFNPYQIKSFRGAYTNRKQKNDVIDSILIANFLNFNGTKQTSLPNDDLLALKNLTRYRSNLVSNISKAKTQVTGILDKVFPEYSDLFSDIFGEASKQILLNCPTPNEVINFNTRKLANILKKASRGYHSTDKVREVKSLAKNSFGIKFTGDACSFEIKQLVNQIIFLENQAHELEVKIKEIYSKLDNHLQSIPGIGEVTAPIILAEIGDINNFSSPSKLTAFAGIDPSENQSGNKKSTDEKTSKRGSPYLRHAIYLAAMVASNNDPVMHDYYIKKRAEGKHHYVALTGVERKLLGIIFHVLKENRDYRPPKSS

SEQ ID NO: 163065 - protein, 403 aa, unidentified
MNSVGIDISKGRSTIAVMRPFGEVVISPFEVRHTGSELSKLARQLKSLDGETRVVMEATGNYHASVAKLLHDAGLYVSVVNAKLVHDYGNNELRRVKTDRKDAVKLANYGLDRWLTLPRYIPEEDTRLLLKNCYRQYRQYSKVQTVLKNNLISLLDTVFPNVNRLFSSPIRGDGSEKWVDFVAEFWHCRCVSEKSERAFTSKYLRWCRKHGYNFREAKAHTIYAEASGHIGVMPKSETTKLLVEQAVAQLGATSTALAALKHEMQSLASQLPEYPVVMDLFGVGPTLGPQLIAEIGDVRRFYSKKALVAYAGLDAPPNDSGDVTGRHKSMSKIGASSLRRTLFLVMSVYLQTAPLDEPVYQFMDRKRAEGKPYRVYMMASANKFLRIYYATVKAYLESLEHTA

SEQ ID NO: 163066 - protein, 398 aa, unidentified
MTESSDYESVQVFIGVDVGKDTHHAVAINRSGKRLFDKALPNDENKLRSLISDLKQHGQMLLVVDQPATIGALPVAVARSEGVLVGYLPGLAMRRIADLHAGEAKTDARDAAIIAEAARTLPHALRTLKLADEQIAELSMLCGFDDDLAAQTTQASNRIRGLLTQIHPALERVLGPRLDHPAVLDLLQRYPSPEKLASLGEKKLAAQLCKLAPRLGKRLAADIAQALAEQTVVVPGTNAAAVVLPRLALQLITLRKQRDEVALEVEQRVLAHPLYPVLTSMPGVGVRTAARLLTEVACRAFASAAHLAAYAGLAPVTRRSGSSIRGEHPSRRGNKALKRALFLSAFAALRDPISRAYYTRKMSQGKRHNQALIALARRRCDVLFAMMRDGTFYTPQAS

SEQ ID NO: 163067 - protein, 349 aa, unidentified
MNRTTYGLDIAKNVMQLHWVDGETGEIGRKKLGRAKLSEFFAQRQPARVAMEACGSAHHWARELGGLGHQVELLPARQVRAFVRGNKDDAADARAIWLAAQHSDIRRAPVKTVEQQAAMSLHRARSHWVSVRTATVNMLRGLLYEFGVVLPGGKMAGLKTIGAKRAEIDDKLPPLMRGLVDLELEALKGVELSIDQLEAEIAGQQRQLDKARTLREVPGIGVLGATALAATLGDASGWRSGREFAASLGLVPAHTGTGGKTRIGHLTKRGDPYLRTVLIHGARAVITQAKVKPAWLEELLRRRPLNVAAVALANKMARTAWALVAHGRAYRPEWKSTPPSGCGARAQAA

SEQ ID NO: 163068 - protein, 342 aa, unidentified
MLRANVRQQSATVKDAVRYDHFVAIDWSLKTMAIAHASRRDQIPRVFERPTDLKELKTYLGTLRGRTIITFEESGPAHWLYLELLDHADRILICDPFQNRLLFHGAKTDKIDARKLCELLCARLLKEVYHSDSALYELRLLASAYDDVVRSGVRLLNQKAALTLGHRDEGKSAAFIDVILKENIELYRRSKEQYERRFHDLAKHNKLVRWQREIDGIGTIGAVKIVACVVDAHRFPSSGKYLSYCGLVKHEKLSGGRSYGRRKPRYSRVLKSVYKTAALAVLKGHNPISSYYDVLLAQGVAEHNARHAVARYIARISYGMLKNGTRYDPDIIARRDTNGKSV

SEQ ID NO: 163069 - protein, 330 aa, unidentified
MKFKNIIGIDTGKNSFDFSFLENGEKKLHGQVENSTKKITAFLLSQKIDFKETLFCMEHTGIYNYHLLDVLQNHGANIWLENPIQIKRSMGLTRGKNDKIDALRISKYAYLHQEKVKLWQPTRLVIENLKLLMGQRSRLNKAKKLLEIPITESKEFITKVQHKILKQNCKSTLAGIKKDLNLVTTQIKEIIETDDTLKELFSYVSSVPNVGLITATAIIVSTNEFKKIETARKFACHAGVAPFEYTSGSSVRGKTRISHMADKELKTVLHLATLSAVSRPGELRDYFVRKVKEGKNKMLVINAIRNKLIHRVFACVRDQRKYIKRDLTIA

SEQ ID NO: 163070 - protein, 394 aa, unidentified
MILVGIDIGKNKHTFSIIDKGTGEILSSPAVFDNNQTGFLYLIKKLSSYAKSELLIGMEDTGHYHFALLKYLLDNRYTVALINPTTTDLTRKIQGGITKNDTLDSITICDVISSNHRKKPYRITKVNRFDLYEQKQLTRHHHNLKEELNIYKNRLQKCIDIVFPEFNSLFNSKYGIVYMSVLKTFSSANAIANADIRSVRKCFEFKGQGVRISLSAEQLKTTAKFSVGIPSAAEEIQIRHLVCQIELLEKQLSEIDKRIAEFSIKNNSAILSIPGISHFSGTSILAELGDICNYQKSSQIIKFAGVAPYHYESSQFTAQHTAITKKGSRYLRKTLYQIILPVINNNEVFRTYYNKKLAEGKGHRCAQGHCVRKLLRVIYHLLTTEQQFSSELLV

SEQ ID NO: 163071 - protein, 422 aa, unidentified
MDVIRERVAGLDVHKKTVVACVRVTRGSKVGRECRSFATMTADLVELLKWLTVSGCTHVAMEATGVYWKPVWNILSDGPFELMVANAAHIKNVPGRKSDLNDAMWIADLLACGLIKASFVPEEDLQELRTLMRTRKQLIREQTSHVQRLQKTLEEANIKLDAVISDLMGVSGRRMLEAMIQGVRDPRKLASLADRRLKAKPKELYDALHGRLRDHHRFLLRLHLAQWDALDAAVREIDQEADARITQLDAEAGPDQAPFRDAITNLSMTPGIGPVAATAIIAEIGLDMSRFASAANLISWAGWCPDQNESAGKRKKTRLRKGAPWLKTILVQCAWAAKNRNGSYYKAQFLRLQARRGPQKAVCAVAASLLTAIYHMLKNRTAHRDLGAGHFDRRPTEAKAKRLLAQLANLGYQVQIQPAAAT

SEQ ID NO: 163072 - protein, 409 aa, unidentified
MNDQSNPVERVIGLDAHPDSFTAATLRGSTPAQAWTEKLFNKVPLAQLQSWARKHTTPNDLIVLEASGNSFHLVRVLRALGRRALVLESTQLGKLKEAHANNDKISAVRIAKAYLAGTAREVWVPDPKTQERRDWFHAHQKAVRRSTQVRNRLLSYLSDHGVRLKKGTRLVLEPELADAQLRQRADWSPRQWQVIQGMLMELRHAEEQRWHWRSLIAQEVAADPALLALIRLYGVRELIAFALGAIIGDIQRFAEPRKLVKYVGLNPAFDDSGQGKWEGGIGGHGRKDLRSLLTEAAQSILRSGSPLAHWGKKLWGRKGSRNLAVAAIARKLTVAVWYLMNGRWTPLREIDQRLSQKVSLMITHVGAAALQNLGATRKEFRERVCQSLQTARDYVLDPHRKFTPKPQRA

SEQ ID NO: 163073 - protein, 329 aa, unidentified
MVTASLLPVVGLDVSKATLAVCYQVNEQVKHLEVSNSKAGFQQLVKACGVHCRFVMEATGTYNLALAYYLHEQGGEVAVLNPLVIKRFIQMHLSKGKSDRKDAQWLLRYGQQQPVKIWQPDETVLVECRQLEQVTEQLLKQKVMISNSLEALQQQPIISKLALKRLQQMLKTLTQQVERVEAELLTLLAQRFAAEMQLLCSIPGIGRKTAGMLLLFAGGFTHLDNYRQLIAMAGLSPREHTSGTSIRGKARITKMGGALIRGKLFMCSFSAKKTNAACAALFDRLVAKGKNKKLALIAVCNKLLKQAFAIVKSGVPYQADFSSELALNP

SEQ ID NO: 163074 - protein, 342 aa, unidentified
MLIIGCDYHPSIQQIAWVDTETGECGERRLTHSGGEAEQFYRELKKKGISVRVGMEATGHSRWFERLLAELNYELWMGDPAQIRAKRVRKQKNDRRDAEHLLKRMLENNSPRIWVPTPENRDVRQLVLHRHRLVGMRTRVMNQLQAIAMNEGVRRKRGLWTGKGRAQLEALRLPPWTTRRRQELLELLDRIDPSIDQLSQAIEEEAARVPEVQRLQTHPGVGPITALAFVLVLGTPARFGCGKQVASYLGLIPCEDSSADSWRLGHISKQGNALLRFLLGQAAQSVARSEEQWRHQYAHLALRRNHAIAKVAMARKLAVRLFWMWRQGWDYQQLKKFGSHAG

SEQ ID NO: 163075 - protein, 383 aa, unidentified
MKKTQETLRIKDSIKEAVLYIAFELSNSKWKLAFSDGSKIRYKTITAGNLDQLQVEIDLAKRKFQMIEDVRVLSCYEAGRDGFWIHRYLESQGIENLVVDSASLEVNRRKRRAKTDRIDVRKLLRMLLRYWGGEKQVWSVVRVPSETDEDARHLHRGLEDLNKERTMHRNRIKGFLVLHGIKVSNPSHKRFLEQLEKLRTWDGRQVPPDLKSTIIREYERLQMVEEQIRALEREKTERLKNPDTDSLQKVVKLASLYGIGSVSSWTFVMEFFGWRQFQNRKEVGALAGLTPTPYDSGKSLREQGISKAGNQRIRGLAVEIAWSWLRFQPQSNLSQWFMKRYANGGKRMRRIGIVAVARRLLIDLWRYLEYDKIPEGARLKSAT

SEQ ID NO: 163076 - protein, 375 aa, unidentified
MDSFVGIDVSQEYLDVAVLGQKRVLRVGNDEAGLESLKRHLLAAGRELVVMEASGGYERRPAAVLLTAGLPVAVVNPRQVRDFARSLGQLAKTDAIDARVLARFAEVVKPQPARRSEEAEEQLRELDQRRRQLVEMVVAERNRLRSAGREADRIEEHLCWLGEEVKRIEKELEGLIKSDPKLDAKAAILQSVPGVGRVVSVTLLSGLPELGLLNRKEIASLAGVAPLNWDSGKLRGKRAIWGGRAHVRCVLYMAALVASRCHPRSVRTTLRRRQAKESRARSGHAKAAHHPQLDAPQPHTMDRRYTMNSRQLLSAPTPARRQKHISAKEPWAGQTYASGQRRASCKRMRHRIKRTMSNPSARVVLSAATRNLASP

SEQ ID NO: 163077 - protein, 523 aa, unidentified
MATKFKSKPSRSQRYLTIVKPSGSLHPRVQKVGPEHFGIVAVDCAKARSKWMLADFYGNVIIPPTVVEHNKQGFDAAVAAIRGAMASHGLGDVLVAIERTGIYHLPVKRTFISHKFEVRIVHPLTTKQYRLPADPGTKTDDTDLLAIHRATTNGFGLIELPLDEIHGPLRLLARYRRTLVRNNAGLRNQIIALLDVVLPGYTGLFEDVFDNQAALSIARSVTSASKIRSLGSEGLAEILSELQVRYQQRTLKKILHWADGVENTTEYSEMYHNILVHKDNERCARLQQIATLEQELAGLLARSAYVVLLSIPGVSIVTAAEFAGEMGPITNYASDQAITGRAGIYPSRYQSDQVDRCDGPLVRCANRKLRGVILMIAENLLTCNRFFQGLREQWKTAGLKEQAMGVRAAKRFCRIAYQMVAGGQVFRHPCCQQRDAILRKLSLFHAEHGSALAQVLVDLQAAADHIPKSEHAREAKSLYEELQPSPRRERCGPRRLGEILPVVLAKLGVNAVDLSVKGENDLT

SEQ ID NO: 163078 - protein, 410 aa, unidentified
MELVHKKCAGLDVHKDVIVACARIVEERGVRRELKRFGTTTTELLALADWLQKLGVTAVLMEATGIYWRPVWNVLEGMFELTLANAAHVKNIPGRKSDVKDAEWLAELLAHGLVRGSFVPPRDIQEMRELTRTRKQLVGEITQHCQRLQKVLETGNVRLPSVVSDILGATGRAIIRGLANGENDPQLLARLAEGRLRQEDKQKELVTALDGRLSPHHRFLLGFHLDTVEHLEKQVAYLEARIDEVSRPLAWAIDLLDPIPGVSRICAQMVISEIGVDMKRFPTVGHLLSWIGLCPRSDESAGKIRSRQIRKGNRWFKGTFMQAAWAACRCKTSYYRSQYLRIKARRGAKKAVVALAASMVTAIYYMLRDGVAFQDLGPKYLEKRDKARLAAALVDRLNALGYQVQLPAAA

SEQ ID NO: 163079 - protein, 411 aa, unidentified
MLEVKAERCAGIDVGKKFLAVCVMIGPANQKPVMEVRRFGTNVKDLERLRTWLQETGCTEAVMESTGSYWKPVFNILEGSLKIILANPEQVKALRGKKTDPNDSRWLASLLRHGLVQGSFIPPRDIRELRDLTRRRRVLLSEGAAERNRVQKVMEDANVKLGNVLSDVFGTSGQAMLEALLENTLTPEEIAELAQSRLRPKIPQIVETLEGHRMTDHHRLLIKQSLHHMEYIEKMIGELDNEIGKRLQPYQKEIELACTVPGIGRIAAASILAETGMDMSPAGPFPDCHHLASWSAICPGNNESAGKRKSGRTRNGNRWLRATLTQTAWAGAAKKDSTFQRRYQKLKLRRGGQRAVTAVAHAQLIALYWALRNGTPYQEQRQQIEQDRREALVQYHLRQLTKLGHEIERAS

SEQ ID NO: 163080 - protein, 411 aa, unidentified
MLVAGIDIGAEVHHVAVVDEGEVALVKPTPFAEDVSGHHKLLKLLARVGARGGEDLPLAPASAERPRILVVMEATGHYWQNLFATLVAHGYGVALVNPLRTHRFAGEELARTKTDRIDCLQIARFGVQKRPAATDVRDTLVEELRELVRLRSRLVQDAVDRVNQLHRLVDLGFPEFTRYLSQLNSPLATAILRQYPTAQSFHGLSRRRLAQLCYDGRHQVGAELAQQLIEAAKISVGSQHSAAHQLGVRYACEDLETLRMRLKQLDGDIAAKLQQHEVGRLLTSIAGIGDNTAACLIAELGDPARFESARALAAYVGLCPKHNQSGKRRPKSSSLTPIGNRRLRQALWMPTLAAVSRCNPWLQTFYRRLVERGKPHKVALLAAMRKLLVAIYSVAKHRRAFVPLTVYTQES

SEQ ID NO: 163081 - protein, 356 aa, unidentified
MSYDVKYIGMDVHKEAIVIAVLNEGGKLVMESVIETKASSILQFLHGLRGELHVTWEEGTWAAWLYDLLQPQVQHIVVCNPRRNALLKEGSKSDKVDARKLADLLRTGMLRPVYHGENGLRTLRELGRSYQTISKDLTRVMNRLKALYRGWGIPCAGTQVYAARCREEWLSKIPQAGVRRRAELLYQQLDGLQALRREVRPEFLAESRKHKAAKLLRQIPCIGPIRAARLIGLMQTPHRFRSKRQLWTYSGLGIETHDSAQYRFVRGQLQLSKKPQQVRGLNRNHNHEMKEIFKSAATRASCGRGPFHDFYAGLLAKGMKPEMARLTLARKIAAITLTLWKKEERFDVEQLKTQAA

SEQ ID NO: 163082 - protein, 387 aa, unidentified
MPKPNDLSRSLVALEQDSTLIAVVEMSRSSWLVAGIVPGVERQPLKKLAADEDALLRCLLRWRDEAAKAGRAISRIAVAYEAGRDGFWLARWLRAKGIEAYVIHPTSIPVTREHRRAKTDRLDTGLLKRAFLGWLRGEPGHCSMAAVPTLAEEDAKRPNRERECLVGERTRIVNRMKATLARLGIRNFNPKLRKAAGRLAGLRLPEGEGLPENTLAELRRDMARLRLVREQIDAIEAARAARLEEKPATGPHAMIQLIARVIGVGLETADMLVNEVLLRNLRDRRAVGRYAGLTGAPDESGARRREKGLARAGNPRVRRGMIQLAWRFLRFQPDSALVRWYRERTAAAPRGGRKTLIVALARKLLIALWRLATAGEVPQGLAMRPAA

SEQ ID NO: 163083 - protein, 360 aa, unidentified
MFTERTSVGLDVHARSIVAAGIDGVTGELFRRRLAPRPDAVIDWLATLPDPVAVTYEAGPTGFELSRRLSDVGIRCVIAAPSKMARPSGDRVKTDARDAVFLARLLRMDEVTAIRVPSRSEESARDLVRAREDVRGDLMRARHRVSKLLLRHGHVYYGGRAWTGKHHQWLASIRFDDAGTRAAYEADREAVEFALARRDHLDEVITALAADSEFTSVTRNLCCLRGISTLTGFALAVEIGDWHRFTGASIGAYLGLVPSEHSSGDSRRQGRITKTGNTHVRRLLVESAWQHKTHYVVGQVLRARWDKAPSLAQTRAHLGNQRLHHRWQSFGARSKPHNIANIAIARELAGWCWSLATLDT

SEQ ID NO: 163084 - protein, 403 aa, unidentified
MNNVAGIDVSKGKSMVSVLRPFGEVVAKPFSIGHTGSELKELADYLKSLDGETRVVMEHTGRYYEPVARFLHEEGVFVSAVNPKLIKDYGNNTLRKVKTDKADARKIARYGLDNWAELRQHTPMDTIRMQLKTLNRQQSLYAKTKTMMKNNLIALLDQTYPGVNALFDSPVREDGSQKWVDFATAFWHVDCVRNMSLTAFAERYRKWCKRHGYNFSQSKAVEVHTGAQDLIAMLPKDALTKTMVRQAIDALNAVSASLERLKAEMQALAAQLPEYPVVMAMHGVRDSLGPQLMAELGDVARFTHRNAITAFAGVDPGADQSGTHEAKSTRVSKSGPPELRRALFLVMDCLLKTQPQDDPVYRFMDKKRAEGKPYLVYMTAGANKFLRIYYGRVKEYLASLEEN

SEQ ID NO: 163085 - protein, 368 aa, unidentified
MGRKSSKLFVGMDVHKDSIDIAVAEEAGEVRHHGRIGGDMQALSRAVRKLESAGRSLVFVYEAGPCGFGIYRMLKTRGHGCWVVSPADTPRRSRDRIKTDRRDSLKLAGLARAGELKPIYVPDAADEAMRDLVRAREDAVIVQRQGRQRLAALLLRNDLRYAGKTAWTEGHRRWISRLTLATTAQRIAFEEYVQAVEEASARVERFTRAIEQELSHWRWAPVVAALQACRGIQLLHAVRIVAELGDLGRFGHPRELMAYLGLIPSEDSTGERRRQGSITKAGNRSARRALVEAAWAYQHRPAVSQVIARRQTGLPKAAIAIAWRAQLRLCARFRRLQARGLNRNKIVVAIARELAGFVWAIGQQVKPA

SEQ ID NO: 163086 - protein, 396 aa, unidentified
MKVIGIDVSSRNADYGIAVTGSKPVYKGTFAMDRTGMESLLSDKDAEGSDVLFLMESTGLYHLPLYHFLLNRGKRALIINPVLIRGYKKSLSLRNTKTDRIDAKAIAEYGIDRAASLPEGKNVTDTESQIIARRRAANAEETGKAKTILKQDLAVAFPELLSMDVFTEGMLHFLALFGSPREVLDASDEALENALLIPGKGRKVTLTAKRLRELAGDSVGVSLHGLCVRDSAKRVIECAERDAMLTAALLKVEKDIHPEDIDIVSSMPGIGEVEAAQFMAEVGDIHRFATYQKLIAYMGTDPGVYQSGQSNVRGHISKHGDAVLRKYVFLMAKGSIANNPVFGDYYRKKRSQTVTINGVELKRPYRKAMVDTMNKLVRVLHFMLTNGVMYAPEKKS

SEQ ID NO: 163087 - protein, 438 aa, unidentified
MSNNVIFNLDELFISVGIDVGADFSWMSIALPNQQFVGKPYKILHSSMDSLTTAVSKIKEAEELYSLESRIFLESTGIYHYPLFCYLRDKGFNCSVINPIITKNSTNINIRKVHNDRFDSKKAALVGLKSDLKVSLMPSDLALNCRNLCREYYDLMDNRSAYVNKLQGELRMAFPQYLGIFSKVTTNTSLTLLETYTSPSAFLKADKQEIIDTIRSTARFGLTYAEKKYNAIIQAAVEANEFGYIIDSNIKRIRLYISFIRKFDEEIQGVLESLRELVDANEDTDFVNQIHLIETFKGAGFLSAVSLMGEIGDFSAFSKPKQLFAYFGLDPAVKQSGKFEGTKVQMSKRGSAIARRVIHILALQSISTSRTGEAKNPVLRDFYLKKCESKAKLVAMGAVSHKVCNMIFAILRDNKPFEIIMPQEHIRQYNAAKCDVAA

SEQ ID NO: 163088 - protein, 367 aa, unidentified
MIVNEVAKNVEKIISIDTAKNSFQVLVVNQKTGKKKNTKVQRSKFVEYILKQGPCLIFMESCSASQHWARLFESFGFTVKLIAAQHVKAFLRNRRVKNDERDAEAIYKCGIQPDTKFVRIKTVEEQTVALLHTLRKAAVSQRVELSNRIRGILAEFGIVVARGRGSFNSEIEAMFNECEKIHDVNLRVAISSLFEDYHRLEQREKELSEKIEALNKDNELVKIALTCPGVGSLTASAIVAEVGDASQFRNGREMAAWNGVVPSQHSTGGRSTLGGITKTGNRYLRALLAQCACTVIQNASRHLEQGKDTHLDRFALRLKLNGKPVKKIMIAIANKIIRILWAMLTQRKTFENKANEISDTSAELQLA

SEQ ID NO: 163089 - protein, 334 aa, unidentified
MEKVTTVGVDLAKNVFALHGVDEKGVTVLRRSVGRSRLAELVAGLAPCLIGMEACSGAHEWARRFERFGHTVRLMAPKFVAPYRKSGKNDGNDAEAICEAVRRPNMRFVPVKSAEQQAVLTLHRVRQGFVEERTASINRIRGLMSEFGVVLPQRAAEVRRGAAAAAEALPVLARRGIEDLLAHLHTLDERIGEYDRELERLAKSDDAAQRLMGLHGVGPMTALATVASVGHARDFENGRQFAAWLGLVPRQWSTGGKPRLGHITKRGDPYLRTLLIMGARSVLQMAAQRTDRMSRWALAVKARRGYHRACVAIAAKNARIIWALLARGETVRAA

SEQ ID NO: 163090 - protein, 413 aa, unidentified
MTQLNPLYVGIDVASHSNVAYLMKPDGSKHSVFPITNSKAGCQQLVKRIVSAMTGNGLSEMKIGMEATSIYGSHLVYTLKEDFSLSAYTKEIHVLNPKQVAKFKESYNDLPKNDYVDAYVIADCLRFGRINNEVYLGDYRHEALKKLTRARYTAVVNLSREKQRFLNTLFLKYSTFAQEKVFSDTFSTTALAVYEEFESADQLALMDLHELTEFIKEKGKNRFPDPDAVAKAIQKAARSSYRLPKTVNDSVNQVLSISISSMRALEASIKQYDKAIAEQMNAISNPLISIKGIGPVYSAGIIAEIGDIHRFKNQASLAKYAGLAWKQHQSGGFEAENTPLIHTGNRYLKYYLCEAVMSLVRCDTEYNSYYHLKYKEVNRAQHKRALVLTARKFVRLVYCLLSENRMYIAPEER

SEQ ID NO: 163091 - protein, 344 aa, unidentified
MDEVSTIGLDIAKAVFQVHGVDDAGAVVIRKRVSRTKVLEFFADLPPCLIGIEACPSAHHWGRELQALGHTVKLMPPSYVKAYLKRSKNDANDAAAICEAVTRPSMRFVPIKTKEQQTALMLHRTRQLLVRQRTMLSNALRGHLAELGVVSAKGRNGMGELLRIIADGADNRVPPAVHGILDVLARQYSAIGAEIGSIDKSILALHRSCEASRRLAEIPGIGPIGATAMVAEIGDWKTFSSGRSLAAWIGLVPKQHTTGGKDRLGSITKQGNRYLRWLLVVGAMAVIRYAKKHGTKNRPWLARLMERRPTKVVAVALANKIARMAWAIMVHGERYKEPKLLLAA

SEQ ID NO: 163092 - protein, 392 aa, unidentified
MVCVGIDVAKDKHDCFILSSEGVVLADAFTIANNREGFEMLLQRIRTCTRPTDNIKVGLEATGHYSYNILGFLLDNGLTTFVLNPLHTNLYRKSLSLRKTKTDRIDARTIASMLMSDVDLKSYTDTAYHNEELKSLTRYRFEKVQERAKLKVSVSRLVNILFPELETLVSSLHTVAVYTILREFPGAKQIATAHLTHFKTVLSDASKGRYDREKAVAIREAAKTSIGSIMPAKSLELQHTIRLIRELDEEIEEIELAIKAIIDEMAPPILTIPGISYRMGAMILAEIGDFSRFDSPDKLLAYAGLSPSTYESGKLKAAGAYAHMEKRGSRYLRYALFNAAKYVCIWEPSFAAYLAKKRAEGKHYNVAISHVAKKLVRLIFALQTSGKAFQPA

SEQ ID NO: 163093 - protein, 313 aa, unidentified
MIITLRCIGIDVSKRHLDIFDEGIGVSERVANAPHAITKLVARWRCDVLVVFEATGVYDLGLREALRAAGIRFARINPARARDFARASGQLAKTDPIDARMLAAFARAMRPAPEQVSTPARNALARLAKRRDQLVLMRAQEKNRRSEAGDRAMVERICRLIEVLDHEIAEIEADISALIKAEPEISHDAQLMRSLPGVGPVACMQLIAQMPELGHVGPKQAAALAGLAPFNVDSGAYRGKRKIRGGRKRVRNALYMAALNAVRRADRFKAFYARLRQAGKPAKLALIAVARKLLTILNAMMRDRKAYIPAQQT

SEQ ID NO: 163094 - protein, 480 aa, unidentified
MNVKARRTKKQVNVENQAIMLLSKEELDRKIEVIKKELRSYTWRDLETNGKFAKNDKLSFITDDMLIAGCDIGSETHYIRAIDVRGRELSSGAFEFSNTSEGFANAKAWVLALAAKNDKKQIVLGLEPTGHYWFALAAWMISNGISVVQVNPYAVKQSKEIEDNSQLKDDRKDPKLIANLVKDGNYGMPYLPEKVYADMRRLSMFRDQLTEDRIRNINRLHRELKIYFPEYMDAFGKIDGAFTLEVLKISAIPSDITALGAEGIKNIWHNVKLRGRGYSRANEIVSYAEKSVGLTDGTDAGREAVKWYAEQILRLDEQLAEIESALHEKCREIPYAENILAINGVGENILAGILAEMGDISRFDDVKEIQKLSGMGLVACSSGKHKGQTKISHRGRKRLRYWLFQAAKSAVSHADEFKQLHEYYTTRSNNPLKKMQSLVVIACKILRVIYTILKTGTTYDPQKLLKDIKHPAASQAPMAA

SEQ ID NO: 163095 - protein, 410 aa, unidentified
MEVLHPVCAGLDIHKESVVACVRHMAQGKVSTQVHTFKTTTEALLALSEWLAQHGVTHIVMEATGVYWKPVWHILSDGEFQLTLANAAHVKNVPGRKTDVNDATWLADLMAHGLVRASFVPDEPTQQMRDLLRTRKQLVRERSSHTQRIQKTLEDANIKLDCVVTDILGLSGRRILEALIAGQTMPQALAALAHRNLKASADKLEASLRGRVTAHHRFLLKLHLDQIDAIGAAIASIDKEVDGNIEPFRQAIELLSAIPGFSQLAARVLVSEIGIDMSRFETAGHLVSWAGLCPRNDESAGKRRSTRMKKGAPWLKTVLIQCAWAAARTKGSYFQAQYHRLRSRSGAKKAIGAVAAALLTTAYHMLKNGTLYQDLGPNHFDQQAKARHVLRLLNRLENLGFDVTIAPKAA

SEQ ID NO: 163096 - protein, 315 aa, unidentified
MTRVICGVDVSSETLAARIGRDGAEASFANTPQGIVALAAFCRTHPVELVVMEASGGYEQRAFALLWAEQMPVAIVNPRAVRRFAEAMGLVEKTDAIDAGMIAWFAETRRTLAQPPASAAQQHLRALVTRLRQLTLVRCAQANQRRLVTDAAVLAMTDQLLELIEQQIGELETAIAELLASDPLWRELDQQFRCIKGVASRTVARLMAEMPEIGTLSAKSISKLAGLAPLARDSGKHQGRRVIRGGRAPVREILFVVASVAARHEPDFTAFHQRLRLAGKPPKVVRIALAHKLLVRLNAKAREVRKRINPALLAA

SEQ ID NO: 163097 - protein, 408 aa, unidentified
MDVLHDRCAGLDVHKEWVFVCVLVGQGRGRLRFKHRFGTFHHQLLELRSKLLEHGVTHVLMESTGVYWMPIYDVLEGHMQVIVGNAQHIMNVPGRKTDESDAEWLAKLLRCGLVKPSFVPERPFRELRQLTRYRRSLVQARASEQNRIEKHLQMAGVKLSSVTSKVFGVSGIDMLEHIGRGQTDAVVLAELARGRLRKKTAALEQAFAGPISPHTQQLVSLQLEELDRLTQTITDVETKISSKSGPYEKALALLDPIPGINIAAAIDIIAEIGTDMSPWPTHRQLAAMSGVCPGNYISAGKRLKNRSRQGNPYLKSILVQVAASAINKNGSYFQAKYKRLKQTRGHKRAILAIAHALLVTIYYVLKRQEPYRDLGANHLGHVDQRRKTASLVRQLEQLGFRVDLNQMS

SEQ ID NO: 163098 - protein, 351 aa, unidentified
MLIIGVDYHPSFQQMAFLDQETGECGERRLNHSDGEAEKYFRDLKQRGVSVRVGLEATGYSRWFERLLAELGFEVWIGDAAEIKKKRVRKQKTDREDARLLLRLLLENRFPRIWVPSPENRDVRQLLWHRHRLVQMRTRIMNQLQAVAMNEGYRWKKKLFSEQGRALLEKLSLAPWANRRRKELLELLDQLNPKIAELTAAVEQEANQRPDVLRLMTHPGVGAITGLAYVQVIGTPERFPCGKQIGSYIGLIPCEDSSAGKQRLGHLSKQGNALLRYLLGEAAQAATRCNPDWRRRYVHLAMRRHKNIAKAAMARKLAVQLYWMWRNGWDYSQLVSFGSNAGKLATGHGVN

SEQ ID NO: 163099 - protein, 337 aa, unidentified
MKHTVIAMDIAKRVFQLHAVDAQTGEIERVKLRREAVREFFARRTPSLVAMEACGSAHYWARELRGLGHEVRLLAPKSVRPFVRSNKTDAADAQAIWTAVQQPEARLVAIKSEAQQAILTLHRMRAQLLKFRVMQSNALRGFLYEFGQVLPEGHRAMVKAWPTALAALAEQLPAMLLDSLREQWVRVQQVDAEIAALERRLASALRANGSCQQIAAIPGVGLLTATAAVAAMGDPTTFKSGREFAAWVGLVPRQTGTGGRVRQLGLSKRGDTYLRTLLIHGARSILARGKPSPWLEALLRRRPYSVAVAALANKLARTIWAVLARGRPFDPAAFGVA

SEQ ID NO: 163100 - protein, 348 aa, unidentified
MTRLARIGIDTSKSVFQLHGVDEKEQAVLRKQLRRRQFVALFAKLEPTLVGLEACGASHHWARELQKLGHQVVLIPPQYVKPYVGRNKNDKTDAEAVCEAMSRPKVQERFVPIKSIEQSAAQMLLGVQESLVKRRTQLTNTIRGHAAEFGLVAAKGLDKIEPLLARIAADDSLPALAKEMFAVLGREYTELGPRIAQIDKQMLAFHRSNEVTRRLMEVPTIGPIGACLLVTKIVDPHAFRSGRRCAAWIGLTPKDHSTAGKQKLGRITRAGDERLRAALVSGAMACIRHARNRRSNSSPWLVELLKRKPPKVAAVALANKTARIAWKIMTSGERYDPNRGAAHQGIAA

SEQ ID NO: 163101 - protein, 361 aa, unidentified
MLIRYVGLDVHKDSIKIAIAEEGREPAKLLASIPGESGKLIKQISKLGPSSSVRCCYEAGPGGYSIYRALTAAGIDCKVVAPSMIPKQSGKRVKTDRLDAENLAHYFRSGDLSEVWVPDENTESIRNLVRLRDDARIARHKARQQLNQFLLRKGLVYHLKTKWNTGHMTWVRSQIFPQEADNVTLADYLRHTELLDERVANIEEDLRVYSGYWGKSSLVESLQGLRGIAFVSAVAIAAEVGDLRRFPTAGHFMSYVGLVPSEYSSGQKEKRGSITRCGNVIVRRLLVEAAWHYRHKPSRSRAITLRNENLPKRVQDIAWKAQERLHRKYMKLLMSGKPKNKVCVAVARELAGFIWAIGQSI

SEQ ID NO: 163102 - protein, 406 aa, unidentified
MKVLYERCCGVDVHKKSIIACTITPEGKEIRTFGTMTDELLEFVNWLKEKGVTHVAMESTSVYWKPLYNLLELEQIETLVVNARHIKAVPGRKTDMKDAEWIANLLRHGLLKGSYIPDRAQRELRELVRYRRSLIEERARELNRIQKVLEGANIKLSSVVSDINGASARKMIRALIEGKNDPMVIAQLAKGKLKQKVEELQRALHGVIGPHQRMMLAEQWRHVEYLDEAIARLDQEIEERTRPFEEALELLDTIPGVGRQSAEQILAEIGTDMSRFASASHLASWAGMAPGNYESAGKRLSSRTRKGNKKLRACLVECARAAARKKDTYLSAKYHRIAARRGANRASMAVGRTILEIIYYLLTRKEPYKELGADYWDRQREAKIVRQTVKKLEGLGYEVKLEKVGA

SEQ ID NO: 163103 - protein, 353 aa, unidentified
MTLTRVHEKGTSMTVIIGVDPHKSTHTAVAIDRDEQPLARVQLVADRSQVQRLLAWVEPLGTQRTWAVESAEGLGKLLAQQLLEAGEQVVDVPATLAARVRLLGSTKAGKNDPNDALATAIAGLRHCGLRAVRVEDDTAVIRMVIDRYDDLVALRTQAACRLHVALRELIAGGAPRRLGAERAAKLLRSVRPQGAAGVERKRLALELLADVRRLDRDVATAKRRVSDAVTASGTSLLELHGVGPIVAGFILGHVGDPARFPTPARFASYNGTAPLEASSGPRSRHRLNPRGNRKLNHALHLAAVTQVRHDTPGRVYYQTKIAEGKSKKEALRALKRRISDAVWRQLQVDLGRR

SEQ ID NO: 163104 - protein, 466 aa, unidentified
MHALTDSVTGGGRATGHRPSRASVMQPPPPGAGSVERPWEDAPRAPVSNDPSSASVTERVPEPKGGVMLVGIDWAAESHDVCVVDPAGRIRDRAAVDHSREGLDALVALLGRWAKRGEVLVGIERPEGRLVDRILEAGYRIVIVPTFAMKELRRRYAASGAKSDPGDSYVIADVVRTDGHRLRCLEPLSGETRALRAVVRARDDLVDQRVALANQLRAALEAYWPGAAVIFSDVDSQICCAFLERYPTPASAARLGEARLGGFLKKAGYSGRRSVAELLARLRTAPDGVRGVEAEGRADAVRAMVGVMRSLLRSIRDLDRAVVAHLGEHPDAEVFTSLPRSGRINAAQMLAEWGDCREAYPEPDAVAMLGGLCPVTYASGKQRKVSFRWACNKRLREALTVFADNSRHASPWAAEVYGKARARGCDHPHAVRVLARAWVRVIWRCWQERQPYDPALHGAATRVEAA

SEQ ID NO: 163105 - protein, 290 aa, unidentified
MSKVPSCPAAWCGIDVSALQFVGAFQRGDLPVQRRTFPNRSSGHRELLRWLQRSNVTVRVCLEATGVYSLDLALVLHACSSIELAVLNPKAVCRFAETLRRSKTDPADALVLLEYSRRMPWQPWQPPSVTAMTLRSITRRCAALTRQHTMEANRLHAAQASGTVPRCVQQDLRQSLQQIERRLKRLQHAAREVVAQTVESEQRYTLLRSIPGIGERTALQLLGELEGLPPDLDVRQWVAHSGLDPLHHESGEFRASQGAYQPRRQSASASCAVHACLSRRAIRPVSPRLL

SEQ ID NO: 163106 - protein, 419 aa, unidentified
MSTEKRKVCGIDVHKAFLVATVVDRQGKSETRRIQQNPESLLELRDWIQSENCDSVAFESTADYWRSLYLVLESRVPVTVANANHIKHVPGRKTDITDSRWIAQLELNGLITPSRIFAGEMYDLRFLTRSRELLVHNRTELKNKIHHLLDSASIRLSSVLSDLFGKSGTIILQGLVQNKTIEEIIESLPKKMRGCAEAISATLPASIPLVTLVLLQSNLKLVDDLDNEIKLIEGRIRESLTSKSREIQILTSIPGIGFIGASTLIAEIGNVHDFGDADRLTKWAGLTPSVYQSANVTRTGSITKQGSRHIRWILVELAHVAIRSPGRIRTFFERLMPKKGYKKSIVAVARKMLRIVWHLLVHDEVFIDEFPRSKQVKFPKMPKQIQAVGINRIIELLSKASEVIIKDRNQEIFRLGFSD

SEQ ID NO: 163107 - protein, 343 aa, unidentified
MTRFVGLDVSQKLTSICVVDETGRRLWRGQCSTDPEQLERMVKGHAGGDARVGLETGPMTPWLVHALRGRGLDVVCLDARHASAALKMQMNKTDQNDAEGLAQIMRTGWYRPVHVKSLDAHRARALLGARAQLVGMTTRLSNQIRGVLKTFGLLPGSMRGLSFDRRVESLLADRDDLLPIVRPMLVAWRQLREQIAEFDKQVRALTKKDPTCRLLMSVPGIGVVSVLAYVSTIEDPARFARSRSVGAHMGLTSRQYQSGDVDRSGRISKCGDTLARTLLYEAAVVILARIKRASGLKDWALAIAKRSGSGKARVALARKLSVILHSIWRSGEPFRWPEQPASA

SEQ ID NO: 163108 - protein, 375 aa, unidentified
MNKYTTKYVGMDVHKETIAVSIAKEGRGEPSYYGEIPNTGDAIRKLVNKVASKGERILFCYEAGPCGYGVYRQLMDLGQQCEVVAPSLIPKKSGDRVKTDRRDANTLSRLHRSGELTPVWVPDKEQEAIRDLTRAREDMKSMEGHARQRLGAFLLRHGKQYPGKSKWTQAYYRWLEAMRFEIPTQQIVFQEYVDTVRQMGKRVLSLEEEMRHAMQEWSLAPVVRGLMALRGVDMITAMTVVAELGDISRFDSPRQLMAHLGLVPSESSSGGRCKRGGITKTGNGHARRALIEASWTYRMPARKTAHIQRKAEKTSETIQEIAWKAQKRLSKRYWHLVNKGKLPVEACVAVARELSGFIWAIACEAKGKGDNRIAA

SEQ ID NO: 163109 - protein, 458 aa, unidentified
MSEVMIGIDPHKSSHTAVAIGAGEEPLGELRVQACPSQAEQLRAWAAGWPARAWAIEGAAGLGCLLAQQLVAAGERVLDVPPKLAARVRLLQAGDTNKNDPNDAFSVAVAALRSPAPRPVLAEDHAVVLKIWAKRHRDLARLRNQAACRLHAVLCDLVPGGHPKEISAAQAARILERATPTDAVAQARCELAAEFLTDIRRLDAQLREANKKLAAAVKASGTSLTGLFGVGPVIAGTVIGDVRQVFRFPSRDHFAAYNGTAPVEVSSGGRKAWRLSLRGNRRLNHAIHMAAVTQIRHTHSDGRAYYEKKIAEGKTGKEALRCLKRRISDAIYAALVADARQAAAATCPQGPGGQPGNHFVSRAAGSHPERRLFGQATPGPATTLRPAHNPAARARHSPVAAIQPPAKPQVQVERPQRSEDERPGGAARRRPHSAARKAPRDPELAPEATTAKKTQATA

SEQ ID NO: 163110 - protein, 346 aa, unidentified
MENIALDVHKHYTWARVENREGQQLYASRLVHSRGSIKNFIRRWTPGSSVAVETVGNWYWVVDEIEAGGGKPQLVNARLAKLMIGNVNKSDKLDAKGLNMLQRTGTLPTVWIPPSGVRDARELPRTRMVFSRQRTQLKNRVHATLSKYGYSVDEVSDAFGKRGRQIIEELSSKLPPHTKQALDHVLDQLDEIIENLKAIEANMINVFAPCPQTIWLQSLPGVGQILAVVIWTEIGSIERFNRAEQLASYSGLVAREHSSGGKFHYGAVRRDVNVYLKWAFVEAANSAILNRERCDYQHISRLYQRIKPRRGHNRAKVAVARHLAEASFWMLKKGESYREPVLSTQR

SEQ ID NO: 163111 - protein, 349 aa, unidentified
MKVFKQVLGVDVSQKELVVTLGRMNEDFSIEFYSYRVFSNKETGFIALLKWLKKNILTDISLRVVLEATGVYHQKFAHFLVDNCIDVSIVLPNKISNYFRTLEIKTITDKSCSEAIARFGLERKLENWKKPNKVYKLLQQLTRERDQIVCERTMIKNQIHAETTEAEPNERSLKRLEERLLFMNKQEKEIKQDISDIIQQDKTVEEQIGYMTSIPGVSVLTASTILGETNGFELIRNKRQLTSYAGFDVKAKLSGTSVHGKPKISKRGNKYLRKCLHLPSLCSVKYILEYKELYTRIVSKNGIKLKALIAVQRKILELTYVLFKNQTVYNPNYEIQKRVPLKEENTLTS

SEQ ID NO: 163112 - protein, 449 aa, unidentified
MSNGSGVSRGDRNRNARLARLRAAVPVANAIVGIDLADAKQMVVVCDHDSRVLARRTFRCKAWDLGAALDWAAGHADRHGSAGVTVACEPTGHRWRILGQLAADRGMAFVCVHPTMSAWARKSEDLTFDKTDDKDAVLIARMSAQLRCYLPEPVDETWARLRHLGTRRDELLGIHEACVHRLRDLLECVWPAALATAKQPFRSTTWVAALTLITVRDGGDLDRIRRLGAARFERLVRAEVIRRGKKRPCLRILRALFAALSDPVGVLAHRRAAFERITWVLADWDTARAAQADVENRMVTVLDELGLTALVTSIPGLSAVGAASILAHTGDLSRFTSARAVVKHAGLAPRERMSGTFTGKARLTGAGRPELRTAAWRAVWGCLQTNKVYAARYRHLTTRENNRLKATQAQTVIAAAILRQLYAVVIHRQAWDPAIATGHAHQEPAMAAA

SEQ ID NO: 163113 - protein, 346 aa, unidentified
MEQSIRCGIDIAKLVFQIHCVNAKSGETVMVKKLARHDMLRFFANKPPMLIGIEACGGAHYWARELTKLGHTVKLMTPQYVAPYRRGGKNDANDAEAICEALARPNMRFVAVKSESQQSVLVLHRMREQYVRERTSIMNQIRSYLHEFGIVINQGRAALAKTFPLVAEQESLPAMFRQSIANLADNLTDLETRIDKLNKQIESWCKQDNTAKALLTLCGVGGVTATAAVATAGDVSVFKNGRQFAAWLGLVPKQNSSGGKTILGAITKRGDRYLRTLLVQGARTVMLAASRAQKSTQPTPIFEWIYKLQERRPNNVVVVAIAAKQARMLWAIMAKQQRQNSLGLPV

SEQ ID NO: 163114 - protein, 369 aa, unidentified
MSKTVKYVGLDVHKNTIAVAVAEDGKRGEVREHGEITNTPTALTKLLGKLGGLGSSSTFCYEAGPCGYGIQRQVAAAHHSCVVVAPSLIPSRPGDRIKTDRRDAVKLARLHRAGELTPVWIPDSAHEAMRDLVRARLAAVRSLRHARQQLSGFLLRHGHHYHRPAWTQMHRRWLSGLRFAEDAHHIVLEDCIATVDAAKERRDRLTVQIEKRLADWTLAPVVEALQALRGMAMVAAATIVAELGDISRFSKAEQLMSYLGLVPSEHSSGKRRRQGGITKAGNGAARRMLVEAAWSYRFPARISREQLLRQEQLAAPIRAIAWKAQERLCLQYRKLSRAGKPITTVTTAIARQLAGFVWAIAHEVGMPKA

SEQ ID NO: 163115 - protein, 419 aa, unidentified
MSNRLGQRLATIPSGTLCAGVDLSLDSLVVVVLDANGQRLERFRTTNDVTGYAYLRERLQRLVTKHHAAGALVGMEPTNYYWKQVGYDLEQHQVPFRLVNALTVKRHREGDELDRAKDDWRDAFTIADLLRTGKFTETHLPHGAYAELQTGYTAYLRLRRDRGRQVTLLRNTVRQLFPEFEQVFQDVGGLTATAVIAAGLNPQPISRQSEAEFVTTVRCAFAGERLALRQLRELYALAPHSQGFTEATMALQLMAQHQAETIRLLDTQAEQLQTPLLSLFHTLPEAPYLLSIQGLQAADGLALVATAGDLAQYPSGAALVKLAGTTPTPNTSGRKTYSLTPFSHQGRSDLRTGLYFITLRLLTRNDALYYHYQRLTTRTPRPLPKMQAVGACMNKLLWYAWHVVKHREMYDPDRWRLLA

SEQ ID NO: 163116 - protein, 343 aa, unidentified
MNEIRVLGIDLSKDICSVVSMDGSGTVVLRRRMRRDTVLKLAAGLRSCIVAMEACCGAHHLGRYFRDQGHEVRLMSPEYVRPYVKAQKNDDRDAEAIAEAATRPTMRFVDLKSDEQLDIQSLHRARDRLVGERMALINQLRAILLERGIVIAKGRRKLALGLDQRFAGEMAIGSRVKVLIDDMRSQWRALDARIGAFDAEFADLARQDASMTLLSAIPGIGPLNATTFVASVGKGEAFGRGRDLAAWLGLVPRQMTTGGKPRLLGISKRGNGYLRKMLIHGARAALPTLAKGTTLLGMWLRGLLSRTHMNTAVVALAAKMARIIWAVLRSGRPFELASATSAG

SEQ ID NO: 163117 - protein, 396 aa, unidentified
MITLIFVGIDVASQKHDFFISNDCGEFYRKRSITIPNDYEGYKKLHKAINDFCGELNDYEVRIGLESTGFYHKNILTYLHKQGYITYLINPILIKTYKESKRVHIAKNDNIDSIYICNYLEDNINELKPYTTESYHIESLKSLSRERFNVIDELRKCKLAVYKLLTALFPEYIKLFSNIYQGTALSIIERYPSPSKLAKAHLSTIEEMIHGSCKTTASEIIESAKNNVGIDEKFLSFQLIQAIKKLKFVQSQVDEYNQFIKEYVDKLYTKITSIPGVGYVTAGLILGEIGDINNFSNSDKLVSFAGLDLRVYESGKFKVKITSPSKKGSRYLRYALFQVAKIIWKIDPRFKEYYLNKKSQGIHYYVILGHIENKLLKIIYSVLKNKKEYYTYSPQK

SEQ ID NO: 163118 - protein, 338 aa, unidentified
MERQYVAIDLHLNRSVVVRENEAGEKVGVSRIDNDPWALAEAIRDAGEAPEVAIEATYGWYWAVDTLQELGATVHLVNPSGLAWENRRVKNDYRDCCDLLDRMRLGKLPEAWIAPHEVRELRELVRFRARLVMLRTGLKAQLKAVLAKHGLRPPVKDLWGVAGPLWLDQLDLPRAYTTRIESIRDLVEVYDREIDMLEREIHRQLKDHQGYKAIQAIPGVGRTIGAIMVAEIGDIARFPNPQALCSWAGLTPKHHESDTKVRRGRITKQGSKLVRWAAIEAVSNGRGGPKLKADYHRIAERRPKNVARVAVARKLVIMVFYGLRDGHIRCLAEAEQAG

SEQ ID NO: 163119 - protein, 356 aa, unidentified
MLNKFNKFVDFTGHNVYAGLDVHDKSWTTTIIVDNIEHRRFTQPPDPMALHNYLSSHFPGASYFSAYEAGFCGYHHHRKLLELGIQNIVINAADLPVTNKEKMNKNDHVDSRRLAQALQKNELNAIYVFGPEHEQFRSLFRMRWRAAKEHRRVKNRIRSFLHYYGINPPSDLKPEYWPLTFIHWLDHIILPTKAGTLSMKYLLKAYHNTREQLLEVTRQLRNEVKIHYPNLYRLLMTVPGIGPIVSMGLIAEIGDMTRFKSYRHLSSYVGFIPNSHQSGEKDPRGRLTYRSNKYLRSMLVEAAWVAMRYDPALMKYFKERVIKQEAKFVIIKVAHKLLNRVRQVWISGNPYQTAVI

SEQ ID NO: 163120 - protein, 366 aa, unidentified
MSNPMPETVTAALDVHKDSIRLAAVSSDELVDERTLPYDHAVVGRALARWPGVRVCYEAGPTGFGLYRQLRERGFACQVVAPGLVPARPGERVKTDRRDARKLARLHAAGLLEAIEVPSPEREAARDLVRCREQARLDRMRERHRTSKFMLRNERRLPGRSWGLTRRAWLSAQRFERPAQQATLESHLHALDIADARIERLEREIRALSEQGPWRELVARLRCLRGVDSLTALSIAVEVGDFSRFRTAEEFMAYVGLVPSEHSSGERRKQGSITKVGNSYLRRLLVESAWNQRGRPQVGAQLARRQRGQDPLVIERAWRCQQRLHRRWRRMAGRGKPHNKIVVAVARELAGFIWAIATDQPLREGA

SEQ ID NO: 163121 - protein, 338 aa, unidentified
MTETKYFVGVDIASSTFTISVGGTPWQVILKPKLFENTEDGFQTFLDWLASHQIFAKQTVICMEATGVYSEGLAYFLFAKNYQVAVQSPLEVKRTFKPNGPKTDAVDSLQIAEYAYRHLDKLSFWQPRNEILEQVKALLATREQFVSQNVAHKNALQAIQRKPVRTPFAEQAHSQMIEQFKKQILAIDHEIRRLIESDPTFKEMLLLLLSVPGVGLLLAAHMILLTQISLDHKELASYLGIAPHEYSSGSSVFKHATSRHFGPAAIRKLLYLASCSVRTHQPQFKVYFSRKTKAGKPARLVLNNIANRLIKIICAVLRTKTAFIQNYHAVQPLALTAS

SEQ ID NO: 163122 - protein, 473 aa, unidentified
MSKGSGLSRSERRRNARKERLRALVPRGGAVIGIDLGEEKQALAVVDHDVRVLWRKTARVRAHRLGEALDLAVAAARAAGFAAVTVACEPTGPRWMQVQRLCAERGLVLVCVQPLASHIAREQQDYTTHKRDESDAVLIARLACELHCYVPEELDEAWALLRQLGRRREQLVKSATAAALRTGDFLSTAWPAAETAAAGPFGSLTWLACVEVVTGRCGGDPARLAALGEEEFFALVSDAARGWGASRAVRRIARNVLAVLDDPDAVSWSRRGLFRRIAGELGDLRRARAQLAAVEAEMRAVLGGELGLSRLGDIPGLTLTGAAVILAEAGDPRRYETAKSLVKHAGLSPADTSSGAFEGTSRISRRGRPGLRTAAWRAVTPLLLHNPVMAAKYQAMVRAAEDAARAAAAAARPGSAQAAQAGRAARAARARARVACAAALLRWICFMTVHDAGWDPAAASGGRITRDDLPEAA

SEQ ID NO: 163123 - protein, 425 aa, unidentified
MNHSTFCTCVGADVHLDKIQLCVVDKTDGHEVIERFRVTNNLPGAQTAATAIAEIATHLGCTRIEIGWEATGMLWIPFHRYLCDCPQLQPFELELVCFNPQLVTKFKDGLVLRRPKNDKLDASAIAARLRFGELPLSYVPDGFWQGLRRLTRYRFHLSRNMSREKMRFQSYAFLKCSDWKRVKGFSDVFGATSIALLTEFTVAELGEMTHDQLVDLIRRRGRGHFADPTHTARKVREALRSSYPIDPQMDEMVTATLATAWEHIRFIKRSMKRLDKLIARYIDLVPNPIITVKGLGAVITAGILAEIVDITRFLEHKHLAQYTGLTWEKRSTGNFVSQNTRLTKVGSKYLRYYFILGADKLRLFNLEYKAFYWRKHNEVSKYQHKRALVLTARKLVRLVHALLTKNVPYVRPRSLANVEEDNSLQ

SEQ ID NO: 163124 - protein, 388 aa, unidentified
MPAEEMSVAYLGIDVGKSSHSACALDVGGRVAFRAELANRPDDIDRLLERAGSGALVVVDQKRNIGALVLARAHAHGNPCAYLPGYAEKQARGMFPGIAKTDAIDAEVIARTALGVPRALRPAPEEPEGTASLRILSSQREFASSARTRAKNRLRATLLEADPALEGAVDPSSRWQVSMLAEFGGAAGCSAAGWRRFSSAARRAGAPVAGARRLWEALLASSRSGRRLPAGEDVAVRILAREIASLDADIEELDSLVADSLAGDEVYECLLTVPGIGPKTAAALVTSIDISAFRGHDELASYCGVAPRDRRSGSSIRSTSPQHGGNRQLKNLLIFSCNSLIGTDNRFGRYYGECRARGMRHSKALKAVARKRLKVIYAIMRDAVPYAA

SEQ ID NO: 163125 - protein, 419 aa, unidentified
MRDSKTKKVKIINRKTMIATLDIGKGFHYAYFRSPNGNDITPFPFCNSKKDFDKFWTRLHQFQTAHNLEDVIIGFESSGPYAEPLFHYLRKKPVKLVQINPMHSKRIKELTGNSPNKTDKKDPRVIADVISLGHALTLVVPEGAAAQLRRLTQARERTLKKRTAAVNQLHDLVFIIFPEFLSIMKGIATKTAFYMLKRYPTPEAIVSLGLESLAAEIKRVSRGRLKRERAEELFNAAQMSIGVSEGKRGILLEIEHLISQIATDDRFISNLERQMGKFLVEIPYSRNILSIKGIGTVTVAGLIGEVGDFRKFNTTSEVMKLAGLDLYEISSGKHKGQHRISKRGRPLIRKLLFFASINAVKSKGIMRKPYQQMLDRGMPKIKALVAISRKLLGLIFALVRNNTVYIENYSNEHHFKLAA

SEQ ID NO: 163126 - protein, 334 aa, unidentified
MEKVTTVGIDLAKSVFSLHGVDGAGRVVLKKTVRREQLLGVVAGQSPCLIGMEACSGAHEWARRFQELGHTVRLMAPKFVTPYRKSGKNDGNDAEAICEAVTRPSMRFVPVKSAEQQALLSLHRVRQGFVVERTAAINRLRGLMAEFGVVLPLRSVTVRRQAAQAAEGLPELARRMVAELLEQLRLLDQRIDTYDRELGAQARLSEAAQRLMKIRGIGPTTALAIVATVGNAREFRNGRQFAAWLGLVPGQYSTGGRARLGRITKRGDAYLRNLLVQGARSVLHTAGAHRDRLSRWALELQGRCGYYRTLVAIANKNARIAWALLARNETLRPS

SEQ ID NO: 163127 - protein, 320 aa, unidentified
MTLASAGVDISKATFDAAYLSAENKYKHKKFPNTPEGFTDFVAWLSVLDTGQPLVCMEATGAYSIPLAEFLAEHGWPVSVVNPACIHAFAKTEMSRAKTDKADAKLIARFAQQKNPARWTPPPPNIRELQALLRRVEHLLEMRQMEQNRLDTAGPAIADSIKAILESIEQELKATHERIRQPIDNDPERRQRRNLLASIPGVGGATSAHLLVALSDHYGFRTAKQAVAHAGLDPRIRQSGQWAGQTHLSKAGDPLLRKALYLPALTAWRHNPIVRTFCERLKAHGKNGKVIACAAMRKLVHIAFAVLRSGKPFDPNFALA

SEQ ID NO: 163128 - protein, 466 aa, unidentified
MAHKRKNVKNKGRKPSPRSLKTIQPNAAGIDLGSREHWVAGPPKHDGTPNVQRFGTTTPELLGLADWLKQQGVETIAMESTGVYWIPLYEILDGRGFEVILANARQIHNVPGRKTDMIDCQWVQLLHACGLLRGSFRPCDEICRLRALIRERNTMVKQRADWIRRMQKYLDQMNVCVHHAVSDITGVTGMAIIRAIVDGQRDPVALAGLRDRRCRKSQAQIAEQLTGNWRPEHLFNLRQALKMYDQLCTVIEDYDSEILTYINTLQPKDESDTSAPPLASKAKAKNLVSRGQEPMRQALYRLSGVDLTTIHGIGVDTATEIISELGIDLSVFPDENNFVSYVRLAPNLSISAGKKVPKKLKSSTCTRIATALRMAALTLRNSKTALGAFYRRVAWRKGASVAVFATARKLAQLVYRLLRYGRAYVDIGIEAYEARFKQRRIKFYTKALNTLGYNVKPLKTEEAEVA

SEQ ID NO: 163129 - protein, 365 aa, unidentified
MKKSITAATASKRNFDGKLTIGLDLGDRWSWYCVLDERGEVVGEQKLSTTPEALRALFGAMPRSRVALETGMHSPWVSRLVSGLGHETIVAHARNVRLIGESRRKDDRLDARTLARLARIDPQLLSPVKHRSRQAQADLMVIRARASLVRARTALVNAARGLTKSYGERLRGCNPRNMDLEKAQALSPELQAVLGPLLQALESLSERIAEYNRQIETIAQQSYPQTALLKQVKGVGTLIALTYMLRLEDPHRFRKSRDAGCYAGLQPGRRNSGQSEPQMHISKEGDPYLRTLLVQGAQHILGPFGVDSDLRRWGLKLAERGGKNGKKRAIIATARKLAVLLHRLWVSGEVYEPLRNTNRTMLAAA

SEQ ID NO: 163130 - protein, 348 aa, unidentified
MNALHYIGFDVHKKTISFCVKTASGEIVEEGSVPAQRRVLRQWASARPQPWQGALEATLFSGWIYDTLQPYGERLEMAHPAKMKAISAAKKKSDTIDARTIADLVRCNLLPACYVAAPRIRELRRLLRYRSLVVSEAVRMKNKMAGLLMETGALYVKEKLHRKKYFANLLEELEEVPESVIDLLRLSRGALEMFESTQKRLVRELLADPELAQRVERLMSIPAVGEITALTWALEVGDPQRFRSGSDAMSYCGLTAALQSSAGKQQRGPISKQRNRWLQTTLIEAAKLAPRWNPQLAALHARELERGHRNRATLAVARKLVAYLLAVDKSRQPFQVRESSQDLAQKTG

SEQ ID NO: 163131 - protein, 375 aa, unidentified
MRNFSTFIGMDVHMETIAIATAGKHGAPRYYGEIANTSEALTKLVKEVIPSGSRAVFCYEAGPCGYGVYRQITDMGHRCDVIAPSLIPKKAGNRVKTDRRDAVTLVRLLRANELTAVWVPDQQQEAMRDLTRIREDMKSMERRARQRLNGFLLRNKRIYTGQNKWTQAHFRWLEKISFENPIQQIVFQEYVDAVKHLQGRVVSLEEEMSRALSGWSLGIVVVALMALRGVNLVTAMTIVSEIGDISRFKSPRQLMAYLGLVLSEDSSGKRKRRGEITKTGNGHVRRVLVEASWSYRLPARKTAHLQRKAEKASEAVQAIAWKAQKRLCGRYWHLTQKGKLKVQACTAVARELAGFIWAIGCEVMGKNNTPVVKVA

SEQ ID NO: 163132 - protein, 458 aa, unidentified
MQQPVEVQVDEHEQVVERVAAIDVAKASGMVCLRIPHETIPDRRVTKIWPVAATTAALVELGDHLRCERVTRVVVESTSDYWRPFYYLLEAAGLMVWLVNAAQVKNVPGRPKTDKIDAVWLAKLAERSMLSPSLVPTEPMRQVRDLARARYDLVEDRTRVKQRIEKLLEDALIKISSVLTDVLGVSGRAMIAALIAGQRNPKVLAELAKGRARRNRTALERALHGRFIEHHARLARLLLGQLDELTVRIEEVTGLLDTAIRALPTSTSTTPTATTGAGGATNAESSTALPAPAGYDGAIARLCAVPGGGPDSVRAVLGEIGLDMSVFGTAGRLCSWARVAPHTRQSGRHNARARTGKGNPYLKSALAQIATGAAKTDTFLGQRYRRLIKRMPKAKALVALQRSILVIFFHLLADPTAEFTDLGSDFYAKRIDRARRTTHLLRQLHALGYEVRLAELSA

SEQ ID NO: 163133 - protein, 397 aa, unidentified
MLAVGIDVSKSKSTVAIIRSDGTVLSKPHDFSHTISDIAQLTALIHSYQEEAKVALESTGHYHYPILKALLEAGFTVFVINPFLVKKFMDNSIRKGKTDKKDAVRIAHFVLEKSYQLRPYSPTDQKYEDLKFLSRQYNQSVSMKVKARVQLANLLDEIMPGIQNIIPISSRYLENTLFFDFVEKYQSYERIAQMGEKRFVNSYTTFAQKHRCRSSQKKALAIYQAASDGIVTRSPDTTTALALSQCLLLLKQASSSADLILRQMQSIAYTMPEYSIVRSMYGVGDRLAPILIAEIGDVRRFTSAKALNAYAGNDAPPYQSGQFEGTNRHISKRGSAYLRKACYEVMHSLKVHKPENDPVYQFIIKKESEGKHKTVAKMAGVNKFLRIYYARVMELYK

SEQ ID NO: 163134 - protein, 274 aa, unidentified
MIKYHKHIGIDIGKYNFVVGIEGIKDTKEYENTSFGIFEFINDNKDILANSLTVVETTGGYELELLYSLCERGYVVHRADVRKVKNFIRSYGNSAKTDKLDAKALGLYGKERADKLEVFKSESKQNIQLFRLVQRRNDLKQMLVAEKNRLQQANTDKFVKNSCINMIDVLSNQITEITNQVEVIISSDQLLKAKHEILKEINGIGNIVAFELLILLPELGKLTRRQIASLAGLAPKANDSGKYQGYRKVGHGRAGVKLYYSLLLCQPVIARLLV

SEQ ID NO: 163135 - protein, 363 aa, unidentified
MHYVGLDVHARRSSLCILDSCGKVVKRLEVKGSWPKLMERVAAEVPRPFSVCFEASCGYGHLHERLSALAERVAVAHPGKLRLIFRAKRKNDRVDAEKQAKLLYLDQVPQVHVPCGDVRAWRGLIELRRKLVGRRTAVKSQLRALLRGAGCCDAPAGKALWSKRGLKWLAAAALGEADALRRDLLLEELAQADERVGRVTRELDRRADAHPGVALLRTIPGVGPRTAEAFVAYVDDVRRFARTRQVGCYLGLVPCQDSSAGRDRLGHITGDGPPTARMLLCEAAWQAVRRSPSVKAFFERVMHGEPGRKKIALVAVAHKLARSMAAMLRAGEAWREEVQGQDRGQERDRGQGQDRGQGQEPGA

SEQ ID NO: 163136 - protein, 319 aa, unidentified
MDNLSHGRVIGIDVSRDWLDVHCLPDGHRCKVPNAPAGHAAVADLARDQDAVVCFESTGGQEWQLWAVLETEGVAARQVPPAQVKAFAQSRGTRAKTDRIDAELIARFFAFRPEAGRSLPAEKLRLLRALTTKRAQLVEMRKRLLAQIRAHQKLGTAVMFEDVDTELKQRIDSLIKELEDRITLAIASDERLSETAGLLRSIPGIGPVASSMLVAEMPEIGTITGEEAAALTGLAPVAHDSGTLRGKRAIAGGRRALRHVMFQAALVAAHHNPSLKSFADRLRKAGKPHKVIITAVARKLVTIANALCKNRQNWTAAAA

SEQ ID NO: 163137 - protein, 316 aa, unidentified
MSEATALVVGIDVAKDTLEVATSSGEHWQVDNDPQGQESLRDRLAGLGAGLIVLEATGGYEVALVAVLAHVGLPAVVVNPRQVRQFARSFGRLAKTDAIDAGVLVQFGVHVAPQVRPLPDAQTQQLEALLTRRRQLLGMIQAERNRLLLAAGPVRTDLKQHIAFLVRRLKDIDRELEERLRASPLWREREKLLKAVPGVGRQLLLTLCASLPELGRVPARQLAALVGVAPYNCDSGKQRGQRHCWGGRADVRQVLYMATLAATRFNPVIRPQYARLVAAGKPHKVALVACMRRLLVVLNAMVRDGTPWNPQLVMAK

SEQ ID NO: 163138 - protein, 495 aa, unidentified
MNNSAAIQNDGGKRPALARSRSPECYRKTVSERPPAEPEALAPTSNRKLPQEGQNISSMDGRAKRRQDRKQRKQTMNGSEQWQQHRAFGALDWASEKHFVVVVNKGGKIVEESEIEHSALGWKKFREKLQPYGSIPFAIETSQGVAVEQLLEASMTVYPINPKSAQAYRQRKAPSGVKDDRLDAWSFADALRVDGHGWKALRPEEPLIKELRLLCRDEVALIEQRTAFIEQLRHALAAYYPAALEAFEDWTSVSAWMFVERFPTPAALAKAGKRKWQNFLHSRRLWGSTEGPRRMEVFAKAGQFAGTPPTTKAKSLLALSLVQMLFVIEKQLKVYRQRIEELFAHHPDHDLFGSLPGAGPKLAPRLLAEIGDDRQRFDGDPQNLQCLAGSAPVTKRSGKRRKYWHVHTRWACDKHLRHAMHLFAEQSLSRCVWAELYYQHHRQKNQSHANALRRLANRWLKIIYKMWVDRTPYNAEFHHRNQLQHGSWIFQLKSI

SEQ ID NO: 163139 - protein, 357 aa, unidentified
MERILKQSLGIDVSKASLSLSFGTLYGNLKKEFVSHPDIGNDVSGFKSLRTWISKQVDRKEGFYVIMEATGVYHQRVCHYLYGLGYNVCVMQSGRVKRYAQSLDQRSKTDALDSRMLSMLGLERELRLWSPPSEELQQLKLLGRERSSLLKDRTTEINRQSAIDSSSCLGKRASKRHQRRLQPINEQIAAIEQEMRGLVKGDAVLRERIGHLESIPGVSFISAATVVGETLGFESISNAKQLTSYAGYDVVLKESGRFKGKTKISKKGNSHIRAVLHMPSMACVRFNPTLKLFYSRIKPNKAKPMVALVAVQRKLLVLMYTLWKKEEDYDAEFEKKKQQRPEVLAAQDSAQIKLSAS

SEQ ID NO: 163140 - protein, 314 aa, unidentified
MLKMTDHTIGIDISKARLDVFDSKRQEVRSFNNTEAGFRELSKWLVSYPPTRVIYEPTGPYHRNFEEHFCGKWPLVKVNPLQARRFSQACGTRAKTDALDARGLARMGGALELEPDVPVSKTTRVLKDLQLARTALVKDRTRLRNRSHIQSNKVLQRQTKARLDLVEKQIDQLDAEISKLIETDKTTARRRDILRSIPGLGPVASAAILTFLPEIGTLDRRQVGSLAGVVPHTRQSGQWKGKAFISGGRKPLRDALYMPALVAMRFNPDLKKKYQTLRDAGKPAKVAIVAIMRKLIETANALVKENRFWVEKGA

SEQ ID NO: 163141 - protein, 327 aa, unidentified
MNEKILGIDISKKKFDVALEKGELVESGTFRNDETGFTKLGRWLRKRDAKRIWACMEATGQYGDELALHLHEQGQKVSVVNPARIKKYGESKLQRNKNDKVDARLIADFCRTQAPYLWTPPAAEVRKLRALARRQNVLQGDRTREKNRLQAGYHPPAVEASIRAHLAFLNEQIAAIEAQTQQHINDHPNLKKDQELLDTIPGIGLKTAACILGELSDVSRFDHARHAVAYAGLSPHNHQSGDSILRPAHLSKIGNSALRAALYWPAITALRFNPIIMALGERLAKKGKKKMVIIGAAMRKLLQLAYGVLKSGQPFDPNFAANIQDNA

SEQ ID NO: 163142 - protein, 311 aa, unidentified
MKSTIFVGIDIAKHALQIFCKELSLEQSVAYEAQELNALIKRLKTRRSKVQVICEATGGLEALLVQSLCGAKIKFSVLNPRQVRDFARAQNKLAKTDKIDAAILADFGRRMQPAPTAMPHWRIQQLAALMARRQELLDFCVAEQNRLGQSTQRWVRRQQLILLNQLRTHLCQLDQRIKALVEATPWLEARLERLAQTKGIGSVTALTLLATMPELGTLSRAKAAYLLGVAPLNCDSGKWRGKRLIYGGRRVARSALYMAALSASRFNQVLRPFYQRLRANGKPPKLALIAVMRKLIIYLNACLKALPAPTA

SEQ ID NO: 163143 - protein, 416 aa, unidentified
MDTMYERCCGLDIHKKTIEACFRSGKKKTHMSFGTTSAELRKLTMWLVENDCQSVAMESTGSYWKPIFNILELSGTDMEIIVVNARHMKNVPGRKTDVHDAEWIAELLQHGLLRPSFIPDREQRELRELSRYRKSLVEERAREINRLQKMLEGGNIKLTSVVSEVTGYSSRRLLDRLLRSDEPMTEDVISGLVHTSLAGKSKELETALDGLLSELQKELLIKVLDHIDDMSRRIADLDDFCRKQMKKYEDALDKLDEIPGIARRTAETILIQTGLDMSRFPTAKHFARWAGLAPGNNESAGKRSSGRTTKGNPTLKSTLIQSAKVAARKKDSFFKARYQKIAARRGANRASVAVAHSMLIAIYHILKSGERFKDLGEDYYNQFNKEKKKKYYLKKLTKLGVNLKEATLSISIQAAT

SEQ ID NO: 163144 - protein, 388 aa, unidentified
MVEFLCQTLEKVNRMSHKPGIGIDIHAAFYQLAVVGPDGVVAEERISTGVEGVKKIVDRIRSMSPAPVVAMEACTGTYHLYHSLQNTGATILVVDPRKMRERFPKRGKKTDKVDALNLANLATFHNVKGNWIPPESTRKTRELTRERCRITEQCTTEMNRIHSKLKEYGIRWPGASKKLWTEDGRRWLSNQMQKAPGWLKMTVVGTLERLDLLWKQKRDLESAICEEALQLEEARLLMTVPGVSAVGSAVILSEMGDWRRFDNSKQLVSYAGLNPSVSQSGNSCYHGPISKHGRSNLRWICVELALSAYQHCPVLKAFHDRIKKKTRCSGKAKVATGRKLLALCWHILRTGRPYNHERQDLTKRKEARIRQVAHRTRSGSGVNSVNTG

SEQ ID NO: 163145 - protein, 405 aa, unidentified
MDIQPIFRCAVGIDVHLALICVCIIVAQPGLEPEVHRREFGGFQRDRRAMAEWIASFKPEIVVMESTGIYWKSPYAALEKVGIQAKVVNAQQVKKVPGRKTDTSDAEWLAMLARAGLLRGSFIPPERLRTLRQVSRHHHKITALRAMEKNRLVKVLSDAGIRITAVVSDAHGVAASAIIDCLLAGGTPEQALAHAGRLHAPPEVLLPSLQGELSADHILVAKTIRNHIVYLDAQLADLERYLLDALQPHEAALQLLMTIPGIDRLAAAKLVVEIGVDMAAFGTAGRLCKWAGVCPGNDESAGKRRRGDTAPGNRYVRALLCQIAWAAVRTTSQFKGRFQSLVSRRGTKKAIVAIGHKVLKTVFVLLSRQVPYQDSTVDYEALAVKRHAPRWIRQLRKFGYLPKMA

SEQ ID NO: 163146 - protein, 344 aa, unidentified
MDQIIRIGMDTSKHFFQLHGVNAGEQPVLRRKLRRNQVLAFFAKLPPTVVGMEACGAAHYWARELRKLGHEVKLMAPQHVKAYVKRNKNDGRDAEGLCEAMGRPTMQFVPVKTEEQQAALMLAGVRQQLIARRTQLSNAIRGYAAEFGLTAAKGLDKIEPLLADIAADKALPGLARELFAMHGREYAYLQAELKKIEARLMAWHRANADSRRLAQIPGIGPIGATTLVMKAPDPRLFPSGRHFAAWIGLTPKDHSTAGKTRLGKITRAGDEMLRSVLVAGATAVIQQAKNGRGRPAPWLLALLKRKPPKLAAVALANKMARIAWKLMTTGESYDGARMPAAFAA

SEQ ID NO: 163147 - protein, 472 aa, unidentified
MNRKRRKELAHQLRSEDPGLEVLHPNAAGIDVGNNAHYVAVRPDRDPQPVRRFECFTADLHRMADWLHRSGVTTVAMQSTGVYWIPVYEILDARGFEVYLVNARYTRNLPGRKTDVQESQWLLKLHTYGLLSNSFHPTAEIRTLRMYWRQRGDHVAAIGTCIQRMQKVLTQMNVQLANVISDLSGRTGQAIVRALVDGERDPEKLAALRDARIRASHQEIAKSLEGTWRPELLFVLKQEVDMYDTYVLRLTECDRELEAHLQRFAAKLPPTPLSPTPTATPTGPSNTPTRRTKRNKKPQGHAPQFDLRRELQRISGVDLTRIDGIDVVVAQTIISEVGVDMGPWQDEGHFASWLGLSPDNRVTGERIIGKGTRQVVSRAATALRMAASTLLKSQSYLGAQYRRFRTKLGAPKAITAMAHKLARLVYRMLKFGHEYVDKGASYYEERHRQQQIALLKKRAAKLGLQVVQPEAA

SEQ ID NO: 163148 - protein, 389 aa, unidentified
MIQDEAGIRLRRKRLPEGIAGIVELHAMVAGYASDPAEVVVGIETDRGLWVAALVAAGYQVYAVNPKAVARYRERYGGGSGAKSDAADAKVLADLVRTDRHNHRPVAGDSEAGQGIKVLARAHQRLVWSCQRQVNSLRSLLREYYPAALAAFDDLDHRDALAVLSGAPTPAAGRRLSRAAIATTLRRGGRQRSIDDRAAEIDTALRAPQPEPPTTLADAYGAAVAATVAVITEMTRQLATLEAELERAFGAHPDAAIIRSLPGLGTILGARVLGEFGDDPHRYTDDRARKNYAGTSPITVASGKRRVVKARYVGNRHLADACYLWAFCALTHSAGARRYYDQLRAKGLEHDGALRALANRLVGILHHCLAKRMTYEEAKAWPAAEAKAA

SEQ ID NO: 163149 - protein, 376 aa, unidentified
MNKVRFVGLDVHADTIAVAVAEPDGEVRALGTIPNRPDSIRRLVKRLGPPDRLRMCYEAGPTGYVLYWQLTGLGVPCDVIAPTLVPTKAGDRVKTDRRDAMKLARSYRAGDLTPVWVPDATHEALRDLVRAREAAKKDQLRARHRLGKFLLRTGRRPPLTMKAWTQQHLRWVKTVQYDHAAQEATLQDYLQEIEHVADRIARLEQAIDEAVKSVPERMRAVIAALQALRGVAQVSAVTMVAELGELSRFASARQLMSYTGIVSSEDSSGTRTRRGAITKTGNAHLRRIVVEAAWAYRHRPGLGAAFHKRQATVSPEIKEIAWKAQHRLHTRYRWLMAKGKHKQQVVTAIGRELLGFIWAIAVKVEAQRADGQATAA

SEQ ID NO: 163150 - protein, 339 aa, unidentified
MAILFVGIDLAKNVFAIHGVDEHGKAVLVRPSVQRARLHQLVSALPPCTIGMEACSGAHHWARLFAQHGHAVRLMAPKFVTPYRMGGKRGKNDAADAQAICEAVQRPNMRFVPVKSLDEQARLCIHRVRQGFVEQRTATINRLRGLLSEFGIVLAQKAATVRREAAAHLEDLPGWANTAVGDCLSEVHRLDERLAEYDRHISQIAAEDERSSRLMRLQGVGCTTASALVATIGDARDFKNGRQLAAWLGLVPGQYSSGGKTRLGGITKAGDGYLRTLLVLGAKSVLAAARNKHDRLSRWAMALEVRRGYWKAVIAIAAKNARMAWAVLAKGENFKLIEA

SEQ ID NO: 163151 - protein, 413 aa, unidentified
MDVIHPRCAGIDCSKKDAKVCVRIQGQGRRAKSATVTTWGATTNQILALREHLVAAKVTCVVIESTSDYWKPFYYLLDDALEMILVNAKAVRNVPGRKTDVSDAAWLADLGAHGLVRASFVPPAPVRTLRDLTRTRTVITRERTREVQRLEKLLEDAGIKLSSVACDITGVSGRAMLEALIAGERDPAVIAELAQRRMRSKIPALAEALTGRFSDHHRFMTRLFLDRIDAHSADIARLDTRIEEAMQPFGAARDLLASIPGFSRITAEVVIAETGADMSVFPTARHLASWAGLSPGSNESAGRTKSTKTRPGNHYLKGALGIAALSAARSKNTYFSAKYKRIATRRGPMRAIVAIEHAMLIATWNLLVNGDFYRDPGPDYYTRRIPTKTKARAIGQLEALGYQVTLQPLADTA

SEQ ID NO: 163152 - protein, 374 aa, unidentified
MSEHGITFVGMDAHKKAINVAMLLPGQHQPVEWQLANEPAAIRRLAKKLQREAPGEVRCCYEAGPCGYVLQRQLEAGGVICEVVAPSLIPVKPGERIKTDRRDALKLARSLRSDDLTAVHPPTSADEAVRDLSRCREDARKDLLRARHRLDTFLLRRACLYTLTRRRWGQPYRAWLGSLKFEHVADQVTFEDYVRTIEQAEERQRRLDERLAAVAEQDPYREPVGWLRCFRGIDTLTAIAVVAELHDFRRFLSARALMAYLGLVPSEHSSGERERRGAITKAGNIHVRRLLIEAAWHYRHRPHIGVGIRQRRKGQPDKIIAIADRAQERLCHRFRTLTARGKIPNKVVVAVARELVGFVWAALYPATHGQSTHS

SEQ ID NO: 163153 - protein, 385 aa, unidentified
MRGKSFIPKNCDVFTGLDVSKKSMSVTFTNHQGLIRSLNMPHKAEPLLHYVRKHFPDQKIAFVYEAGPTGYGLYDGLAAQAYPCLIAAPSMIPRAPGQRVKTNRLDSKALSENLRGGQLKSIHVPSPTYRQLRHLTQLRDVLVSELAGMKQRIKSLLLFEGIEFPPAPAGSQWSFLVKDKLRKLPCSGTVRFKLDQLLDSLEFNEKQVLKTITEIRRFCRQDPELSQCIEYLMTLPGIGWITASQLLARIGDWRELNNIRQLGGFLGLVPTEHSTGERTDRGSITRTGDERLRSKLIQASWSAIRQDGELREFFRTVYRKHPREIASRVAIVAVARKLSVRIAVVLMKQRPYEVREKVHSAPLTQEETSPQGTTRREPEPGEKNS

SEQ ID NO: 163154 - protein, 367 aa, unidentified
MSTKSLSHRGVIHLGLDVSRDSIAVGILRPDERVADVEKISHDEESVRRLVTRVGSPGRMWACYEAGPTGYELHRLLGRLGVRCDVIAPSLIPRAPGDKIKTDRRDAKRLARLHRAGELTAIRVPSPAEEGVRDLWRARRVAVKEVTRARNRLSSFLLRHSVVWREGSTWTVKHRQWVATRHFEDLAVRTAFGFYLAELTAREATLEAMEAELRGWVAHDLFADTVARLGAYRGIDHLGALGLEAEICDWRRFGTAGSFMNFCGLVPREYSSGESTWRGQLTHAGNVQVRDQLVESAWAYRYAPSLSVSIKRRQQGLDPMVVARSWKAQQRLCARWRHLAARKERKTTVAAAVARELAGFVWAEMTA

SEQ ID NO: 163155 - protein, 314 aa, unidentified
MKQVQEINIGIDTSKTQLDIYVRPIGEFFSVENNAKGIKAALKRIKSYQPTRIIIEATGRLELPFACAASKANLPIVIANALKVHNFAASSGQLAKTDKLDAKMIAHYGEALKPRLTEIKADNIQRISDLLVRRSQLVEMRTMEKNRASMMNKEVKRSTQRLIKHLQKEIDWVEKTLDKLIEDTPDWSRTLEILLSVKGVGKVLAYTLLSDLPELGQLNRKEVAALVGVAPMNRESGAYRGKRRIRGGRARIRTVLFMAMMSTIQSNPKFKREYHALVAKGKPKKVAIVACMRKMITILNTMVKNGEVWDEKLA

SEQ ID NO: 163156 - protein, 346 aa, unidentified
MGKSIIDLSSVTTVGLDLAKHVFQVHGVDGSGRVVVTKAMRRNKLLEFFASLPSCLVGLEASGSAHHWARELIRLGHEARMIPPAYVKPYIRRQKNDAADAAAICEAVTRPSMRFVAVRSLDNQAALMRHKTREMLVSQRTQLLNGLRGHLTEVGVIAAQGPRHARELAELIEACDETIPFGVCEALAPLVVQLRNLDQAIAGLERAIAKLAQKDETARRLMSIPGFGPITASAMAATIQDTSSFAGPREFAAFLGLTPKQSSSGGKQKLGRISKMGNRNLRKLLVVGAHAVLFHRKLHTDPLRMWAKKLIEKKPFKLVAVALANKMARIAFAILRGKTTYREIPA

SEQ ID NO: 163157 - protein, 365 aa, unidentified
MTKVRTWAGLDVHAAATVACVVDAPSGEMSVHRLAGRTSQLTAFCAQLPAPVRVAYEAGPTGFEFARALDAAGLACVVAAPGKIERPAQDRVKTDRRDAERLVRLLMIGGLHPVRVPSSEEEALRDLVRAREDIRGDLMRSRHRLSKLLLRHDVRYDDTASAWTKAHRAWLSRVDLGERAAQTTLLDYLGAVDALVIRRDTLERMIGELVPVSPWAEPAARLRCLRGIDTLSAVGLCAEIGDFARFDRPSKLASYLGLVPSEHSSGQTRRQGAITKSGSRHARRLLVEAAWHYRRPPRTGTTLQRRQEGQAAQVIAISWKAQQRLHQLWRRLDGERGKRKTVVAVAVARHLAGFCWAITNTDPDT

SEQ ID NO: 163158 - protein, 347 aa, unidentified
MRFFTDHHQNYCGIDLHARSMYLCIQNLEGKVVLHRNMQARPELFLKAIEPFREDVVVGVECIFTWYWLADLCAEHNIPFILGHALYMKAIHGGKAKNDRIDSRKIAALMRGGTFPMAYVYPAKMRATRDLLRRRNHLNRRRAELLGHIQNTNSQYNMEPFDANISYKQNRSGVVEQFHDPDVRMSMQANFELIALLDELKRRLELHITRNAKHHDPQALYRLRSVHGVGPILSLVMLYEIGDINRFARVQDFASYSRLVKCARESAGKRYGTSGGKIGNAHLKWAFSEAAVLFLKGNPEGMKFKNRLEKRHGKGKALSILAHKLGRAVYYILKQDQAFDMNKFLKN

SEQ ID NO: 163159 - protein, 361 aa, unidentified
MNGVGTEAAPSIIEGTTMEHYAGIDVSLESSCVCVVDRTGRVIREAKVASEPDALIGWFRSLGVELARIGLEAGPLSQWLYAGMREVGFAMELLETRHVREAFKTMPVKTDRKDARGIAQLLRLGWFRPVHCKSLPAQETRALLTARKQLQSKLHDIELSLRGTLHGFGLKVGRTTARTFAGRVCELVSGHPTLATIADAFLSARTILAAQLHRLEKRVLAVARSDTRTQLLMSAPGVGPVVALTYVAAIDDPARFKSSKATGAQFGLTPKKYQSGETDVTGRISKIGDASVRTMLYEAANVILTKPVKGSSLKSWAMRVAKRAGMRKAKVALARKLAVVLHRMLVDGTKFIADKAAAAAA

SEQ ID NO: 163160 - protein, 332 aa, unidentified
MVAGTYGSFNKAGSTKMTQISRTAGIDTSKAKLDIAVHGGGEHWQVDNTSVGWRRLAADLSKAGVTRVGIEASGGYESGVVGHLRDKGLTVLVLQPIQVKAYARVHLRRAKNDKLDAALIAACAATIDQPRLAPDERLAKLAHHLTFVEQIEEDIARFKTRLEHVGDARLHRTVVADIARLKRRRSTELSRIVVALRAHDDLARRLDLVLSIPGLGERTAIALIIRMPELGRISREEAAALAGLAPYDDDSGKHKGQRHIAGGRGRLRRSLFAAALPAAFHWNKALIELYARLTARGKAHNAALIACARKLLIYANTVVERGTPWTERPAAI

SEQ ID NO: 163161 - protein, 337 aa, unidentified
MKFNSDSQGITKFIHALEDIQAQFGYKPQDFFILLEPTGGHYSYLVVRVLLDRGYSIYQVENKAVKDFRERQLGLNEKSEEIDARIMAYMGWHKTLHPDMHSVRIVRPASAEQVLYRTLTRDRWLLTTQLTRRKNQVQQLFSVTNPELKRAFKKTGALSVLKLALKYPTAQEMAKVTQDELRQTLITIGAKTTAAKASMTLAELLPNTLALNIPHLAERQTWLIEEALRIDEAIKSMDKQIASLLYGDKEKGYKPHPYTKILMSFPIMSESMACTFIGAIGDIERFSTYLELKKYLGVAAENKISGTSVFKSRQTYEGVRDTRRVLFLMTLLLISQK

SEQ ID NO: 163162 - protein, 426 aa, unidentified
MRAIGLDVHQSFCEVAIYEGGEVRSAGRVRSDREELELFAESLGRNDQVVMEATGPAMEIARILEPHVARVVVANAQDVRAISHARVKSDRFDARTLARLLAAGMLDAVWVPDPATQALRRRVARRAALVRQRTRAKNEVHAVLSRCLLGRSPVTDLFGVSGRAWLAARKLPEPEAETVAGCLHQIDFLSAEIEKIDRKLSEWAISSAEARRLMTIPGVGVAAAAALMAAIGDISPFDSSRRLVAYLGLDPKVRQSGEEAPRHGRISKRGNSQARSVLVESAWSAMRSPGPLRAFGERVRVRKGAQVAAVAVARKIACLCWQLLTKEEDYAYARPSLMRAMIRRAELDAGAPPRPRRHGGKAVRASAKEKAAEREMVERAEAAYRRMVDDWRSSGAKGAGATRGRASSRPSAGQAARQESAPEPAL

SEQ ID NO: 163163 - protein, 334 aa, unidentified
MNNVSLIGIDLGKNSFHVHCQDAAGNALTRKKFTRAKLFEFLANCPSATVVMEACAGAHYIARKVFDMGHKPKLISPQFVRPFVKSNKNDFVDAEAICEAASRPSMRFVAPRTESQQEILALHRVRESLVRDKVKTTNQMHAFLLEFGISMPKGLAVIRRLSVVLAENELPPYLAKLLVKLQGHYLYLVEQIRDVEHELELAAKQDDTTQRLMSIPSVGPITASVLMANLGNGQQYKQSRDFAAATGLVPRQYSTGGRPTLLGISKRGNKNLRRLLVQCARVYILHLEHQSGYLAEWVRNQLSKKHSCVVACALANKLARIAWAITTKQSVYMA

SEQ ID NO: 163164 - protein, 316 aa, unidentified
MTDTPNFVGIDVSKAQLDVALRPSDERDTLVHDAAGIDALVARLRHVAPTLIVLEATGGWERPLVRALVAAALPVIVANPRHVRDFAKATGQLAKTDQLDAVVLARFAEAVRPTLRPHPDAATEALAALLARRRQLLDMLTAEKNRLSTAPPRVQRRIRAHVTWLTAELARLNEDLDEAIRQSPVWREQEDLLQSTPGVGPVMSRTLLADLPELGTLNSKQIAALVGVAPLNRDSGTLRGKRQVWGGRAPVRAALYMATLVATKCNPVIRSFYLRLRGVGKAAKVALVACMRKLLTILNAMMKHRTPWRALVAQQA

SEQ ID NO: 163165 - protein, 346 aa, unidentified
MKITTIGIDLAKVVFQIHGVTAHGKVALRKQLKRAEMSSYFANLEPCLIGMEACGSAHHWARKLEGYGHTVKLMAPQFVKPYVKTNKNDMADAEAICEAVSRPNMRFVAMKTVEQQAILSVHRARQGFVKARTAQGNQIRGLLSEFGIVIPQGIRSIMKQIPEILEDGENGLPGTMRHLLERLTENLKEMDRQAKELEAQIQLWHRENASSCKLAEIPGLGPITASAIVATVGDAREFKNGRQLAAWMGLVPRQHSSGGKQNLLGISKRGDTYLRTLMIHGARAVIRFAENKAEPESWLRKLMARRNKNVAAVALANKNARVVWALLANDRIFRPDYTPAAVVAGM

SEQ ID NO: 163166 - protein, 350 aa, unidentified
MHATTVAIDLAKDVFELAFAEPAGRILERKRLTRRAFCRVMENRPVMTVVMEACGSAHYWGRRFQALGHSVRLLPARDVRPYVRRNKTDRADAAGLIEAARCEQIAEVPVKSPRQQGLQALHRVREQFKAQRTAAINLLRGVLREYGVVIPNGSAKVRSAVQAALEDATNDVPMALRATLAEQLERVASFQADMARIEKRLAEEAANDVAVQRYLTVPGVGLLTATALRAGAGELARFNSGRHLAAWIGLVPREHSSGHQRRLGRITKRGDPYLRTLLIHGGRAVLRSALMRQRAGKPLDSLQAWALELAQRQGHNKTAVALANKLARRLWALDHYGTAFNPNHISRRPA

SEQ ID NO: 163167 - protein, 443 aa, unidentified
MVTDLKTHGHAFAAYIGLDWADKKHNLTMQTADGRRSRGELKHTPEAIDAWAAELAQRFGGRPVAIALEQARGALVAMLSKYAHLHLFIVDPSRLDHYRKSVSPSGAKSDPVDGDLILDFLRKHPELVRCLAPDTVETRSLQFLTEQRRQLVNQHTSQVQVMQSWLKQVFPQILEWFGDVSTPLVGDLLKRWPELAKLQRARPETLLQFFHDHNCRSAELNQQRLEGIRTAVAATHDAALLKTAHLMIQTCIQMLESLRAAIEKFDGEIAAVYATHPDRFLIESLPGAGSALEPRLLAALGTDRGRFRSAGDMACCFGIAPVTASSGNSRWVHWRWACSKFVRQTFHEWAACTVREDGWARDHYERQRAKGKGHHAAVRSVAYKWIRILYRCWRDRVPYSEQRYLEALRTRGAAKSKPTTNAAEPSPGPLTVQWKNCGGFSKP

SEQ ID NO: 163168 - protein, 356 aa, unidentified
MNKISKLNFEGQQIYVGMDVHKKSWSISILTDRFEHKTFTQPPEVCTLVNYLKRNFPGASYKSVYEAGYCGFWIHDRLQEHGVQCLVVNPADVPTKDKERTKKTDRVDCRKLARGLRSGDIKGIYVPSRPKVEDRSLIRTRQSMVKKQTRCKNQIKSILHFYGIQIPEELANGNWSKRFINWIEDIRMERASGNFALKVHLEDLNNMRKLIADITRAIRSLANSGEYRQNVRLLKTVPGISTLTAMTLLTELYDISRFKNFDKLCSYVGLIPDTDSSGETERKTGITSRRNAQLRCILIESSWVAVRKDPALLMTFNALSKTMPKTNAIVRIARKLLNRIRYVLKNKQEYVSSTVQ

SEQ ID NO: 163169 - protein, 401 aa, unidentified
MAETQRLFNIFLGIDVSKEKFDVCCINNKGEKLFRSSLSMEKEGFDELSRKLSSLSVSKESILIGMESTACYHINLFSFLTYLGYTVVIINPLLISQFVKLQLRKTKTDKKDALVIAQFLALNRESLTKGSVSSDIADLRDLSRQRESLVHQMNAVKHDIKRVLTITFPELERTAGIFSQSMLRLLQHYPSAHAIRKAKHKKIAKVLIQGSYGKQDDESVKRIREAAETSIGTTSPAKEVILKQKASLLMQMEEHLEELTDILINQCKAMIRDDVEILKSIKGVGDKTATNFLLELGGDINKFKGHKQVLAMAGIDPTVYQSGKYTGQGKISKRGNRHLRRVIWIMATKVIQFNRIFRLYHSKRMKEGLPYKKAVLATAHKLVRVIFSMLTNKTLFIAKAN

SEQ ID NO: 163170 - protein, 415 aa, unidentified
MALKIVYKICCGIDVHKTFVVACIASTNDKGITSYESHRFSTYTSGLKTLLQWLLDRDCKDVCMESTGKYWIPVYNILESDCSIVLAHPKYVKAIRGKKTDKKDAKWIADLFKHDLVAGSFMPPADIRQLRDLMRYRFKLTCFKSSEKNRLQNCLTVSNIQLGNVVSDTFGKSAQAILDKILENPEDTSFDLEPLVFKSLKKKLPELRDAIDGYITPEQAGKLKVIKAHYENLESRKAELEELILALAAPYQQELTILQTAPGISSPFTAIGIISEIGTNMEAFPSAKHLCSWAGLTPTNNESAGKKKSVRVSKAGCYIKPLLVQCANAVVKSTKHPEMRNRYLRLKKRRGHKKAIIAIARMLLTALYHMLKNGENYNAELYQKSDLLPVDREITVEQALMIARNQGYKIKSATA

SEQ ID NO: 163171 - protein, 350 aa, unidentified
MVLIQNVGIDASMKELQVCFMALESGQVQKIKGTRTFSNSPKGFTALVNWALKKSCQTAVRFTMEATGVYYESLAYFLHQRGYYVSVVLPNQSKAFIDSLNLKSKTDKLEAKALAQMGVERQLPQWEPISEQMYQIKRHCRERVMLLEEKTMIANRLHAEEHCAQPNKIVIKRMKQRLKLLEKQVAQVEAELHQLVARDQELAERITNIEQIKGLSFITVITIIAETNGFALFKNRAQLTSFAGYDIVERQSGSSVKGRTRISKKGNRYIRRALHLPSLSVIRYNENFQQLYERVYERTRIKMKGIVAVQRKLLILIYTLFKKNQTYDPAFIQRNTQQSSRQDTVPAYAG

SEQ ID NO: 163172 - protein, 349 aa, unidentified
MVVYYIGADVHSNNTELAVERQGKIVQRYSVPTTVQAIRQVLEKLDGPKHLVMEEGPLAGWLYRNLVEHVDTLVVSDPRRNKWIASDGDKDDRIDAAKLAALRRGNYLRPVHHTREEPLVRLKRWVRLYEDRVREATRTINKLRACAREYGERVPRRALPETAAREQWLAALACGDLAAQLRLLFRGYDVIRQQVHQARAALARQASRFDVVGRWQAVPGMGLIRSVTLLAYLDTPWRFKKKTKLWKYCGVGLQRTSSGQDRYGREHPAQLELGWPVNKRIKNVVIGAALSAIYSEDNGFRRAYERMVADGTLASNARHAVARKLLLVLWGMWKSHQGFDAGFWEPPET

SEQ ID NO: 163173 - protein, 400 aa, unidentified
MRCTDHPAHPRAAVREEDNSLFVALELSKSVWLIAASAPGSEKISKYRVAAADVAALVALLARLKAQAERNRGEPVKIVSIHEAGLDGFWVHRMLETNDVESHVVDAASIAVDRRSRRVKTDRIDAEKLLRTLMAWARGERRICSMVRPPSPADEDERRLTRERGTLVTERTRHVNRIKGLLATQGVFGFEPLHKNRRQRLEELQQWNCQPLPPRLKTELIRELDRLELVMSQLATLEAERDRALQARRTVARNTAKAPSSRSVSAGQVGSQLLRLRSIGPEIASVLSLEAFYRNFNNRREVAAYSGLTPSPWKSGGIDVEQGISKAGNARLRTTMIQLAWLWLRHQPGSALSRWFQERVGDKRGKIKRIAIVAVARKLLVALWRYVTQGVVPEGAELKA

SEQ ID NO: 163174 - protein, 422 aa, unidentified
MLEETQETEEIIQRVAALDIGKAELTCCVRVPSPGKHGRRAQEVRTYQTMTRWLLVMADRLRELGVTRVVMEATSDYWKGVFYLLEAHGFETWLVNARDVKHLPGRPKTDTLDAVWLCKVAERQMLRPSFVPPRPIRQLRDVTRYRVDLVAARTAEKQRVEKLLEDAQIKLSVVASDIFGVSGRAMLAALLAGERDPKRLAQLARARMRAKLSLLAEAFTGFFTDHHAFLLARMLDRIDALSADIAALDARIGALIGPFAQTVDRLDEIPGIGQTAAHLLIAEIGVDMTRFPTAGHLVSWAKFAPGVKESAGKRKGTATTGHGNRYLARVLGEAAVAAGRTDTFLGERYRRIARRRGANKAIVAVGRSILVIVWHLLADPNARFCDLGAGFYDTRVNADRAKRNHVRQLEALGYTVTLEPAA

SEQ ID NO: 163175 - protein, 427 aa, unidentified
MNRSNNDQTQNNYAAFIAIDWADQKHVFSLQVAGQTKKETGTLEQKPEVIGPWVATLRERFGGQPIAVAVEQSRGALIHALLTYDFIVIYPIHPTTVARFREAFKSSGAKNDPLDTDQIMQILTKHLELLKPLSPDTEQTRLLARLVEDRRKAVDLRTSHDQAALASLKEYFPQAIELCSGNLTSRLACDLLKKWPTMEAFQQAKASTIKRFFYGHNIRSPEVIEKALRLAATAKVLTTDSAIVESGSRLSLMHLQIIQTLNPIIDHYERRIEKVFHDHPEAHLFSHLPGAGPALAPRLLAFFGTDRSRYEAAENIQSFSGIAPVTKSSGKSKVVYFRRACPKFDRQTFHEFARLSLSRCQWAHNYVDYYTAKGKKFQTIIRALAFKWIRILFRCWKNRTPYDESKYMETLKKRGSIFATFHLEQKP

SEQ ID NO: 163176 - protein, 433 aa, unidentified
MRVKYEDRQKQKLIAITTDTLVVGVDIAKNYQWARFVDFRGIEHDRALKFKNSRGGFETILARIRDICKEGNFAKTVVGMEPTGHYWKAFANWLEKQEGIKVVLVNPYATKQAKELDDNSQTKSDKKDALTIAKLVKDGRYFELYLPHDIYAELRGLSTTRTGLNKRKNALKNTITAVMDEFFPEYAEVFKHPLSGKASRHILKTCPFPKFIIELGGDGVTAEIKKAVKKTVGRRKAEQLVETARASIGVDYGEEAARLKLRLMLEELELLEKQKEELEGQMAAALEKTDYAGFLLSIKGIGVVTLAACLGELGDPTRFDNPRQMSRMAGYNLVEDSSGKNRSGTKISKRGRKNLRSVLYQMALTMVATNDEMKQLYRYLKTREKDPLRKMQALIVISKKILTLVHTLARKKENYDPDKVFGYVRREQLTGAA

SEQ ID NO: 163177 - protein, 391 aa, unidentified
MVCVGIDVAKDKHDCCILDSDGTVRADCFTIPNNMDGFKQLLQTIRDCTKKSDKIKVGLEATGHYSYNILGFLLDNGLPTYVINPLHTNLYRKSLSLRKTKTDRVDARTIATMLLSDVDLKSYTDIAYHNEELKSLTRYRFDKVQECAKLKQSVSRLATILFPELEQLVSSIHGTSIYALLGEYPGAKQISEVHLTKLTNLLTTASKGRYGKEKAIQIREAARASIGSVMPAKSLELKHTIKLIQELASEINEIEDSIQKIIDELNPPILSIPGMGVNSAAVILAEIGDFSNFSSPDKILAYAGCSPSTYQSGKLTNCYAHMEKRGSRYLRHALYNATKYVCYWNPVFAEYLAKKRAEGKHYNVALSHAMKKLVRLIYALQKSGKTYLTAA

SEQ ID NO: 163178 - protein, 456 aa, unidentified
MPIIRSNAIRIKRFRELKETLRTNRDRLLVGIDIAKAQDVAQVRLAHTQLVDKTLTIPNTQAGFAAFWAHLQRRQQETGVAELVCAVEPTGTYHDALARFLESHGADVVLVSNHVAHHNRRTLDGTWGKSDPKDAHNLCDLLERGHVLFYSLPDEPIATLRRLVRLLRRARTELGACKARFRNTLLPALGPAGEPLPAAVVVALPAPLQVLLPPAQRRALPEVGADLPPALAFELTDLAARLVSVRTRIAQIEAELVHVATPLPAYRLLLSLPGVGSTLAAILLAEIGDIAWYTKFSQLRKLAGLDILRVESGQWAGTARISRGGRALLRWALYQAALGAARTPVWRARREAMLAKRHGDRFAFFKANIELAAKLLRLAWGVWRSGRPYDPNHWSGGPAARPATAPRRARGGRRGAPADTGRAEMAQSRQDGTGRMAVRGGVDRQERPSLRCRRSA

SEQ ID NO: 163179 - protein, 345 aa, unidentified
MTTLDVARPVTGGVDTHLDVHVAAALDPIGGLLGVAQFPTDVEGNEALLAWLQGFGQVSLVGVEGTGSYGAGLARFLRSASVRVVEVDRPNRQARHRRGKSDTEDAIEAARAALSGRAQGAGKTRDGNVEAIRVLLVAKRSARSSKIKALNQIRHLGFTAPEPLRVRLAGVRRQRLGELAASLRSRTGSDPVTYATKTALSVLGHRILELDSERARLDALLKELVTATAPGLLSLYGVGVDTAAALLVAAGDNPERITTEAAWAHLCGVAPISASSGKVTRLRLNRGGDRQANAALYEIVVTRMGHDPNTKAYVERRLKEGRSKKEIIRVLKRYVAREVYKHLPR

SEQ ID NO: 163180 - protein, 347 aa, unidentified
MRFYSKQHNYYCGIDLHTNKMYLCILDQEGEVVLHRNIKTKPDLFLRAIKPYRDDIVVCAECMFTWYWLADLCVDQEIPFVLGHALYMRAIHGGKSKNDKIDSRKIAGLLRGGLLPMAYVYPRKMRATRDLMRRRNHLMRKRAELLAHIQNTASQYNLDPPGSISKARNRKGLLNIFDDHPEVMLSVAANLDMIDTYDKVLSRLEIEIVRCAKGHDATSYALLKTIPGVGKILALILLYEIENIARFPRVQNFSSYCRLVKCAKESNGKKYGTSGKKIGNAHLRWAFSEAAQLFVRGSGAANQYYRKISNKHGKGKALSILAHKLGRAVYFMLKNRQGFDLNKFLAA

SEQ ID NO: 163181 - protein, 419 aa, unidentified
MFKIFRKNCCGLDVHKTWIYACIGITDANSRTEYFQARFSAFSKGLQELSHWLDKYNCKQVCMESAGKFWIPVFNILEKTCLVTLAHPKYTKPQKGNKTDRKDAKWICDLFMCDMIKPSFIPPPAIRHLRDLVRYRGKLTNMLTGEKNRAQNCLTVSNLKLDDVFADVFGKSARSITEYILAHPGEPFDVAQFVDRRCKSPLSEIQAAVDGAVSPEQAVKLRQCLDHIDQLRLLRQRLEQEILRICEPFADILQLLRTVPGLGNDPMTAIAVLSEIGGDMSVFPTAKNLCSWAGCCPRNDQSGAKVKSSRISRAGSYLKPLLVQVANALIHSRKHPEFAERYRRIKARRGHKKAIIAVCKMLLTAIWNILSKLVPYTPVGFLATPHAAAPSRTLTISQGLSLLRHRGYILVDDPALPVP

SEQ ID NO: 163182 - protein, 341 aa, unidentified
MDHYAGIDVSMEYSSVCVVDGTGKIVREGKVASEVGALIGWFGSLGLNLVRIGLEAGPLSQWLFAGMRDGGLAVELLETRHVRNAFKTMPVKTDRKDARGIAELMRLGWFRPVHCKSMEAQETRAILTARKQMQSKLHDVEMSLRGILRGFGLKVGKTTPKTFEGRIRELVAGHPTLETVAGGMLSARTALLLAFNGFEKRVRIMARQDARARLLMSIPSVGPIIALTFAAAIDDPARFKSSKSVGAHFGMTPKKYQSGETDYSGRISKAGDASVRTSLYEAAHVMLTRPVKGSALKSWAMRLARRAGMQKAKVALARRLAVIMHRMLVEGKPFNLAAAAA

SEQ ID NO: 163183 - protein, 343 aa, unidentified
MSNVTLIGIDLAKSIFQVCGVDEQLKPVFNRQVRRAQLTRFVERYPGVPICMEACSGSNYWGRQFMAQGHDVTLIPPQHVKPFVKGNKNDAKDALAICEASRRPNMRTVEPRSLEQTDCVMSHRVRERRMQQRIQVTNQIRGVLNEYGLVFRQGPSALRTGLEGALEDVHNALSPQARELLDDLLNEWLMLDAQIKRCDQRIREHGKHNSVIQRLQTIHGVGELISSAAWAVLGTGGTFHSGRCFAANLGLVPREHSSGGKQRLGAITKRGDRYLRKLLVQASQNVLRYAANHPQDRLSVWAAQVAQRRGHHKAVVAVANKLARIIWAVVEHGQPYRPAGLPA

SEQ ID NO: 163184 - protein, 362 aa, unidentified
MGKIQIVEGRAQLPVKRPPVGTEVNIAADVASTKWVYGVRWEGEERYRFSTPSGLEHLRALLERFEGCPIRFAYEACGFGYEPAWMLQERDVEVTVIAPSRMERAPGLQVKTDRNDVGKMVRKLELRDLKGIYIPSRSQHERRQLVRTYGQVLKERKRAQTRIRSLFQEHGRRGPAPSLGWAPYALWLQEQQLAEPVKQCVEALLALRTMADMQVKRLRGQLLLLARHQDYRSIVKALCEHPGVGPLSAIRLVLELMDIDRFRTADSIAHYLGLTPSEHSTGLSVERGAILKQGPGALRAAMLQCGWASVRSSGDSELREMFKRLLPRTGKKRAIVAVTRRLVTRLRAKWRQALQEKSSPAS

SEQ ID NO: 163185 - protein, 417 aa, unidentified
MQYAPVKLADQPANGLTCGIDWARDDHAVTVIDSGARVVYRGVVEHSAKGLKDLIAVLTRTGVEEVAIERPDGPVVEALLDAGLTVVVVNPNQIKNLRSRYGSAGNKDDRFDAFVLADTLRTDRARLRPLIPDSNATTALRALCRARKDLVIHRVGVANQLRAHLNRVYPGPVGLFDALDSQISLTFLTRFDCQDRADWLTPKRLGTWLASVGYKGHTDPAVLHARLCARPRGFTGIDGAAYVGITTALVKTLTNLVSQIAELSTQIRQQFAAHADACIFTSLPRSGTVRAARLLAEIGDCRGRFPTPDALACLAGVAPSTRQSGKVRSVGFRWACDRQLRDAVCDFANDSRHANSWAADLYNRARSRGHDHPHATRVLARAWVHIIWCCWQTNTPYDPARHRALQTLLAQQTTAST

SEQ ID NO: 163186 - protein, 352 aa, unidentified
MKILALDLGKSKTAVCMYDTATSAPRFTTVKTAPFVLWDLLEREKPQRVVLEVGTPAGWVHDLAVRQGCTVQVANPNHEGWRWRNVKRKTDRLDALKLARLSAADQLPTVYIPCKSVREHRALIRYRTQLVQRRSRIKNTIRSLIYRQGLPMPSGTKAWAQKELAVLRGLSRPWEQVDGEELWRGQLGEELEALGHLDTQLRRVEQTLDQLGRRDERIRRLQTIPCMGPRTAELIVAVVDDPHRFGSGKEVGSYAGLVPRQYQSGAMNRQGTISKQGHRQLRRMLVEVSWLALRYNAPLRRHYERLCRGSKSRRKIAIVAVARKLLTIAWAMLRDGTVWRTTQEDQPAVCGT

SEQ ID NO: 163187 - protein, 319 aa, unidentified
MPRTPVGVDIAKHKFDVAILLDNQKYKTKKFANTPSGCREFAAWLSRFGDCHVCMEATGSYSTELATYLADNNYHVSLMNPACIHSFGNTELARNKTDKSDAAMIARYCALHQPAPWFPAPLSERQLTALVRHLKNLEEMRQMEENRLEVAEAVIVPSLNEHIATLDELIRETKKKISQHIDDNPDLKRDSELLKSIPGVGEMLSSSLLAFAGNLRRFTSSKALVAYAGLNPQRCESGMFKGKSRLSKVGHGELRSALYMPAVVAGQYNVVVKDLTERLKLRGKSGKERVCAAMRKLLQLAYGVVKSGKTFNAEIPLAG

SEQ ID NO: 163188 - protein, 376 aa, unidentified
MERGSLMLNTTTFVGLDVHARSIKAVALDAMTGEVRSATFGYDAAEVAGWVSSVDPSAKCVYESGVTGFDLQKRLAALGVDCVVGAVSKMIKPSADRKRKNDRNDAEFLARMLSVGNVVEVWVPDDGCEAARDLVRALDDAREDLKRCKQRLSKFLMRHGYAFSETTPTGRRKGNWTAAHWAWIRSIEFPEKADDDVLAYYIDATRQAMEDKKRLEKLVEAEASKPRWKKRVDSLRCLKGVDAMTAADIVFEAGEFSRFKNARSFAAWLGLTPSEHSSGESVRQGGITKAGNKHLRRVLVEAAWHYISASPHPKDLAKGQAPDPAARRHAAKGIRRLVKRREEMLGRGVHKNKANVATARELACWCWAIGRMVENG

SEQ ID NO: 163189 - protein, 272 aa, unidentified
MTFRPHALHLKAELFVKSSRVHVRDDGFTRCNFHLKFFIMVYRGIDISKSSFVAAYPSTNGNPTKTFPNTTAGMRELIGTLAVAEHHYVMEATGNYGFLLLYLLHQNGIAVSFAPPQKKKQIKHFSRMMMPVTKTDEKDAYMIAMYGEKMNPPIYKMPSQATIRILTTEGFTYFDNAKQLSRFIGICPTYQQSRTSVNIREHINRNDDERLRSLLYIAFWTALRYNSRECYIRLKANEKPFKVALIAVTNKLVRPVLTITTINSIYRWICPG

SEQ ID NO: 163190 - protein, 343 aa, unidentified
MAIVILGIDLGKNICSLVGVGEDGSVILRRRMRRQTVLTFAAKLPSCVVAMEACCGAHHLGRLLTAQGHTVKLMSPEYVRPYVKAQKNDDRDAEGIAEAASRPTMRFVDLKSQEQLDLQSLHRVRSRLVGVRRTLLNQLRAILLERGHIFPQGRRKFEAAIDTLVADPACEISSRIRQLVIDIRSEWQALDSRIEALNGEFVAIARHDDTARRLVTIPGVGVLNATALVAAVGDGAAFRRGRDLGAWLGLVPKQHTTGGKPKLLGISKRGNKYLRMLFIHGARAAMPSLSASQSPLGEWLRGLLARTHRNIAIVALANKLARIAWATLRRKTSFDLRHLAVAG

SEQ ID NO: 163191 - protein, 382 aa, unidentified
MTGTEPHAWGTGLMDDITFVGLDVHKARVCIAVAEGGRGGEVRQLGVFENRSEIVSMAAAQLSNGGRRLSFCYEAGPCGYGLHRLLTGYGHECVVVAPSLIPMKAGDRVKTDRRDALMLAKLHRAGELTAIWIPDAAHEAMRDLVRARATSVRVLAKARQHLQGFLLRHERIYCGARAWTLAYRRWLTTVRFEHPAQQIVLQDYIHAVQEAETRRDRLTQQIEELLPNWSMAPVVAALQSMRGVALVVAVTVVAEVGDFRRFANPRQLMAYLGLVPSEHSSGSSVRRGGITKAGNALARRVLIEGAWTYRMSARVSRKLHDRLEGLPAAVRDIAWKAQLRLCARYRRLAATGGPKVVVTTAIAREMVGFIWAIARLAQPAPV

SEQ ID NO: 163192 - protein, 316 aa, unidentified
MENPQPFVGIDVSSQRLDVDTLPASQRSSEPNTEAGIASLVLRLQALNPKIVLLEATGGYEIPVAYALYEAGLPVVIMNPKAVRHFAKALGKLAKTDKLDAQILALYAQRIQPQVRPLKDQEQLELANLMTRRRQLQGMIGMEENRRRTCTPKVRGNIDQHLAYLRQLLKELDREIHDSIRRTPLWHENSEILQSFTGVGPKVSASLIADMPELGTLSGAKASSLAGLAPINRDSGQYRGQRKIQGGRPAVRRALYMAALVASRYNPVIREFYQRLRLAGKPPKVALTACMRKLLVILNAMLKNRTYWNPQLPLAA

SEQ ID NO: 163193 - protein, 411 aa, unidentified
MDLVYPRCAGIDVHKRTAVTTIGWVDEQGQRRRKTRTFGTMTAEIEQLAAWLVEHRVTHVAMESTGVYWRPVFNLLEPHVEVVLANAAHVKAVPGRKTDVRDSEWLLDLMQHGLIRGGFIPEAPIRALRELTRYRTGVIEERTRALNRIQKVLEDTNIKLASVVSDILGVSGRAMLEALIGGETDPEVLAGLARGTLRKKHDALVQALQGRILDHHRFLLRTLLAHVDQLTASIAELNAEIARRLEPYAAAFDLLCTIPGIKRRVAEVVLAEIGTDLGRFADARHLCSWAAICPGNHESAGKRRSGRMRHGNRWLRGILVQAAWAAIKVRGSSFGARFRRIARRRGDKRAAIAVAHSLLTVAYHVLTRDEPYRELGGEYFDRRKPEHQARYYARRLAELGFDVTLDPVTAA

SEQ ID NO: 163194 - protein, 425 aa, unidentified
MKQEAQKQEEFGAYIGLDWADRTHVISLRGSDSNKVERYELAHKPEILAAWVSGLQRRFPGQRVAVALEQARGAVVHALMGYDFLVLYPVNPKTLAKYREAFSPSGAKDDPTDADLLLELVTLHRAKLRPWLPDDEQTRTITLLVEYRRDLVDTQTRLTNQLTSLLKLYYPQALAWAGELTTVQACDFLQRWPTLAKVQQAAPAKLRQFYLAHGCRKADVIERRLQEIKLAQPLTRDGAVLSASLAMVQATISQLRPVLAAIPQMEKQIAELFSQHADHDLFSSFPGAGPVLAPRLLAAFGTDRGRFATATEVQQLSGIAPVMERSGKTCWVHRRWACPKFMRQSFHEFAGQSILRSAWARAFYDQQRQRGKGHHAALRSLAYRWIRIIHRCWQMRVPYCEETYCRALERRQSPLARVLSAQTQN

SEQ ID NO: 163195 - protein, 345 aa, unidentified
MELHTIGIDLGKTVFHLVGLNLGGEVVVRKKFSRTQLLRFTANVHVGLIGMEACGGSHFLGRALREQRHEVRLIPAQYVKPYVKTNKSDYIDAEAIAEAVARPTMRFVPIKTDDQLDMQSLHRVRERWVMRRTAVINQIRGLLLERGITLRKGRHHVHAALPLILEDADAKLSGAVRMLLAQLKLDLDQLAARIDEADAVIRKTAHENEACRRLVAIPGIGPVTATALIAAIGNGGAFHKGREFAAWIGLVPREHSTGGQQKLLGISKRGNSYLRRLFVQGARAVMQQRTKQSSGLSAWLAQLTSRTHRNVAAVALANKLARIAWAVLAKNEPYRPPVLADVAAA

SEQ ID NO: 163196 - protein, 324 aa, unidentified
MDRQGHILWRKKLNRSQLKTFVINTPPTIVAVEACPGSQYWGKLFNDAGFSVKIIPAQFVKPYLKSNKNDFNDAAAIAEAGSRGTMRCVSLKTHEQLALQATHRVRQRFIVERTATVNQMRALLLEYGITVPVGRKVFERNLPSILEDAENGLPDFIRALVFRLRERWQHLDVQIDEMSEQLQQASNASEKCQLISSVPGIGPIVATGLIAAIGSGTQFKRGRDMSAWLGLVPRQYSTGGKSNLGGISKRGNVYLRRQVIQGAKALKIHMKRDKSALGQWIAKLEATHHHHVVLIALANKIMRICWKVLTSGQEYQPYPASATK

SEQ ID NO: 163197 - protein, 341 aa, unidentified
MNHYVGIDVSLEASSLCVVDANGKIVREGKVASEPDALIAWLRGLKLELTRIGLEAGPLSQWLYAAMRQAGLAVELLETRHVHTALETMPVKSDRNDARGIAQLMRLGWFRPVHCKSMAAQETRALLTARKLLQTKLRDLELSLRGILRGFGLKVGPTTPARFEGRIRELVAGHPSLEVIADGLLAARVALRREFDRFEKQVRDAARCDTRARLLMSIPGVGAIVSLTFTAAIDDPARFKSSKLVGAYFGLTPSKYQSGETDIDGRISKIGDAWVRAALYEGAHVILTKPLKGCTTLKSWAMKIARRSGMKKAKVALARKLAVIMHRMLADGTSFRHTAAV

SEQ ID NO: 163198 - protein, 400 aa, unidentified
MDDIDDVGVFLGLDVGKSAHHGHGLTPAGKKVFDKQLPNSEPKLRAVFDKLAAKFGTVLVIVDQPASIGALPLTVARDAGCKVAYLPGLAMRRIADLYPGEAKTDAKDAAVIADAARTMPHTLRSLELTDEITAELTVLVGFDQDLAAVATRTSNRIRGLLTQFHPSLERVLGPRLDHQAVTWLLERYGSPAALRKAGRRRLVEVIRPKAPRMAQRLIDEVFDALDEQTVVVPGTGTLDLVIPSLARSLAAVHEQRRALETQIGQLLETHPLSPVLTSIPGVAVRTAATLLVTVGDGTSFPTAAHLASYAGLAPTTKSSGTSIHGEHAPRGGNRQLKRAMFLSAFAALHDPTSRTYYDRCRARGKTHTQALLRLARQRINVLFAMLRDGTFYQPRTPRLA

SEQ ID NO: 163199 - protein, 347 aa, unidentified
MRFYNRQHRHYCGIDLHVKTMYVCILDAAGQVLVHRNVKSTPEAFLEIVAPYRDDLVVAAECMFTWYWLADLCATEGIAFVLGHALAMKAIHGGKAKNDRIDSHKIASLLRGGLLPQAYVYPAGMRSTRDLIRRRLHLVRKRGELLAHIQNTRAQYNLAAFERRLAYPANRDGVSAHFADPSVRKSIDVDLALIDQYDRLIVDLELTIVREAKRHDADAFHRLRSVPGIGKVLALTILYEIHDVTRFDRVQEFASYARLVKCVKRSGTKTLGTGGAKMGNVHLKWAFSEAAVLFLRHTKDGKKILVGIEKKHGKGKALSILAHKIGRAVFYMLSRGTVFSMEKFLAA

SEQ ID NO: 163200 - protein, 346 aa, unidentified
MRFYQQQHEFYCGVDLHARSMHVCIVDGEGQTKVHKNIEATPDRFLPLIRPYRKGLVVAAECMFAWYWLADLCAAEGIPFVLGHALYMKAIHGGKAKNDRIDSQKIALLVKGGMLPVAYAYPKAMRATRDLLRRRNKLVHTRAEALAHIQNTVSQYNLPPLAKKLTFAANREGVAERFADASVRRMVESDLALIGHVDEQLQSLELYLVRHAKVDDPQAYHLLQTIPGVGKVLALVLLYEMHDAGRFGDQRHFVSYCRLVRPTHESAGKKSAGKGRKIGNAHLRWAFGEAACLMLREVPAAQTYVARLEKRHGKAKAISILAARIARTAWLMLKRKAAFDATQFLK

SEQ ID NO: 163201 - protein, 371 aa, unidentified
MQDFSTYVGLDVHKDTIVVAALLPGHQEPVRWEVPNEAMALRRLARKLRRQGGDQVLCCYEAGVCGYAIQRRLQAEGVRCVVVAPSLIPVKPGQRIKTDARDALKLAQLLRAGLLTEVAPPTSQEEAVRDLCRAREATLGDLNRSKNRLTKMLLRKGIIYREGQKAWTLTHRRWLGRVTFESDTERFIFEDCRLGIDQLEARLQSLENAIEALAQQEPYRQAVGWLCCLRGVKTLTAMTLLSELHGFRRFTSARQLMGYLGLVTSVHASADSMHRGRITKAGNAHVRRVLVEAAWNYMRRPEVSPALRRRRQGQPAWAVALADKALVRLHQRFQALTRRGKPHNKVVVAVARELVGFIWALLYRETMNQAV

SEQ ID NO: 163202 - protein, 344 aa, unidentified
MDHFAGLDVSVKETSVCIVDDAGRIVREVKAASEPEDLLRILSNPAYHFKRIGLEAGPLSQWLFSALAEAGLPAICVETRHMQAVLKAQINKTDRSDARGIAQMMRAGLYRPVHVKTLHSQKLRMLLTHRKLLQSKAIAIENDLRGTLRNFGLKVGMVGTVKFEGRIKELVEDAPDLALLVEPMLVVRRVLREQIGILHRRLLVIVRDDEVCRRLMTIPGVGPVVALTYRATVDVPARFKNSKAVGAVYGLTPSKYQSGEINRSGAISHCGDEMMRVMLYEAAQVMLTRTNKWSWLKAWAMQIARRRGMKKAVVALARRLAVIMHRIWVDGTEFRWTREETAAA

SEQ ID NO: 163203 - protein, 318 aa, unidentified
MRMAQEQVVVGIDVAKEKVDVAIRRGAEGCFANDPQGRRQLLTWLKEQAVGQAVMEASGGYERSWARLLRAAGLEVVIVDPKRVRHFAKSAGRLAKNDPIDARMIAWFGEAFEHRGKPEDAAREELDQLVTARRGLSRLKEKIDNWSEHEQPKAVQKVHQALLKEITRQQDRLEALIADTIEQTESFAQRAEIIQSVPGLAGNSAAALLAFLPELGQVDRQAASALLGVAPFDDDSGKRRGPRHIQGGRRKLRCLLFTPILGAATQHNPVLKDYYRRLLAKGKEHKVALVACMRKLICILNTMLQRGEKWDPDRHVLA

SEQ ID NO: 163204 - protein, 461 aa, unidentified
MRDSDQRKNKADSAKQITGLPVVQHKVAGIDLGSERHWVCAPTLEEGGREVADFGATTCELIRMAKWLNARKIESVAMESTGVYWIAPHEVLEAEGLKVMLVDTRQLARVPGRDKKSDPFDCEWIQRLHGCGLLMGSFRPKEAVCMLRTLVRDKGNLVAEAGDWLRRMQKSLDQMNVRVHRAVSDIDGVTGMAILRAIVDGERDARQLAKLRDGRCHKSEEEIAEQLSGHWREDHLFSLRQALKMYDAIQERISDYEKEILQKLAEMEREECRGQEVPKSNNLQKGRAIRRRGEEPMRQALYRMSGVDLTGIDAIGVETVQVVLSEYGPDLSRFPTEKHFVSHVTLTPHKPTSAGKPVKKKKRNSASTRVAAALRMAASSLRHSESALGAYYRQIARRIGGDVAVFATARKLATIIYRLLRWGQPYVDEGTERYEQRYRENRIKSLTTRAKELGFQLTPTA

SEQ ID NO: 163205 - protein, 348 aa, unidentified
MFIEKIETKDRIINNDNYDYYIAIDWSQNNMAIATLRKDSQKPKIIDLDTDLKDLITYLRSLSGSKILTIEETTSTHYLYVELFDYVDKILICDPYRNKLLSDGPKTDKIDAGKLCMLLKGGFLKEVYHSLDKKYQLRQLVSEYEQLVKFGVRVKNEKSAIYRSMGKSYKKLEVIGDVTLEWIIKQKDQRIELYESQKAEYEKMFANMIRHDKDLKHLKGVNGIGIIGAVKILASVIDAKRFKSEGKYLSYCGLVKHQKMSGGRNYGQKKTRYSRRLKSVYKTGAMSVINSKSPLSEYYNYMLKNGMPEENARHRISRRIAIITYGILKTGTEYDPYKWRNRKEEDRN

SEQ ID NO: 163206 - protein, 458 aa, unidentified
MARPKRTKETFPVLNPHAAGIDVGNEEVFVAIPEDADPNPVRHFPTFTQDLYILADWLKEKGIQTIAMESTGVYWIPLFQILEQRGFKVYLVNARDLNNVPGKTDVADCQWIQYLHACGLLQASFRPEQAVCAVRTLLRHRDGLIRDAASHIQHAQKAMTQMNLRLQNVISDITGKTGLAILDAILAGERNPKVLAELRDRRIRATEDTVIKSLEGDYRPEHIFTLRQALGLYRTYQALISECDAEIERMLSEFDSRGEPPADPSTGGPGKFKSTSGKMAGGNALHFKYSDMNSEVYRLYGTDLTLIPGMGALTLVTLFSEVGRDLSAFKSDKNFCSWLGLCPCNKVTGGKVISSRTNSVASRAARAFRMAANGLWNNRSSLGDYHRRMSARLGKQEAVTATAHKLARIYYHLVQTRQSYDDSKFTRDEEAHRRKREARLRREAGRMGFDLVPQPTVT

SEQ ID NO: 163207 - protein, 383 aa, unidentified
MVQAQTMDNAAHKNLNAIFVSVELSKKTWLITSISPGAGEKLSRHSLPGGDIAGLLARLRQLKQNTRGRTGADYSIITIQEAGFDGFWVHRVLEAEGHESHVVDAASIATSRRRRRVKTDRLDGETLIRALLAFKRGEPRVCSMLCVPTPAEEDRRRIVRERKILMEERIRHSNRIKGLLFSQGITGYDPLRRDRRERLEALRTGDGRALADHMKRQILRELGRLEMLLEQVQEVETERNALLEEEAQSAHEVAMLSKVVGIGPEFAAVLWGEGLFRHFDNRRQVAAYAGLAPTPWQSGSIDREQGIGKSGNARLRFTMVEMAWLWLRHQPASGLSRWFNERVAQNGGRFKKVMITALARKLVVALWKYVNAGVVIDGAIIRP

SEQ ID NO: 163208 - protein, 326 aa, unidentified
MQSFLGVDVSKAKLDLALLLPNGKFKSKVFANDRSGHQALLQWLEVQLPGGLNDLHICMESTGSYHEALACAMHDRGLVVSVVNPLLVKRFAESNGQRNKTDGADAKCLAQFCREKRPERWEAPSVGVRTLQALVARLETLQDMHLAECNRRDVAHDSVIESITVVITELETAIAQVKAQIAKTIDDDPDLKRRAQLLDTIPGLGEKSIPQLLAYIGRPERFKNVKALTAFASLSPLIRQSGTSLDRRRGTHPMGHQELKRALYFPAMVAGRHNPLVATFWNRLKAQGKPGKVIVVACMHKLLAIAYGVLRSGKPFNADHLKPSTA

SEQ ID NO: 163209 - protein, 407 aa, unidentified
MLFVGDDWAEDHHDIELQDEQGRVLARARLPEGIAGITRLHALIGQFAGPDTEPREVAVGIETDRGLWVTALRAAGYTVYAINPRQVSRYRERHCTSGAKSDKADAHTLADMVRTDSHQLRAVAGDSAEAEAIKVAARARQTLIWERTRQLQRLRAALREYFPAALEAFEDLDAPDALELLAKAPDPARAARLTRAQVAAALKRARRRDIAGKTDAILAALRGQQLHQPQPVAGVYAATVSSLTVIIAALNGEITKMEQQVTGCFRRHPDAAIYLSQPGIGEILGARELGEFGDDPDRYASAKARKNYAATSPVTRQSGKKKIVLARFVRNDRLADALHRQAQSALIASPGARGYYDEQRDRGLDHDAALRALSNRLVGILHGCLKTGTVYDEATAWSHRVKISAAA

SEQ ID NO: 163210 - protein, 422 aa, unidentified
MLAKTQDNEEIIERVAALDIGKAELMCCVRVPDEDRPGRRLQEVESYSTMTRPLLSMADRLACLGVTRVVMEATSDYWKPVFYLLEAAGFETWLVNAKDVKHLPGRPKTDKLDCIWLCKVAERQMIRPSFVPPPPFRKLRDLTRYRADLVAARTAEKNRVEKLLEDAQIKLSVVVSDIFGVSGRDMLAALVAGERNPKVLAQLARRTMRKKITVLEEAFTGYFTDHHAFLLGRMLARVDAITADIAALDARIEEQIAPFAAAVRKLDEVTGISLAAAHTIIAEIGLDMARFPTAGHLVSWAKYAPGVKESAGKKKGKNSTGHGNTYLARILGNAAAAAGRTDTFLGERYRRIARRRGATKANVAIGRSILVIIWHLLSDPDARYTDLGSGFYASRIDPERRRRNHIRQLEALGYKVILERAA

SEQ ID NO: 163211 - protein, 430 aa, unidentified
MEEIDEQELHVERIAALDLGKAVLEACVRVPHETKPGRRMQEVRTYLTTTAALLQMADWFRCWGVTRVVMESTSDYWKGAYYLLEAEGFECWLINARDVKNVPGRAKTDKLDVVWQAKVAERGMCRPSLVQPKPIRQLRNLTRYRRSLIRDRSREMQRVEKLLEDAQIKLSAVVSKLFGVTGRAILDALAGGQRDPNVLAQLAKGRLRPKTAQLREALRGFFTDHHGAILAMMLANIDRLSAQITTLDTMVEQAIAPFANQAQQLAQITGSGPLSAQELIAEVGVDMSRFPSAAHLVSWAKFCPQTHESAGKHKNKRRVKGDPWLAATLGNMAASVARTGAGFLGARHRRIARRRGPQKAIVATGNAILVIVYHLLSDPAAQFHDLGGDYFTTRIDTNRRARSLAAALQAVTGQKITIRDGQAVIEAQAA

SEQ ID NO: 163212 - protein, 359 aa, unidentified
MEAQRKALSFKGQNIYIGIDVHLKSWSVTLMSEATQLKRFSQSPDPDALYAHLVRNYPEAEYHSVYEAGFCGFWIHYRLVGLGIHNIVVNPADVPTTTSEKLRKTDAVDSAKLARSLRAGELKGIYVPGSESLETRSLIRLRDSITKDQTRLKNRIKSHLRYLGIEIPEEFSGPGRCWNRCFVVWLKGAETGTAYGRQTLDFLVRQYEALRGQRLEMLRAVRALSRTERFEKPLENLMTVPGIGQLTGMSLLSEIDDIRRFKSADQLAAFIGMIPMCHSSGEREGVGDITVRRSARLRSVLVEASWVAVRQDPALSMAYGNYCKRMAPGKAIIKIARKLVNRIYFVMKRNQPYVKCVVA

SEQ ID NO: 163213 - protein, 399 aa, unidentified
MVNVGVDLHKTQFTVCARRNGEQKFGKFTTQEEGYQEFFAHVSAWQEDGEEVRVAVESTGNTRYFKNRMEDAGLEVKVINTLKMKVVNESVKKTDKHDAATIAEFLEKDMLPEAQLCSRESEQLRRLLKVRTSLVKTQTVLKNQIHALISSEGLEAVKSGALQSKKGRKEVLNALNQCENGLVAQPLLEMLDRLEQNVNSIEKQLRTMVKGDRTVELLMTIPGCGEICSWTIRAYTDDIKRFANPKKYTSFAGLAPWVQNSNETIRHGKITKRGPKELRTALVQVVMGLRRMKAKTFTWHLVKRYDLLKQSKGSGKAIIATARKVAVIIWHMLTREEMFKLERVTDPKLAKKAQNMRKTMGEKVEEPQVEKREKPVKAKCSRKKIKTPGVAREKKKNVG

SEQ ID NO: 163214 - protein, 422 aa, unidentified
MEDLNTINFAALIGIDWADNKHDICELNQQSRKKHLSIISSQPKAINAWASGLKTRYHGQLVAVACELKRGPLVYALSKFDHIVLVPINPATVSNYRKTFTHSGAKDDPTDAAIQVEMLQLHMDKLKPIMPDSTVVRQLAQLVEYRRKLVQSRVSLTNKITAALKNYFPHVLDWFEEKDTVIFCDFVMRWPSLPLVKKARKQTLIDFFNQHNSRYPSVNEKRIANIKKAEALTEDDAVILPNQLLIECLMAQLKQLLNAIERFDLQIKTLYKSHEDRFIFDSLPGAGPQMAPRLLAAMGSNRDRYQSPDEIQKYAGIAPVTERSGKKEWVHWRWSCPKFLRQTFVEWAGQSVRYSFWAKAYYRQQESLGKPHNNIIRALAFKWIRILFRCWKTRTAYNETTYLNALRRRGSPLLKFAVESQY

SEQ ID NO: 163215 - protein, 399 aa, unidentified
MTASPRVVIGVDTQLDSHHLAVITDAGKPLADTEFPTSQTGYDDAVRWAQSFGTIVIAGVEGTSSYGAGLTWVLQAAGIEVAEVSRPDRAARRRQGKSDPLDAYAAARAALAGHGVAVPKDASTGALRALLSARRSAVKAHTAATNQIHALLVTAPAELRDRYRRHNSNALVKALARCRPATHNDATTVAVLTAAKALAQRAEFLAHQKQDLNAHLDVLVRQINPALRTAYGVGADTAAQLLATAGTNPHRLRNQASFAALCGAAPVPASSGKITRHRLSRGGDRAANNTLYRIALVRMSAHPQTRDYVQRQVANGRSKKEILRLLKRAIAREMFRLLTRPAPVDDYRDLRPARQAKHITLATVATHFGVPVITVSRLERGHQRNEALANHYRRWLIAA

SEQ ID NO: 163216 - protein, 395 aa, unidentified
MGEPRFIGIDYHKRYSVYCVIDGHGEMLERGRIEHVDPGAFVALVERWRGCRVVFEASMNWHWLYEILEGEMEAGSIVLANPYKTRIIAEAQVKTDRVDAGILAQLLRGNLISSVHIGSLENRQRKEVLRQRSFFVRQRTMLRNRIHRLLGGQHGLKLPQCSDLFGRKGLSFLDALELPSPAGLLLRQQLDLLRNLQVRIREDEKALESLLEDTPALARVRSLPGMGLILAAVVVSEIDDIARFPSAQKLCGYAGLCPSTSSSGGKTFHGKLMTHCNKWLRWGFVEAAWVAVGCSAYFGDFYKTKRALGKKPNTAILATARRMARITWQLLTQERTYTNLALIQEIQRQPARRHRPPAGSAKEIKGSARSKKAGRPFEKPTFPSRSKHGLVGRQA

SEQ ID NO: 163217 - protein, 356 aa, unidentified
MNTKIKDFSGENVYVGFDVHKRSWQVSIMTDYASYKSFSQPPSVEKLIKYLHTNFSGASYYSAYEAGFCGFWIHRELEKLGVNSIVVNPADIPTTQKDQVQKEDKRDSKKIAKGLRNGDLQGIYVPSEKSVEDRGLVRIRQLLVKDSIRYKARIKGFLHFHGISIPDSFSSSSSHWSKRFISWLKSIEMKSESGRYSLEILIREVESLRMNILETTRQIKTLSETERYASNISLLRSIPGIGLITGMTFLTEIDRIDRFESSDKLCSFIGLVPTMHSSGEKEIHGNITYRSNHLLRRMLIESAWIAIRYDPALMRAYHQYCKRMEANKAIIRIARKLLTRIQFVLTNKKMYEKLTY

SEQ ID NO: 163218 - protein, 355 aa, unidentified
MTTATYLPRDYDIFIGIDVDKKSFAFTVRDHDTMKRSKKVAANPEQFYNYIQNNFNDKRVICAYEAGPTGFHLHDHLKEKEVLCLVTPPTSIPKAPNEKVKTNRIDSNKITEELMAGKLKSVRVPEGPYREIRHLVRIRENYARNRKGTRQRIKALLLSVNLYPLLKDSEIKWSSCYIKELKQIECSFAVRSRLDMLLMDLEYARQQILSTHRTLKTFCNNNLEIKKYMEYLQSIPGIGFITAVSILANIGDPQNLKNPREIGAFVGVVPRENSTGDKINKGAITHLGNQNLRSLLIEASWVAIRKDNELQQFYYRIKRRHHPKIASRVAIVAVARKLTQRIYKVLKEQRKYIKH

SEQ ID NO: 163219 - protein, 366 aa, unidentified
MKKISTVQTFKSEIFKEQKLTIGLDLGDRWSFYCVRDEAGQVILEQKQRTTPEALKQTFGKIPRSLVALETGTHSPWVSRLLTQLGHEVLVAHAQKVQLITKSSRKDDRHDAQTLARLARVDPELLGPVRHRSVQAQIHLTVIRARAELVSARTALVNAARGLVKSYGERLPKCGTQQVSRALAAELSSELRDVLEPLLREIESLNERIKEYDERMEKIAKEVYPQVSLLQQVKGVGTQIALTYVLTIEDPYRFPKSREVGCFLGLRPGRRNSGKSEPQKGISKEGDRYLRTMMVQGAHYILGPFGEDSDLRRWGLKLAERGGKNAKKRAVVAVARKLAILLHRLWVSGEVYEPLRNSQKAMRAVA

SEQ ID NO: 163220 - protein, 341 aa, unidentified
MASQYVAIDLHRRRSVIVRQTPDGEVVDTVRIDNDPVALAHEIAKAGDDPEVVLEATYGWYWAADVLEACGASVHLAHPLGVKAFAYRRVKNDVRDATDLADLLRMGRLPEAWIAPPYLRQLRELVRYRAKLVALRSGLKAQVHAVLAKEGVGVPMTDLFGRDGMNLLREVRLGTCYRMRIDSLLDLIDAFDGEVAWLTSAIAARLRHHPGYTAIQQIPGVGPTFAALFVVEIGDITRFARPARLCSWAGLTPRHHESDTTVIRGHVTKQGSRLVRWAAVEAVQRLPYDRKLRADRDRIAGRRGRAIGKVAAARKLLTLVFYGLRDGHIRCLDAAAAAATA

SEQ ID NO: 163221 - protein, 353 aa, unidentified
MKRPKEKLIAGLDLHSNNVMIGVINQDGKRVAHRKVDCDLKEVMQFLEPFKPQLQSMAVESTFNWYWLVDGLRAQNYCIDLANPAKIEQYSGMKHADDKDDAFHLADLQRLNILPKAHVYNPQLRPVRDLLRRRTNLVHQHTALLLSFSSLHTRTTGKKLDMGDAKKMEPKQAPKLYEHPANQLIAQVQAEHIQALAKSIGRIEKSVLGCAREIPMYEKLVSIPGIGRILGMTITMEVGDIKRFRTDGDFASYCRLVDAKRLSNGKCKGENNVKCGNKYLAWAFVEAANFSRRYDENCRRWYDRKAARTSKVLATKALGCKLAKAAWHVMAGQTSYDENRMFPELANKPVKKN

SEQ ID NO: 163222 - protein, 420 aa, unidentified
MKTIKTKKRTFVNRNFLIVTTDMGKDKHFGYWRCPDGTDVKPFAVENNGAGFWEFWEQISRAQKLYNLDGIIFGYESTGPYAEPLAHFMRARGAELVQVNPFHTKRFKEVTDNSPNKTDQKDPKVIADIIAMGRFLTVVIPEGSAAELRRLSQARERSTRRHTALANQIQCLLASIFPEFLQLMKGVTSASARYLLKHYPTPQEIAAYGLPDLTKKLRKVSRGKLGADRAQALYDGAKSSVGVAEGQASIVMEIHELLSLMEASEQFTERLELEMTTHLAQIPYSNTLLSLKGIGEVTAAGLIGEVGDFRKFHTMGEVMKLAGLDLFEVSSGRHKGQRHISKRGRPLMRKLLYFAALNTVKKDGAMHQWYRSACDRGMPKLKALVAVGRKLLGILFALVRDHSEYAPNYSETRYQLKEAA

SEQ ID NO: 163223 - protein, 344 aa, unidentified
MQTTEAQRGLYCGADLHGNNVVLTLCDEQGTPVMRRRVKAKLAEVTATLNPYRDRIKQVAVESTYNWYWFVDGLREQGWDVRLANPAKMDQYEGIKSTDDDSDAGWIAEQMRLGILPEAYIYPKEQRPIRDVLRRRMFIVRQRTQTLLSLESLFARQGWDCPKVAHLKEWTAKEVQALNPEPLLRLQLEGLLELLRKQDALAHWIEQEVLKVVKPTADFQRVQEVPGIGLTLGMVVVLESGEFSRFANAGHYASYCRAVKSQRRSNQKKKGENNRRNGNAYLGWAFSEAALAAIRYYPRIGAWYERKKRRRNVPVAMKALACKLAKAVWHVMRGEDYNEAMLFG

SEQ ID NO: 163224 - protein, 360 aa, unidentified
MQSENTKDSFKDQLFYVGIDYHKKSWNVTVLGEQYEHKTMSQNPDPDLLAAYLKRNFPGGTYHAVYEAGFSGFKSCRRLNELGVNCVIIHPADVPTSQKEKLQKTDKVDSRKLARTLRSNELEAIHIPDVELESDRALVRQRFRMVKDVSRTKNRVKSLLFQFGISIPECFTVAQTRHWSSLYINWLKELEVNNKSLRQVLDNYIAVGEIQRKELLMINKQLRELALSEGYKNNYSLLQSIPGIGLMMAITFLVQIGNVERFKRLDDLANYIGLVPRMYGSGEKMQTGKMLKRGRKELKIMLIEASWVAIRKDPALMLKFNQLSKRMHKNKAIIRIARKMLSRIRFVLQNQQSYELSIVK

SEQ ID NO: 163225 - protein, 381 aa, unidentified
MTRATRTAEYTGATTLCLYLAFELGSNEWKLGFATEPGATPRVRTMPARDLARLTREIADAQQWFGVQAATPVRSCYEAGRDGFWLHRYLTSSGIANVVVDSSSIEVNRRLRRAKSDALDARKLLGMLLRYHAGERAVWSVVRVPTVEEEDRRQLHRELRTLKQERTRVANRMNGLLATQGLWLPPGTDVGAAAKTVRRWDGSPVPAALRARLEREWEHAQFLRTRILELERERQRAIAHGHGEAIDKVRQLLRLRAVGPTGAWVYVNEFFGGRRFRNRKEVGAAAGLTPTPYQSGDERREQGISKAGSRHIRAVAIETAWCWLRYQPRSRLSRWYQARFGRGGTRARKVGIVALARKLLIELWRFLEFGVVPEGARLKTA

SEQ ID NO: 163226 - protein, 387 aa, unidentified
MKNVYSDVACGGMDVHYKFSQVTFRDKAGRVVRRERLEHASRDRLREQVNRWPAGLPMVLEASFGWGWLSDVLGEAGLEPHLSNCYKLEQMRKARGWVKTNKKDADLLSLLPFETSPWWEVWRAPPQVRDQREQMRFRGDLVALQTMVKNRIHAIFHRHGIFHDFSDLFGGQGRKFLGELCLYNPTDLSPQALLALRGQVKLLDHVRRQLADVERLLHRQWVTTPLVRRLKTIPGIGLVLAHVLAAEIGMIERFGHHKALASYSLLAPRAEDSGEADSASTPWGRHLGTRGNRTLKWAFIEAAHAAVRSGGRWRALFDRVTHGGKKDRNRGYIKVARELVKVVYVVWAKGVDYEPIAPARPGRQKNRKSSRSGTGQLCHPMVPALPA

SEQ ID NO: 163227 - protein, 400 aa, unidentified
MERVLERCCALDVHKRQVTACVRVPDREGRRSELRAEFRTVTSELLALRDWLKGLGVTHVAMEATGVYWKPVYYLLEDDFELWLVNAQHVKNVPGRKTDVQDAQWLCQLLEHGLVRASFVPPKPIRELRDLTRYRKSLVWERAREANRLQKLLEDANIKLGDVASDVLGASGKAMLNAKGKLRAKLPALRLALEGRFSAHHALLVSHLLSHVEYLDETIASLSEEIEERVRPFERQRELLCTIPGVAERTAEVILAEFGPDMERFPSHRHAASWAAICPGHDESAGKRRSGKTRKGDRWLRTALIEAAQSAAGRTKDTYLHSQYLRIKRRRGHSKAIVAVAHSILVAAYYILSEDKPYEELGGDYFIRREDQERLTRRLVRQLERLGQRVTLEPATVEAR

SEQ ID NO: 163228 - protein, 413 aa, unidentified
MDTLKKLSSLVLTIQSQVQAFLEKGKPYRKSFKVSHTLEGLRLLVEFLEEVRYETGQKPPIVLEVTGHYHSSVVQYLEDRGFLLIIINPLISYKAKSSSLRKVKTDTVDAYHLCELFYKEDLEPYKKRGVQLLNLRNLTRQHENITGVLIQTKLQFQAILEQVFPEYRGVFGDLYSVVSLLTLSEYPSSEDILEASVETVADKIAELCKSRSYRWSKEKAIQLKAAADRNPFEKTVYQSHILSLGMYINIILQYKEHLSKLESEIDALAKEVEEYTIIKSIPGIGEKIAATIISEIGEIDRFTDPKKLVAFAGVDPSVFESGKFTATKNRITKRGSSRLRHALYMAVRCAIRDCRKSKTSDEIIPRNKKLREFYDKKREEGIPFKVAVIACVNKLLHWIFALLKNKTTFQDIA

SEQ ID NO: 163229 - protein, 339 aa, unidentified
MNNSVIGLDIAKNIFHMYTFNEEKSKPVKKKLKRAELLAFFANYPVSLIGIEACGGAHHWARELTKQGHEVILLNARYVKSFVVGNKNDFNDAAGIFDAVTRPNKRVVSIKTIEQQDIQLVHKIREGLVGKRTALVNQVRGLLSERGIIIPKGINKVRVELPLILEDAENNLTALSREMFAEQYEKLVALDEEVKNQDRRIGRLSKSHQLSQRFLDVPGIGAITATIVASDIGNGKGYQSSRDYAASLGIVPKQHSSGDKQVYLGISKRGNRYIRTLLIHGARSVLKHCSGKEDKLNLWLQALIERRGFNKAAVALANKNARILWAMASQDKEYDAALV

SEQ ID NO: 163230 - protein, 341 aa, unidentified
MQITTIGLDIAKNVFQVHGIDAAENVVVRKQLRRGQLMKFFEVLAPCLVGMEACATAHHWARELTKLGHEVRLMPAKDVKAYVKRNKNDAADAEAICEAVRRPTMRFVGVKSPEQQGRLMQHRVRDLLMRQRTQLINALRAHLAELGMAAAQGREGVKELLAIVAQDGDSRLPVDAHASLIVLAAQLQAVQTTIGSIEKRVIRQHRSNEESKRLETIPGIGFLGASAIAATVPDPRIFRSGRDFAAWIGLVPRQDSTGGKQKLGPISKQGDRYLRRILVVGACSVLRRARQEPEKYPWLIQLLARRPFKVVAVALANKMARVAWALLAKGGTYRAPRLTAA

SEQ ID NO: 163231 - protein, 379 aa, unidentified
MDHAITDTPAETILHGALELSKNSWLLALQFPDRAQPSLYPISGGDTVGLMAKLTAARDRWAKMSGKAPSIVLCYEAGYDAFWLARFLKARGIECLVVDAASMQVNRRARRAKTDRIDVGMLLRALIAWGQGDRHVWSVVRVPNVDEEDLRRSHRERDRLVRERTAHINRIKGLLFGQGIRGINVKSKYKTLQIDKLVTGDGRPLPPRLASEITREIARLALIQEQIATLERERDQAPTPCKTTEKKRLQLVSLNGIGPAIAAVMTREVYYRQFDNRRQVAGFLGLATCPHDSGDVERSQGISRAGRGQVRGTMIQAAWLWLKHQPKSAITRWFVQRTAGQSGRIRRIMIIAVARKLAIALWRFLEQGLVPQGAMLANR

SEQ ID NO: 163232 - protein, 318 aa, unidentified
MDQPIIGIDVAKATLDAYVHPSGARFPVTNDDEGIKTLLERLKAFPQAAVILEATGGLEFGVAAALTSAGFRVAIVNPRQVRDFARALGRLAKTDPIDAEILALFGDRLRPEPRPIPDSALRSLEAHVARRRQIVDMITAESNRLGQTTDADIKKQIKRHITWLQHELKSVDTDLGDAIRHSPIWRAKDQLIQSAPGVGRVTSFTLLAQFPQLGTLGGKQAASLVGLAPFNVDSGTLRGRRHIWGGRASIRSVLYMATLSAVRYNPVLAEFYQRLLRAGKSKKLAVVACARKLLVILNAMLRDNRPWTPGHLDPQHGC

SEQ ID NO: 163233 - protein, 348 aa, unidentified
MNTMTDQDGLVTVGIDTHGEVHVAAVLDAQGRWLATESFPSTGAGHRSLETWAAGFGPIDAVGVEGTGSWGAGIARHLTAVGVRVVEVDRPDRRTRRRRGKSDPIDAEAAARAVQAGTATGTPKTRTGTIESIRVLRVARRSAMKARSQAGLQLRALVATAPDELRDRLRDLSLDALVDTAARCRPGDPIESVEATRVALRSLARRHQDLTVEIHALDEHLDRLVALVAPNLVALFGVGTDCAGQLLVTAGDNPERLRNEAAFSHLCGASPIPASSGRVTRHRLNRAGDRHANAALYRIVITRLRWHAPTRAYVERRTAEGLSKREIIRCLKRYVVREIYLELTRIST

SEQ ID NO: 163234 - protein, 275 aa, unidentified
MNIKRIGLDLAKQVFQLHAVDHQERVVLRKTLHRARMLTFFTRLEPCLIGIEACGSSHYWARELTRLGHTVRIIPPQFVKPYLKGNKNDANDAEAICEAVSRPGMRYVAIKSEAQQSMQAEHRVRARLIHDRTALSNEIRGMLGEFGFVLPAGLSALRKALPEILSQQEKWDNRFIRLLSELTEELQALDERLNRYDRRLKQLAQEDERIRRLQEISGIGPVTASATVAAVGDAKQFKSGREMAAAGTGAPATFERRKNKMGHISKGATATCERC

SEQ ID NO: 163235 - protein, 385 aa, unidentified
MLKLDRTDAPATDEYATVYVAFELSKAKWKLGVLLPGRGKLSRYTIDGGDLAALSSRLADARAKAGRCGKPVRILSCYEAGFDGHWLHRWLSQQGVINHEIDPSSIEVSRRARRAKTDRIDLEKMMRALLAHLRGEPRALSVVHVPTEEEEDRKRRTRERERLLKERTAHTNRIKGLLHAQGVRDAMPMKRGFIAGLSTLRTGDGRALAPRLKEEIVREHERLCLVNKQLGELEAKSEAELRSAAPGSADAKIMQLIDLRGIGPASSQKLVNEVFYRSFANRRQVGSCFGLTGTPYDSGESQRDQGISKAGNRRARTLAIELAWLWVMHQPDSELTRWFRARVRDLKGRIRRISIVALARKLMVALWRYLTTGVVPTGAVLRPGV

SEQ ID NO: 163236 - protein, 447 aa, unidentified
MEEAVAVRKRELAVLYPNAAGIDIGSAKHYVAVPPERCEQSVREFESFTADLAAMAEWLASCAIDTVVMESTGVYWIPVYELLESRGFTVYLVNARHVKNVSGKKSDVLDCQWLQQLMSFGLLAGAFRPDGKVCALRALVRQRETLIAGQAQQIQRMQKALTQMNVQLVQVISDIAGQTGQDIVRAIVAGERDARKLAQLRNYRVHASEEQIAKSLSGNWREEHLFCLAQALTLFDTHQQLLEQADAQIEAMLGHLQRHAPGAIKPDKNKGRAKHAPRFDVRAALVRWAGVDLTRIGGIDVCTALKVLAELGTDLSKFKSAKHFASWLGLCPGTRITGGKRISGATKRIANRVAQALKLAAHGLHRSHCALGAYYRRMAARLGAGKAITATAHKLARLVYAILTRGEEFIERTQDHYEDQVRSRTIRYLQKKAASLGFKLQPNAVCP

SEQ ID NO: 163237 - protein, 355 aa, unidentified
MKRGYFIGMDVHCKSCNIAVVNSAGDVVHRAVCETAITALLEVLEAVPRPRSLVIEEGPLAGWLCRNLQSAMDEMVVSEPRRNQLITKEGDKDDPLDAGKLAQLHRGGFIKRVHQCQSLEQAEFKQQVAVYHQRVGQRVREGHRLASLFRRHGVMIRERAFVAEADRPALLARLPANAALRETITWLWESYDAAVDHEEKWRRRLVGLAQQVEVVRRFEALPGIAWIRGATLYAYLDTPWRFASKSALWKYLGIGLQRKHSGSGPERLAVPWQTNRLLKSTILGAALSAVAQGENPFADLYRRWIAAGLSAKLARRNVARSLAATLWGLWKNGNVYHPEWVGVVAAAPVAAKESR

SEQ ID NO: 163238 - protein, 343 aa, unidentified
MQSISTIGLDIAKSVFQVHGVDAAGRVVIRRQLRRRHVLAFFQKLPPCLVGIEACASSHHWSRELQALGHTVRLMPPAYVKPYVKRQKNDTTDAEAICEAVTRPNMRFVPTKTVEQQSCLMLHRARHLFIRQQTAVINSIRAYLAEFGIVAPVGRRGVEQLLEVVADTADCRLPEVARACLAALGSQLRALKAQILEFDRRIIAWHRSSATSKRLDAIPGVGPALATALVASVADAKAFRSGRDFSAWVGLVPKQNSSGGKDKLGSISKQGDRYLRSLFTAGALAVIRYAKIHGTGHRPWLTALLARRPTKVAAIALANKLARMAWAMMARNERYKEPAALAA

SEQ ID NO: 163239 - protein, 355 aa, unidentified
MATEPHDEIRVTVGLDTHEDVHVAVALDQLGRCLGELAIPTNTGGFARLVDWASELGVIDKIGVEGTGSYGAGLSRWLRAEGLVVVEVDRPDRKTRRHGKSDTIDAEAAARAVLSGKATAVPKSGDGPVEMIRILRLSRRSAVKNRTMTANQISALITTAPHELRDQMRGLTTRRRVAVAAKFRPGEQPDTVADATRYALRELARRHQHLSEQIDRLDTQLDRLVAATAPDLVAKKGVGTHTAAALLVTAGDNPQRLAREGSFAHLTGSAPLDASSGKQQRHRLNRGGDRDANAALYQIALTRLACDEDTKLYVKRRIAEGKTKKEAFRCLKRYIAREVHKTLVVNPALQLRLDT

SEQ ID NO: 163240 - protein, 343 aa, unidentified
MTKDTMIGVDLAKNVFQLHAASMTGHPKYRKKLPRNNFAAFMAQQPPAIVVMEACGSAHYWAREMIKLGHEVKLIAPQYVKPFVKRQKNDAADAEAIVTAAQRPEMRFVDPKTAEQQSRAILFRARERLVHQRTELVNALRACLYEYGHVVPQGIHNIKRIEGILDVPNSDLPDLMREECKELLVQIAEKTIRINARTGKIKALAAEADAARRLQTIPGVGPLTALAVEAFAPAMESFKCGRDFAAWLGLVPRQFSSGGKERLGRISKAGQADIRRLLIIGAMSRLNWLGRKSIPEDSWLARLAARKPRMLVAIALANKMARTIWALMTKGEDYRDSAQAAVA

SEQ ID NO: 163241 - protein, 352 aa, unidentified
MFAIVAERYQYVVGVDTHAQKHVATIVNSRGVVLASREIRVTGPQMNSFLTWIRKVTDNAEAVLLAIEGTSSYGETLTKLALASGFVVAEVKPPKTKSRGGDGKTDRIDAELAALSVLRLPVSKLIIPRDGTMRKSLRILLTARRGMVMRRTAEKQTLIALLRGCDLGIDARKALTPKQYTEIAKWETGVGDDQEQAIARFEAKRLATGIVESGLVLEQNEIQLAALVRAMAPELLDAPGLGPVTAAQILCSYSHKGRVRSAAAFAALAGTTPIPASSGNVTRHRLNRFGDRALNGAIHTIALSRMQHDDTTKAYVTKRTSQGQSTREIRRSLKRYIARRLYKQLEVYNIGC

SEQ ID NO: 163242 - protein, 316 aa, unidentified
MTEAGGFVGIDVAKAELEVVVRPSGARWTVTNNASGLAQLQERLQAAAPSLIVLEATGGYEVAVVAALATAALPVVVLNARQVRDFARATGRLAKTDAIDAGVLAHVAEVVRPPVRPLPDAMTQDLQAWLTRRRQLVDMLLAEEQRRSRAPRAIQRQIDQHVRWLRAQLGAVEKDVAQTLRESPVWREKEDLLRSVPGVGPILTTTLLGDVPELGQLNRKQIAALIGVAPLNRDSGTYRGRRAVWGGRARVRATLYMATLTAARYNPLIRAFYERLVAAGKPKKVALTACMRKLLTILNAMIARRTAWKPPAAVTA

SEQ ID NO: 163243 - protein, 384 aa, unidentified
MKKDSIAKLQVTKSQIRRMGTKQRLTVGLDLGDRSSRYCILNEAGEKASEDQLPTTKAGLDSLFAKMAPCRIALEVGTHSPWVSRHLGGLGHEVIVANPRKVKLITESLKKNDRMDAEQLARLARVDPQLLAPIRHRGPEAQGDLAVIRARAELVDCRTALINTVRGLAKPMGERLKSCDADYVKESLADGLNEATQNAIRPLLKSVEEITKQIGVYDKKIQEIEKRYPETKLLKQVNGVGTLIALTFILTLEDAERFEHSRDVGPYLGLTRKQRDSGDSQPELGISKAGDVLLRRLLVQAAHCILRDGAPDSDLKAWGLTKVQAGAKTGSGKKGSKRRKKKAAVAVARKLAVLLHKLWVTGEVYDPQYNRKAVEAAKGKAKAA

SEQ ID NO: 163244 - protein, 428 aa, unidentified
MDEVNRNRLKEFRQLRQEIRHSEEYLIVGIDIAKDRHHAFFGTATGKTLLRRFVFSNDYEGFRKLLDQAEALRVPHGLKKVVYGMEPTANYHKPLGEYLITLGRTVVLVSGVTVKRNRESLDGRWDKHDVKDSANVADLISQGKCLYYEYPSAELRGLRGLLSLKRRLKKQEHGYKVRIRNHLIAQYFPEMDRDYERLGAAGLSIVRWCFPASQITELDMDSFIQRVTSRRIRMETRRRLEGVWEKAGASIGCDAVPGLEHEAKVMVEGLRQIREVIKETEDKIQELCEQFAEYHCVLTIPGFGPDVSAKVLGAIGDPDRFQNGKQVLKMGGLDLSADRSGKDSDKAIPEISKRGKADLRYALYQAALIASVQNRDVMSYYTNKLRGREREKGIQNKMRVKLAAKLLVIAWTLMKKKEKFDPTYLNIG

SEQ ID NO: 163245 - protein, 339 aa, unidentified
MKLYTGLDLHSSNTYLGIIDETGKRVYKQKLPNDHERILAALNPYKNDIADVAVESTYNWYWLVDLLMGEGYHVHLANPAAIKKYTGLKFADDQHDAFWLAEMLRLGILPEGYIYPKEDRPVRDLLRKRMHLVRLRTSLIVSLQNILSRNNGFKLKTSDVKALTENRVAPYLAGSEDLALAGLVSKESIDFLTRQIKKIEAVIEDKVELKPSYEKLQSVFGIGKILALTIMLETGPISRFAKVGNYVSYCRKVSSRWLSNDKVKGKGNKKSGNKYLAWAYSEAAEHARRSYTQARTYYNRKMQKTNFMAAHNALAHKLARAAYYVMRDEVIFMPEKIFG

SEQ ID NO: 163246 - protein, 412 aa, unidentified
MEVYCGIDWAEDHHDIALVDRDGQLLARRRISDEAAGLAALLDLLAEHGDTPDDPVPVAIETPRGLLTACLRATGRPVYPINPMAVARYRDRHSVAGKKSDHGDAVVLAGVLRTDRHAHRPLPADSELAQAIAVLARAQQDAVWDRTTAHNTLRSHLREYYPGFLAAFAPVKGGIMRAEARTILAAAPTPADAARLTVTQLRALLKKAGRSRGLDTDAARLREAFRVPQMRQLPLVEQAMGQQATALLRQLDAACAAAADLERAATESFNLHPDAGIITSFPGLGPLTGARVLAEIGDDRSRFQDAKGLKAYAGAAPITRASGKAKSVTYRRVKNNRLNAAGYSWAFSALTASPGARGHYDRRRDDGDRHAAAQRHLFGRLLGCLWHCLITGQDYDETTAFPAATKKISQAA

SEQ ID NO: 163247 - protein, 427 aa, unidentified
MNSCGVAAWVGLDWADQQHVICLYEVQSGQCEITRLEQKPEAFQSWLSQLRQRFGGAKVAVVLEQARGAVIYALLGLDFVVLYPVNPQALAHYRKAYAPSGAKSDPVDAVLLMEMVRNRPGCFRAWKADDAETRSLQLLTENRRQLVNQKTAFTNQLTSLLKSYYPQALELAGDLGSLQACDFLKRWPTLEALQQAQPSQIRKLYLDYGRPRPEQLEQRLEQIRRARALTEDAAAVLSGSMMVQALTEQIRSLIATLERFDQRIAALFRKHPDRPLFECLPGAGAALAPRLLAAFGADRDRFQSAQEIQQLSGIAPVTEQSGKQHWVHWRWACSKFLRQSFHEFADHSRKWCRWAQALYQQLRRRGQGHHAAVRVLAFKWIRILFHCWKTRTCYEESIYLKSLEKRNPSLWTEIQALPPRVRKPKAA

SEQ ID NO: 163248 - protein, 337 aa, unidentified
MEFKRIAVDTSKSVFTLHGVDERGRPILRQDLTRARFETFLGKTPPTEVVLEACGSSHHWGRVAQELGHTVRLIPPQYVKPFVKRGKNNRNDAEAIGEAASRPTMRFVPVKPAETQAEAMDLSARDLLVRQRTQLVNAVRGHAAEFGVIAAKGIAQVEPLLRKIADSDMPQAAKETLAQLGRVIAQLDSQLAEIGQRLVAQHKANPVSQRLAAIPGVGPLTALTVAMKVDAGQFESARHFAAWLGLTPKERSTGSRQSLGGISRAGNERLRQLLVVGAMAVIRHAKPGSKTASPWLLQLLERRPRKVAAVALANKMARILWAMMANGTAYRRMPQAA

SEQ ID NO: 163249 - protein, 337 aa, unidentified
MSYLGVDLHTNSFTVCYRTQQGKERISTYAIQHIDAFAKTVRKRDLVAVEATGNTAWFVEQIRHRAKKVIVVDPNQFQVIRKSVKKTDKHDAKTLALFLSKGMLPEARMKTKENAQLHSLATTRDKLVKQRTALVNKIHNVLNSYGLKWKKETLTTEKGLNSIMAFDWEPIVRVELEVLADQIRSLTKNIKRLDTDITEHGKQLKGHQSLSSIKGIGNRSATVLLSVIGNVKDFSGEDKLASFFGIVPRIKDSNQTIRHGRITKHGSTLARTTLVQCTLVAKRYSPYLKNYYERIKRTRGSGKAIIATARKLLGIIYKTLINGWVFEDFPNFVIANT

SEQ ID NO: 163250 - protein, 323 aa, unidentified
MSQSSTLYVGLDVHQASMAVPYIAHAHDAEVVYLGTIGTRQYDLATLSRTRPSTRTPLGFVYDAGPCGSWLSRDLSRKGSVCWVMAPSMIPKTAGDRVNTDRRDAIPLARLMRSGELTPVDVPAVEDAAIRDRSRARADVRRDLKAAQWRLKAFWRRHDLRSTGRATWGPAHLRWLSEVVCPTPAQQIVFQEYLRAVSEHTVRLQRLEQELKDQVKTWRLAPVVDALQALRGVQFTIAVTTVAELGDLTRFDTPRQLMAYLGLIPSESSSGERRRQGSITKAGNTHARQALVEGAWAYRYLAKVSRHLQLRLEKQSKAIQDIS

SEQ ID NO: 163251 - protein, 333 aa, unidentified
MSRIGKLLEVGIDVSARELTVAASRDGQFLGRSSFENTAESRGALCRWLGKRGKTIRVCLEATGIYGLDLCLALERSGVEVMLLNPRVSADYAKARMQRSKTDIADAEMLLDYLQRMPFVRWVAPSAERLKLRALLRRISSIKRMIVEEKNRLAAAEAVDEMTDLVRNDIEVTIGHLERRITLMDRQAMELVQAEPSLVRCYELLLTISGIGHVTALLLTAELMMLPVDLTARQLVAHAGLDPRRFESGSSVHKAPRISKAGNRHIRAALFLPALAAIRHDDHVRAFHDRLVGRGKKPIAAIVAVMRKLLHAIHGVLASQTPFDSTRFTPINT

SEQ ID NO: 163252 - protein, 440 aa, unidentified
MKEKKTKAFPIIYPNAAGIDISSKEHYVAVNPESTEKPIRAFGAFTEDLHALVVFLKECKVDTVAMEATGIYWVSLFLVLEDAGFDVVLVTAKHVKNVRGKKTDVSDADWIRQLHSCGLLSASFQPDKFTRKLRAYMRHRKNLIEMSATHIRMMHKALEQMNIKIQHVIADITGKSGQEIIKSIIAGERNAEILASCCDSRIRAHKKEGIIKSLTGVWKEEHVFELEQSYSIYQFYHAKLKECDAKIEEHLREKSGVDTFVEPQKKEKSNKNNLNFNGKEMLYELTGTDLAEIFGITETNAIEIISEVGLDMSKWPTVKHFTSWLNLAPNNKISGGKVLSSRIPKKKNHAGQIFRMAAFAIQRSKNWLAMFYNRIKAKNGAPKAIVATARKIAAIFYKMVKERVKFNPIPIEKYMDGFKENQIKKLKRQAKNLGLQIVEM

SEQ ID NO: 163253 - protein, 315 aa, unidentified
MANLTKSKTVVNVGVDVGKQYLDVCIHEKELYWREDNTLAGIKRIFKRLSYYQVERLVMEATGRYEFELAQLAYVRNIPVCIVKPLRVRRYAGANEQLAKTDKLDAQIIAEFGAVLKPRVTPAKSKNLIAIKDLIARRRQLVNLRTQESNRSGIMGKTLAVSCRRIIRYLNAEIGRIEKQLARHVAEQAEWTEKQDLLKTVPGVGDTLVYTLLADLPELGDLNNKEISKLVGVAPINRDSGRMRGKRRIQGGRANIRTVLYMATLSATQCNPVIKAFYRKLVAQGKHKKVALTACMRKFIIILNTMVKNKTEWAI

SEQ ID NO: 163254 - protein, 402 aa, unidentified
MRRCIGLDVHREFAQVAIWEDGVVRQAGRIELTPEGLRDFAASLCASDEVAIEATGNTHAIARLLERHVGRVVVSNPQKTRAIAEAKVKTDKVDAAVLAGLLAADYLPAVWLPDEATFALRRQVARRAHIVRQRTRLKNQVQSILHRNLVPRCPAADLFGTKGRAWLAAQDLPADEQQAVQALLRQLDFHGQELRIVDAELGRVGLERAEVRRLLTIPGVDATVAVAIVAAVGDFGRFSCPQRLVSYLGLNPRVRQSGGQPAQHGRITKQGRAHARGMLVEAAWAAAKTPGPLRAFYERVRARRGMQVAVVATARKLATLCWHLVVGEQDYAFARPSLTDKKLRALELRVGMPPRRGQKGTAAAYSLKEVRRRERALTEQAEAAYRQLVAGWQPKRPASKPR

SEQ ID NO: 163255 - protein, 341 aa, unidentified
MKYVGVDLHKQTISVCVMAEVAQNRKVQQRRSLLCKDVQGIRRFFEELGAFRVVVEATSSYEWFLLLIEDLADRCVLAHPKKLRIIAETKHKSDKIDAQRLAEFLMLDMIPEAHRPSPRVREHRVLVRHRNRVQRQITKVKCQLRHKAAGYNADIVGLFSARGLIHLAKIAMSHADRFECRALQDQLEFLQQQLKAADQELRTFAQTGPVAEREARAILATVPEVGPVTTDVILSETADVRRFRGAKRIVAYAGLDPGLRESAGKGKQLSISKDGSPLLRWALIETAWRLVRRTTRWRRLFERLRASTGHKKKAIVGVARRLLCVLYAMLRDGRAYRLAAD

SEQ ID NO: 163256 - protein, 375 aa, unidentified
MTKVRFIGLDVHADTIAIAIAEPGGEVRSLGVIPNRAESLRKLVKKLAPAESLRVCYEAGPTGYVIYWQLTALGVRCEVVAPTLVPTKAGDRVKTDRRDAAKLARSYRAGDLTAVWVPDAAHEALRDLVRAREAAKKDQLRARHRLGKFLLRHGRRPSPAMTAWTQRHLTWIRQVQFEQPAQEATRLDYLHEVDHAVGRIERLERAIDEAVTQAPVGMRAVIEGLQALRGIARVAAVTIVAELGELSRFKRAPQLMGYSGMGASEDSSGARTRRGGMTKTGNAHLRRIVIEAAWAYRHRPAVGGTLRKRQATLSEAVKAIGWKAQLRLHARYCKLLGRGKCPQHVMAAVGRELLGFIWAIGITVEREQRRTSIAA

SEQ ID NO: 163257 - protein, 375 aa, unidentified
MKPELSVVGIDLAKSIFHLVGMDERGKIILRKRLARGEVLPFMAQLPRVLVGMEACGGAHYWARQLRAQGHEVKLMAPQYVKPYVKTNKNDLRDAEAIAEAVTRPSMRFVPIKNIEQQDLQALHRVRERLMGARTALVNEIRGLLAEYGIVLPTGVNAFRNALAAKLEAEHAKLTPLSQELFGKLREEFKKVEAEVAYYDEKLQALATTHPESQRLLTIPGIGPITATALIAAVGDVGGFTNGRQFAAWLGLVPKQHSTGGQTRLLGISKRGDRYLRKLLIHGARATLRWARTKTDSRSRWIRELLERRGWNRTAVAVANKNARIVWALLSRGGVYGESTHYKLSARATEVMATEETAGSRTNGPRLDQEKTCPP

SEQ ID NO: 163258 - protein, 402 aa, unidentified
MKASKQYLRFCGIDIAKQKHVACIIDNNGRYWVRPKSIRNDAAGYQRILNCLKESGRKKSILAGMEATGHYWYGLHDYLIRHGYAVAVLNPIQTAQQAKQAIRKCKTDKYDAFHIANLLRSGQYKAAVVPGELAMTCRLLTRLRYRMVRQSAMIKQLVNSRLHPVWPEYEELFSNTFGTTSMELLQTAPTPKELLELNVDDLSERIRKASRGRFGPAHTQKIVHSAKNSVGMQRGHYGISTGIKFLLEQIVASDTIGKKLDVEIQKLAARLPEYMFTLPGATELTIVSLYGEVDPIETFERPSQLVAFAGLDPKVFQSGQYDARRRHVSKRGSPYLRRTLWQMAYRAVCTEGDLRDFWRRKHRQNKHHLVAVTAAANKLCHIVWRIMTDRRDYIQKGHNPKS

SEQ ID NO: 163259 - protein, 392 aa, unidentified
MIYAGIDIAKGSHVIGATDERGKDAARPMRFANSASGFDRCVAYLEGLAGSKSDLLVGMEATGHYWMACFAHLTAAGYRVCVVNPMQVRAMRKLKGLAGVKNDRIDARLIAETLRQGGYDETRLATDEVQALKRLTRYRQGLKQELATVKTQAICVLDAYFPEYAGLFSDVFGPASLKVLAECPTPSEASRKRTSSIARLLSEGSRGRLGAERAAEVKSAAKSSVGIRLGEDAASFQIKTMVSQVEFLNATIAKVEREVEGLLAKVEPNITTIPGVSTATGAQIVAEIGDVRRFKSAASIVKYAGLNSGVDESGRYSAEGVPITKHGSPHLRRSLWLAANRARQYDPRLRAFYDRKRREGKPHRVAVTAVARKLCHVVYAVMRDGEPYDPAK

SEQ ID NO: 163260 - protein, 315 aa, unidentified
MYQNFIGIDISKKDFSVGIHGKNKATVYLNTLEGFAEFYSDYKSFLENALVVLETTGGYELCLIHYLQARNIHVHRANTRKVKHFIRSFGRLGKTDAIDALALANYGFERHTSLEIFQVNSQQKLLKLVNRRTELKQMLVQEKNRRQAPDQRELANSFNIIIKAIETEIKSLEKAIDEVLKSTPLLQDKKEVLKEIHGVGDIIAIELLALLPELGTINRKKIASLGGVAPHPNESGKKIGHRFVRGGRTEVKPILFLAAMTASRSKSSLGEFYIRLVGAGKKKMVAMTALMRKILVIANAKLRDFYLLKKSPQHG

SEQ ID NO: 163261 - protein, 357 aa, unidentified
MRIIGVDLHTRQQTIAMWDTETRELIERTLTHDGDEVREFYSALPGQVLVGIEATGSMHWFLELLEKLGIDHQVGHPSEIRKAETRKQKHDRRDAALLLKLQIENRFPSIWMPSTELRDLRTLLMHRHQWVRMRTRVQNTLQAMAIGRGLRRGKALWSQTGQHAIESLPLPPHTAYRRTELQDLYQKLDAQIDELDKRVGDQALQRPGAKLLMSHPGVGPVTALATDVFLGDPARFADGKAVVSYVGMIPSEYSSGGQQRLGGLSKQGNPLLRFLWCEAAAHAVRRDPDLQRFYRRKLTQKGLGKARVAAARKLGIRLWIMLRDQIDYQEFCRRGQMRQKNGGACAGMPEVGHGPAI

SEQ ID NO: 163262 - protein, 397 aa, unidentified
MYIVGIDIAKRKHEAAVIDGDGAVIIKPFSFTNNCSGYNRLLAMLAKAKLPLDEVSFAMEATGHYWLALFTRLQKEGFRVQVINPVQTNSIRSFYIRQAKTDPRDALLIAEVIRFGHFSESTLHPENIYELRELCRGRHAIVSMQADVKRKVVALLDQVFPEYETAFTNLFGDTSMAILQTCPTPKELSEMPLEELCHLIEVSSRKRFRMVKAQELQELARNSFGFAMAGDVFSTMIRLYAKHLVFLKQQVREMDRKIAEIMDTLDTPITTITGIGPTLGAYILSEIGDISRFSSAAKLAAYAGIDPTMRQSGEYNGVRNRMSKRGSPYLRHAIWLAASSAVLHDPALKLYFQKKRDEGKPYMASVGHACRKMVSIIYAVMRDNKAYTPYIPNEISA

SEQ ID NO: 163263 - protein, 411 aa, unidentified
MESKLVIAGIDVHKRMLAVVLVEADNPQKELERRKFATGTSALDACAAWLESQGVSVAVMESTAQYWKPVWLALEGKFLLHLAQAQSNGAPRGRKSDFVDALRLARRFLAAELKLSYVPDEEQRGWRCLARSKHQLRSQRVRLQSQIEALLEESRIKLSSMVSDLLGATGRRILGALVKGETDAEKLAALAANNVKASREELADALRGPMQPAHRKVLGMWLEQVEMIDRQIVDLHLELGKALRGHQEPIARLCEIPGLKEDAAQQIIPELGPGAAVFERAAQMASWIGVCPGREESAGESTSNRSPKGNRTMRRLLNQIAWGAVRTKDCFFKELFHRLVPRLGVHKAIWAVAHRIAKVIWKVLHDNVRYIERGPRALDPQVMKRRVTALARQMRKLGYTVELKPLAGTTE

SEQ ID NO: 163264 - protein, 358 aa, unidentified
MTTYYIGADVHSNSTEMVIEKERKIVANYIVPTTIPAISNILDSLQGKKQLAIEEGPMAGWLYRNLNKKVDKMIVCDPRRNKLIGCDGDKDDKIDAAKLALLLRGGYLRAVYHSQDDDKAELKHWVSLYHDRVRDAVRHINKIRARCRMYGVHIRRLVLRDPLHRSEWLSQIKHPALAKQLNLLWIGYDAAAKQTKIAKQQLRKLSKRYDIIHFWRKLPGIGLIRAATLFAYLDTPWRFKKKNKLWKYCGVGLQRTTSGTDKKGRPKPARLQLPWAVNRTLKNAVLGAATSAINREGNVFRAYYERMLSDGIMPSNARHAVARKILTVMWGMWKTNSRFDENLLRIESSSSQASALSR

SEQ ID NO: 163265 - protein, 313 aa, unidentified
MAEKEVFVGIDVSKGKLDVAVRPSGELMSFSNDEDGISVMIDFIKPFSPILIVLEATGGLETASVGMLAAKGLPVVVINPRQVRDFAKATGRLAKTDAIDAHVIAQFGEAVRPEIRPLKDEEAKRLSALITRRRQIVEMMTAEKNRLIAAAPWTRKDIQSHIAWLEKCLKKADQNLNDLLKKSPVWREKDDILQSTPGVGPVLSMTLLSSLPELGALNRKQIAALVGVAPLNRDSGLFRGKRTIWGGRANIRSVLYMSVTCAIRFNPVIKKFYQRLRDAGKLHKVAMTACMRKLLVILNTMIKNRTRWDTVTA

SEQ ID NO: 163266 - protein, 409 aa, unidentified
MMYFVGLDWAAREHAVCVVDERGAVVTRFTAAHTTSGMADLVARLTKLAPAPELRVAIERPTGLIVDTLVEQRFAAVPIHPNAVKAARPRYSAAQGKTDLGDAYLLADLLRTDGHRFRTLAPLSDETKALRGLVRVRDDLVGQRVATANQLRCLLEQFWPGATEIFADVDSPIALEFLDRYPTPQSASALGEKRMAAFMSRHAYSGRRSARELVERLRSAPPSVAGDLEAEAKGECVRALVAVLRPLVAQLATLTAAVEHAVDAHPDGKIVTPLFRSGRICAAQILAEIGDDRGRFVSGDHLAAEGGAAPVTRESGKHRAVTFRWACNMHLRKALMTLADTTHHTNPWARAIYQRARDRGHEHPHACRVLARAWCRVIWTCWQQRVPYDPTKHRAAQQFTLRLVDQEAA

SEQ ID NO: 163267 - protein, 321 aa, unidentified
MTYVGIDVSKATFVVAYSSVKTSKTRTFKNTTKGIHEFIQTLSSTEHHCVLEATGNYSALLVYLLSEANITVSLENPLKIKNFARVMLTVTKTDEIDARLIALYGERMQPAPYKLRSDSILILKQKRTVLRQLKKQLIATRNLKGSMEVLPFFDSKCKKTIEKTIAFLEKQIKGMEEELAALAQGEYKKQMDLLTSIKGIGVTLAAALIVATGGFTYFDNAKQLTRYLGLSPTYQQSGTSVNVKGHINRNGDSHLRSQLYVAAFSSLRCNTECKACFDRLRSNGKPGKLAVIAVANKLVRQAFAVVMQGKPYVDGFKSEKP

SEQ ID NO: 163268 - protein, 334 aa, unidentified
MLAHPTQTQAAARCEANTLFASLELSKARWLVTVSAPGSDKLSRHDVPGGDGKALLKLLWRLQAAAGRRTGAPVAIVVIQEAGLDGFWIHRLLVQNGITSHVVDAASIAVNRRHRRAKTDKIDGVKLLRTLMAWMRGERQVCSMVQPPSPENEDRRRLARERARLLKERVQHTNRIKGLLWGQGIPDYDPLHRDRRARLAALTTGDGRSLPERLKTEIGRELDRLELVVSQLAAVERERDALMAQTAEADACAAPAALARLRGIGPELAALLSLEALFRRFDNRRQIAAYAGLTPSPWKSGGIDREQGIARERTRSRGRALRAGQSSRRAVVAR

SEQ ID NO: 163269 - protein, 503 aa, unidentified
MGPLAYVSGVEVWRSLRSELRGRFWSNHFGWQSLFDVGHAPCWEHWTKSRPADQSLTGHPMSFDRLKRTRRRKRLPGHKLKPSRATLFVQNSKPHLSMKPTYFLGIDAAKHKIRAALSDRSEHVLFEKDLSVWATGLRQLLAAIKRQVNAPEQLLVLIEATGLLHLNWSAALTKAGYAVAVINPLIARRLYTLQNSIRDNKSDPIDARGLCTIGLLHGEKLLIHYRFSLRPEQFTLQRAQSVRKALRSALTNLKKTYQSLMDLSFPELGGLLQLDGVGIRQLLIQAPTPAAIAGKRLFTLEKNWMVRPKAAALKALAADSMADPDLAAASAPALVALLRSIATLEARLRLLDQQIQQLARTNMDPQTKALIETIPGFGPVNAAKTLAWLPTEILHSGSNRKVAARLQAFMGNDPRLRQSGQWKGHTKMSKRGVEMLRTAFFQSAFSAAHNDPELRTYYQCKRAQGKTHEVALSHLMRILTRRLVAVLRSGKPYQSHYNLKNAA

SEQ ID NO: 163270 - protein, 320 aa, unidentified
MSGFVGIDISKERLDVAHRPSGKVWQFANDPEGHKELVAALRAEQPELIVVEATGGYEQVVALEMAASGLAVAVINPRQARDFAKALGKLAKTDRIDAQVLAHFAESVRPETRPLADEEQRRLEALAQRRQQLVTMLVSEQNRLESCRVEVVRQDIRETIAWLRKRLKDLDKDISRQLRSSPIWREKEQLFRSIPGVGFVTVVTLLASLPELGKLNRKQIAALVGLAPFNDDSGKRGGQRSIWGGRAQVRSTLYMATLSGVRHNPNLRAFYARLCAAGKPKKVAITACMRKLLVHLNAVARDGVAWRHAAAPALAAALNP

SEQ ID NO: 163271 - protein, 412 aa, unidentified
MKDLLEISCGLDVHKEKIVACILTGPLGKPTRSEIREFSTLIPDMIALRNWIVSKNCHHVAMESTGIYWMPIYEILEDAFSGDITLLVVNARHMKNVPGKKTDMRDSEWISTLLRAGLLNGSFIPEKRIREFRDLNRYRKSVIRDITSQKNRIEKFLQSSGFRLSSFISDIFGASGRNIILHLIEHGQIDKTALDSCLKTKTRNRIDEILMSVNGTLSEHQKAFLRILMTHYNSLKKHLTEIETSLEEDMAPFALQVEQLNSIYGISTTASCAIIAEIGIDMKPFKTAEHICSWAGLCPGNNESAGKRKSTSVTKGNPYIKSMLCEIAWVIAGKRNTYLSAWYWRIKQKKGAKKAIVALARKLLVIIYTMLKQGTLFDESCFETRRKNCEQKQLSRYIRELKKHGYHVKAQS

SEQ ID NO: 163272 - protein, 363 aa, unidentified
MHSINNTELSSLEETRCQFNGGKADIKLGIDVHQDFYVVVMQEGGSNPKPAQRFAKQAFLRWAAKLKDRGGEVYAVYEACGFGFSLQRNLSALWIKCYVVCPQKLDEQNRRVKTDGLDAKALCLKLDRFVQGNRDALALVRVPTEEEEQKRAIHRQREQLVKARKQLEAQGRSLMVNHGLEPVQNWWRPRTFGALDVPLWMKELLANSQPILVALQQKIAALTVQLQSAASSDSPRGLGKMTSVIIDREIGDWNRFNNRRQIASYTGLCPGEYSSGNTRLQSCVTKHGNPRLRAALVELAWRLVRFQPDYHPVRKWRQILAKGALSTGAARKKAIVAVARQLAVDLWRIKTGRLSAEMLGLIN

SEQ ID NO: 163273 - protein, 460 aa, unidentified
MALLAKIGQELPQRYYVGIDIGYREHVAAGISLQTFVQGGDGWKRAKTLGFPTTQTGFERLQRYLDRFSTDPQAFLILCEPTGGYYGAALYQYVLDHHYPTFWIDNATTRHMREKIFGNIPKTDEIDARVMARIAYLHEAVGEEFSLRPLRLPSQDDAELLSLCRNSWKLNTMINRVRNQFSQLMAVIFPELKFFYTSSVSSVAPVSLMARYPSPAEIAAAPYEDVYEVLWKARSYPHAKQVHELQAIARQSAGLLPDPERAWRLKWLTDYLLSNFQLLSELEQRIEQVIQNHPGYAYVVGVPYSGPTTLGTILAASGEIRRFPNYRHYVAYTGYFAGLEKSQTIDRTHMSKRGNRDLKRAYFQIIAPMVWFDKGNNPYKKLYERKMAEGRAWYAAMPFACAALARHIYHCLKVQEPYDLDKAFPGSVSSLASRQALADFQADLEEEFEVMDARLSQVDV

SEQ ID NO: 163274 - protein, 346 aa, unidentified
MNKHNVIAVDLAKTVFQICVLNKTNEVISNREMRASRFEHYLAKQKRSLVAFEACGRAQHWARKAQSYGHEAVLLPPKAVAAYRQGHKTDSNDALAIGIAAGQPTIKPAGIKTLEQQSLQTDLRVYKHLSDQLTATGNMLRGLLAEFGIEIPKSVRKLKAQIPLILEDAENGLPYCARESLFQGWRLWKYQSERIHALDNRLKERMRENEHCQQLTQLESVGVKNAIGLYVELGNGRHFKNGRNASACIGVSPKQHSSGGKVNIGTIGKYCGNQRLRSSLITGAHSVIQQLERREPRTEKERWLKALIARRGKGRAAVALANKTVRTAWSMLYYKEPYKAVLLPVS

SEQ ID NO: 163275 - protein, 352 aa, unidentified
MTVTIVETRPLARAITGGVDTHADVHVAAALDPVGGLLGVAEFPATAAGYARLLGWLGGFGPVCLVGIEGTGSYGAGLARHIAAAGIRVVEVDRSDRQDRRRAGKSDPLDAVSAARAALSGRAAGMPKGRDGQVEAIRALMVAKRSARSERIQTINQARALVITGPDDLRARFARHAPAELVAELAALRPRPGSMIRYHTLLSLRELGRRVAFLDGQLQRLDELIVPLVTARAPGLLCLYGVGHDTAAKLLIAAGDHPERLRSEAAWAHLCATAPIPASSGKVTRHRLNPGGDRQANHALYRIVITRLSSHPPTRAYAGRRAKEGLSKKEIIRCLKRYVAREVYPHLRPPAG

SEQ ID NO: 163276 - protein, 392 aa, unidentified
MKNQTLFVGIDVSKLKHDVAIMSQNKQLVGKPFVIKDDLAGYQCLLGKLKAAALKQQTQQFKIGLEATSDYWKNIYYFLNRQSDKFKLTVINPVQTHNWAKTELRRAKTDPLDAKDIALFMIEKNPAPFLTREPILDIIKDMDRQIYAIGKQQTVSKNRLRLELTKVAPELEKATANLNAKRILAVLKAFPTAQDITNASFDELGNIGYGKKNWALPASFIEKLKALTEHSIAYKTGFGAGYVVQSLVRQIAQHQQETIQLKQQIVQLYQRINDQESILSTIPGIRRETAIVLEAYIGDVNRFSNAKKIVAYFGMNPTVHQSGKSKRKSRLQKKGSPIVRQKLFMAVLCIIGNKTGHIYRYYQRLVDSGKPKMVAIGAAMRKLLVTIYSIIS

SEQ ID NO: 163277 - protein, 356 aa, unidentified
MANPCDLNKEVVMVTTIGIDPHKATHTAVAINETETILGELTIPADRSQTKTLLDWAQNLDGDGRVWAVEAAGGLGYLLSQQLVACGETVFDVPPVLASRVRLLGSGKSDKNDPNDARSVAIAALRQPGLAVVRREDHTQVLRMLAKRHLELTSLRTQAACRLHAVLTQLRPGGMGRRLSAKQASRMLQGLRIVDPVGEQRRSMARTHLGDIRRLDRELKANKVLIRKAVVASNTTVTDVYGVGPVVAAFLIGYTGDPTRFASADHYAAYNGTAPVEYSSGGKTKHRLSMRGNRMLNHAIHMAAITQIRHDTPGRVYYHRKQAEGKTGKEALRALKRRISDVVYRQLLKDQQTKKS

SEQ ID NO: 163278 - protein, 412 aa, unidentified
MEVVYPCCCGLDVHKKSITACVLWAEAKGKSRKEKKRFGTFTHDLLQLADWLEQCGVTHVAMESTGVYWKPVWNILAEQFEVLLVNAQHIKAVPGRKTDQKDSEWIADLLQHGLLRGSFVPPQPTRELRDLTRYRVSLVQEINRIANRIQKVLEDANIKLASVATDALGASGRAILEAMLAGEQDSARLAEMSKGLLRNKIPELKLALEGRMTEHHRFLLRQLFEHLRFTESKRGEIEQEIDRRMRPFEDKVARLCTIPGVDRVTAWGLLPEMGTNMNQFPSSGHLASWACLCPGNFESAGKRLSGKMRKGNVSLRRCLSQAAWAISMMKNNYLSALYRRIAARRGAKRAVMAVAHALLVIAYHMLKRNEDYRELGADHFDRINVNRIRRSLARRLEHLGHRVTLEPLAQTA

SEQ ID NO: 163279 - protein, 324 aa, unidentified
MKNYAGLDLSMEMTHICVIDTDGHKVGAECVESTAEAIATVLEQLGPIERAVIETGRMTPAIALGLREIGVAVVCIDARQAHQSMKAMKANKTDPHDAAGLAQLARTGFYKEVHVKSPTAHGVRAIITARSHLVEARVRLDNTIRGLCATFGIRLGVGQGARFLAKMQAADQIPGLGEAVASLLRAREQLVVEIGEMDRQLKAITAASPVCQALMSIPGVGVQTSAAFAAAVDDSTRFRRSRTAGAYFGLVPRRHQSGEIDWTGRITKQGDSTVRKLLYEAANSILTRTKQSFALKTWALKIAICEGYRMGFRARFESMQRPAL

SEQ ID NO: 163280 - protein, 360 aa, unidentified
MAKAKTLVGLDVHATKIVAAVLDAETGQLQTFGMSGDSDGAAAFCAGLPRPVRVAYEAGPTGYGLARELAKRGVECIVAAPSKIPRASGDRVKTDRRDAEHLVRLLLAGKLHPVRVPGDEEEALRDLVRARDSVRMDLMRSRHRLSKLLLRHGIRFDDGAAWTERHRAWLGTVTLQWPAARATMLDAQGAIDALCHRRDGLEREIVAMLPACPWAVQVGRLRCLRGVDTLTAVGLCSEIGDFERFARAEQLMSYVGLVPSESTTGQQRRLGSITKTGSGHARRLLVEGAWHYRKRPAIGKALTDRQHDQPPEAIAVAWSAQRRLHRTWTRLEARAKRRTIIAVAAARELAGFCWAITQIE

SEQ ID NO: 163281 - protein, 344 aa, unidentified
MDHFAGLDVSVKETSICIVDDTGRIVREVKVASEPAALLKVLGNPTYRFKRIGLEAGPLSQWLFSVLAEAELPVICVETRHMQAVLKAQINKTDRNDARGIAQMIRVGLYRPVHVKTLRSQKLRMLLTHRKLLQSKAIAIENDLRGTLRNFGLKVGMVGKVRFEARIQELVENIPDMALLVEPLLIVRRVLREQIVILHRRLLAIVRDDEVCRRLMTTPGVGPVVALTYRATVDVPARFRKSKSVGAVFGLTCSRYQSGEVDWSGKISRCGDEMMRTMLYEAAQSMMHSKKWSWLKAWAMQIARRRGMKKAIVALARRLAVIMHRIWVDGTEFRWTREQPAAAA

SEQ ID NO: 163282 - protein, 374 aa, unidentified
MGRSIGVDLHRDCFTTAILAGNGRCYTREWKLGDLTKFVETLEYDDKVAVEMTTNVRLFHDAVWPHVERVDVVNTRQFKVVTESVKKTDKNDAVLLARFLEKDMLPTVHLKSKAMAELASLTRTRDTLVKQRTTLKNQVNNLFAASGVKLRRERLSSQKALSEVDREASELMPMAEALEVEVLLGQIRAINVGVAKLEARIEEDAKRQPGYAELTSIKGIGVNSAAILLSVIGDVKRFENAGKLAAYVGIVPRVSDSNETERRGRITKRGSKLARTALVQCGLIAKRFNPYLAAYHERLKRKKGGGKANIALARKLLEIVYRTLRNGWVFEDFPAFRLRDGTIPVWSGDGAKKYAASQRDLSLSAKTGKRKRAT

SEQ ID NO: 163283 - protein, 372 aa, unidentified
MNYNTVYVGMDVHKESFSLCAYTIETEKASHYQKTEADCKNVLKYLEFLRTIYGDDANFICGYEAGCLGYTLYHQLTANNVKCIILAPTTMLEQRSKKRIKTDKRDAEIIAKCLAQHNYSPVHIPTAKDEETKEFLRMRDDHKLALKKVKQQILAFCLRHNYRYDGNSHWTAAHLKWLKALTPEALYKEILDEYLLTYQTLSDKLERLDKRIGELATQDEYKEAVKKLCCFIGVKTHTALSVLVEVGDFKRFASAQHFASYLGLVPGEDSSGDDQNRLGITKAGNRHVRLLLTEASQCYARGQVGFKSKELKASQSGNTPAAIAYADKANERLRRRYYKMVLNKCKKHNVAKTAIARELACFMWGMMTDNIA

SEQ ID NO: 163284 - protein, 319 aa, unidentified
MSERAVVGIDVAKEQVDVFVRGVAFAPASFANDPEGHTALAAALQRLEPGLVVLEATGGYEAALACALQAAGLAVAVVNPKQARDFAKSMGKLAKTDRMDAEMLAEFAATLLRRDDLGRFLLPVADVHQKELAALVTRRRQLVTMLMSERQRLQLATPLVRPGIEAVIKFLRSRIDDIEAQMNVHVREHFAELDAILRSTKGIGPVASAMLIADLPELGRLDRRAIAALVGVAPMACDSGRSRGRRLIKGGRFELRRTLYMAAFVAARHNPAIKAFYARLIAAGKPPKLALVACMRKLLTILNAMVRAGKTWSDNPARA

SEQ ID NO: 163285 - protein, 363 aa, unidentified
MQYIAFDAHKHYTLASVARPDGQVVREERIEHERGALQAFLARCEPGSPVAVETIGNWYWIVDEIEAAGCIPRLVHARKAKLMMGEINKTDRLDVRGLNRLQRNGTLPTVWIPSGELRDQRDLPRTRMVLVRQRTQLKNRLHATLAKYALHHFEVSDVFGVRGRAVLRQRLELLPPHTAYASGHLLKQVEDLGSQIREFEQRIHTTFKPTAAIQHLMTVPGVGLTLAVVIALEVGDVVRFATAEKLAGYAGTTPRVHASGGKTRFGRSRPDVNRYLKWAFVEAANAICLTRRRARSRHVSRLYERIARRKGHAKAIGAVARHLAEATFWILSKQEPYREPKLSTVSSTGDKREIPLSSPKLDR

SEQ ID NO: 163286 - protein, 346 aa, unidentified
MKKIFIGIDFSKEKFDATVIKAEGVEERAERQHDVFDNKVSGFRRLLRWVKSVVDEQDTGLWLFCGENTGGYSRALCNYLYGSGYDMWLENALSIKRSSALQRTKSDKADAGIIAEYAMRNYDQMRLYKPLDKNLERLREIFLYRHNLVKLKASMTVRKGEKKQTQEKSDISRFMAMSSKHLISEFNKKIAECDMRIEKIISEDEELRRNFEIITSVPGVGTQNAVCLMVYTDNFSRFDFDSRKIACYYGVAPFGRQSGTSVNTPPHVSPFANKLIKALLTQAALASIHFCPQMAIYYHRLVEVGKKKPVAVNNVKNKLLHVITAMVRNGEKYNPDHDYHAALKAA

SEQ ID NO: 163287 - protein, 410 aa, unidentified
MSTTNVLVTRFVGLDVHKRSVMVGAVDAHQQIVMRPFRLSWGEFETWQQQHLHATDAVVLEATTNAWHLYDELAPRVASVTIANPLLVKWISAASIKTDGHDTLKLARLLAAGMIPAVWVPPEPVRQLRALVSHRRRLIAQRTQARNRLHSVLHRHNFTPPEGELFAVVQRTWWMQLPLESLEKLLVTQDLQLLDAVAPLIEQVEQQLCLESVKEPWAAQLPYLVQQTGIGVLTAMILLSAIGDISRFPHAPQLVGYAGLGARVHDSAETHHGGGITKQGRRDLRAAMVEAAWVAVLHNAYWKARFEYLGRHLSKEKAIVAIARQMLVVVWHVWHNGEPDQHTNAEAVARKMMTWAEQGGKAMHPDLTATQFVRLQLDRLGIGQDLTQLHYGSHDYKLPRTGSVKPVDSR

SEQ ID NO: 163288 - protein, 347 aa, unidentified
MLHFGIDLGGFLSQICIRDELGKIIGELCVPTRELHITLAQYAPSRVVLETCAEAFAVADRLTRNGHDVRVVPATLVRQLGVGAHGVKTDVRDARVLSDVSTKIDLPSVHVPSQWSRDARGVARLRDALVRSRTLLVNTVRGYLRTKLFKVKRGSKSTLTVRVRATVTEMLDAVPAAIERQLTVVDVLNAQIKAADADIKVLADSDPICRLLMTAPGVGPLTSIYFRTVIDVVERFPSADEVESYVGITPGEKSSSGRKNRTSITKAGPGPLRRVLVQACWVIWMKKPNDPLALWGRQVAVRRGQKIAVVGMARKLAGVLFAMWRDGCPYDPKKVSSLVNGGRVDAT

SEQ ID NO: 163289 - protein, 344 aa, unidentified
MNYHTALDVSLRSVSICIVDDEGTIQFEAKVPSEINEIVTCLRRFNPEISSVGFEAGALTQYLTYGFQAAGYEVICLEARQVSAALSAMRNKTDKNDARGIAQILRAGWYSRVHVKSMESHLIRALLSGRKTVLKKCVDLENEIRGLIRLLGIKLPGPLKHSAYDVFVRQAVEEHDCMANTLIPLLDARLVLYKTYLKLDNQVKALVREDTICQRLMTVPGVGAITALTFKVGVDDPGRFKSSRTVAAHFGLTPRRFQSGEVDNPGRISRAGDPDVRSALYLAAHALVTRSEEWSSLKVWGIRLIKTKGRKRAVIAVARKLAVILHRMWLDGTDFRYGSTEAIT

SEQ ID NO: 163290 - protein, 418 aa, unidentified
MENLYAVCCGIDVHKKLIVACLRQEQNTQIKEFGASTRELLSLADWLLENHCQAVAMESTGSYWKPLYNVLESFDLNPIVVNAQHMRNVPGRKTDIKDAEWISDLLCHGLLIPSFIPNRSQRELRELVSYRKSLVKTQSAELNRLQKMLEGGNIKLSGTVSNINGKSARNLLDLILKGEKFDEAVYDQMIKDRKISRRLKASKTKLIEDMNGVLSPVQIKMIRELRKHIDELEKHIRELDQDINDAMSDPEKEAAKRLTQIPGIGEDSAKIIISVIGVDMSRFPTDRHICSWAGISPGNKESAKKKLSARTTKGNKLLRSTLVVCAHSAVMKKESYFSSLYNRIAAHRGKKRAIVAVGHSILKIAYHMLKNGESYKELGSNYYQTKTKESKIKSYLTKLENLGIEIPEEYRNQALQMS

SEQ ID NO: 163291 - protein, 361 aa, unidentified
MQSITIIAFDHHAATTVAAVLVPGQRTPALHSLSSDIPTIQRFVGRLQRQGPVTCCYEAGPCGFELQRALTARRMPCEVIAPALIPRRAGDRIKTDRRDAGQLAVLHRAGALTAVHIPSEQEEAARDLLRCREDIRADLLRARHRLSKFLLRHGRRFTATKKAWSKRHDAWLRVQTWPVPALDQTHQAYLRAVDEAGARLATVEEDLRTLLTLEPLRARVVRLRCFRGIDDLTALTIAAELGDPRRFGSAPRLMAYVGLVPSEHSSGTTRRQGGITKTGNAHLRRVLVEAAWHYRHHPFVSAGIRARQRGATATVIAQAWTAQQRLHRRYARFAARGKPKQHIVTAVARELTGFLWAALTQ

SEQ ID NO: 163292 - protein, 337 aa, unidentified
MEQQTQYVGIDLHRRRSVLVRRNEAGETLETVRIDNDPVALAAELAKAGEHPEVILEATYGWYWAADVLEDCGAKVHLAHPLGNNWGNRRVKNDQRDATDLVDLLRLGRLAEAWIAPPPLRELRELIRYRGKLVHLRSSCKAQVHAVLAKEGVAVPMSDLFGTRGQRLLDEIVLGEAYRIRVESLRDLIELVDREIAMLESQIAPLFAGDLGYEAIQAISGVGPVLGAIFVAEIGDISRFASAGRLCSWAGLTPTHHESDEKIRRGHITKQGSRLVRWAAVEAVARQRGPSPLREFQRRVSERRGTKIGRVAAARKVLTLVYYGLRDGEIRCLAQSG

SEQ ID NO: 163293 - protein, 349 aa, unidentified
MSQNLNSAVAVIGIDIGKNSFHVVGLDNRGAIVLRQKWSRGQVEARLANMPPCLIGMEACVGAHHLSRKLKGLGHDARLMPAKYVRPYSKGQKNDFRDAEAIAEAVQRPTMKFVATKTADQLDLQALHRVRERLVSQRTGIINQIRAFLLERGVAIRQGLRFLRAELPRVLAKPSDVLSARMVHVIESLTEDWRRLDERIDQLSGDIAALARQDAGCERLMSVPGIGPIISSAMVAAIGAGEVFSKGRDFAAWLGLVPKQISTGDRTILGKISKRGNRYLRVLFVQAAWVVLIKPMSWDRHGLKRRIEAAKKRLHRNVLAIALANKLARIAWGVLAGGRTFEASKLQIA

SEQ ID NO: 163294 - protein, 436 aa, unidentified
MQVNTNQPRVSIGIDAAVVAAHQVAVRGEVREDFKIRPTLAGLAELTDRLRPYAVAMVVAEPTAGTWLPLAHAVTDAGCDIGFVANRDSARLRTAIVGASKSDVIDADMLAHCEGILGVIRAQVPPPGQIALRRAMRRRHIATVDAHRAECRLWALSAWAFPDLWRATGGHTLAQPLLGRWPHLEALSRARVSSITSLVAAHSRDQDPKRRAERIRDAAAGWAGFWERRLDLDALAWEVAAMLDDITTADRRQADATDQAIGLWHKHWPDDPLITILGMGPVCSAAIRGWWGNATQFPTAKAAVAHTGLNPSTWSSGLTESPSRRITKQGPAELRLALYQAANVARRHDPQLAEHYRRLMTERGHNHISANTAIARKLACRAWAIATSGREYQPRDLDGNAISHNQATALAAELAVPNDIRARRRGHTRKGRLNPI

SEQ ID NO: 163295 - protein, 343 aa, unidentified
MNKHRTIGIDLAKSSFYLVTLSPQGKCEGRTKLTRAKLLNFMAQQPVCTVAMEACASSHYWAREIQNFDHRVQLLPAQHVKGYLHSQKNDYNDAQAIAEASQHGAIRPVPIKSIEHQDEQTFLQMRRHLSAERTRLINDVRGLLTEYGLVLKQGNGVLRKALPGILEDMRNDLTERMRTLLHRQYSRLVAVDEELAWYNDQLKHDTRQDAVCQRLQKIPGFGPIVSKAVKSWMGDGKQFVRGRDASAALGWVPKQFSTGGRNVLLGITKRGDPYVRGLVIHGARAAVRCAAGKDDPLHQWINRLVATRGVNKATVALANKLLRIAWLIISRGENYCVRPANAA

SEQ ID NO: 163296 - protein, 366 aa, unidentified
MGNVRFVGLDVHKESIVVAVADSDASAPSVVSEIPNDIPRLLKELRKLGKAGELRCCYEAGPTGFGVYRALTAAKIQCVVIAPSLVPKQVGVRVKTDSRDALKLARFHRSGDLTTIHVPDAATEAMRDLERSREDAKNAERIARHQLSKFLLRHDRRYDGKTWTGQHLEWVRALRFDHEAHNRVLVDYVHAVEEAGARVTRLDKDITELVESWSLKPLVQALQGLRGVRLLSAVVIAAELGDMARFARPAQLMAYLGLVPSEHSSGQTTKRGGITRTGNTHVRRILVESAWAYRFKPALTRTIRERNEPLSTAVRAVAWKAQHRLHGRYVRMLARGKNKQQTVTAVARELAAFAWDIARQPQLLAA

SEQ ID NO: 163297 - protein, 416 aa, unidentified
MDEPLSSYVTQGYIVGHREDPTGQKGGLFMTVYVGIDIAKEFHFASIMNHDGVPSKPFAFENNAQGFHALLSACSSYAKEELVFGFESTAHYQDNLTFFLNNLGLKIMLINPLQVSALRKSTIRNTKTDRVDAHLICLALCYFHDHTTARASVSNNELYQLCMTRHDLVSKRSAAKIQLVAHMDRIFPELARFFKGNLHLNTSYKLIEVYPLPSQIEKTRIDVLTKLLYRASHGKYSREKAQELKSLASVSVGIPSEIFAFKAQLLVHQIEFLSRQIQTIEDKIKSFDSLQESPIYTIPGINTIFAAYILSSIQNITLFDKSCKLVAFAGLDPIVRQSGKFTASSTHMSKRGNSLLRYALIWTSWNVVLNNKTFADYYDKKRSEGKSHYNALGHCATKLIRCIHTMLTHQVSFNLE

SEQ ID NO: 163298 - protein, 386 aa, unidentified
MTEGCSATVVERHVARQIAEAQVLETVPQHGRLAEPAANPNSCQGDQLNGQPVSARTGRARQIVRREPHRVSEPVQSSVGIDVSQATLDVAIYPSGEWWQVTNDERGIAALVERFKSLAPQRIVLEATGGYELLLLASCGTADLPVVAVNPRQVRDFARSIGRLAKTDALDAHVLAHFAAQIQPTLRPLRDAATRELSALLARRRQLVEMHAAEANRLSRALERVRPDIREHMRYLEKRIKELDRELHDQLRATPLWRDKENLLRSIPGVGPVLSATLLADVPELGTTGHKQVAALIGLAPLNRDSGRWRGKRSIWGGRGHVRAVLYMATVTAVRLNPTIKALYDRLIANGKPRKVAITACMHKLLRICNAVLSHHTAWRYQPLDN

SEQ ID NO: 163299 - protein, 402 aa, unidentified
MERSKQYLRFCGIDMAKQKHVACIIDQNGLYLLRPKSFRNDAAGYQQILNCLKQSGRAKSILTGMEATGHYWYSLHDFLTRQGYTVAVLNPIQTAQQAKQAIRKCKTDKYDAFHIANLLRTGQYKTAVVPGELAMTCRQLTRLRYRIVKQAAMTKQLVNSRLHPVWPEYEGLFSNKFGTTSMKLLQAAPTPKELIEFDYDDLCELIHKASRGRFGPAQTQRILHTAKNSAGMQRGHYGVSTGIKLLLEQIKALEPVRKKMDAEIAKLSAKLPQYLFTLPGSTELTVVSLYGEVDPIEAFKKPSQLVAFAGLDPKVFQTGQYDAPRRHLSKRGSPYLRRTLWQMAYRAVCNEGDLRDFWRRKHRQNKHHLVAVTAAANKLCHIVWRIMTDRRDYIPKSYNPES

SEQ ID NO: 163300 - protein, 368 aa, unidentified
MSETIVAYRSFVGVDLHKDTVTLAAVDPRGESLARLKIHTKSVGKIEAWLRALPRPSTLAVEAVGFVEWFIDRFRDCVDRIDIADATELANRRGKRRKNDPNDAVDIARRLARGECPLGYIADEELMQLRKLGRHWRQLGSILARAKHMMRSILLAANLRGPKLDGASAQRWLLAHGHRLKPVQRQAFRNFLDVIQLVEIHRAPLRHVILKATRHERFAPLAELLQTVPGIGPIWACIIIAEIGPFDRFPNADALEFWAGLTADLKESAGRTQSGHITKAGSRTLRWALCQAAVTLCHCDARQEAIRQRLIRRNGGVKAKANVAVGRRLLAILYAMVRDNKPYQSGPRRNRTSAANKARARKRRKEAA

SEQ ID NO: 163301 - protein, 374 aa, unidentified
MHKYIWVGLDVHKVTIAVAVAKGEEVPHSLGTIPNDPDAIAKLMRKLGPSARLRVCYEAGPCGYVLYRQLTAMGIDCAVEAPTLVPVRAGDRVKTDRRDALKLARLLRSGELTAVAVPDEAHEALRDLVRAREAAHKDLRRARHRLQKFLLRQGHRCPLRTKAWGVRYLAWVSGLHFAHAPQSVVHREYLAEVERLAERRTRLDRELEVALAQAPAAIQTVVRALQVLRGVAFVTAVTAVAEVGQFRRFTRARQLMAYSGLVPRESSSGDTVWRGAITKTGNAHLRRVLIEAAWQYRHQPRAGITIRQRRKGQAAALCAIAEKADHRLHLRYRRLLARGKSKGKVVTAIARELLGFLWAVAVHAENGSTMPAAA

SEQ ID NO: 163302 - protein, 311 aa, unidentified
MEHYVGIDIAKNTFDVHVLPEKAARHFEYTEEGIQACRQWLVAFHPSLILMEATGGHEKQLARELFAAQFPVAVINPRQVRDFARAKGRLAKTDKIDAFIIAEYAQTMQPPAQEAMDELSEKIRALIARRRQLVNMCTQEKNRREHAFDDYISGSLSCFIASFEKALQEIDELIENHINGAPALKKKADLLVTAPGIGKSTAMFLVAELPELGKVNRREIAALIGTAPVNRDSGTFRGKRMTGGGRRHIRTQLYMPTLAAIRYNSVIRTYYQHLLKNGKVKMVAVVACMRKIITILNSMLMSNQPWNPDFA

SEQ ID NO: 163303 - protein, 377 aa, unidentified
MSRIRFLGLDVHADTIAVAVAEPDGEVRSLGLIPNRLESVRKLVARLGPAKQLKACYEAGPCGYVLYWQLTALGVACEVVAPTLVPVKAGDRVKTDRRDAAKLARSYRAGDLTPVWVPDAEHEALRDLVRAREDARQDQHRARHRLSKFLLRHGRRPPEEVRKNWTLKYMTWIKEQVHFAQPALEATLLDYVHEVDHMAARIERLEKALGEAIQKAPPAMRAVVAALQALRGVAQLTAVTVVAELGTLSRFDSPRKLMGYSGLVSSEYSSGNRIQRGSITKSGNAHLRRVIIESAWAYQYRPWIGGFLLKRQQGLPREVKAIAWKAQHRLHARYKKLAAAGKKKPQIVTAVGRELLGFIWAIAVQTEAQFQAAQKAA

SEQ ID NO: 163304 - protein, 430 aa, unidentified
MSYRIAGIDVHKKTLAVVVSDVEIDGEFHFEQRLFGSNPEQLRSLAAWLLEQEVEEVVMESTAQYWKPVWEALERYWKPIRKKPEGAGRRSGTLHLAQAQSNRGRRGRKRDFPDAERLVKRLVARELTLSFVPDAEQRLWRTVTRRKYQLTRDRVRLQNQLESLLEEVHIKLSSLVSNLLGASARRMLKALAEGETNPAALAALADQNLRATPEQLCDALGACTDLKPVYRRLLKMALEQLQFLEQQIDQLNQEMASLLNQHHDAVQRLAEVPGLGVDSAQQIIAEVGPTAATFSSGKCLSSWVGACPGDDESAGVNYSHRSPKGNRHMRRLLNQSANAAARTKGSIFEIVYRRSVPRLGHNQAIGAIAHRQCRLIWLVLHQGVRYEERGPAVNKQSKQKRTARMIRQLRSLGYRVELPNPQHLSPAQAH

SEQ ID NO: 163305 - protein, 291 aa, unidentified
MDHFAGLDVSVKDTSICIVDETGKIVREVKVASEPEVLLTVLKKGGYQLKRIGLEAGPLSQWLFSALGETGLPVICVETRHMRAVLRAQINKTDRNDARGIAQMMRVGLYRPVHVKTLRSQKLRMLLTHRKLLQSKAIAIENDLRGTLRNFGLKVGIVGSSRFETRIKELVEGLPDLALLVEPMLTVRRVLREQIAILHRRLLAVVRDDEVCRRLMTVPGVGPVVALTYRATIDIPARFPKSKSVGAVFGLTCAKYQSGEIVRSGRISRCGDEMMRTMLYEAAHRMLCLAK

SEQ ID NO: 163306 - protein, 425 aa, unidentified
MNTSASTNEYAATIGLDWADQKHDFWLCPQNGRPEHQVVEQTPAAIHEWVAKLRQRFPAGQIAVAVETTRGAILYALMAYDFIVFYPVNPKALASYREAFKVSGSKDDVTDAQLAEELVRCHRDRLRPLKPQDAGTRTLLGLTEKRRHLVDSRTVAVNQAHAELKCYYPLARDLLGDLTTTLAADFLLKWPDLAALKKAGAAKMRQFFYGHNARSEDLMKEREAALEKARPLTEDPAIITPGRLMVQALAAVIKNLNQAIAEMDQAIARLMDQHADAEIFRSFPAAGPVLGPRLLVAFGTDRDRFADAVEVAQFYGIAPFRRASGKSLVIAMRFRCPKFGRQTFHEHAACVVKQEPWAREFYQQQRACGKGHHAAVRTTAFKLIRIYFSCWKNRTKYDSNTYLEALKKHGSPLHALLQNPKKKSA

SEQ ID NO: 163307 - protein, 359 aa, unidentified
MLYLAIDQHSKQLTVNVRDEAGDIVIRKQISTRGDAPRSFLTELSARAGYVAIVEVCGFNDWLLDLLPECGCREIVLVQPGRPGKRKTDRRDANQLGEVLWVNRDRLLGGRRVQGLRRVNIPGSEERRQRRLAAMRHRVGGELTRVINRVRTLLRRGNRQHDCPTKTIQSKRARAWLAGLSLGRLDRLELDQLLARWQLLEAQRSELEEEIARQVAGSGDGPSPSDAQLLLTLPSAGPFMALGLAAHVGDIARFPRPRSLANYWGLTPSCRNSGDSGQRLGSISKEGSTLARFLLGQLVMHALRKDARLRRWYLGIKRRRGAKIGRVAVMRRLATIIWHILTHREAYSYGGARHAEFSR

SEQ ID NO: 163308 - protein, 318 aa, unidentified
MHEGRTMGKHSEVFVAFDVAKRKHAVAIAEGGRTGEVRFLGDVDNSPPPIERTIKRLADRYDRLHVCFEAGPTGYGLYRQVKALGHDCMVVAPALIPKRSGERIKTNRRDAVTLARLHRAGELTGIWTPDAAHEAVRDLVRAREAAGDELRRKRQQLLSFLLRHSRIYSGGGHWTLAHRRWLAGQKFEHAAQQIVFQEGIDAIEDALQRLRRLEKQLALIVPEWSMAPVVEAYQAMRGASFVVAATFAAEIGDVRRFDTPRQLMSFLGLVPAESSTGDTIRRKGLTLAGNRRARRALVEAAWTYRYPARVSEIPEGPP

SEQ ID NO: 163309 - protein, 350 aa, unidentified
MMIGVDYHPSFQQIAFLMEETGEYSERRLNHSDGEAEKYYRDLKLRGVQVRVGMEATGYSRWFERLLAELGFEVWIGDPAEIKAKRVKKQKTDRKDAQLLLQLMMEDRFPRIWVASPENRDVRQLLWHRHRLVQMRTRIMNQLQALAMNEGRRWKAKLWSAQGREEMEKLALAPWASRRRHELLELLDRMNPTIEELTAAAEQEARKRPEALRLMTHPGVGPLTALAYVLIIGTPSRFHRGKQIGNYVGMIPSEDSSGGKQRLGHISKQGNSLLRFLLVEAAQAAVRNNPDWRRRYMHLAMRRHKSIAKVAMGRRLGVRLYWMWRNCCEYSPSMEFGSYAGQLGTGHGVR

SEQ ID NO: 163310 - protein, 360 aa, unidentified
MDVHKDSIAVAHAQGPSADPPVFVGAIGTRQADLAKLIRRLQAKTSTLVFAYEAGPCGYTLYRDLTGQGFACHVVAPSLIPKKPGDKVKTDRRDAVELARLLRSGDLTAVYVPSVEDEAVRDLCRARDAARVTGKDAKLRLKAFLLRLGLHYVGRATWNDAHRRYLAKVVCPTPTQQIVFQESVRAVDEQVDRRQRLDAELLERAPAWRLSPVVDALQALRGVQFLVAITVVAELGDLTRFDNPRQLAAFVGLIPSEYSSGGSRRQGGITKAGNGRARRALIEAAWAYRHPAKVSLHIQQRIDQLPKALQDLGWKAQVRLCKRFRRLVARGKHPNIAVTAVARELIGFMWAIAKAVPVPA

SEQ ID NO: 163311 - protein, 386 aa, unidentified
MIYVGIDIAKLNHFASIISSDGEVLVEPFKFSNDSDGFRLLLSKLNQFESDSLVIGLESTAHYGNNLVEFLVSRHFHVCVINPIQTSAMRKNNIRKTKTDRVDTLLIAKALMVQPHRFYDKQDIDLMHLKNLGRFRQVLMKQRTSAKIKLTSFLDQAFPELQYFFNGIHHKSVYSLLKEAPSPEKIASMHMTHLAHLLETTSHGRFKKDKAQALRILAQKSVGSSDSSISIQITQTIEQVELLDSQIHDVEAQITTIVKSLGSVILTIPGISCIEAGMILGEIGDIHRFSSPSKLLAFAGLDPSVYQSGNFNASHTRMSKRGSSVLRYALVYAAHNIVRNNDVFHSFYDAKRSQGKNHYNALGHCAGKLVRVIFKMLTDNVAFCLS

SEQ ID NO: 163312 - protein, 340 aa, unidentified
MGDITTIGLDLAKNVFQLHAVDEAGSVVMRKRLRRGQVLAFFARIPPCLVGMEACATAHHWARELIALGHEARLMPPTYVKAYVKRNKHDVADAEAICEAVRRPSMRFVPVKTAEQQSALMMHRARDLLIRQRTMLVNALRGHLAEFGLIEAQGLHKVARLIAIVMDEMDGRVPDIARQVLKVIVNQIEDIQTRIAGLETQVLAWHNSSPVSQRLATIPGIGPIIATAIAATVADPNIFRSGREFAAWLGLVPRQNSTGGKARLGGISKRGDSYLRRLLVNSAHTVLLCSKQAKTDPWLTSLLSRKPRLVAAVALANKTARVAWAIMRRQDTYRHAAVAA

SEQ ID NO: 163313 - protein, 312 aa, unidentified
MITQPEVFIGIDVSKKTLDVCSYPDKQKAQFSNDAAGHQQLVEAMRKVQPTLIVMEATGGLEFEATALLVTSALPVAVINPRNARDFAKAVGLLAKTDQVDAWALARFASAVRPEQREIKSEALRGLEEVLTRRRQLVDMVTAENNRKGQASANMAKEIEEHISWLKQRIKSADLDLGKAVKASPAWKAKADVLTSVPGIGSVATFTLLAELPELGTLNRREICALVGVCPFNRDSGTLRGKRSIWGGRTSVRAVLYMAALVATRHNPVIKQFYQKLLDAGKLKKVALVACMRKLLVILNSMVRNNTLWASC

SEQ ID NO: 163314 - protein, 361 aa, unidentified
MSESMCLVGLDVHQGRSVAAVLDPFSGELRVERLRGAPGDVVPVFLEALGRPVRAVYEAGPTGFALAREAVGRGLDVRVIAPGSIPRAPGDRVKTDRRDAKRLVRLFAAGELSFAFVPSEEEERFRDLVRCIDDARKDLMRARHRLSKFLLRRGLRFGQRQWTQPHQRWLGKLAFDDALSRAVFIDYCCAVDAVVHRRRELIGVLEDAIATSSHAETVARLRCFRGINTLTAAGLCAEVGTFERFAKPGLLSGFLGIVPSEYTSDSKRVQGQITKAGPTHARRLLVEAAHHYRRRPRVSPELAARQRGQDPRVVQVAWRAQRRLHQRWAHLGQARGKPTGTVAVACARELAAFCWEAATLN

SEQ ID NO: 163315 - protein, 344 aa, unidentified
MGEVITIGLDIAKSVFQVHGVDGAGAVVIRKRLSRARVLAFFADLAPCLIGIEACPSAHHWGRELESLGHSVRLMPPSYVKAYLKRSKNDANDAEAICEAVTRPSMRFVALKTKEQQAALMLHRTRQLLVRQRTMLSNAMRGHLAELGIVSAKGRNGTGELLRIVENGADGRIPPLARGILGALARQYRALGAELGSIQKSILAWHRSCEASRRLEEIPGIGPIVATALVAEIGDWKAFGSGRDLAAWIGLVPKQHTTGGKDRLGGITKQGNRYLRWLLVTGAMAVIRHARKHGTHKRPWLGRLMERRPTKVAAVALANKIARMAWAIMAHGDRYREPELRAAA

SEQ ID NO: 163316 - protein, 420 aa, unidentified
MSQNRAAKHLASIQPGTLFAGIDLSLDHLVVVVLNASSERLDRFRTANTAEGYAYLRQRLQRITDKQHAPGVLVGMEPTNYYWKQVGYDLERHDVPFRLVNALTVKRHREGDQLDRSKDDWRDGFTIADLLRQGKFTETHLPHGVYAELQTGYTAYRRLRQDRGRQLTLLTNTVRQLLPEFEEVFKDLTGATAAAILAAGACPQQLRSQSEAEFVAQVRATFTGARLSLCQVHELYALAAGSQGFPDATTALQMMAQHQSATILLLDQQAEQLLEQLLTLFYTLPEAPYLLSMQGLAPSEAMSLVACTGDLRAYHSGRALIKLAGTQPTPDTSGRKTYSATPFSHQGRSELRTVLYFITLRLITRNEAIAYHYQRFTTRLTHPLPKMQAVGACMNKVLWYAWHVVKHREFYDAQRWQMLK

SEQ ID NO: 163317 - protein, 355 aa, unidentified
MDSKKYIGMDVHKESISIAVMNAAGKIVMECVIETKANMILDFIHGLRGDLHVTFEEGTWAAWLYDLLKPHVTKLVVCDPRKNRSMREGNQNDKIDARRLAELLRVDHLNPVYHRAHGLRTLKELVRSYLTITKDLGRVMSRVKAIYRSWAIPCTGKQVYSSRHRAAWLGKISEPGVRRRAEFYYQQLDALRLLRQEVRRDLLAESKKHQAWKRLCQIPSIGPIRSAELLGILQTPHRFRTKRQLWTYCGLGIEMHSSADHRVVEGQLQRAKKQVEVRGLNENCNHELKNLFKGAAIVAATKPGLFEEFYAKLLAQGMRSEMARLTLARKIATIVLIVWKREVCFDAQHLKPQTA

SEQ ID NO: 163318 - protein, 355 aa, unidentified
MSQEKYIGMDVHAATISAAVMNAEGKVLMECVLETKAATILEFIQGLRGTLALTFEEGTMATWLHDLLKPHVSRLVVCDPRKNALMRDGNQNDRVDARNLAELLRTNHVHAVYHEKQGTRALKELGRGYLTLTKDSTRVMNRIKSVYRSWAIPCAGTSVYSRRHRAEWLAKLVEPGVRIRAEHLYEQLDSLQPVRQAARRELLRESRKHAAVKLLQQIPAIGPIRSALLVAILQTPHRFRTKRQLWAYSGFAVQTYDSGEYRFVRGKLQRNRERITVRGLNHNHNHDVKNLFKGAAITAIERPGPLQDFYSALVDKGIRPSMARLTLARKIAAITLTIWKKGVSFDPKQLQRQAA

SEQ ID NO: 163319 - protein, 444 aa, unidentified
MKITYKRVAGLDVHKKTVVATRMQVTEEERVEWETKTFGTTTPDLLELHDWLCEWSLTHVAMESTGDYWKPVFNILEDSFQVWLVNARHVKHVPGRKTDVKDSEWLAELMLHGLLKASFIPPKPQRALRELTRYRTRLVQERARVVNRVQKLLEGANIKLSSVVTDVMGVSARAMLDAIAAGQTDAALLADLAKGRLRNKIPELEKALTSIVQPHHRFVLAQQLEHIDFLDEKIEAISIEIERQLESMSWPEEPSEPGAGEDTEEGAPLGDESELPLTWHTAVALLDTIPGVNERIAEVMLAEMGLDMSQFPTAADLASWAGLAPGNHQSGGKRYSGRTTKGNKALSSIMVQAAWSAVRTKDTFLKSRYHRLAARRGKKRAVVAVAHSMLVSAWYMLTYRQAYRELGGDYFDQRKKESKINYLVRRLEKLTGGSVSIELQSAAA

SEQ ID NO: 163320 - protein, 351 aa, unidentified
MLTDNNARRTVFVGVDTHRDSHTAVIVDQLGSHLTTIEIPTDRAGYCRLIETVKQAGNVEVFGIEGTGSYGKTLTSQLVDTGFKVVEINRPNRQHRRRHGKTDETDALSAARAVASGSETTLAKETTGSVGIVRLLHNTRRTAMKWRTQTTNQFKALLDESPDNLKHQLQNQTILKAMRTAANYRPVDCLDSESQMLKQTLKSLAKRWQQLTGEIKELDQQLDQLINKHWPHLLATKGVGVDVAAKLVVTAGSNPERLKTAEQFKALCGVSPVNASSGKTQRHRLNQGGNRQANNALYTIAITRLAHDPETQQYATKQKQKGKTNKEIIRQLKTYIARQTWKQLTQNQPKT

SEQ ID NO: 163321 - protein, 385 aa, unidentified
MDQTSSSPLSANTLHCALELSKKSWLLAIQFPDREQPSLYAIEGGDAEKLLAKLTAARDCWAKVSGALPVITLCYEVGYDAFWLARFLKARGIECLVGDPGSLQVNRRGRRVKTDRVDVKMLLRTLIAWCRGERHVWSLVRIPSIDEEDLRRSHRERSRLVRERTAHINRIKGLLFAQGIRGINVKSQYKTLAVEKLVTGDGHRLPPRLACEIAREIQRLAMVQEQIAAIERERDTAPTPCEATERKRHLLLQLKSIGPAISALLSREVYYRQFGNRRQVGSFLGLTPSPYNSGEEERCQGISRAGSGHVRAIMIETAWLWVRHQPKSTLTQWFVERTAGHSTRVRKIMIVAVARKLAIALWRYVEHGLVPQGATLNVPTTRRAR

SEQ ID NO: 163322 - protein, 337 aa, unidentified
MEKKFKHFVGIDISKIKFDSAIIVDGKKEETLSGCYEQDKANYDSFLQWVKQQTKSNLQDVLFCMEHTGIYNLALVEYLCSHNLHVCVETAMQIKLSMGMQRGKSDKIDAKRIAWYAYKNQDELTAWQQPREKVRMLKMLLTQRSALVLAKTSLQRNINEIEDVGLKTFAKQLKRYNSGVKGIEKDIAKIEADIKELVQQDEQMSKLCKQITSIPGMGFVTATHLIAYTNEFKTMRDGKQLACYCGVAPFEHTSGSSVRGKTRVSHQANKTLKSLLHMCALVSIKTEGEFKQYYERKKAEGKNSMAVINAIRNKMLLRVAALIRNDSMYVYNYVYNE

SEQ ID NO: 163323 - protein, 409 aa, unidentified
MYFVGLDWASREHAVCVIDERGSVTVRFTVEHTAAGMSALVDRLCKVASVGELRVAIERPTGLVVDTLVDRGFFVVPIHPNAVKATRSRYSAAQGKTDLGDAYLLADLLRTDGHRFRTLVPLSDETKALRGLVRVRDDLVGQRVHVANQLRCLLEQFWPGAVGLFADIDSPIALEFLDRYPTPLAANGLGEKRMAAFLARHAYSGRRTAAELVERLRGAPTSVAGELETDAKSECVRALVAALRPLVERIATLTSAIEHAVDEHPDAKLVTPLFRSDARVCAGTILAELGDDRARFVSADHLAAEAGAVPVTRESGKHRAVTFRWACNMRLRAALATLADTTRKSSPRARAIYQRARDRGCEHPHALRILARAWCRVLWTCWQKRVAYDPAKHRAARQFTLRAVDQEAA

SEQ ID NO: 163324 - protein, 368 aa, unidentified
MDVLYQSCAGIDVHQANIVVCILHGPLTSTRPKREMATFDTTTKGLRACHDFLSQFHVEVVGMESTGVYWRPVWHALCDDFELILAQPAHMKAIPGQKTDKKDAHWIAKLTRIGLLPRSFVPDETIQELRELTRQRKHYVESRNRETNRIHKILQSGGIKLTTYIEDIMGLSGRNLLQLLVDGTPITPRIVHQSVYTSLKKKVPQLLEALDGYFSDHHRFMLKQSLEIYDFYQKQIELLEERITVYLSQYENHVEILDSIPGIDVITASVIISEVGVDMSQFPTSGHLASWAGLCPGNNESAGKKRSTKIRHGNSYLKKCLCQAAFAIKRQKGSPLAERFYQIQSRRGSQKATIALVKHQIKWTVKKS

SEQ ID NO: 163325 - protein, 382 aa, unidentified
MPDGIRWVGLDVHARESTLAIFDQASGEVTTKRVVGRPHELLAWLRDVERPARMVYEAGPTGYGLARRALAEGIELAVCAPGKTERPPADRVKTDKRDAVRLARLLAAGELVLVTIPSVEREQLRDLVRCREDIRHDLARARHRIGGFLLRREIYWEGPGESWTRKHRAWLTSVRFADHASQATLADYLHAHDVLIARRDQVEADLGKLAITAPCAQTVARLRCLRGIDTLTALGLCSEIGEWERFDHPDQLSAYLGIVPSEHTTGRQRRLGAITKAGSTHARRLLVEGAYHYRRGAVVGAALERRQRGQPPEIINISWKAQRRLNARWRQLKDARRKPAGVVAVAIARELAAYCWEIATYPITTPAPTPTPTTRKRLTNSR

SEQ ID NO: 163326 - protein, 410 aa, unidentified
MLNTLFVGIDVSKRNNVVRFTDSYGDTLTVFSVPNNQDGANNLLDKLRNTLITRDFQAVSIGMESTSIYADHLAIFLRNDAFLKKWGVKVFVLNAKQVNAFKEAYPELPKNDNIDTLVIADYLRFGRISKEVNLDEKFIALRNLTRARFQVAQNLSREKSRFLDSLFYKFSSLDSSKVFSDTFGTTSIAVITDFFSTDDINEMPLEVLAEFLIDKGKNKFNDPEGIANDLKAAARSSYRLSKTVNDSVNQLLAVRLIGIRSFQQQLKDLDKAIESYMQLFPAILNSIPGIGPVYSAGLLAEIADIHRFKNHAALAKYAGIAWTKYQSGDYEASNTRLILSGNKYLKYYFLEASNKVRMHDAEFKRYYLSKFKEVPKHQHKRALALTARKLVRLVYSLLSTNQLYIPPTSK

SEQ ID NO: 163327 - protein, 344 aa, unidentified
MTYYAALDVSLRSVALCIIDDQGTVCLERTVPSEVTDIVACLRNFDHAIEVVGFEAGTLSQYLAHGLQSDGFEVVCLEARQVHAALSAMRNKTDRNDARGIAQILRTGWYARVHVKSRASHYIRALLSSRKAVLRKCIDLENEIRGLFKIFGIKLPASLGHGPYDARVRPLIEEDMELANALLPLLDARLVLYRTYLELDRRVKLVARNDVVCQRLMTVPGVGPITAMTFKAAVDDPTRFRRSRTVGAHFGLTPRRYQSGEHDNPGRISKAGDADVRAVLYSAANALMTRTRRWSSLKAWGMRLMRTRGRRRALVAVARKLAVIMHRMWMDGSRFQWGKEAAAV

SEQ ID NO: 163328 - protein, 363 aa, unidentified
MGTIRVGVDLAKQVFSVCVVDGGGRVGQRCDLKREAFAAWLVQLPPETVVAMEACSGAHHWARRCLGHGLVPRLMAAQFVKPFRKSQGNKNDRNDAEAIATAARQGNMRLVAVKTVDQQARLAWHRVREGYKAEGLAISNRIRGLLAEFGVVVARSDLALRRALADEAIRRDLPAMLHGLLDDLQQHWNQVRERIGACDVGIATHAKADVRSQRAQQLIGVGPLTADAIVATIGDGREFTHGRQLSAWLGLTPTQHSSGGKQRLGEISRRGDSDLRTLLIQGARSSLQRANAVALEKASAEQIWIRGLTQRLPFGKVLVAIANKHARQLWAMLARDEDYDAEAWLRHPMVQRPATHKTHAMAA

SEQ ID NO: 163329 - protein, 370 aa, unidentified
MRIVENHFLLIIESFIEITVCFMKNSNSLSIRKHAVGIDVSKDTLEVCSGKKTSSESMNFSTSRCFKNTREGFESLLSWARNQSGQNRSVWFVMEATGVYYEQLAYFLHKAGENVCVLVASRAAHYAKSLPIKSKTDAIDARILARYGLERRPETWEPTSPQLRKIKALIREREQLQKQHTQLTNRLHAARNAWGHPQTSLKRLTDHAKQIGRYLEQITIELDNLWQSSRQLAEPVSRIAGINGIGRQTVLDIIAETNGFALITNRNQLASYSGLDVVLDESGNRQGATKISKHGNAHIRKALYMPAMSAIQHNPALKLFYERLVEKHPNQKMIAVTAVMRKLLLLVYSLWKSGKEYDPEFHYRQIMVKP

SEQ ID NO: 163330 - protein, 404 aa, unidentified
MWYVGLDWADTHHDVVVLDEAGRRVGSRRFAHNHKGLNELKEFVLGIAASLDQLACIVETNHGLLIAFLLEAGIPVYPVNPQITNRLRKAAGAKTDRIDAYLLAKTGRFDLAELRRMAPDSPTVAELKTLTRDQDALIQTQTRLVNQLTACLKEYYPAALHLFAKVQQRSALVFLLAYPTPQAAQAASVEQIIATLRTGKHTNPSKVALKIFEEVHRPQLVASEVIVRAKSRLMLSLAKQLLVVIQEIKSYDEAIRPLFLSHPDQEIWSSLPRAGKRLAPRLLAEWGDDRSRYAEANSIQTLAGTAPVPFESGNYARAHKRFACVKPLRNHLYQFAWQSTQHEAWAASYYQRKRAEGKSHSMAIRALANVWVRIIYRMWVNKTCYQAATFETAKRAHAPRQHVA

SEQ ID NO: 163331 - protein, 415 aa, unidentified
MEKLLERCAALDVHKRQVTACAHVPNRRGERAELRAEFETMTPDLLALRDWLKGLGVTHVAMEATGVYWKPVYYLLEDDFELLLVNASHVKNVPGRKTDVADAQWLCELLEHGLLRASFVPPKPIRELRDLTRYRKSLVWERQREANRLQKLLEDANIKLASVATRVLGASGRAMLAELCEGRNDPEALAELARGKLRRKLPELRRALTGRFSSHHALLVSQLLSHIDYLDEAIDALSAEIEERLRPFEHKLELLTTIPGVAERTAEVIMAELGADMQRFPDHRHLASWAAICPGNEESAGKRKTGKTRKGDSWLRTALIEAANSAAGRTRDTYLNAQYVRIKRRHGHSKAIVAVAHSILVSAYYILRDGKPYEDLGGDYFLTRETQERLTQRLVSQLERLGQRVTLEPLAQPAR

SEQ ID NO: 163332 - protein, 370 aa, unidentified
MKKYSETFVGIDAAKKKHAVAVAEGGRGGEVRYLGEIDSSPTSVAKLLAKLSSRSEGLHVCYEAGPTGYGLYRQVKALGHDCTVVAPSLIPKKPGDRIKTNRRDAVSLARLLRAGELTSVWVPDAIHEAVRDLVRSREAASEDLRKKRQQLGAFLLRHGRIFFGKKHWTRAHSRWLAEQAFEHPAQQIVFQDAINAVEAASLRLGSLDQQLASIAPDWSMAPVVAAYQAMRGVSFLVAVIFVAEIGDVRRFESPRQLMSFLGLVPSERSTGESVRRAGLTLAGNQRARRVLIEGAWTYRYPARVSPALHDRLEGLPKPVRDIAWKAQVRLCARYRRLIAAGKKAPVAIAAIAREMAAFLWAIGQQVEPLS

SEQ ID NO: 163333 - protein, 350 aa, unidentified
MMIIGCDLHTRYQQVAMLDTDTGELVERRLEHESGEARAFYAGLTGAVRVGIEATGHTHWFEAMLAELGHELWMGDAAKIRAAVVRKQKTDARDAAHLLDMLCTGRFPKIWRPSLPERDLRQLLWHRQKLVWMRGAVKNQMHALAMGEGVCRKKKLFTAKGRTELEGLTLGPWASYRRQELLRMFDDLQGSVNKLDQAVELAARSQPLAVRLMTHPGVGPITSLAFVLIIGPIERFERSKQVVSYLGLNPREHSSGGRQRLGSISKQGNPMMRSLLVEAGHTAARLDPQLKRIYQRLKFRRGAAVAKVAIARKLAVRMYWMLRSTADYAQLVRMRGSSWPTLVEDNPSLG

SEQ ID NO: 163334 - protein, 368 aa, unidentified
MSKCTIPSFIGQAIFCGFDVHKKLWSVCVRHCGREIACFSTAANAGDVAKKLRKDYPDADIHSVYEAGFSGFEAHRVLADEFGIHNIVVNPADVPTNNKERVHKSDRIDCRKLAKSLEAGLLEPIYVPSIDHLQLRNLVRRETQASGAITRTINQLKSHWYFNGEPVPGKVGKLVLAYRLEQARSRNDQVTVSLIDQFWYLVKSRKQIVSCEHETIRKLHLSEKLKHLMSVPGIGSRSAIVLLSELWDMSRFPDKNHLASYVGLAPHLVGSGEKEETVSGGNRKQKQLHYILIQAAWRASRYDPGLISLFGRLHKRHLSSQRIACIIAKKLLFIIRAVLLENRDYQRVFPETKITSGQSESNLDPTTT

SEQ ID NO: 163335 - protein, 401 aa, unidentified
MVSDFMKGRYNLMKIFVGIDIAKLNHFAAAISSDGEILIEPFKFTNDADGFQLLVSKLESFDKNSIIIGLESTAHYGDNLVRYLVAEFYQVCVLNPIKTCQMRKNNVRKTKTDKVDTFVIAKTLMMQDDLRFITFFDLDMMDLKALGRFRQKTIKQRTRLKIQLTTYVDQVFPEIQYFFKSGLHQNAVYALLKEAPSPKEIASMHMTHLANLLKVNSHGHFTKEQAKELRILAQKSVGANDSAISIQITQTIQQIELLDSQLEKIEAEMTDIMKFNDSVIMTIPGIGYINGGMILGEIGDIHRFSNPNKLLAFAGLDPSVYQSGNFQAKTTRMSKRGSRVLRYALVNAAWNVVRNNATFKAYYDAKRAEGRSHYNALGHCAGKLVRVIWKMLTDEVEFNLN

SEQ ID NO: 163336 - protein, 383 aa, unidentified
MNNPILSSLFIGIDVDSIYNVVHMMNFNQKDLNHFKVKNDLNGVTAIKDNTIETTKKYNFTNVIFVLESTSIYAFHIATFLSSNEELLIYNPKVYCINSKISCNYRASFADTNKDDFTDAKLLANLARVGRCDKLTPWKGAQFLALQRLTRHRKHLADMLAREKNYILNNIFLKFSGLCTASSSESPFSDMYGATSTAILTEFLSPEDIINTSIEDLVIFVNDKSNNKISNPEETIKLLKQCATNSYRLDKVNLLPINLAITSSLNCIRSFENEIKAVSREIQALIKGFNNEEYICLTSIKGIGPVFAAGIISEIGSIDQFDDDDALAKYAGITWRKTQSGKFESEDNPLTKTGNKYLRHYLIEAANQVRKFVPEFNDYYNKK

SEQ ID NO: 163337 - protein, 424 aa, unidentified
MNLTQNERLNQVTADTLVVGVDIGSQDHFARAFDWRGFEFTKRAFRFSNTGVGFLSFVRWLNELQNKTDTKKVIVGCEPTGCYWLTFQRFLKDHDIQLVTVNPYSVKKCKELDDNSPEKSDLKDPKTIAGLVREGRFSTSYLPSGVYAEIREASVCRDMIMKQHVRLANQIQGWLQKYFPEYLDCYKDWDSTSGLMLLKNAPLPQDIIKLGAGGINQIWRDAKVRAAGIKRAKILVEAAQESVGLEGGEAARLEMWILVNDYISKAEQLARLDKYLNEKVMEVPNVEKLLAIKGVGLSTVIGFVAEVGDIGRFTDPRQVQKLAGLEITKISSGKRKGQPGISKRGRRKLRRTMYESARSLINWNPAFLDVFLYYRNRERRPLGSMQAKIAVACKAIRVFFVIMRTGCDFDEERFRKDILRPEVA

SEQ ID NO: 163338 - protein, 346 aa, unidentified
MRKSIINLSSVTTVGLDLAKHVFQVHCVDASGRVVVAKAIRRNKLLEFFASLPRCLVGLEASGSAHHWARELIKLGHDARMMPPAYVKPYIRRQKNDASDAAAICEAVTRPSMRFVGVRSLENQATLMHHKTREMLVSQRTQLLNALRGHLTEVGVIAAQGPRHGRELAELIEACDETIPFEVCEALAPLAVQLRNLDEAIARLDRTIAKMAQKDETARRLMSIPGFGPITASAMAATIQDTSGFASPREFAAFLGLTPKQNSSGGKQKLGRISKMGNRNLRKLLVVGAHAVLFHRKPHTDPLRMWAKKLIEKKPFKLVAVALANKMARIAFAILRGKTFYREIPA

SEQ ID NO: 163339 - protein, 429 aa, unidentified
MIMGFTKPIEHFILQRKKVITMNTLYVGIDVSSKSNVVYLMLPNGDKHSNFSVANSHEGSTQLVKRILSALTSHSLDTVLIGLEATSVYGDNLVYFLREDATLAPFNRKIHVLNPKQVKKFHDAYNDLPKNDYVDSFVIADCLRFGRINKEVYLGDYRYKALQNLTRARFFAVQNLIKEKQRFMNVLFKKYSTMTQEKVFSDTFSTTALAVYDEFDSAEALANMDLHELTDFIIEKGKNRFPDPDAVAKAIQKAARSSYRLPKTVNDSVNQVLSISITSMKALESQIKEFDKAIKAQMELLPNVLISIPGIGPVYSAGIMAEIGDINRFDNQAALAKYAGLAWKQHQSGSFEAEVTRLIPSGNRFLKYYLYEAAFSLVRCDKEYSDFYHLKYKEVNRCQHKRALALTARKFVRLVFRLLKDNRLYVPAK

SEQ ID NO: 163340 - protein, 331 aa, unidentified
MDQRNYVGIDVSARSLEVALVGAERRSATATFANTSTGHRQLIKWATKRGRLAQVCLEATGVYGLAVALALHHHPKTEVMVVNPKAIKNYAGATMQRAKTDAVDAQLILDYSRRMPFARWQPPSDEVLQLQAITRRISQLKVELNREANRLDAEDYKVATTDLIERDIQVNLRPLNRRMVRLEKEAVALVLSVPHLSMLFQRLLSIPGIGETSALRLLAELAVLPEGMKPPQWVAHAGLDPRPHESGQSVHRPRAITKAGNKYLRAALYMPALVAMRHQPNVKAFYDQLIAAGKKPLQAITAVMRKLLHAIWGVWKHDQDFDGQKFYKIAT

SEQ ID NO: 163341 - protein, 429 aa, unidentified
MNYTQNEKIEQVTDSIIVVGVDIGSQIHYARAFDNRGRELTKRVFSFHNNLEGFNFFNLWAETLKTENKKTAVLIGCEPTGHYWFAFAKYVNDHQKRLVMVNPFSVKKIKELDDNSPKKTDSKDPKTIAKLVVDGRYSIPYVPEGIYAEIRDLVYSRDRIMKQHNISANRIQRWLAIHFPEYLGLYTRFDAISGLAVLEKAPLPKDVIALGVNGIRKIWHDKKMRGRGVTEDRAKTLVEAAHNSVGLDGGIGTKSELYMLLEEHRLWTSQLEAVNKVLEEMILKVPHVEKLLAIKGVGSITIAGFIAEVGDIRRFDSPKQIQKYAGLELVENSSGKHKGRTRISKRGRRKLRKILYQVMVPLLARNREFREIYDYYVTRVKNPLKRRQAMVAVSCKLIRVFYAVLTKGMEYDRFKMMSDIHRKSDIIAA

SEQ ID NO: 163342 - protein, 418 aa, unidentified
MNEDENARGTRRYVALDIHKHYCVVAAVDREGRVVLHPVRVEHADLEGWLKKKLQPSDHVVFESTTNAWHVYDLLEPLVERVVVANPIKVKQIASARVKTDVRDTLILARLLAANLVPDVWVPPAHVREMRQLLSQRRQLVETHTQIVNRMHSVAHRHHLKHERGKRFNEKNTVWQKDKGLSKTEQFQLELEMENRAYTEKQIGRISKEVAKMSHRKPWAEGMTYLMQLPGFGVITAMTVLAAIGEIERFGSAKHLASYSGLTGGVEQSGTHLVQKGITKEGRQELRWAMVEVAQRAVKSDPRWTRKFQELHKRMHRNQAIVAVARQLLELVWYVLTRRQPYRHFSQERIAYKYLTWAWQMDEAARDGLSRQQFARYYLMRLGIGHDLTRIALNPKYPRKLASEAELLALQPELKHIE

SEQ ID NO: 163343 - protein, 358 aa, unidentified
MRIIGCDLHARQQTIAMLDSDTGELEEKTLEHEGDTVREFYSALRGPILVGIEATGSMQWFLELMEELGIECRVGHPQKIRKAETRKQKHDRRDARLLLTLLAENRFPTIWMPSSEQRDLRTLLRHRHQWVRLRSRVQHTLQSMALNHGLRRGRSLWSQAGQDELRALPLAPHASERRKALMTLYPGLQESIDQLDQQVSQQVQQHPRARRLLTHPGVGPITALATEVFLGDPLRFSDGKALASYIGMIPSEHTSGRRQRLGAMSKQGNALLRYLWCETAMHAVEGDPDLKRFYRRKLVQKGLGKARVAAARKLGIRLWIMMRDQIDYQEFCRRGKARQESGRVRAGMPDLDSGPAAQ

SEQ ID NO: 163344 - protein, 350 aa, unidentified
MMIIGCDYHPGFQQIAYLNSDTGELHECRLGHKEEAEQFYHDLRTRGLPVRVGMEASGHARWFERLLAELQFELWIGDAAAVRSKRVRKQKTDRQDAQLLLQLLMENRFPRIWVPDAENRDLRQLLWHRHRLVQMRTRVMNQLHVVALNEGLRRKKALWRPAGRAELEGLSLAPWASRRRQDLLDLLDQLTPKILELTRRLEEVVEKRAVAAHLRTHPGVGPLTALAFELVIGTPERFQCAKQIASYVGLVPAEESSGDRRRLGHISKQGNALLRFLLVEAAQVTVRSQPQWRSQFFHLAMRRGRKIAKVAMARKLAVELYWMWRRGWNYNEMQQLGSHAGEPGNRHGVQ

SEQ ID NO: 163345 - protein, 442 aa, unidentified
MRVMVKCGAGIDVHKKSVVVNCRRVEAKHVETETRTFGTKTPELLLMTDWLASWGVTDVAMESTGVYWHPVYNLLEGSYDVLVVNAKHIKHVPGRKTDVKDAEWIAELLSYGLLKASFVPEKPQRDLRDLTRYRTKLVQERAREVNRVQKLLEGANIKLASVATDVLGVSGRLMLEALIEGNVDEETMANMAKGRMRSKIPELEQALTGIVSEHHRFMLGEQLAHTDFLDGQIINISTEISVRLEKMSEEQQPPTAPERQDKAEPVDDDERPLTWQVAVKLLDTVPGINQRAAEAILAETGIDMSQFPDANHLTAWSGLAPGNNESGGKRYSGRTRKGNQTLRTTMVQAAHAASRKKGSYASALYKRLVGRRGKKRAIVAVARSLLVSIYHMLTRQQEYEDLDSDYFQSRRKENKIDYLTKQLAKLGYEVRLAPQLDPAGVG

SEQ ID NO: 163346 - protein, 311 aa, unidentified
MTSEKTWVGIDVSKASLDVHSLPQGIAFSVSNTETGMRELIEQLQPLAVSLVVLESTGGLERMSISALQQADIPVAMVNPRKAKGLAISLGKAKTDELDAYVLALFAQIIQPQPLPKINANAQALSDLTRRRAQLVEMQVAEKNRLSSAPTSIQADIKAHLKQLKERIEGLNAEIQTLTQAEANWSRKQEILISVKGIGPVTAALCLAELPELGTLTDKQIARLVGVAPINHDSGQYKGKRMISGGRTSVRCGLYIATLVATRHNPVIKAFYQRLLERGKLKKVALIACTRKLLVILNAMIRDNKTWQVPA

SEQ ID NO: 163347 - protein, 418 aa, unidentified
MDTIYSRVAGLDVHQKSVEVCVRCRQQTGKLFSQVRSFGTMTRDLRALADYLESLDVTHVAMEATGVLWKPVWNILDGRFVMLLVNPHHLKKVPGRKTDIKDAQWIAQLLECGLLRGSFVPPRPVRQLRDLTRHRAQLAGEHTRVANRIHKVLEDANVKLGAVASDVLGKSGRAMLRSLLDGEEDPSRLAELALGQLRKKIPQLRLALEGHFTEHHRFLLRQMLSHLNYLEEQSEQFSQQITPQLRELLDLRDQGRLDAIDGVNITTIENVIAEIGADMSVFPDEHHLSSWTGICPGNEESAGKRKRSRTQKGNRWLRRALAEAAWAANHTKETYLAAQYRRLAARRGKKRALLAVGHTILVIIYHLLKNKEVEYHDLGGDFFDRLEPERLRRYLVKRLQTLGWDVTLKPKEADDQAA

SEQ ID NO: 163348 - protein, 353 aa, unidentified
MNQLTTIGIDLAKDVIAVCVMDQHGAVTEHRVLRREAFERWAAQLEPALVAMEACGSAHHWGRWFAARGHAARLIAPEFVVPFRKGGKNDTADAEAVAIAARQPTMRFVPVKTVDQQAMLAWHCVREGWKEERIALLNRVRGLLAEFGVVIPRSPERLLTALPALTEDPRLPDPIHALLLEVREQLSALHARMAQCDAHIAIHAKHSTTAQRAMQLTGVGPVTASALAATVPDARVFRNGRRFGAWLGLTPRQHSSGGKTRLARISLRGNVYLRNLLIQGARSTLQSALRADPLKASRLQRWISALYARKGYFKTVIAIANKHARMLWAMLAKDENYDASAWQRHPMSSPKNT

SEQ ID NO: 163349 - protein, 345 aa, unidentified
MKITTVGIDLAKNVFQVHGIDERGKAVLCKQLRRAQVAVFFGNLPPCVIGMEACASAHHWARTLQDYGHMVRLIAPQFVKPYVKTNKNDVADAEAICEAVSRPNMRFVPVKSIEQQAILSVHRVRQGFVKARTAQANQIRGLLGEFGLVIPQGIYNVAKRVPEILEDASNELPMPFRHLIDRLTEHLKELDRQVKEFEQEIIAWHRNSELSRKLEKIPGIGPLAASALVASIADARSFENGRQVSAWLGLVPRQSSSGGKPTLLGMSKRGDAYLRTLLIHGARSAILAAKNKVDNTQGWLTNLLKRRHPNIAAVALANKNVRTVWAILAHGREFKADYVPTRMAA

SEQ ID NO: 163350 - protein, 358 aa, unidentified
MNEITRVGVDLAKRVIQVFAVNAAGLRVTGRALARDKFLAWCVQLPAGCLVAMEASASAHHWARKLLALGLDARIIAAPHVVPYRLQGKSGKNDANDAAAICEAASRPHMHFVPIKSVEQQSMLCIHRLREGVKADRTACINRIRGLLAEFGLVFAQSPEALRQALPDAMEDASNELGGLARLALQRACAQWQELDAHLRWCDERIAAHGKLSAQVRQAEQLPGVGPVTASAVVATVGDFKQFKNGAQFGAWLGLTPRQNSSGGKNNLGRITKRGDAYLRTLLIQGAKSIVLTAHRRDDPISRWVQALRERSGWQKAVVALANKNARILWAVFARGRAFDAHHVSTQPPGAIAAVIAA

SEQ ID NO: 163351 - protein, 377 aa, unidentified
MHGLTHHSTTVIRILALDLGKFTSVLCIYDPATHAHRFVSAQTTPRTIHDLLVEHQTPDPAQTLLIIETCDVAGWVHDLAVALGMTIAVANPAHEAWRWTRVKRKTDKDDALKLAKLAVLGQLPTAHMPSPAQRQRRRLVHHRRVLVDRRTQIKNQVRSIFSQQGLSLPPRGKAWTKIGLRQIAGEARPLADCDAIDDLWRGRLAVELQLLEALDAQVAQVDAKLDALGAADERVQLLRSVPGVGPRLAETVVAHLDDPHRFKTAGQVASYAGLVPKQFESGTIKRSCRITRRGPALLRSMLVEVAWMVYIRNDWARQFVARISRGVPSRKNIAIVALARKLLVTLWAMLRDNTRWREPAAAAAAAAAAAAAAVAIG

SEQ ID NO: 163352 - protein, 421 aa, unidentified
MALCPHHWKIGETICNDPQVCRIVDLPVYYELETNNGNRDYRIQIGGHYMNYNTVYVGMDVHKESFTLCSCKYEDEKASHYQRTPASYKNVLRYLAFLRTIYGEDTRFVCGYEAGCLGYSLYHQLENFNVECVILAPTTMLEQRSKRRIKTDKRDAEIIARSLAQHNYSPVHIPTETDNQTKEFIRMRDDHKAELKKIKQQILSFCLRQGYQYDGSGNWTAKHVKWLRSLKPAGLYKEILDEYLLTYTILTDKLNRLDQRIEELAFKEEYKESVSKLTCFLGIKTHTALSVIVEVGDFQRFVSARKFAGYLGLVPGQHSSGDDRNGLGITKAGNTHVRRLLVESAQSYTRGKIGYKSRVLRSRQAGNSPQVINYADRANERLRRRYYKMVLKDGKKYNIAKTAIARELACFIWGMMTDNIY

SEQ ID NO: 163353 - protein, 381 aa, unidentified
MTTAATHDEQSNATEATLFVAFELSEKTWKLGFTTGHGQKPRERTVTARQQERVLDEIAQAKRRLGLPDSAPVVSCYEAGREGFWLHRFLQAHGITSHVVDSSAIEVNRRQRRAKSDGLDVRKLLSMLMRYHSGERQVWQVVKVPTVEAEDQRHLHRDLETLKQERASTTTRIQGLLSSQGLRVTSLTKLPEQLEALCLWDGSPIPPGLRRRVLRVYAHHTFLSEQIAAVEVERRTQLQASTDTSIDKVRQLMQLKGIGINGAWLLVMEFFGWRAFKNRREVGGVAGFTPTPYQSGERAREQGISKSGNRHVRWMTTELAWSWLRFQPDSALSVWFRARFGGGGKRLRRIGIVAVARKLLIALWRFLETGVIPAGAVLKEA

SEQ ID NO: 163354 - protein, 375 aa, unidentified
MKKTRFSEEQMVKILREADKTPVAEVAKNVFELAIADGGWRITERARLSRSQFERWFVNRRVGLVVMEACGSAHHWARWLTGLGIEVKLLPARYVRAYVKRNKTDAADAAALLEAVRCAEIVPVRVKSLEQQGLQALHRTRSLWMATRTSRINALRGFCREFGISIAQGSRVGVEQIARVLADPQTVIPSLLRGTMTLLIEEIRLLEGRISQLERELTAAAKQSPACTTLLSVPGIGLLTATAMVAATGGAVSHFKDARHFAAWFGLTPKEHSSGNHRHLGRISKRGDRYLRMLLTHGARSVLRAASIATAAGKPIDALRQWAMAVQKRSNHNKATCALANKLARICYATLRDQEPYGAHRLNRKLQRVAFAMPA

SEQ ID NO: 163355 - protein, 359 aa, unidentified
MFKDSTTYIGVDLGDKQSHVVILDSNGEMVEEARLPTTRSSFQRKFSSLPGCRVAMEVGTHSRWASHLLENLGHDVLVANARKLRAIYSNPRKGDRADAETLARLGRLDPELLSPIHHRSPQAQADLAVLRSRDAVVRSRSLLINHARSIVKSCGARLPSCSADSFAHKVASDIPESLRPALAPILDTIACLTQQIRAYDRKIEELCSECYPETKQLRRINGVGPLTALAFVLTLENPDRFRKSREVGPALGLVPRTDQSGDRDPQLRITKTGDSYLRRLLVGSAQYILGPFGPDCDLRRWGLRLAERGGKNAKKRAVVGVARKLAILLHHIWKNGEIYDPFYQSDTNALEPLPASKAA

SEQ ID NO: 163356 - protein, 417 aa, unidentified
MEVLYRTCCGLDVHKQTVVACLLSVQPDGGRQKEIRGFGTTTESLLALSQWLGGAGCTHIAMEATGVYWKPIYNALTLSGRFDGVLVANAAHIKAVPGRKTDVKDSEWIADLLQHGLLKASFIPEPAQRELRDLTRTRTILTDGRTAAINRLQKVLEDANLKLASTKLVTNIMGVSGRLMLDAILEGNASPSEIAELAKGKLRRKRQELETALVGVVKPHHRLLLALHLEQIDLLDEQIARLSQEITERLLPFEQELARLDAIPGVGRQTAEVFAAEVGFDLSHWPTAGHLASWAGMCPGNNESAGKRKGGKTRKGSKWLRRALVQAAHAAALKNGSYLQAQYRRLKYRRGAGKAAVAVGHDILRIAYHLLTHKLDYKDLGPNHLDERHRARTQLRAIAQLEALGLEVSVKPRQLAA

SEQ ID NO: 163357 - protein, 423 aa, unidentified
MMRLIYPICCGLDVHKKVIVATIVTTDNAGISTYKQRSFSTINSDLRLFHDWLLENGCKHVCMESTGKYWIPVYNYLEANIAVCLTHPKYVKAIKGQKTDKKDSKWIADLYKFDLVRCSFIPPKDFRQLRELARYRFKLVCMKASEKNRVQNCMTVSNIALANFVSDPFSKTATDILSYLLQHTSDDICDKDIQKLIRKNSRASADEIFAAVKGYTIEADQAKKLELARNHLDYLDEMIKSTEVELYVRIKPYWEYVEIVSTMPGMTQLSSTIVLAETGVDMNVFDDAGHLCSWCGLTPRNNESAGKKHSTKIMKAGAYLKPMMVQCALAAIACKKQPYFAIKYRRIKKRRGHKKAIIAIARMMMVCIYHMVKDKKPFTPCDYEEFMNPQKQPQKVVLNDANVFEYLKSQGYDTSSLVKCNDN

SEQ ID NO: 163358 - protein, 402 aa, unidentified
MHHPTPCFAGIDWAMRSHVVCVIDAAGETVERFEVAHDAPGLSALGRRFERLGVAQVAIERPDGPVVDHLVASGFEVVVVPSRSVKVLRTRYSLAGNKSDGADAYMLADVLRTDGHRLRALTPDSAATQALRAVVRARKDLVAHRVALVQQLEAHLERAFPGGTRVFAETGSPIALRFLRRFPTQVKADWLSPARLAAWLSANAYSGRKDPGVLFGRLDSAPDGPRGEEAELLGVVTLALVRAIEDMRERIAELEARIAERLVLHPLGHVFTSLPRAGTVRAAALLAEIGDCKERFPTPESLAALAGVVPSTRASGQHTAVVHRHICNKPLKTALCDFAQDSRFDSPWAADIYNRARASGKRHPHAVRIVARSWCQVIWRCWQDEVPYDPVRHVGAQRLRAA

SEQ ID NO: 163359 - protein, 364 aa, unidentified
MGVGSRHRPRLDWKPAAASADRPRMSLALQSFLPFPNSCQGTSPHQQGRGTKMTEHCYCGIDVAKDRLDAQVLPHRQRFSVDNNATGWAELVERLHALPIAAVGIEPSGGYERGIIRILLAAGLSVRRINPSKLRQFARARGILAKNDRLDAQLIAEYVSIMPTRVVQRVATAERLAEVVTMRRQLCDQHVTIENQAAHVEDAILRRLNKRRLARLKADIHLLDKRLAEIVAADVILAQRYELLTSMRGVGPTLAFTLIALLPELGQISRKQIAALVGLAPYDFDSGKLKGHRCIYGGRMPVRNILYMAALSAARYNPALKVFHNRLAAINKKPKVIIVAVMRKMITILNAMVRDNAAWQPRAA

SEQ ID NO: 163360 - protein, 411 aa, unidentified
MEAIIEHAAGLDVHQSSVVACVISGAAGRRTSRETRTFGAMKQDLAALRDWLLEKGVTHVGMEATGVYWQPVHAALEGAFTVIVGNASHMRNVPGRKTDVKDAEWTADLVRHGLVRASFVPPPQIRVLRDLVRHRKALVNTQAAERNRTLQLLESANIKLAGVISDVFGVSGMLMLQALADGQAAPAEMADLAKRRLRRKIDQLTLALDGQLAEHPRLMLSLHIRRLVEIDRDLAEIEAAISVAMRPFAAQRVLLTTIPGVDELAAAAIIAEIGVDMTVFGTAQRLAAWAGVCPANHESAGKRKRCGTRKGDTFLKAILVTAAVSASQAKGTYLRDKFHRLKARMGTKKAAMAVAHKILVAIFHMLQRGIAFVDLGGNYLDGINKHRTAKRLVRRLNLLGYEVMLRPQAAA

SEQ ID NO: 163361 - protein, 428 aa, unidentified
MSKPSFAKLEAITPETLIVGVDIAKELQWARFTDYRGLEIGRVIKFSNNREGFENILASIETTCKLKRLAEVVVGMEPTGHYWKPLANYLILNGIKVVMVNPYHTKRAKELDDNSPTKSDRKDALTIARLVREGRYYEVYMPHDVYAELRVLSNTRIGLMRRQNALKNAITAVLDEYFPEIKEVFKCPLKGKASLQIMKTCPFPALILELGVGGVLLEIRKAVKKTVGGKKALELVEAAKTSIGVNYGATSAKLKLGLMIEELELLTEQLEQIKSAMEVALKDTGLKEIILSIPGVGVVTAASLLGEIGDPLRFAHPDQISRMAGYNLVEDSSGKNQSGTVISKRGRKNLRSILYQMALVMVAVNEEMKELYHYLKARPNNPLKKKQALVVISKKVVTIIYNLAKKQTEYKAELVFNEYRKNQIKQVA

SEQ ID NO: 163362 - protein, 342 aa, unidentified
MTPYLSFVGIDMASAYFVACIGTTPWRLLVKPVKFENNEDGFVSFLAWLQEHKLQVENTVVCMEATGVYGEGLAYFLHASGYRVAVEPPLNIQRKFPVNASKADELDCQYIGEYACRYLDKLSFWQPRAEILEQVKVLLTTRQHFSVQLTGHKNALHALNRKKIVSTLAQHVHQTMIQQISSSIKDIDREIRRLIESDPTFKQTLLLLLSVPGIGLQLAAHLLLHMQETLDPKTMAAFIGISPIKHQSGSSIYTTPTSRHYGPPALRKLLYLAACSVRTHKKPFQQYFFRKLAEGKHKKLILNNIQNKILKIACAVVRSQKPYIPNYVSVNPLVFQKSLTGS

SEQ ID NO: 163363 - protein, 355 aa, unidentified
MDSKKYIGMDVHKESISIAVMNGAGKIVMECVIETKASMILQFIDGLRGDLQVTFEEGTSAAWLYDLLKPHVTKLLVCDPRKNASMREGHQSDKIDARRLAELLRLNHLSPVYHGEHGLRTLKELVRSYLTITKDLARIMTRVKAIYRSWAIPCTGKQVYAPRHRAEWLGKIGEPGVRRRAEFYYQQLDALRTVRQEVRRELLAEAKKHQAWKRLCQIPSIGPIRAAVLLGILQTPHRFRTKRQLWSFSGVGIETHSSADYRSVDGRLQRTKKQLSIRGLNRNCNRDLKNLFKGAAIVASSKPGPFQEFYNALLTKGIRPEMARLTLARKIATIVLIMWKRGACFDAQHLKPQTA

SEQ ID NO: 163364 - protein, 418 aa, unidentified
MRNSWTPYKFTFGGTRMYNAVGIDVSKGKSTVAVLQPAGVIIRKPFNVNHTSSELDELAKYIGSLEGETRVVLECTGRYHEPVVKTLSEAGLFVSAVNPHLIKNFGNNSIRKVKSDPADAKKIARYTLDNWIELRQYSSMDNTRTQLKTLNSQFSFFMKQKVAAKANLIALLDNTYPGVNKLFDSPVRDDGSEKWVDYAYSFWHVDCVRKIGLKTFTERYQAFCKKHHYNFQPAKPAELFLASKDLIAVFPKEASYKLLIRQSIQQLNLASSHVEELRSKMNELASTLPEYATVMGMYGVGKTFGPQLIAEIGDISNFSHREALTAFAGVDPGVDQSGTHNSKSNKASKCGSNRLRKTLFQIMSTLLQTAPEDDKVYQFLVKKRAEGKPYYVYMTAGANKFLRIYYGKVKECIRNLEQ

SEQ ID NO: 163365 - protein, 407 aa, unidentified
MTNVCVGVDAAKGKSTVCVIDENGEVLLSPKDIEHAKKSLDELIRTLKKTGRKEDMKVVMEATGIYHWPVLNYLKKEGFFVSVINPLKTRLFIRNHSFRGAKTDRIDSKMIALYGIENYQELKNSCLEEDQARLKLKRLSRNYEDYLKPKIKLKQALDVQLEKNMPGIKKIFYDDDRLFDFVTCFYHYDNISKMSESKFKERFDRWAKKKGYRFKSSTSARIYELSKSGIPSVSFDDVSKLTVTGIVNSLRSINESINSIISAMRDLAKTLPEYEVVMAMAGTGGTLGPLLMAEIGDIRHLRNKKSLVSMAGIDVPPYESGQFKANHRLITKKGNSHLRRHLYLVMTALVMNRPKTDTAVYDFMVRKKEEHKQFKQVRVAGMRKFLHIYYARVKEKYKELGIWYKDI

SEQ ID NO: 163366 - protein, 353 aa, unidentified
MNATTVAVDLAKNVFELALTDAQWKIIERARLTRAQFERWFDNRKVDRVVMEACGSAHHWGRMFKARGIEVRLLPAQYVRAYVKRNKTDAADCLALLEAVRTQDIKPVAVKSVEQQALQALHRTRSGWMSTRTRRINTLRGFCREFGLVVPEGAATGLAQIARYLADERSGLPEMLRSSMRLVLEEIRLMEARIGQLEQQLAALAKLSPACQVLLSVPGIGLLTSTAMVAAVADPRSFDSGRRYSSFLGLTPREYSSGSTRYLGRISKRGDRYIRMLLTHGARSILRAAIVAKRAGRQLDRLKSWALAVQARTNHNKAACALANKLARIAWAVWVKHERYRAEPAPTTASFSA

SEQ ID NO: 163367 - protein, 338 aa, unidentified
MKLYGAIDLHSNNNVTVLIDEEDKVVYEKRLPNDLGVIAQQLSGYQSSLEGIVIESTYNWYWLVDGLMDKGHQIHLANTAAIQQYEGLKYTDDHSDARWLAHILRLGVLPQGYIYPKEERAVRDLLRKRGQMVRQRTANLLSLQNLITRNTGSSISSNRIKTLDSETVNALLPNQDLALAVKANLAMIQCADGQIDILERTVTDRVKLRAAFSFLKTVPGIGQILALTIMLETGEIQRFPTVGDYASYCRCVGSQKLSNGKKKGSGNTKNGNKYLAWAFVEAANFAIRYNARIKSFYQRKKAKSHGVLAIKAVAHKLCRACYYIVRDQVPFNVAKAFA

SEQ ID NO: 163368 - protein, 337 aa, unidentified
MNNKFCCGIDVSKKKLDVALLKEEKFYYKVFENSNDGVILLQEWIKNQLEKDTFVHFCIEATNVYHELVAFSLLENKNFKVSVVNPRRVKAYSKSIVNTKNDKTDAKVLAQFCKERNPQQFTPQSKERRELRDLSRLMDNLVELRIMQKVRLQTFNTEAAARVVKSTIKSIENTIAETEEEIKYYYDNYPELKQEFELLNSIPSFGKRVSNVLISEIYKDEYGVYNSKKLTAFFGLEVRETESGSSVWNKPRITKFGNPRVRNMLYMAALVSIRHNLKMSDFYLRLVNKGKPKKLALIAVMRKLLVIACAILNSQNKYDENHISTLKTKKETLKISA

SEQ ID NO: 163369 - protein, 344 aa, unidentified
MNYVGIDWAYGRAAFCAMGDGGEIAAEGLIPANEDGLAKLVLKLGSEASGCVEMMSGAVWVKDRLQAAGWQMKVAHARKVRDVAPLACKTDKVDARVLAELCRRDLVPELWLPSPEDRALRERLRRRAHLVKARTSARNRIFGLLTQFGLRISHRRLRRPDAIELLRRRGVPEVWRASIAELLELAEEMDGRIKPIDRELAPLARSDERARLLATIPGVGPLLSLTFAAEIGEVARFPGPGKLVGYAGLAPRVSQSGERSATGALSKAGSRTLRWAAVEAANQAWRPANPWHGHYLRVSARHGKNPAKSAVARKLLIAAWHMLSRGEPFEPPPRTLPRRAPAAF

SEQ ID NO: 163370 - protein, 356 aa, unidentified
MSRDIKYIGMDVHQEAVVIAVLNSSGKLVMESIVETKASSILQFIHGLRGELHVTWEEGTWAAWLYDLLQPQVERVLVCDPRRNALLKEGSKNDKVDARKLADLLRTGMLRPVYHGEHGLRTLRELGRSYQTLSQDLNRVMNRIKALYRGWSIPCAGTQVYAPRYREEWLRKIEHAGVRRRAELLYQQLDGLQQLRRTLRPELLTESRKHKAAKLLRQIPCIGPIRAARLIALMQTPHRFRSKRQLWTYSGLGIETRDSAQYRYVRGELQRTKKPQQIRGLNQNHNHEMKEIFKGSATRASCGVGPLRDFYVALLAKGMRPEMARLTLARKIAAIALTLWKKEERFDAEQLKPQAA

SEQ ID NO: 163371 - protein, 349 aa, unidentified
MSPKLNYGIAVIGIDIGKNSFHVVGVDRRGAIVLRQKWSRGQVATRLATMPPCLIGMEACVGAHHLSRELSSLGHDARLMPAKYVRPYSRGQKNDFRDAEAIAEAVQRPTMKFVATKTAEQLDLQALHRVRERLVSQRTGIVNQIRALLLERGVAVRQGLRFLRAELPRILAMPCDVLSPRMVRVLEDLACDWRRLDERIEGLSSEIEVLARQDAGCERLMSVPGIGPIVSSAMVAAIGGGDAFSKGRDFAAWLGLVPKQISTGDRTILGKISKRGNRYLRVLFVQAAWVVLIKPKSWDRHGLKPWLEAAKKRLHHNVLAIALANKLARIAWSVLARGRAFEASKIQVA

SEQ ID NO: 163372 - protein, 417 aa, unidentified
MNQDVEVVHSRCCGLDVHKKVIEACIIVPEGKRRNQYGTMTEDLQKLVTWLQEHRITVVAMESTGVYWKPVYNILELAGFEILVVNAQHIKAVPGRKTDVKDAEWIAALLRLGLVKGSYIPSREQRELRELLRYRTKLVEERGREVQRMQKILEGANIKLSSVATNIVGSSGRSMIEAMIDKIEDPRVLAELAKKRLKNKREDLERALNGLMGAHQRMMLQAQLKHIDFLDEAIETLDKELAERKKDDATFHESLELLDGIPGVGVRTAQAMLVEMGSNMSRFPSADHLAAWAGMAPGNNESAGKRKTGRTRPGNSHLRTVLIQAAHAAARVKSSYLSDQYHRIAARRGAKRAAVAVGHSILVMAYHILTRREPYKELGHDYHQLRRKDIKIKHYLKELHKLGIVVNLEASTQSIAV

SEQ ID NO: 163373 - protein, 420 aa, unidentified
MKTPGNKPFTAFIGIDWADAKHDVCMQAAADECREFSRVSHTVDDIDEWAQSLYRRFGGPIAIALELSKGPLVYALQKYDFFVIFPVNPSTLAKYREAFTPSRAKDDPSDAELALDLILRHADRFTALHPQSVEMRTLASLVEQRRCLVNDRVRITNRLRNTLKQYYPQALEWFDRIDTPLFCDFIERWPTLVQVKRARRMTLQSFFHQHNMRSARVLEARLISIKAASPLTLDEAVITPNRLQALVLVDLLRVTLAAIKRFDEAIAELAPQHPDFALFDALPGAGPSLAPRLLVAFGEQRDRFNNAAEIQRYAGIAPVTERSGKKHWVHWRWQCPTFLRQTFVEWAAQTINKSFWAGVYYRQQRDKGCTHQAAVRALAFKWIRILYRCWQTHTPYNEAAYLKALKRRGSPLLNQIETTI

SEQ ID NO: 163374 - protein, 338 aa, unidentified
MRKFIGIDLHSNNSVVVVTDEDDRVLYQKRLPNDLEAIAAALAPHRDETVGVVIESTYNWYWLVDGLMDRGYRVHLANPTAIKKYEGLKYSGDFADAAYLAQLLRLGLLPEGYIYPREQRAARDLARKRMQLVRQCTAQILSIEGILMRQTGARKSCAAIKRLNAEQVEAFAFAPDVALAVQANRAVSAVLQQQIAVLEARLKERVSLRAEYRLLRTVPGIGEILATTIMLEAGPVSRFAAVGNFASYCRCVDTVRESNGKKKGEGNGKNGNKYLAWAFVEAANFALRYCPQAKSFYERKKRKTNVVVALKALAHKLARACFHILREQKPFDVNRCFA

SEQ ID NO: 163375 - protein, 338 aa, unidentified
MTQFSNFVGVDVASISFMACAGTTPWKLTVKPVKFDNHEDGYASFLEWLRENNLKPENTVVCMEATGVYSEGLAYFLSASGYPVAVEPPANIARKFPINASKTDWLDCQYIAEYACRYVDKLAFWRARDEILEQVKVLLTTRQQFSVHLVAHKNALHAVNRKKILSKVAKQVHEDLIQQITKLIIEIDAEIRRLIDSDPTFKATLLLLLSVPGIGLQLAAHLIILMQKSLDPRELAAFVGISPIQHQSGTTVYSAPTSRHYGPPALRKLLYLAACSVRTHRKEFKQYFLRKTAEGKPGKLVLNNIQNKLLKIACAVVRSQKPFIPNYVSVNPLLLINA

SEQ ID NO: 163376 - protein, 343 aa, unidentified
MSEITRVAIDTSKSVFTIHAVDARDRAVLRRNLRRSEVTEFFNKLPPVEVAIEACGASHHWGRSLQAMGHKVRLIPAQYVKPFVKRGKNDRNDAEAISEAAARPGMSTVAVKSATQQAAAMLLSVRELLVRQRTQLINALRGHAAEFGLVRPIGGKGLAALRADIATDATLPAPAAEALAILGGEIDRIEARLAVADAKLLARHKATPESQMLAEVPGIGPISALNMVARVDFTQFKSGRHFAAWLGLTPRDHSTGGRQRLGGITRAGNEGLRQLLVLGATAVIRFAKPEHAKRARISAWLLALLERRPRKLCAVALANKMARIIWAMMTRGEAYRPPAPAQA

SEQ ID NO: 163377 - protein, 371 aa, unidentified
MSANQNSIFVGMDVHKVAINVAVAVRGRREPEAEWQVANEPRAVKKLVKKLKEMTRGAVRAAYEAGPCGYALQRQMCEQGIDCVVVAPSLIPVKPGERVKTDRRDARKIAAMLQADLLTEVHPPTPEDESVRDLTRAREDTKQDQMRARHRLGKMLLRYGFVYREGKNWTMRHREWMRQVRFGDEISQRVFEGYVLVLEQVEERLKRIDEDLASVAQSERYRERVGWLRCLRGVDTVTAMAILAELHDFRRFTNPRELMSFLGLTPSEHTSSTRVRRGSITKAGNSHVRRVLIEAAWHYRHRPSVSTTMRQRRNGQPARVLAIADRAQERLHHRYFKLKEGYKKPHNVVTVAIARELVGFIWAVLRNNEAA

SEQ ID NO: 163378 - protein, 315 aa, unidentified
MVSYLGIDVSSLSLDAAVRPQGTRLHVSNDPAGFEALLDGLCGLSIKRVLLEATGGYERNILRFLQDAGYKVIRVNPRRARAFAESIGVKAKTDAIDAEVLAHYAEVIPDQPTLRISPERALLRELLQQRDRLVQQRDDDRRRLKQAQFSAVSDFLKANLEHFKSQIKLIEQAISQQTEALKDERVTQLVQVKGIGLVTAGKLITLLPELGRVESKEIASLVGVAPFNHDSGKSVGKRSISGGRFEARRSLYMSCLVAIKYNPALKARYEALRGRGKVAKVALVACMRVLIVRLNAMLRTGKPWLDLVLPQPMRT

SEQ ID NO: 163379 - protein, 416 aa, unidentified
MPRNKRVVMEAIYECVGGLDVHQATVMACRRRLIGQGQVEVEVQEFGTSTQSLRALSEWLSEWGVTHVAMESTGVLWQPVWNVLEGTFQWVLVNTQHLKKVPGRKTDVSDAEWIAQCVQCGLLRGSFVPPEQVRQWRDLTRQRMKLLDSHTAVVNRIHQVLEQANIKVSSVASDVMGVSGRAMLRAMIEGESDAAKLAQLAGGRLRQKHVQLVDSLEGRLSEHQRWLLARLLHQVEFVEQEIAAYDARVRELMRPFEAALERLETIDGVGRRTAENLLAEVGPEMGQFASSDDLTSWAGICPGNHESAGNRHSGRTPGDNKWLRRVLVEAAWAGIKTKDSYLGAQYRRLAARRGKKRAIVAVGRTILVAAYYILKEEMEYQDLGGDYFDRLNEEKTKKQLVKRLEKLGYQVALRVA

SEQ ID NO: 163380 - protein, 425 aa, unidentified
MKVTACADSRLEPDAAVLAFDVSMDVVNLYTELGAESLEFEFENRTDVIERHLVDLEARALRLSYKRVLVVAEATGGYQECLMRVACRLGLEPAWVNGEAVAKMRVVESNDSGKTDIKDPRVIHLVARMGKTLKYRELDELYGALREWHKVYEAAHSGVAHAKGAMHRRLKALFPDYSFAKDFLYHQSGRALMDRYGANPYRIVASGKAPFARVMRKAAPRIQHRSIERLWRDASISVRNRLSGEQARIREVRLRQSWEEFLLHDERKIETATEMESIYEQLRMRDRHLPRAQKGVVSKLMLARIVAETGPLSDFSSKKKIIRFAGLNLRERQSGKYRGKTKLSKKGRTSLRNALDQAVLPLVKKSALFGEYYHRKKEQQKMPGTKAIVAVARLFLKMLFGWYKSGQAFDHNRVFACETSYKMAA

SEQ ID NO: 163381 - protein, 416 aa, unidentified
MSSRTQSRPRIKADTLVVGIDVAKRTHVAAIRKPDGTKEKPFPFGNDRPGFEHLQARSERTRERLGLNGVVFALEATGHYGHALRQYLGLQGYAVLGINPAHTKKTKELDDNSPEKSDPKDARLIADLAAEGRGRLVRPVKGVFAELRRLGKLRERYVVERTRLSNRYSCLVDLVFPELVQEVRKLTIRSIRRLLAEYPTAREIAGLKFEELEDRLGRWSQRRLRPDKIARIHRLARESVGIVEGLETARMEMRQLLESLDLVEGRLQEVEAAQRAALEKVPYAHLLLTVPQLGSVTVAAILGETGDLKNYKNAEMVIKMAGYNLYTISSGMFRGKTRITKRGRPMLRRYLFLAACRLSKKGAPLREFHERLTARKAKPQVLVGSCRKILRLLVAMVRDGKPYEPGRLAMPLGEAA

SEQ ID NO: 163382 - protein, 347 aa, unidentified
MVTFGCDSHKRTHTLVVVDQNGCQLAERRVAATVSGHLEALDWAGQWSERQWALENCRHLSRMLERQLLSAGEVVVQVSPKLMGSVRRSSRELGKSDPIDALAVARAALREPHLPVAQLEGREREVKLLIDHREDLVGERTRIQNRLLWHLHELEPGYQVVASGLLRSVVLAEVSRRLERHTGVVAEIACELVVRLAELTQSVKRLQQRLESLTRELAPSLLSLPGCAALSAAKLLAETADVSRFRSSAAFAMHNGTAPIPVWSGNHNRHRLNRGGNRQLNVALHRIAITQIRLGGPASAYVARRLTMGNTKTEAIRALRRQISDEVYRRLRQDQLKRSTAQVAVAA

SEQ ID NO: 163383 - protein, 331 aa, unidentified
MFPVGIDVSKNTLDLCMLYDGIKGRIKTRNIQNNRHSVENILRWLRLQHCSPEDVHVVMEATGVYHEQLATELHDAGFRVSLANPHRSREFARGMGIMTKTDKVDAYMLACYAFLKKPHRWEPPAPEIRYLGALLRRQDVLLGDALREENRLEKYLSTDTPADIISSCRRMAQLLREEISNIERQIKAHIKASPALRRDYTLLTSIKSVGPQLGMHMLIVLRSHNFVSAEQAAAFLGVVPIEKRSGTSVRRRPRMSKIGPPQLRAKLYMSALCGKIYNKRMRNIYDEMCLRGKPKMVAIGALMRKLVHWCYGVLKTGTVFNDEDLKPVLST

SEQ ID NO: 163384 - protein, 371 aa, unidentified
MITLGVDAHKTMHVAVSVDEGGRPLDTWEGTNSQSSWQEMLAWASQWESRQWGIEGTGNYGRGLAQHLVAVGETVYEVNPRLTAQGRRRARKQDKNDRLDAQAVARALLRDVPELPEVVLEDEAAVLELMNRERDRLRTQVDRLRNQLHNRLFQVDPQYRKSFPSLSKLAAIQNLEQYTAAADTPLASVRGAAVRRVASLLRLVLEQHQQITGEIESLSGTRYGALTEIQGVARLTAGILAGILGTRRFATEGQFASYSGASPIETSSAGRVRHRLNRGGNRRLNRVLYLIALTQWKQKGAGRNYIQRRMEQGKSWLEAVRALKRFIARAVWRLWQRHYAIKHPPNPDPTSPQPGPSKYSQHCPLPQPQLT

SEQ ID NO: 163385 - protein, 338 aa, unidentified
MNHSVVGLDTAKNIFHLYSLGTDTKVIKKSLKRADLLAFFANYPVSLIGIEACGGSHHWARELTKLGHQVVLLNAKYVKSFVVGNKNDFNDAQAIFDAVSRPNKRTVAVKTIEQQDVQLVHNIRQELIETRTALVNQIRGLLSERGIVIPQGINHVRKELPSILEDAENNLTALSRELFAEQYEKLKTLDDDIKAQDVRISRLCSQNERSKRFLEVPGVGPITATIVAADIGDGKGYASSRDYAASLGVVPKQHSSGGKQVYLGISKRGNRYIRTMLIHGARAVLKNIKDKTDKLSLWLKSLIERRGFNKAAVALANKNARILWAMASKNKDYEVKTA

SEQ ID NO: 163386 - protein, 376 aa, unidentified
MKNKATPTLHDNGQPNAALAGGNSGARQIFKLGLDVDLNNAVTAIQCGAGEIKRGQSFSRARLLGWVRTQVNAGHTVHTVYEACGFGYTLHHELVGAGAHSLVTTPMRHTAQRRRKNDRMDARELCVRLARWLDGHRDELKPIRIPSSEEQQRRELGRQREFFKRELRRLENHGRALRIEFEHETLPSGWAGPRKWTRLSLQCSSFVREQLEPIVTQIRACRAELVKLSAALEARVAEQMIPTGLGSLTLALLDGEVCNWHRFKHRKAIGSYTGCCPSEYSTGGVQRFGPIDRQGNKHVRVLLVEAVWRLLKWQPGWHARQKYLARLKHGASLKKKIAVALARQLAIDLWRWRTGRATAAELGWTLKNAIEETTPL

SEQ ID NO: 163387 - protein, 426 aa, unidentified
MKLEDKEGEKPICAWIGIDWADEQHDVSLYDVASGKQEASMLRQSPEAVQEWLGQLRSRYEGGYVAVVLEQGRGGLLNALMGCELLVLYIINPKSLSSFREAFYGSGATSDPVDAELMRDMVRQNPSRFRAWRPDDVMTRSLRLMTEGRRDLVNQSTALTNQLTALLKGYYPQALSWAGTLDTAWACNFLEQWPTLQSLQASSRRQIRRFYEKYPRASLDLNEQLKQIRAARALTQDAAVLESSALMVHALVCQLRPLLASIAEFDRKIATIFRKHPDRPIFESFPGAGAALAPRLTAAFGTDRDRFQAATEMQELAGIAPVTETSGKKRFVHWRYACPKFTRQTFQEFADHSRRWCEWAKAQYELLRKRGKSHNAAIRALAYKWIRILFRCWKDRKPYQDEVYTKSLLNHGSPLGSLLAKPVENP

SEQ ID NO: 163388 - protein, 471 aa, unidentified
MEIPDAEHELVIERVAAIDVAKATGTVCVRLPGKSGRRVSRVWDAAATTGPVSELGEQLANMGVERVTVESTSDYWRIWYYLLEAAGLSVQLVNARDVKNVPGRPKSDKLDAVWLAKLTEKGLLRPSFVPPAPVRQLRDYTRLREDLIRERSRYWQRLEKLLEDALIKVSSVASTLSTLSVRDMLEALIAGERDPRRLAELARGRLKTKRSALIAALNGRFDAHHAELTRMLLDQIDALTAQIGVLTTRIEQLIAAMDEPDRDREHGAGAPNVAASADDTAADVEPQQDDNGRSAGLDISVDTIAEGTRLTVIERLDEITGMGERAAQTIIAEIGLDMSRFPTPEHLVSWAKLCPRTIQSGPISRAGKTGKGNPYLKGALGEAAAAAARTDTFLGERYRRIVKRRGKLKALVAVARSILVIVWHLLADPTARFRDLGSDYHTNRVVTERKIRNHVAHLSAMGFHVTLEPAA

SEQ ID NO: 163389 - protein, 341 aa, unidentified
MEYIGIDVHQRESQVCIIDERGQVLIERRVRTSHERFAALLGARAGARVLLEASTESEWVAHAVEGLGHEVIVADPNFAPMYASRSRRVKTDRRDARTLADACRLGAYRPAHRTSAAQRTVRAQLAVREALVRTRTRYISVIRAVLRRDGVRVPSGGAATFGPRVQALALSATQHRLIAPLLALLRSLNQQLAVLETQLAREVAGHAAGRRLCTVPGVGPVTAAAVVATLDDVGRFASADQVAAYVGLVPRERSSGEQQRRGPLTKAGNSRVRWLLVQAAWAYWRSRATAGTVLRAWVERLAGRRGRLRAVVALARRLARILYAVWRDGTVYQPVRLAVVA

SEQ ID NO: 163390 - protein, 345 aa, unidentified
MIVIGADIHKRSHTLVAVRAASGELIGELEIGATEAGHRRALHWARELGEERVWALEDCRHVSRRLEGALLGAGERVVRVSPRLTGSSRREERPVGKSDRIDALAVARVVVREGPDRFPAAFLDERAMEIRLLADHRANLIAERTRAQNRLRWHLVDLCPELEAELPAGSLDRAVRLRAISKRLEGIETVRAKVARELLERVSALTGEAKRLEGEIAELIRAHRPALLQETGCGPLCAAILIGHTAGAERFAGDAQFARMAGVAPIPASSGRTQRHRLHRGGDRQLNHALHVIALTRSRLDPETRAYLARKRAEGKSHREAMRCLKRHLARRFHRLLLDPSSSSS

SEQ ID NO: 163391 - protein, 405 aa, unidentified
MKAGCPPMAVCDTLVETRSGESNQRGHLMRPKPRKEQPMRMYIGLDVHCKETVYVSQNEEGAVIGQGKVPTMAEGFAQLVETLDAPKGTKIGLETGTQAMWVSRLLSGLEMEPVMIDAREVRQKARRIGQKCDRRDAFEICDGVRRDIYTSIVYVPEGKVLRLRQILSRRRHFVRICTTEINAAKFVLRAVGLQGEARSLTTWQAWEKLLRRPAVEGRRAHLAMHAEVWRVAQEKVVALEKELREALEPFQATVTRLQTVPGVGPTTAATYLAVLGTPERFPDSGRVVSYIGLVPSSFDTGEVQRHGHITKRGSGELRAMLSECAHHAASKRHPLNPYWARVCAKQGYKRAVTATAQRLARILFAMWRKGEDFDVNKLNVIADRRRCKKTYYWRIKRPGKQTVAA

SEQ ID NO: 163392 - protein, 306 aa, unidentified
MSKARLDVAIRPSGQTESVSNDTAGIEALVKRLSESRPALIVLEATGGVERSVTRALASAELPVVVVNPRQVRDFAKATGQLAKTDRIDAQVLARFAQAVRPALRPLPDEVSWELRAGVTRRRQITEMIVAERNRLGATSKAIRKRIEAHIRWLESELDRADQDLDQSIRQSPIWQENQELLQSVPGIGPVISRTLLAELPELGQLNRKQMAALVGIAPLNRDSGTMRGRRTIWGGRARVRAVLYMAALVASKRNAIIRTFYQRLRNAGKAPKVALVACMRKLLTILNSMIKHKTRWSENFSVQPC

SEQ ID NO: 163393 - protein, 338 aa, unidentified
MSTIKVIGIDLGKSSFHLVAHDYSGREQFRKHLSRAKLIEFLAQIPATIIAMESCGGSHWLARKCQSFGHEVKLIPPQYVKPYVKTNKNDYIDADAIAEASTRPSMRFVGVKTETAQVISVIQRIRSSYVKERTACMSRIGAILLEFGMSFPKGHSKMKSLFQWLAYSKESIPQMLMQELIEHHEYYLQLNERIAGQDNKLKQLVEQNEDAQLLKSIPGVGNLTASQCLADISDVGHFKNGRQLAAWIGLVPHQYSTGGKTTLLGISKRGNKALRTLFIHGARSILSRPEVAVAVFGEWILELRARKPFNVAVVALANKLVRIAWSVLSTKQAFEVRV

SEQ ID NO: 163394 - protein, 324 aa, unidentified
MIDAILGIDVSKNTLDVSISSCTKVRTKSFANSSDGWHHLLDWLIAQKIQRVHACLESTGRYSLGIACSLYEAGHVVSIINPAQIRDFVRTKLGRNKTDGIDASRIREYCELFKPSPWAPPSEAHRRLGELQTIRAGIIAGLTEWKNRKNSGIVDTEAQALADATILHFTSQLGAVDKAIALTIDNDSDLRSKRDLLLSINGVGDTLAGVVLAELPGPDVLRSSGEVVAYAGLNPRQHQSGTSVDRATRISKIGNAVLRAALYMPALSAMRYNPVIVALVTRLKSRGRLKPKQIVVAAMRKLLVLCFGVLKTGKPFDPAIAMGC

SEQ ID NO: 163395 - protein, 334 aa, unidentified
MKQVNEVGVDVDSEALVCAMKRAGQRMPLATFANSAAGHKKFIGWATKGARPARVCLEATGIYSLEFALALHHAKNVEVMVVNPRAIKDFARACMQRAKTDAVDAGGILEYLERMPFTTWQPPAPEILELQAINRRIDQLHTELTREKNRRHVAEFTGASADAIAHDIEVNIHHLERRIARMQESGLQLVRRVPALTIKLAHLVSTKGIGEVSAMRLLAELLVLPDDLAAPQWVAHAGLDPRPYESGTSVHRPRRITKVGNRHLRAALYMPALVAIQHEPNVKAFYNKLVTAGKKPMQAVVAVMRKLLHAIWGMLKHDQDFDGNKFFKLTGKPA

SEQ ID NO: 163396 - protein, 342 aa, unidentified
MTAIGIDTHKATLAACAVDELGRPVAEATFANDPAGHLAFIAWARSIAPEVTIGVEGSSSFGAPLARSAHSAGLVVREVPPYLSRVERLRTRRPGKSDPGDALAIARVTAREKNLPPIRLSDRTTELRLLLEAREDLLAESNRARNRLHAHLLTLTPGYGGTATNLVAARHRATVGRLLRGVGGVQAELARGLLLRLARLEREVKALTSRIEALVAGHPLLGLPGAGPITVARLVAEAGDTRRFRSADAFATLAGVAPIPASSGQVQRMRLNRGGNRQLNRAMHVIAVTQARFYPPAKAYVTRRIEADGKTWREAIRALKRMLVRPVFRLLVEGAAAQVEAA

SEQ ID NO: 163397 - protein, 415 aa, unidentified
MDAVYTHCAGLDVHKKTVVACVITPGGSSGWQRETRTFGTMTADLLALSDWLSGYGCTHAAMESTGEYWRPVFNILEGNFEVLLVNAQHIKAVPGRKTDVKDAEWIAQLLQHGLLRASFIPPVAQRDLRDLTRHRSNFIRERATLVNRVQKVLEGANIKLGSVASNVMGVSGRAMLDAIVAGEANPEVLADLAQGRLREKREQLSQALTGRVKPHHRFVLTELLCQIDSLDETIARFDLEIEAYCAPFEMAVVLLDTIPGVGRETAEVMVAEMGADMTHFPSADHLASWAGLVPGNHESAGKRLSVKTRKGNRTLCTALVQAAHGAAHTKNTYLAAQYHRLAARRGNKKAIIAVAHSILVIAYHLIQRQEPYRELGADYFDKRRPEATAKRLVKRLEHLGFDVQLSRPTSIAATA

SEQ ID NO: 163398 - protein, 343 aa, unidentified
MKSKKVSTWHEFVDCPAIGVDVCKKHLDLVGLRGSVGFCRRISNTAQAVGELTKALVRQGFTGTVLCEATSHYHLVLAVMCCEAGLDVRVINPLLSSKHAKSAIRKTKTDRVDAQVLATMVLTEPNLPPPLQLTRRHCLVRHTLGLIHSQEQHLQGIKRALASYQERLSQLNLETGEAYKQTLEAFNQLQRSHEQLLSELESYLLETQPDRQEVIERVGKIPGITRRNAALFTFVLDPTVSNAKSWIAYAGLDVAIKESGSWRGRGKITKRGPAWMRKRLFQAAWGAAMTCPQGRLYYDALKAKGRKHKEALVIMAKKLLSIMHTLIVHQKTFDYSKAFQVTA

SEQ ID NO: 163399 - protein, 415 aa, unidentified
MAMKKNFILFDQVVERGAGMDVHKETIVVTIQGKGIKTETKSFRTFTSSLKKLREWLKQHGITHLAMESTGVYWKPVFNVLGDDFMIILVNARHVKNVPGHKTDKQDSKWLAKLLLSGLLKGSFIPGKEIRDLRDLVRTKTQLNGEISSAKNRFIKFMESANIKLSSVLTDVFCVTGQKIIAEILDGDYKPERLLHHVHGRVKASRQDIIEALTGNLDEHYRFMMKTMLEHIANIENVIAKIDAQIMQKTEDHKEILELLETIPGVGRDGAICIVAEIGTNMEAFASHKHLASWAGMCPGNNESAGKNKSGRITYGNAFLRTFLVQMAWAAARTKNTYLSSKYKSLVGRRGKKRAVIAVGHKILIAAYFIMKNKVGYNELGEEYLNNFRRDKLINYYKNQLQKLDPNVNFDKEVA

SEQ ID NO: 163400 - protein, 410 aa, unidentified
MERVIERCCGLDVHKKTVVAGVRVPGGTGGRDQHVRTFGTTTAELLALRDWLEAYGVTHVAMESTGVYWKPIFYVLEDAFTCVLANAAQIAQVPGRKTDVKDCVWIAQLLEHGLVRGSFVPPVPIRELRDLTRYRKALIHEHTREANRLQKGLEDAGIKLASVASDVLGVSGRAMLDALLRGTTDPDVLADLARGTLRKKLPALRQALAGRFRPHHAFLVSQLLAHLDYLDEVIETLSTHIAEVIAPFAEEVSRLDTIPGVNRRTAEVLIAEIGVDMGVFPTAAHLASWAGLCPGNNESAGKHKSGKTRKGNRWLRGALIQAALAAGTRSTKGAFAARYRRVMRHRGHQKAVVAVAHAMLVTAYHLLARKTTYHDPGADYYEHRHAERVRHRAVQLLERQGYRVILEPAA

SEQ ID NO: 163401 - protein, 369 aa, unidentified
MASEVLTRGGPHMETLIMTGKRHTINRPILDRICVGIDLHKDTLFAVALEPATGELLERRISCKCREQIVQFFAVLPSPNIVAIESVGFYRWLWDLLEPIVDELVLADATQCRALAGRRIKTDREDALNIAELLAAGRLPRAWAPPSDLSMLRDVTRHRHYISRQHARVLHRVKSIMAQVNRPGPARLKAPGLLRYLKAQRDRLPDHLVDQLEMAVDELVLLERQLDRIDERLKAVLQKPRFVESTNRLRSFPGVAWVLAGTILAEVGDVSRFTHRDAITRYAGLDPRVFSSADTARTGRIAKAGSRELRWALVQAAWVAVRSEGRYRRLWLRIRKRSDGKRAIIAIARRLLLAMRAAERARTDFQLAA

SEQ ID NO: 163402 - protein, 345 aa, unidentified
MKIVGCDLHTRYQQIAMLDDETGELVERRLEHANGEAKEFYSQFGAGVRVGIEATGHTRWFERLLAELGHELWMGDAARIRAAEVRKQKTDARDAALLLELLVSGRFPRLWRPTAEQRDLRQLLWHRQKLVWMRNAVGNQLHALAMGEGLCKKKQLFTKKGRVQLEGLQLDRWASRRREELLRMLDQIDASLKQFDQAVNEQAAASPEAVRLMTHPGVGPMTSLAFVLIVGPVTRFQRSKQVASYLGLNPCEHSSGGRQRLGAISKQGNPMLRGLLVEAGHSAARLDAELRQDYQRLRLRRGGSVAKVAIARKLAVRMYWMLRRQVNYAQLVRMQGSSRATLVQR

SEQ ID NO: 163403 - protein, 321 aa, unidentified
MAKRVVESIVGVDTGKSHFDLHYWEGGEKERIDNRPRSIDALLERLPAASVIALEATGTYHEELLDRALRRGFTVYLINGQRLRAYAEATGLRAKTDPSDAELLARFVYYERAQLRPQRLIGADQRRLRRLLKRRALLVEMRTRLRQSSDATAQLKQYFAEVIEAANRAIAHIEHELRALVRRLGWEAEVQLCRSIPGVGELSAIALVESYQRGPFKSIDAFIAFQGLDVRVRQSGRWVGRRKLTKMGDAETRRLLFNAARAAVQRSALHAAYYERLRARGTPTTGAYVAVARKLARQAFGVLRSQTPYRCDLGSTACAAA

SEQ ID NO: 163404 - protein, 311 aa, unidentified
MKIVCGVDISKAGLDVCVWPGGAFQRFDRTVSGVDALAGFCRQHGVDLVVMEATGGLERLVVGVLNTAGFGSSVVNPGRVRDYARAMGITEKTDRIDAAVVASFALAANLRATPAQMENQRRLNALVVRLRQLTADLIVQKQRLSAVEDAESIGSLRAVIAFLKQHSRMIEGEIASLIDDDPVWAKLAETFGAIKGIAGRTIARLMAELPEIGLYSNKAIAKLAGLAPIANDSGARHGKRSIRGGRCNVRSILFLVAGIVAKYDERLKDFHQRLSKAGKPKMVIRIALAHKLLVWLNAKAREARAEMTTAT

SEQ ID NO: 163405 - protein, 481 aa, unidentified
MKPKTQEKAEKKTKPRTHHWEEMNRKQRRELTRKIQNQDLSLEVVHPDAAGIDIGNESHYVAVPATRDSQAVRRFGCTTGELQALAEWLKQCRIRTVAMQSTGVYWVAVYDLLEQAGFEMYLVNARDTKNLPGRKSDVQESQWLMKLHTYGLLRNSFRPSQEIRMMRTYWRQRNDLVRSAGRHIQRIQKALTQMNIQLANVLSDVSGMTGQAIVKAILRGERDPHQLAALRNVQVKASEEQIAQSLEGNWQPDLLFVLKQEQDGYEFCQKQIAECDHQLAQYLQQRENRSQTTSLPEEKRKGRRRKKRGNAPQFDLREGLFRMSGTDLTQIDSIDVMTATTILSEVGWDMSKWQTENHFVSWLRLCPDNRISGDRIIGKGRLPTNNRVTIALKMAASSLRLSKTYLGAQFRRLRTKLGGPIAIKAMAAKLARLVYRMLRYGMKYVDQGALFYQAQHRQLQIKHLKWKANKLGFRVVEAHPA

SEQ ID NO: 163406 - protein, 373 aa, unidentified
MPRYSTAFGMDVHLRSTTVCALNAETGEAVTRRFRGNPWGEVAEWMSGFPGPSLAAYESGYLGFAPQRELSGLGVDCVVAAVSKVPRSAADLSSKNDRNDAARMAKAILSHDVTPVWVPSPEIEGLRDLAAAHDAATARLAAAKQRLLAFLARRGYVYGGTTPAGNPRKYWTYGFLRWLDGIHPADDGGIRALAALRNEVEAADETREALLAEYRAAVAAGPLSAEVEALQSIKGCGFALAAAFASEVGDFSRFRSGRQVTSYFGLAPKQRSSADSVRLGGISGAGNALVRKLAVEGSWCYAQAGHQPKLMPKGSGVPLEIRMHGRKGSERLLRRREEMIARGMPQAKANAATAAELVRWLWALGTMCREGAE

SEQ ID NO: 163407 - protein, 347 aa, unidentified
MRFYTTQHPFYCGIDLHARTMYVCILDQSGEVLVHRNMQTDPETFLHVVAPYRQGMVVAVECMFTWYWLADLCADAGIPFVLGHALYMKAIHGGKAKNDKIDSHKIATLLRGGMLPQAYVYPAKMRATRDLLRRRMHLTHKRAELLAHVQNTNSQYNLPAIGKKIAYKANREGVAERFADAAVQKSIEVDLALITYYDALLRDVELTIVNTARHHDANTLHLLQTVPGIGKILSLVLLYEIHDVHRFPRVQDFVSYCRLVKCARESAGKRYGTSGAKIGNAHLKWAFSEAAVLFLRDHPAAQKYLARLEKKHDKGKALTMLAHKLARAVYYMLKRQVAFDPETFFQR

SEQ ID NO: 163408 - protein, 410 aa, unidentified
MELVHKKCAGLDVHKDVIVACARIVEERGVRRELKRFGTTTTELLALADWLQKLGVTAVLMEATGIYWRPVWNVLEGMFELTLANAAHVKNIPGRKSDVKDAEWLAELLAHGLVRGSFVPPRDIQEMRELTRTRKQLVGEITQHCQRLQKVLETGNVRLPSVVSDILGATGRAIIRGLANGENDPQLLARLAEGRLRQEDKQKELVTALDGRLSPHHRFLLGFHLDTVEHLEKQVASLEARIDEVSRPLAWAIDLLDPIPGVSRICAQMVISEIGVDMKRFPTVGHLLSWIGLCPRSDESAGKIRSRQIRKGNRWFKGTFMQAAWAACRCKTSYYRSQYLRIKARRGAKKAVVALAASMVTAIYYMLRDGVAFQDLGPKYLEKRDKARLAAALVDRLNALDYQVQLPAAA

SEQ ID NO: 163409 - protein, 422 aa, unidentified
MMGKERRWFVGVDWGSQEHVVSLYDDEGEKISQRRFAHGGTGLTDMIAWLLKASGGKPGDIHVAIETPHGPIVEAVLERGFNAYSINPKQLDRFRDRFTVSGAKDDSRDADVLADSLRTDMRAFRKLSIADPIVVELREWSRIDEELKVEHVRLTNRMKHQLWRYYPQMLELADDVGANWFLDLFEVVPTPEKAANVREKTIARILKNHRIRRFDATHVLSELRKPALSVAPGTIEAATARIRGLIERIRIINNQIKDAGRQLDRLCKNLSEPVADKDEETSPGQKTEQRDAAILDSLPGVARTVLATLLADASDTLQRRDYHALRALCGSAPVTRRSGKSCIVVRRYACNQRLRNATYHWAQNAIQHDATSRAKYDALRAKGHGHARALRSVIDRLLNVACAMLNSGTLFNPEFASKQTTG

SEQ ID NO: 163410 - protein, 401 aa, unidentified
MNAVGIDVSKGKSMVCVMRPFGEVVLEPFEVLHTAQNLRDLAEKLKTLDGETRVVLEATGNYHKPVAFVLHDAGLFVSVVNPVLIHDYDNNSLRRVKTDRKDAVKIANYTLDKWTRLRQYLPEDDTRLALKNCYRQYQQAVAIRTMLKNNLISSLDLTFPDANKLFSSPAKSNGCEKWVDFIGDFWHSECVSGFSKETFAKKYLKWCQKHGYNFTRSKSDEIYACAVNAASLPKSVTSKLLIQQQVAQLKAVSQSVAAFQQEMLRLSQQLPEFDTVMEMYGVGPSLGPQLMAEIGDVRRFSSKKSLVAFAGVEPQLNDSGKVVGNDKGISKVGSAVLRRTLFLIMTVILQTRPQDEPIFQFMDKKRSAGKPYKVYMMASANKFLRIYYAKVKAVMDSASSN

SEQ ID NO: 163411 - protein, 341 aa, unidentified
MGQASTIGLDIAKRVFQAHGADATGRVVFRKRLVRAKVLEFFAGQPRCLVALEACGGAHYWARELGKLGHTVRLIPPAYVKPFVKRQKNDVADAEAICEAAQRPGMRFVPVKEEAQQANTVVFRARDLLVRQRTQCINALRGHLAEYGHVVPQGPAHVNRLVALVEDPKSSVPESARGILQVLIRTLNALEEQLKELDGEIARRAKADPVARRLMTIPGIGRIAATAITALVPAPEGFRAGRDFAAWLGLTPLQKSTGGKNKLGAISKRGERTIRRLLILGASAVVRWASQRGAAAGSWLARMLARKPRMLVTTALANKMARIVWALLVKGGTYKAPAVAA

SEQ ID NO: 163412 - protein, 400 aa, unidentified
MRVVFGIDVSKASSEVAILVNGEKVHGYTISNDAIGFARLLGDLRTVHKPEIIFEATGVYSRRLQAFLDEHGYAYTRLNPLEAKKQLDSLRVRKTDQIDAEKLAQSQFVLNRKTTYVQKEVYQNLRDLSRFYQNLTEDIVRAKNRLHKVLQVTFPELENILSTPSGEQYWNLVIAFPCKDFVLDLSKDELSESIRQSTSKRISDKRAAYLAEKLIALANQSYCAVKKTSPMLEEVRYYTKELLRLSEQRQAVLNEMVELAQPLPEYDILLSIPGIAETTATSIIGELGDIRRFQSANQINAFIGIDLRHYESGNFLAKEHITKRGNPYARKILFKCIHNIASASHTNPCHIADFYEKRKRQSQTTSTKPHTIASIHRLIRTMYYLIMHNKLYDYASTQNR

SEQ ID NO: 163413 - protein, 425 aa, unidentified
MNKNILSTLFVGVDVSSSSNYFCAINFEGKHLLDFSITNDLPSSEIAVERIFNTLKENELNFVIIVLESTNIFSFHIANFLASNNSLFDFNSKVFVINPKTSSNFRKTYSDKDKTDPQDAFILADMARCGRIDQEPYKASQLFALQRLTRQRFHLVKTITREKAYMMSNIYLKFSSLYIAKKDDEPFANMFGVTSKTIISDFTPDDLVNMSDEDMINFVMQKGKKRFAEPEKNVDLLKKIARDSYRLDKLAYDPINVAISSSFNTIKALEDNLKVIDKAIEKNIKGLCDNEFTILNSIPGIGPVYAAGIISEIGSISFFKDNNALAKYAGLTWRKTQSGYFEAETTRMTKTGNKYLRYYLIEAVSSVKMHSKEFNEFYTRKYNEVSRGAHKRALALSARKLVRLIFGLLRHNQLYSTDKVDNRLD

SEQ ID NO: 163414 - protein, 423 aa, unidentified
MDKNDDSRLEEFRQLRREIRGSSEHLVVGIDVAKERHYAFFGTPAGKTLLRRLVFDNSKEGFEKLCFQAEILKTQHGLTKVVFGVEPTADYHKPLGEYLIRQGHLVVLVSGNAVKNNRELLDSRWDKNDMKDAANLADLITQGKCLFYEFASPPLGELRSLLSLQRRLKKQEQGYRVRTRNHLIAQYFPELDPYFGYSEGPAIVKWCLDPKELMCLPFEEFVRMVSSSTGGQKQRRRLEEIREKAASSIGCEAHPSVAFEGRVLVEEIRRLQDLLRETHANIRAVCHHFPEYFFLLTIPGFGPDISAKVLGAIGNPHRFENHRQVLKTAGLDLSADRSGKRTDVTPVISKKGKADLRYGLYQAALIASTRNRQFMTYFTEKLKGREREKGIGTKMRVKLAAKMLVIAWTIMKKKEKFDPGCIA

SEQ ID NO: 163415 - protein, 355 aa, unidentified
MNDTKYIGLDVHQATISVAVLDCVGKLVMEAILETKAETILQFIHGLRGTLRVTLEEGTCAAWLHDVLKPHVAHVLVCDPRKNALIKAGNKSDRIDARKLADLLYLEKLHPVFHGETGIRALKELARSYLALTRDTTRVMNRLKALYRSWAIPCAGQRVYAPRYRSEWLAKITEAGVHRRAEIYYREFDALRSLREQVRRDLLGEARKHKAMKLLRQIPSIGPIRAALLIALMQTPHRFRTKRQLWAYCGLALKTSTSGEYRIVEGRLKRSQKFLAIRGLNTNHNHDLKNIFKGAATRAAAVPGPLQEFHAGLVARGMKPTMARLTLARKIAAITLIVWKKGVGFDAEHLKQQAA

SEQ ID NO: 163416 - protein, 405 aa, unidentified
MVDIMVSDFRKGRYNLMKIFVGIDIAKLNHFAAAISSDGEILIEPFKFTNDADGFQLLVSKLESFDKNSIIIGLESTAHYGDNLVRYLVAEFYQVCVLNPIKTCQMRKNNVRKTKTDKVDTFVIAKTLMLQDDLRFITFFDLDMMDLKALGRFRQKTIKQRTRLKIQLTTYVDQVFPEIQYFFKSGLHQNAVYALLKEAPSPKEIASMHMTHLANLLKVNSHGHFTKEQAKELRVLAQKSVGANDSAISIQITQTIQQIELLDSQLQKIEAEITDIMKFNDSVIMTIPGIGYINGGMILGEIGDIHRFSNPNKLLAFAGLDPSVYQSGNFQAKTTRMSKRGSRVLRYALVNAAWNVVRNNATFKAYYDAKRAEGRSHYNALGHCAGKLVRVIWKMLTDEVEFNLE

SEQ ID NO: 163417 - protein, 341 aa, unidentified
MSDYSYFCGIDLAKNHFSLHAVDQNGKVLLHKSVTRSKLLTTIANMPLMRIGVEACGGAHYWARTLNKLGHDARIMAVKYVIPYRTKGKNDLNDAVAICEAVQRPSTRFVPVKSPEQQAILSVHRMREHWVRERTALMNRMRALLSEFGLIIPVGRSSLMKQVHLMLEDAENELPHLARTVIADAYHHLGELNQRIADTEQVFDSFAKVSANVQRVMKVRGIGPQTATAILASIGNGSQFDKSRDFSAWLGLVPKQYSTGGKPRLGRITKHGDKYLRTLLVHGARTVIANLGDKQDKLSQWCRGVLERRGMNRAIVALAAKNARIIWSLLHNQTEYENYAA

SEQ ID NO: 163418 - protein, 325 aa, unidentified
MIDQDGQVLANRNVPNGAEPILKVIGGLPLGTPAAFEACYGTSWLVELLEDYGFAPHLVHPSRCKAIASARLKNDKVDAAILGQLLRADLLPEAWIAPPPVRALRALLRHRVYLVRLRTRLRNRIHAIVADYGYDRPAGGYWTGPGRAWLASLQLPAVSRELVEDDLGLIDALQQRIDRLDWEIRQRARSDPRVTVLTQLPGVGPFTALVILAEVGDVSRFASARQLASWAGLTPTVRGSDRVAHYGHISKQGSVWLRWVLCEAAQTAKRSPQFAATFQRIATRRGKKIATTAIARKLLTHAWHLLTKTDQAAAPQPAAPQTAAR

SEQ ID NO: 163419 - protein, 440 aa, unidentified
MDSASGPASPVLTGYGRRVGGLGPGLTSESADAVRAVLRDDLSAGPQGLGTHRRCRSDLPSLCKRPGFTGPGGQRVRATPQPEKGMAVSIVEEARPVTCRTAITGGVDTHADAHVAAALDPVGGLLGVREFPATAAGYAGLLGWLGGFGTVALVGIEGTGSYGAGLARYITAAGIRVVEVDRSDRQDRRRQGKSDPLDAVSAARAAQSGRARGAPKGRDGAVEAIRALMVARRSAAGERTRTINQARALILTGPDDLRARFTRHTPAALVTGLAALRPRPGDVTGYAVRVALRELGRRAQFLDGQLERLDELIVPLVTAHAPGLLTVYGLGPRTAALLLIAAGDHPGRLRSEAAWAHLCGVAPIPASSGKVTRHRLNPGGDRRANHALWRIVFTRLGSHPATRAYAERRTAEGKSKAEIIRCLKRYVAREVYRHLRPAAG

SEQ ID NO: 163420 - protein, 355 aa, unidentified
MRFFTEHHQFYCGIDLHARQMYVCIVDNAGEVLVHRNMSAKPAELLHVLSPYAGKDVVIAVECVFTWYWIADFCAEQKIPFVLGHALYMKAIHGAKTKNDKIDSRKIALLLRAGMLPQAYVYPRSMRSTRDLLRRREYFMHQQSELLVHIENTNSQYNLEPFAKRIRDRSNRRGIAERFSDPQVASSIEADALLLDVYHQILLGLEAQVLKAARVHDPVGLQLLRTIPGVGKVLALVLLYEIHDVNRFPSVGQFLSYARLVKCPHESGGKRTGGRGNKIGNVHLKWAFGEAAVLFLRGNEAAQQYHEKLVSRYGKGKAMSLIAKKLGRVVYSILKKRQPFDPKKFFSDAAHESAA

SEQ ID NO: 163421 - protein, 429 aa, unidentified
MTRISAGVDVSKNRSTVCIIDQDGKVIMRPFLVCHSTEELDFLADTLKRLNGEVRVIMESTSIYQYPIALHLKEKGIFISIVNAYKVKKFANTDFRGGKTDKKDSRTIASYGISYWDKLVEWQIPKDTYFNLDLLNRTYMNAKKHRQIILQELQHYIDCAMPGMDKELHSLNLNTKKDFMLDFVEKSWHRDEIVNMTEAEFTEVFTAWAKKKGYRPVEGKAAKIYAIAKSCIPYYPANPTVKTILQCIVDKLSGVNRTLVTIVTQMIEEAKKLPEYQIVREMPGVGDPLAARSFGSAGDIRRFKNSKALVAYAGIDSPPDESGDFSSTHRHITKKGSKVFRDTGYEIMMALRAQKRTWEKVRKNPEVYDYMLRKEAEGKPPKVAKIAALNKFLRIIYARIKELYDNMALAERAKAKTKSKTKAKTKATA

SEQ ID NO: 163422 - protein, 340 aa, unidentified
MPLYGGIDLHANNSVIVLLNEQDEVIYRKRLPNELPTILGQLAPYNTEMQGLVVESTYNWYWLVDGLMEADYRVHLANPAAMQQYSGLKYTDDHSDARWLAHLLRLGVLPEGYIYPKTERAVRDLLRKRAHLVRQHTANVLSVQNIMARNTGARFSVKRIQELTKQELTSLLAEEPQVLAVTSSLVVLDCLRQQIKMLEKTIHKCLNHTPAYEQLLTVQGIGTILAQTIALETGAISRFPTVGNYASYCRCVDSKKISNGKRKGTGNVKNGNPYLAWAYMEAAQFAMRFQPAAQRFYQRKLAKSRNNTVLARKAVAHKLSRACYYIMRDLVPFEATKAFG

SEQ ID NO: 163423 - protein, 367 aa, unidentified
MENVITYVGLDVHKKMIVVAMLIPGQPVPLRWDCPNERGKVRRTLERIRREAVGAAQMCYEAGPCGYALQRQVAEFDASMKCMVVAPSLIPHKPGERIKTDKRDALKLAEYLRSGLLTEVRPPTAEEEAARDLCRAREDASEDLRRCQHRLSKFLLRRGVAFTKGKKAWTRSHRLWLCGLKFDNTCTQSVFDDYLLAVEQTEARLLGLQIRLTELSQAEPYAEPVGRLRCFRGIDTITAMTIVVELYAFGRFRSARGLMAFLGLVPGEHTSSDKVRRTGITRTGNGHVRRLLIESAWHYRHRAVPGAALKKRRLGQSAQAIAIADKAMLRLNRRYTRMVARGKSGALTVTAVARELAGFIWATLRVA

SEQ ID NO: 163424 - protein, 337 aa, unidentified
MPALTIGLDIAKNVFQIHGVDRHGKTVVQRKLRRAEVLKFFAKLESSLVGIEACHGSHFWARELTSLGHMVRLLPTQYVKPFLLGGKNDANDAAAICAAVTRTGIHFVTIKSAEQQSRQSVHRMRQRLILERTAKSNQIRSMFAEEGVIFAVGVPQLRKGVVELVNNPDAHITALLRRLGSMYLEQLKALQQWLDELTAEIAEIFKSNEACQRLATVPGIGPVIATALVSSVGDPSQFRNGRQFAAWLGLTPRQKSSGGKTRLGGITKRGDTYLRTLLVQGARAVMHFVNRRDDRHSRWIKAVMQRRHVSIAAIALANKTARIAWAILTGNGCFRGV

SEQ ID NO: 163425 - protein, 352 aa, unidentified
MKEFIALDAHKRYSWMEREEIKSCKVWHARIDHAPGAIRQSLEGRAKGTAVAVEATGNWYWIVDEIEQAGLEPKLVHPRKAKLMMGMINKTDKLDAHGLNQLQRNGTLPTVWIPPRELRDLREITRARMVLTGQRTRLKNRIQATLNKYGLVPEGEASDPFGKKARLSLEEAVQKLPLQTAQVTEMLLRQLDFVQKQIEELERKIRALVKDTVEMDRLRSLPGIGWILSAVIALEVGEMTRFASAERYASYSGTTPRVHASGDKTRYGRMRTDVNQYLRWAYMEAAHSVSLHRKTYPERQVSCLYERIRGRKGHGKAIGAVARHLAEATFHVWRKGEIYRDPGLQQGQSREG

SEQ ID NO: 163426 - protein, 373 aa, unidentified
MPKYSTAFGMDVHLRSTTVCALDADTGEAVTRRFPGNPWGEIAGWMDGFPGPSLAAYESGYLGFAPQRELAGLGVECVVAAVSKIPRSAADSASKNDRNDAARMAKAILAHDISPVWVPSPEVEGIRDLAGAYGGATARLATAKQRLLAFLAKRGFVYGGTTPAGNPRKYWTYDFLRWLDKVRPEDDGGVRALAALRNEVEAAAEARADLLSEYRAAVDASPIAAEVAALQSVKGCAFALAAAFSAEVGDFTRFRSGRQVTAYFGLAPSQRSSGDSVRLGGISGAGNALVRKLAVEGSWCYAAARHQPKLMPRDTGVPLEIRMHGRKGSERLLRRREEMLARGMPAAKANAATAAELVRWLWALGMMCREAGE

SEQ ID NO: 163427 - protein, 411 aa, unidentified
MATMFCGIDWGESRHDVAIIDQSGNVLGRAKITDDAAGFTELLTLLAEAGDCEDEQIPVAIEKDHGLLVSALRSTGRAIFPLNPLAASRYRARHQVSGAKSDATDAVLLANILRTDLAAHRPLPADTELAQAIRVLARAQQDMAWTRQRIGNQIRSLLKEFYPAALDAFAALARGGLAHPEARMILAVAPTPAKAARLTRARLRTLLAKAGRQRRINTEADRLFEALRGNYLRHPSVVEDAMGIQLTALLTHFDAVCQASDDLEVAAREHFERHPAATVINSFPGMGTLLGARVLAEIGDDRARFAAARGLKAFAGSAPVTRASGKKTVVTYRRIKNNRLAAVGTIWALSALSVSPGAKRHYDARRARGDWNRQAQRHLFNKFLGQLHHCLQTGVTYDETHAFPTPLGLAA

SEQ ID NO: 163428 - protein, 312 aa, unidentified
MTSVVYFGIDVSKAYLDLATQDRYLGQYANVSEAFASLLSVLGSSDSCQIGLESTGVYSQAIANYLSDTGYTVYMIQPGRVRWFAKSQGILAKTDAIDGQVIAQYIAHTRDLRPYQSPTVEAKSLRALIDRRDQLVSDRQREKCRREACRDAAMHIHINEFITTLTTLIRDLEGRIDDALAASESLKQKADCLQEVSGVGRQTAVCLLTHLPELGSVNRQKIAALAGLAPYPDDSGTKTGKRRIYGGRARVRRALYLAALSASRHNATLHKLYTHLLSKGKEKKVALMAIARRLLAYLNGLMKTFQNEPEPT

SEQ ID NO: 163429 - protein, 396 aa, unidentified
MESAVYLGVDIGKSGHYALAVDAAGKPIYQTSVVNDEVALRKLVDWAKERQASVVVDQPGGAAALLLKLCWQSEVRIGYLHGLAMARARDFYAGESKTDPKDAFVLADVARAHPTRVVWLEPSSEALAHLELLCGYDADLRADANRITNRLRGLLVAHWPALERAFGERLDSRGVLAVVQQYPSGPAIKEAGVEQLTAALKAQRVRRPEAFAKQLHDAALAQTVTITGSATAARLIAELAAQLAAVLTRRDELEKEIEEGFFALPEAAILRSLPGIGPRLGARIAVEIGSISRFRTPGHLAAYAGLGPTPWKSGTSINANMPSRFGNHRLKNALFLAAFASLRHPPSRTYYDRKRAQGKRHNQAVLCLARRRVDVLHAMLSQGVLYRTPAPLATAA

SEQ ID NO: 163430 - protein, 352 aa, unidentified
MPKRTRVVIGGVDTHGRAHHAAVIDQQGRLLGDREFPADRAGYRQLLGWLRRHGNPDTVGVEGTGSYGAGLTRYLLDQHVAVVEVDRPDRRTRRQRGKSDPIDAQGAARAVLAGTASAPAKRRDGVVEAIRALRAVRSGAIKARTAAINQLKGLLVSAPAPLREDLDQLSVAALVATCARLRPDEAALADPVQASKAALRAVAWRIHQLDEEIGLADQRLAKLVGRAAPRLLQLHAIGVDHAGQLLTTAGDNPERLRGEAAFAHLCGTAPVPASSGKTHRHRLHRGGDRDANRALHLAVVVRMRWCPRTRAYAERRTRDGLSKPEIMRCVKRYLVREVYHALVADFEALNAT

SEQ ID NO: 163431 - protein, 391 aa, unidentified
MVCVGIDVAKDKHDCCILDSDGMVRADCFTIPNNMDGFKQLLQTIRNCTKKSDKIKVGLEATGHYSYNILGFLLDNGLPTYVINPLHTNLYRKSLSLRKTKTDRVDARTIATMLLSDVDLKSYTDIAYHNEDLKSLTRYRFDKVQERAKLKQSVSRLATILFPELEQLVSSIHGTSIYALLGEYPGAKQISEVHLTKLTNLLTTASKGRYGKEKAIQIREAARASIGSVMPAKSLELKHTIKLIQELASEINEIEDSIQKIIDELNPPILSIPGMGVNSAAVILAEIGDFSNFSSPDKILAYAGCSPSTYQSGKLTNCYAHMEKRGSRYLRHALYNATKYVCYWNPVFAEYLAKKRAEGKHYNVALSHAMKKLVRLIYALQKSGKAYLAAA

SEQ ID NO: 163432 - protein, 338 aa, unidentified
MDHVAIDLGGRESQICVRRPDGTIVEQRRLRTAAVGAFLQDRAPARVIVETCSEAFWVADLARASGHDVRVVPATLSPALGVGARRLKTDQRDAQILSEVSCRVDLPSVHIPSAPARAAKTVCGLRDGLVRSRTLLINSVRGWLRTQGRRVPSGTVATFGTRVRALLGDGLPGYVARQLAALEDLHGHVTAADAEVRALAQADPVAHRLMTVPGVGPVTAVRFLAALDDPTRFASAPAVTAYLGLVAGQRSSGDRTRHLGITKAGSPAVRWCLVQAAHCARRTLRPSPLRTWVEAVEHRRGRQVATVALARKLAGILFALWRDGSRYDPFRTNTPAHD

SEQ ID NO: 163433 - protein, 422 aa, unidentified
MRFIGLDVHREFCEVAIAEEGRVRSAGRIRTRRAELELFAQSLGSDDEVALESTGGAVAIARILEAHVARVVVVNTKKLRQISEAKAKTDRLDARRLAELLAAGYLAEVWCPDEQTRALRRLVARRAQLVRQRSRAKNEIAAALQRNLLDRPGVYDVAGARGRCFLDGVELPADERQTVAGCLRQIDFLDEEIAAVNRALAEAAVGSREMRRLMSVPGVNLQTAATFMACVGDIGRFRDPSKLVSYLGLDPRVRQSGEEPARHGHISKEGAAEARHMLCEAAWVVVRYPSPLRAFGERIKTRRGAGIATVAVARKLVVLFWQLLTKEQDYAFGRPSLTRKKLRQLELAAGAARGEGEPGVWGANEALREAELELARQAETAYRRLVSDWQPNKGAGATAGHASSRPSSGKQRGRASVPDPAL

SEQ ID NO: 163434 - protein, 345 aa, unidentified
MNISRVGVDIAKSVFHVHGVDRHDQVQWRGKYSRDKWLNAIANRVPVSAEIGMEACASAHHWARELQARGYHVRLIAVQFVKPYVKSNKNDRVDAEAICEAMSRPNMRFVAVKTVDQQDVQAAHRIREELVHQRTAKANQIRGLVGEYGIVAPVGIGKLRAALPRWLEDAENGLTDAFRMLLAGLAEDLRHLDDRIDTVTANIENQVQTDPVAKRLMTLRGVGPLTASALSGALGDGQAFSRGRDFAASLGLTPRQHSTGGRDRLLGISKRGDSYLRKLLVHGARAVLRHAVGKDDGLSDWVQRLSERKHVNVAIVALANKTARIAWAITRRGVAYDPTLASQAA

SEQ ID NO: 163435 - protein, 321 aa, unidentified
MNKYKETFGVDISKDVFDVHGSKSGHNQYKNDESGFKQLLKSLPEYSIVAMEATGYYHYRLAQFLYKNGVVVSVINPLSIKRFIQMKLAKVKTDKSDSKAICEYALTNEVPIYNALTDVQSECLQLFRLLDSYLKQRTMLKNKMHGEEVLGLPSKQVYRSLRRSRKHLDKEIKGIESHILSLVKADQQAQLTLLTSVPGIGKKTALFLIVVTDGFSKFENAAQLCSYVGITPTIRESGSSVRGRARISKVGNRKLRNLLFLCSFNACKYNKACRELYERIVAKGKSKKLALIAVCNKLLKQCFAIAKSGKPYDETYVSKLG

SEQ ID NO: 163436 - protein, 311 aa, unidentified
MEHTCFVGIDVSKAHLDVHVRPTGDSFRVNHDDAGFATLLERVRPLTPTVVVLEATGGYEMPLAATLAGAGLPVAIVNPRQIRHFARATGQLAKTDLLDARVIALFAEAIRPTPRLIPDEQAQALGEMIARRRQLVEMLGAELNRRRLLRDRRLHRHLDAHIAWLEEALRRLDHDLTTLIRSTPMWREADDLLRSVPGIGPVTACTLIADLPELGRLDRRRIAALVGLAPVARDSGTFRGRRIIFGGRGHIRRVLYMATLTAIKHNPTIRAFHHRLVAAGRPGKVALTAAMRKLLTILNAMLRDRRPWQPA

SEQ ID NO: 163437 - protein, 322 aa, unidentified
MTIYNNYLGIDISKETFDVVNKEGKHSQYFNNKKSFSKFYKAIPKGSLCAMEVTGIYHLCLAKFLFSKGVAVSVVNPLRIKRFSQMLLRRNKTDKADAQIISLYAQKQELELWSPAPLVIEQSKDLYQIMEQYIEFRAGLKNKLNALKSKDSPKRLIEKIIDQIAHMTDSINELQAELDELIKAYKPAMLSNITSVVGIGQRTAALLIVTTEGFNNFDNSKQLCSFFGLAPTETSSGTSVRGKSKISKMGNPLVRKKLYMCSLQASRYNKACRDLYQRLLAKGKPKKVALIAVANKLLKIVFAIAKSGLPFDREYVSYIASK

SEQ ID NO: 163438 - protein, 430 aa, unidentified
MSFLPNYISVGIDVAADFSWFCILSPDGREFKKPFKVEHDNADSLKNAVLTIKKAEEHFSMKSKIFLESTGIYHFPLFCHLKELGFEVFVINPLITNSNKNIGIRKVKNDRLDAKRIAVIGYSPDTKVSVMPAELILNLRCLCREYYSLVDNRTSYVNKLKAQLHIVFPGFCKVFSDITGITAISLLKNFLTPEDVINAQPDEIIKLISTSSRKGLNYAKAKYDKLFKAAKNALNFRYNLPSVYDILKVYIYFIEEFDKKINLVLSEIKAFVDENKSEKFVQQIYYLDSIPGVGFLSAVTLMCEIGDFSAFRKPKQLFAYFGVDPSVNESGHFKGNDNKMSKRGSKIARRVLYAIALASVRVKRNGIAINPVLYDYYQKKKESKPKKVALGAVMHKISDIVFAVLRDNKPFVLKTPDEHKQQYQNIHKAA

SEQ ID NO: 163439 - protein, 480 aa, unidentified
MNVKARRTKKQVNVENQAINLLSKEELNKKIEVIKKELRAYTWRDLETNGKFAKNDKLSFITDDMLIVGCDIGSETHYIRAIDVRGRELSRGAFEFSNTSEGFANAKEWVLALAAKNDKKQIVLGLEPTGHYWFALATWMISNGISVVQVNPYAVKQSKEIEDNSQLKDDRKDPKLIANLVKDGNYGMPYLPEKVYAYMRRLSMFRDQLTEDRIRNINRLHRELKIYFPEYMDAFGKIDGAFTLEVLKVSAIPTDITALGAEGMKNIWHNAKLRGRGYNRANEIVSYAEKSVGLTDGTDAGREAVKWYAEQILRLDEQLAEIESALHEKCREIPYAENILAINGVGENILAGILAEMGDISRFDDVKEIQKLSGMGLVACSSGKHKGQTKISHRGRKRLRYWLFQAAKSAVSHADEFKQLHEYYTTRSNNPLKKMQSLVVIACKILRVIYTILKTGTTYDPQKLLKDIKHPAASQAPMAA

SEQ ID NO: 163440 - protein, 345 aa, unidentified
MQTHTLGIDLGKTTFHLVALSDRSRVVIKKKFSRRQLLTFTANFPSSLIGMEACVGSHFLGRALREQGHEVRLIPAQFVRPFVKSNKNDYADAEAIAEAAGRENMRFVPIKTDDQLELQALHRVRDRLVSRRTSVINQIRAFLLERGISFHSGRANLRRHLPDLLEETNEKLTTRLRRLLDLLWQEWQHLEMQIENLTEEIEQIANQDEACRRLRQIPGVGSLVATAVVASIGNGAAFQKGREFAAWLGLVPKQHTSGDKPKLLGISKRGNRYLRRLFIHGARAVVFRRKRDQSSLGQWMASLEGRAARNVLVVAVANKLARISWAVLSSGENYRSLAAPVAVSH

SEQ ID NO: 163441 - protein, 457 aa, unidentified
MGKRNGLSRGDARRNARLIGMRGIVRHDLAILAIDLADTTQALALCDHDSRVLARRMIPGHAWHLDEAIEWAQATAITQGFAGIVVGCEPTGHRWRIVAELCQRRGIDLVCVQPMLVARAREGEDLTRDKSDPKDAVVIARLVGELRCYLPERPDQVWARLRQLGARRIQLTTLVGAARQQLRDLLECAWPAVLDSAAKPLDSLTFRAAVAVVLARTQGDPAGIGRLGYARFARLVTGELARWGGVRRCQRILRAVWTAATDPDQLEVGVSVQRPGALERAALVAGDWHHTLDGLDDIQQRMTGVLDTLDLTALVTSIPGLSAVGAAAILAETGDPTRFDTARALVKHAGLCPRANQSGAYTGKTTISGRGRPALRLAAWRAVWGALHANPVLAARHHRLTSRDHNQLTPTQARVALAAALLRWLWVVVTKRVPWQAAIAAGQLDPRVAKEVTAPAA

SEQ ID NO: 163442 - protein, 384 aa, unidentified
MKTNSDAPKTLYLGLDVHKEKTVIAILESHRDAQPRHYGEINTSQHALERAMRRIAKAQSRALSDLHVCYEASGCGFWIARRLLQMGVRCEVIAPSLIPTKSGDRLKTDKRDAAKLAKSLRANDLVPVNIPDSVDEAIRDLCRGRTDAVDDLRRARARLLAMLRRLGYRYDGKTNWTQAHMNYLRGLKLPDSAHNIVLEDNLAIIDFHHKRIDKLEAEMLHLLEDWQRKPLVDAMMAFKGFQIVAAMVTVSEIGTFSRFEHPKKLMAFLGLIPSENSSGSKRRQGSISKAGNPHARWLLIEQATHYSKPPKISQQLSRRQAGTDRWIRELSWNTQLRLNTRFKTLGKRGMHRNKIKVAVARELCAFLWELGTRIESNATCAAAK

SEQ ID NO: 163443 - protein, 353 aa, unidentified
MQIKSQIKSQIKSIGIDLGKTTFHLVALSTHSRVVVHKKFSRQQLLTYTANLPACLIGMEAGVGSHFLGRALRAQGHQVRLIPAQFVRPFVKSNKNDYRDAEAIAEAVERENMRFVPIKTEDQLDVQALHRVRERLVSRRTSVINQIRSFLLERGISFRKGPASLRRQMPEILENAEEKLSTRMRRLLDFLWQEWKHLQLQIESLNEDVEQIASQDEVCARLQQIPGVGPLVATAVVSAIGNGAAFHKGREFAAWLGLVPRQWSTGGKAKLLGISKRGNPYLRKMFIYGARAAVLRVKRQGSCLGQWMSGLETRAARNVVIVATANKLARISWAVLSSGEDYHPMHRAVSSAS

SEQ ID NO: 163444 - protein, 348 aa, unidentified
MGLITAKTVVGMDIGKKYSWCEAVFTETGEVLKEKRLNNRKEEFASFMSDLPRPIRVVMEASGNSAYLWECLEEMVEEIQIAHPMKTKAIASAKIKTDRIDDGILAHLGRADLVPQSYFPPREVRDLREILRHRVFLFLIQTRLKNRIHSYLWKLGIEVGRTDLFGKGGLLWLKGLELREPYCRLLEQDLRVLEAVQREIKEATEGIERLSKEDPRVNLLLPIRGIGRYSAMLILAEIGEIDRFDGPKKLVSFAGLCPSTYQSGRAFYHGRITKQGSRWLRWVLVEAAQKYGRAPGRLGNLFRRIQKRKGNNTAKVAVARELLICIYHCLKKGVAFEENPKRGKAMQS

SEQ ID NO: 163445 - protein, 414 aa, unidentified
MEQIHDRVAGLDVHRDSVVACVRATGPRGGAVADRERFGTTTAQLSHLKGWLTDRRVSLVALEATGVYWKPVYYALEHRFAVWLCNAQHVKNVPGRKTDLSDAEWLADVVAHGMIRPSFVPPPAIRELRDLTRYRKSQIDARVAEVQRLEKVLQDACIKLTSVASKVLTQSGRAMVEALIVGQRDPAELAELALGKLRPKIPELREALDGHFGPQHAVAARRILDHVDFLDASIAALSEQIDARTEPYRGVFQLLLPVPGFDRLTIDTVIAETGADVSRFPSPGHLAKWAGVCPGNHESAGKRRPVGVGPGNRWLRRALIEAARAAARTGGSYFGAQYRQIAQRRGPNKAAVAVAHSLSDLIWHLLSTGECDQDLGNDYFQRRRDPEREPMRLVRQLEQLGYRVTLTATPPPAA

SEQ ID NO: 163446 - protein, 522 aa, unidentified
MSRYVGIDLGIATKHRVAVLDGAERLGKPFSVAVSREGFEELLRRATAGADGPVKVVLEPTGLAWVPVAAYLSAAGHQVHLVKPQKVSHLRKFLRQHTKSDSVDAETNARLPQVDPKGIHQVSLPTPEQMTLRRLVNRRDRLAQEIADQKRRIHALMVMVNPPLMAALGESAFSQGARAFYREHADPDNVVNMGCEKLYKFWKKHGTVDKEMIAQVFKACGTTAELYADLRRNQKLPFDYPEVQEELRSELDWMEHTEIEVKRLGHRITEIYNRYDPDHTLEQIRGIGEVIAPSIDVLVGDIARFRNTKQFVSFSGICPRKKQSGLSDQAMPITKCGQRLLKKYFYLAAEVARQWDPEFAAYYARRYARGDHHSRIMIALARKMALRVYALLKRREKARQEALKPGTVSFVLRNPENGATVDKKQARALVLAKYTRASASPERHQRESARRGKEKGTGPAKKEWPSKDATSRYTVPSAQIPQGQKKGNNIDVRRTREGLEAINDVLKRVLENISVETEEEKL

SEQ ID NO: 163447 - protein, 335 aa, unidentified
MEFNYFIGTDISKNELDFAIMQEGRILFHREVSNTVKQVGVFIKELLKLPGFDLSRAVFCMEHTGIYNNHLLFALHKQGANICLESATQIKNSLGNIRGKNDKVDAIRIADYAYRNCDRLHLWVPKRDVIVRLAQLTATRSRLVQVKKMLTVPLAESNFFIDKRMAIDNAKLCKSSIESIQKDLIKTEKAIDELIDRDPELKRLFKLATSVTGIGKVVATEILITTNEFKDIREAKKFACYSGVAPFTKESGLFKGRARVSPMANKKVKKLLHLAALAAIQHNNDLKIYFQRKVKEEKKNKMLVINAVRNKLILRIFACVNNNREYEKKYQKLVA

SEQ ID NO: 163448 - protein, 354 aa, unidentified
MPCLPAEVILGVDTHRDTHAVVLIDLLGRLVAAETFPTTRPGIRALIAWAQQRGTVRRAGVEGTGSYGAGLTRALRLEGVDVIEVTRTARVGGRHRGKNDTRDAEAAARNVLSGQATAIPKSRDGIVESIRVLRNTRASAVKARTQAILHLKNLVLTAPDELREALRDLSTKQLLARCARMHRSDRLDALHATRHALRTLARRHRALDDEIHELDVLLADLTAKAAPRLLRQPGIGPEIAARLLLVAGDNPTRLRNDAALAALCGASPIEASSGKTTRHRLNRGGDRQGNSALWLIANNRMIHHPKTRDYVTRRTTEGKNTKEIRRCLMRHIARGIYPLLIADLHDAQSQLLLT

SEQ ID NO: 163449 - protein, 349 aa, unidentified
MKKTERSTLAVQDFAGIDVSAHELDVAMRRGIDDQLTIATFANSAAGHKVLLRFLLHGKARVRVCVEASGNYTLDLALTLQAHPQVEISVVNPRRARRFAESLGKRNKTDRVDAQVLCEYAWRMPWIPWQPPRAVALHLRAITRAIADLSSIHTQQNNRAHAAAASQALPALVVKEMQHHQKYLEQRMTRLRRQALRLVAEDTELDRRFRLMLTATGIGETSALQILGELAVLPDTLDARQWVAFSGLDPRLFKSGKSVEKRPRISRGGSRHLRRALYMPALVALRRDPYLRRFYQNLVLRGKARLQAIVAVMRKLLHALFAMFRTNQPYDGSKLCALGRTGIAVAACS

SEQ ID NO: 163450 - protein, 462 aa, unidentified
MSRLSKPNTSLEEARPFQGMSLINHNAAGVDISAHEIMVCIPGPDQTQLVRSFGNYTVDLYAIAKWLEEHHVHTVAMESTGVYWIPLFEVLESQQFHCLLISPRSLRRVPGRKSDVIDCQWIQTLHTYGLLTGSFRPDADLVALRTLLRHRARLLEHRAPHILHMQKALLQMNLQLSQVLTDITGETGLHIIRAIVQGERDPYKLAAMRNSHCKKDENEIAKALTGTWRQEHLFVLEQSLALYDFYTEKIFACDSQIEKNYSAIRPNWEGNEIMERSATGYLPPKRLSKNAPRAGNQLQLHLKRICGVDLVAVPGISVPLAQTILMEIGTDMSKFPNEKHFCSWLGLAPKNEISGGKILVSRTLKTRNRAGQAFRLATVSVMRADCIFGAFYRRVKSRLGPAQATVATAHLLARTVYRMLKYQVEYEPLSVSEYEKRYHDQQIKYLQKRAAKFGFQLPPAPA

SEQ ID NO: 163451 - protein, 340 aa, unidentified
MGLYGGIDLHSRDHWLAILNEEDRRIFKKKCPNDPQIILRTLKPYKDDLVGIVVESTFNWYWLVDLLMEEGYRVHLANPSAIKKYEGLKHSDDKHDAFWLAHLLRLGILPEGYIYPKQERPIRDLLRKRGHLVQLSTSLILSLQNIISRNCGFKLNVNEIKKITENRIAPLLAGQEDLELSGMVSKETIDFLTRKIRQIETAVLNKVKLKMPFIYLQTVPGIGKILSLTIMLETGPIDRFPKVGNYVSYCRKVPVKWTSNNKAKGKGNKKNGNKYLAWAYSEAAEFARRYDPYARAYYNRKSAKTNFMVAHSALAHKLSRAAYYVMRDQVPFDHKKLFAQ

SEQ ID NO: 163452 - protein, 316 aa, unidentified
MKIIYPRVCGIDVHKQFIVAVICISESVEPIYLKKRFSTFHNDLIRFRNWLIQNDCQNVCMESAGKYYIPVYNVLESHISNIVVANPKWVRAVKGEKDDDKDAKWIADLFKFDIVRSSFIPQKDFRILRELTRYKYKLVNMRSSEKNRFQNALTSGNCKLDMVFTDVFGKSASNIIDLILSDNPYTDEDILSKVHKKCKASPDMILDSVNGTDLTPVQKSRIELVNDHIKQLSSNIQRLDKLIDLMIEPYEDYISFLCQIPGVSRNSAIIVLSEIGVDMNQFTSTRRLTSWAGLTPSSNQSAGKKRAFIAIARKNL

SEQ ID NO: 163453 - protein, 429 aa, unidentified
MVFRSEADAVDVIVDRCAGLDVHRDTVVATVRSPGKRKGARTSETRTFATTQRGLGELSDWLRCASVELVAMEATGIYWKPVFAALEEQVTCWLLNAAHMHNVPGRKTDVADSVWIAQLVEHGLVRPSFVPPREMRDLRDLTRSRAAVVQERVRMIQRLEKVMQDAGIKLTSVASQAYSKTVRAVLDALVAGERDPRVLALLAKGRLRAKRELLEEALAHRFRVEHHGVLVRRLLDHVDSLEAAVVDLDEEITRRLQPHAAQLALVCTIPGVGGKVAQCLAAEIGFDMSIFPTAGHLASWAGICPGNNASGGKQRSGRTRPGCKWLKTALTEAAWGAARTKGTYLAAHHAQIKGRSGRYIALGATRHDIIIAYWHILTDQAPYRELGADWIARRYSPERRARRLIAQLEELGLNVTTTPAATGSEGTAA

SEQ ID NO: 163454 - protein, 426 aa, unidentified
MMKANDSDQHEYAAFVAIDWADQKHVFTLQETHQAKKENGTLEQKPEVIGPWVAKLQERFPGQRLAVGVEQSRGALIHALLEYDFLVIYPIHPSTVAKFRQAFKASGAKNDPLDTDLILEILSKHLGLLKALNPDTVQTRLLARLTHDRRKTVDLRTSHVEALTASLKEYFPQALALVNGNLTSRLAGDFLMKWPTLEQVQQAKPNTLKKFYLGHNIRRPELIKEMLALAQAARPLTKDLALVESGRRLTQMHAQMIQTLNSVIADYEARIKEVFEQHPEAHLFRQIPGAGPAMAPRLLAFFGTDRSRFASAQDVQSFSGIGPVTVSSGKSRVVHFRRACPKFLRQTFHEFARLSTADCQWAQNYVEYYRSKGKKYSTVIRALAFKWIRILFRCWQDKTSYDDQKHMETLKKRGSIFATLHLKSEP

SEQ ID NO: 163455 - protein, 341 aa, unidentified
MFYCGIDLSARDSHLCVVDENLSIHLRQKSANELPRISNLLDPFKPHLKIVVESTFNWYWLVDGLQLLGFDVCLAHTLGLSMITKAKIKTDRRDAFSLAKLLSAGLIPKAYIYPASTRPLRDLLRRRLRVVQMRSREYGSLRQLLLRQGILSTSRNHIKLADDADLLTWLTHPLVRMNAAQGIERIDMLSRQIAELEQQILDLTCDKADYKRLIGIAGIGKILALTILYEVGEITRFNSLRQFSSYCRLVPGVAQSGAVSRRGRSSKQGNHYLKSAFNQAAVAAVRSYPAIRRCFERHLGRHRGSARKLVAYNVIAHKLAQAVFHVLRDGADYREELLFGN

SEQ ID NO: 163456 - protein, 405 aa, unidentified
MNAVGIDVSKGRSTVTIRRPGDVVVLPPRDYRHTQSSINALVAMIKGLDGETKVCMEHTGRYYEPVASWLSSAGIFVSAVNPCLIKAFGDESLRAPKTDKADAKKIARFALDRWTKLRQYSRMDEIRNQLKTMNRQFDFFMDQKTAMKNNLIALLDQTFPGADDFFDSPARSDGSQKWVDFVYTYWHVDCVRRKSLDAFTEHYRNWCKKNTYNFCAEKAETIYRTASDLIAVFPKDDNTKLLIRQAVTLLNTASKTVETLRIKMNQTASQLPEYSAVMEMNGVGPTLGPQLIAEIGDITRFEHRGSLTAYAGVDPRPNESGDNKRQSNPTTKKGSPYLRKTLFQIMDGLIKRSPMDDPVYAFMDKKRAEGKPYHVYMTAGANKFLRIYYGRVNAFLSSAKQTEEP

SEQ ID NO: 163457 - protein, 475 aa, unidentified
MNLKGTKKKNQVSNANIFEQQELLKKIEVVRENLTASTWRELETKGKFDKNAKLSFICDDMLILGCDVGSETHYLRAIDTRGKELSKSAFSFSNNADGFSKAKEWAVKIAAEYDKKQIVLGLEPTGHYWFCLATWMISNGLSVVQVNPYAVKQTKELEDNSQLKDDTKDPKLIANLVKDGNFGMPYLPEQLYADLRRLSMFRDQLNEDRIRSINRLHRELKIYFPEYKEALGKTEGTFSLELLKQAPFPDDLAALKEDGIRQIWHNAKLRGRGYSRAGEILEYAKASVGIREGKETGKLVVQWFVQKILELDAELALIEAQINQKCLEIPHTDKVLEICGIGENTLSGMMAEMGDISRVDDVKEIQKLSGLGLVASSSGKHKGETRISHRGRKRLRYWLFQAAKSAVAHAEEFKKLHVYYTTREQNPLKKMQSLIAIACKLLRIIFTILKKGIKYDPRKMLKDIQRKSRRESLVA

SEQ ID NO: 163458 - protein, 340 aa, unidentified
MKIVGCDLHAAQQTIAMLDRETGEVVEKTLKHEAGTVREFYAALPAPVVVGLEATGSMGWFLQLLDELGITYRVGHPATIRKAETRKQKHDRRDAALLLQLLAENRFPAIWMPSTELRDLRALLLHRHQWVRLRTRVQNALHAIALGYGVQRGHALWNRDGQAMLASLPLPPHAAHRRDELQALYQQLDENVDRLDDRVKHAAAQRPRATELMTHPGVGHVTALATEVFLGDPSRFADGKSLGSYVGMIPSEYSSGSRQRLGGLSKQGNPLLRFLWGEAAMHAVRRDPELQRFYRRKLQQKGLGKARVAAARKLGIRLWIMLRDQINYDEFCRRSPRRQS

SEQ ID NO: 163459 - protein, 338 aa, unidentified
MSNITTVGLDLAKNVFHVMCCDVHGKIVRKKMLKRPQVLEYFANLSPCLVGMEACASAHYWARELGALGHQVKLLPPRYVKPYVRGNKNDYNDALAIAEAITRPQMRVVSVKTTEQQDIQALHRLRERRLADRTALCNQLRGLLAEYGLIFPKGVNVLRRRVPELLENAENGLSALFRRLLAQGYQQLQELDEHIDVYTEEMMRQSQQDEACQRLQTIPGFGPIVAGVFHSAVGNGDAYRRGRDVSASLGLVPRQHSSGGKEVLLGISKRGDRYLRSLLVHGARSVVIQAAKKDDRLSRWVNKVKAARGFNKAVVALANKMARTGWAVLANKTVYQAA

SEQ ID NO: 163460 - protein, 344 aa, unidentified
MSMVKSVVGGVDTHADAHVAAALDSNGGVLGVESFPADAAGFEELLGWLVGFGAVSLVGVEGTGSWGVGLARFLAAADVAVVEVDRPNRQARRKVGKSDPTDAVAAARAALSGAASGIPKTRNGPVEQMRVLLVAKRSARAQRIQTLNQLRHLVFTGPESIRVRFKNRYKTGLISEAAAMRPRPGSDPVLFTTNMVIRGLARRIQGLNDEMATIDAMLGELVAKVAPSLLELYGVGVDAAASLLVTAGDNPDRLGSERAWAHLCGVTPVPASSGKTIRHRLNRGGDRQANSALYRIVLTRMSSHPETRRYVARRRAEGLGSLEVIRCLKRYVARQVFKELPRTA

SEQ ID NO: 163461 - protein, 315 aa, unidentified
MHAPRTFMVGIDVSKAHLDVAVEGKRTVVRFDNDAAGRAALAAAVAGAELVVVEATGGYEMATVRALMAADSPVAVVNPRQIRDFARASGRLAKTDQVDARVILHFARAMRPAQIPHIDDGRIALAALVTRRRQLIDMAVAEKNRLEHAPQAVAVLIGETLAALKAQLARVDAAIALAIEAEPDMAARRDLLLTVPGIGEVGAAVLIAELPELGGIDDKKLAALVGVAPMAHDSGAWRGQRHIAGGRATVRCALYMATLSAIRCSPAIKAFYKRLRDAGKPPKVALVAAMRKLIIMINTILKRHTPWSEPQQHGC

SEQ ID NO: 163462 - protein, 420 aa, unidentified
MKVSYQTCCGVDVHKSFLVATIVKTTGDIEPSYQKKRFSTFNNSILEFKQWLRDNDCHDVCMESTGKYWVPVFNLLEDDINVVIANPKWVKAVKGNKDDTKDSKWIGDLFRLGLVKGSYIPCKKVRILREYTRYRYKLVSCRSSEKNRYQNALTVCNVALDSVVSDIFGKSSTSIIDYLLEQSGSSINHEEIASKLLRSLKSKEDAVIESVEGYQMTDAQKYRMRLVRAHMDYITAEINDVDKMIENMISSNTDFENAVQFLCTIQGVKRDSAITIISEIGTDMSQFSSSRRLCCWAGLTPGSNESAGKRKSVRFTRAGVYLKPALVQCAHAAVKSDKSPYYKKKYESLVKRRGKKRAIIAIARMILTAIYQMLSTGEQWNPSDLYKIDMPVALVEKQKAKAIKQAKKLLQREGLSLIHI

SEQ ID NO: 163463 - protein, 391 aa, unidentified
MPQPNDLSRSLTALDQDSTLIAVVEMSQSSWLVGAIIPGVERRPAKKLEASEGMLLALLHRWRDEAAKAGCTIDRITVAFEAGRDGFWLARWLRQRGIEAHVIHATSIAVSREHRRAKTDRLDAALLQRAFLGWLRGERGHCTMVAIASLAEEDAKRPSREREALVGERTRIGNRMKSTLARLGIRGIRPGLRKAAERLEQLRTPEGAPLPPNTLAELRRDLARLRLINDQIGEIEAARLERLRQQPDEARHPMILLLARVVGIGIETADMLVQEVLSRKLRDRRAVARYGGLTGSPEESGARRREKGLARAGNARVRRGMLQLAWRFLMFQKDSALAQWYRARTADARGATRKTMIVALARKLLVALWKLVTTGELPNGVVLRPAIPAAV

SEQ ID NO: 163464 - protein, 449 aa, unidentified
MSKGVSAQAGLPIIHDRAAGIDIGSRFHVVAVAPALAADPVQTFQAFTGDIQRMADWLVAVGIRTVAMESTGVYWVPVFEVLESRGIEVILANAREARAVPGRKSDVNDAQWLQRLHACGLLRASFRPARDIAALRVYLRQRERLLDYAAAHIQHMQKALTFMNLQLHHVVSDITGVTGMKIVRAIVDGQRDPRVLATMRDVRCKATVETVQAALVGNYQPEHVFALAQALALYDFYQARVAECDAQIEGVLVMLNAEKLCPAVPIPKARHRTKQPNEVGFDVRTVLYQLTGRDLTQIHGIGPYLALRLIAECGTDLSKWRTAKHLTSWLTLSPGCKISGGKVLSAHTRKTTNRLTAHLRLAAVTVGRTSTALGAFYRRLAARIGKAKAVTATARKIAVLFYNAMRFGMDYQDPGAEHYESKYRERVIKNLHRRAAEFGYTLQQAECVS

SEQ ID NO: 163465 - protein, 370 aa, unidentified
MKSIIYVGMDVHKASFTISCFSVTTQETFATVKISPDAKAIKKYLDGVSLSRSEECEFVCGYEAGCLGYTLYHQLTAMNIRCVIMAPTTILRNSKRIKTDRIDAENLARCLAYGGYKSVYIPTAQDEAVRDYLRMRDDHKLMLKKIKQQINAFCLKHNKIYPGNKSKWTQAHVKWLNALEFDGYLQDAFNEYMITYRELADKVERLESQIEQLAELEEYRDKVKKLICIKGIKTHTALSLIVETGDFSRFQSAERYASYIGLVPGEHSSSEDQNRLGITKAGNRHMRMLLIEAAQCYSRGVPAKKSKDLKSRQKGASPEVIAYADKASIRLRRKYIRMELVNKKKANVAKTAVARELACFIWGMMTDNIA

SEQ ID NO: 163466 - protein, 355 aa, unidentified
MSNVTVLGIDLAKNIFQLHGVDKNGKKVSSKAVRRNKLLSEVVKLKPCLIGMEACGGAHYWARCFKDLGFEVKLMSPQFVKPYVKGNKNDANDAAACAEAVTRPTMNFVPIKTVEQQDIQLLHRVRSRLVSQRTALTNQIRGLLAEYGIVVNKGIASLRRRLPEILEEEQNELTEFGKEIFQELYDELCSLTKRIDKYEEKVKVLSKYDERCRILETIPGIGKLTSTAFVAAVGNAEVFAKGRQLSAWLGLVPKQHSSGGKTRLLGISKRGDRYLRSLFIHGGRSVAKTAQKKKDRYSLRVQALIERCGMNKTVVAIANKNVRIAWALLKNNTAFDPNYKVEKPITGVNDARKAA

SEQ ID NO: 163467 - protein, 362 aa, unidentified
MRIIGCDLHTRQQTVAMLDTTTGEVMEKTLTHEGSNVREFYSTLPRPVRVGIEATGSMHWFVNLMEELGIECQVGHPAKIRAAEPRKQKHDRRDADLILKLLLENRFPSIWRPAKELLDLRALLLHRHQWVRMRTRVQNALQAMALANGLRRGPSLWSQAGQGTIALLPLAPHTAYRRSGLQAMYVKFEAEIENLNQRVEEQACERPGARLLMTHPGVGPVTALATEVFLGDPTRFADGKALASYVGIIPREYSSGGRQRFGGLSKQGNPLLRFLWCEAAAHAVRRDPQMQRFYRRKLIQKGLGKARVAVARKLGIRLWIMLRDQIDYKEFCRRGQMRQKNGAACAGMPETRYGANRHRPVD

SEQ ID NO: 163468 - protein, 349 aa, unidentified
MIVVGIDPHKQTHTAVAVDEATGRVLGELTVRARTPGFDRLLAWARSLDAERCFAIEDGRHVSGHLERCLIAHGERSVRVPPRMMGEARRTDRVAGKSDPVDAAAVARAALSHPDLPVATLAGVEREIGLLVGHREMLVNERTDRICKLRWLLHDLDPDLAPPLRTLDRLATLDRLEARLQELGPIVAVELCLELVQRCRQITIRANELERRIRDLVGSHAPALLEIPGCSALTAGKIVAETAQVSRFPTEGHFARYAGTAPIPASSGARHRQRFSRRGNRQLNAAMHRIAVTQIRIHPPAQAYLARKRAEGKTKTEAIRALKRLITRTVFTTMMSMNQPADRLTADAA

SEQ ID NO: 163469 - protein, 521 aa, unidentified
MITIPVILERCAGIDVGKRGLAVAVAVGPADKEAEIKTRSYGTTVPALQELHAWLREEGCTSVAMESTGSYWIPVKNILEQDFQIVLVCARKHRPKKGDKTDFRDAMDLAVYHRHGLLTGSYLPERGIVELRDLTRRRKKLLGHLRAEKNRIQKVLETANVKIGSVVSDVFGVSGQEILQTLLDNKPVTAAELADKAKCRLRQRIPELTEALEAHHLNDHHRWLIDQSIEHCKLLDQQVEALELRIDQHLEPYHRQYELLTTIPGVKETTAANILAEIGPNMDQFPSADHLCSWAGICPGNNRSAGKSKSCRIKKANKFLLTALVEGAWAAGRKQGSVFQRKFHRWVNKLGKKKANIAMGRSLLRVAWTMLKNDQPYVEPDVASTKTRERERQVRNHAHQLRQLGADEKTIQALVENMLEAPPALTGTSPAQEPAPDTAATARQASSKNAPPKMQGGHSPRRPPARGVLGFRIRTADIRKHSIIKEPPGKPSTATTPETALKRPRQQPRARKKTDPGTLGG

SEQ ID NO: 163470 - protein, 415 aa, unidentified
MNDLIRIGMDTSKSVFVLHGADAAERPVLRKTLRRRQVIEFFAKLPSTQVGMEACGAAHHWARELGALGHEVKLLPAQRVKPYVARNKNDTADAEGVCEAMSRPRMTFVPVKTAEQQAALMLAGMRDQLIARRTQLSNTIRGYAAEFGVVAAKGLEKIEPLLARIAADESLPALARELFAVLGAEYAELKLKLRKIEAQLLAWHRQNELSRRLVEIPSVGPIGAALMVMKVANPRAFRSGRDFAAWLGLTPKDHSTGGKQRLGVITRAGDEALRRVLVLGATAVIQQVRRGRGHSSLWLVALLKRKPPKLAAVALANKTARIAWKLMVSGERYRGACATDVTHGNVCFEGASSQPRKPGAVLAAVKARPGSAAARRTGNATAGLDGGCARRPTTIAVGTKKRSMVEQRNESYGHD

SEQ ID NO: 163471 - protein, 454 aa, unidentified
MKKNGNQKKTRIVEIDTLKQINLDAAGLDIGSEEIYAAVPKGRDKESVQSFPTFTADLHRLANWLESCGVKTVAMESTGPYWIPIYEILESRGFEVYLVNARHIKNVTGRKTDVLDCQWIQQLHTYGLLKPSFRPPEQICAIRSLVRHREMLIRCRSSHIQHMQKSLNLMNLKLTNVLSDITGVTGMKIIRAIIAGEHNPEVLAKFRDKRCARSEAEIIKSLEGHYKREQLFTLKQAVELYDFYDQQLRACDAELEALYEEFEPPEDPGTDLPEPKKSKRRKNQPDFDLTQSLYRMTGIDLTPVDGLDALSVQTILSETGIDMKPWRTVKHFTSWLRLSPNNKITGGKIKSKSTQPTKNRASTTFRVAAQSLAHSDSALGAFYRRLRAKHGAPKAITATAHKLARIVYFMLKNREPYHDPGSDYYEAQHRDRAIRNLRRKASKLGYILEPVNLT

SEQ ID NO: 163472 - protein, 309 aa, unidentified
MDTTVVGIDVSKDRLDVHALPGGESFAVARDAAGLEALVEQLQPLAPKIVAVEATGGFETVVAASLAAAGLPVVVVNPAQVRAFAQALGQRAKTDPIDAAVIARFVKATDPEVRPLPDAETQALSDLVARRRQIIQMVVAERQREKRAAGRMKKSILRLLKALQKELTAIDDDIDDAVRGSPVWREKEDLLASVPGVGPTIARTLLADLPELGTLDRRQIAALVGLAPFTRQSGQWRGRSFIGGGRATVRSALFVGAMVAARFNPHLRRFHQRLLAAGKPKMVALIAVARKLLTVLNAIIRDRTPWQPA

SEQ ID NO: 163473 - protein, 346 aa, unidentified
MNETTTIGLDIAKQVFQVHGVAIDGTVTVKRQLRRSEVIRFFDRLPRCRVGLEACGGAHFWARELTVLGHDVRLIPASYVKPYVKRGKTDAIDAEAICEAVSRPTMRFVPIKTVDCQAGVMLLKTRSLLVKQRTQSINSLRGHLSELGIIAARGTGKVETLIAIIRDKTDERIPAVARRALEMLAEQVEALVRRIATLENEIVSEVRRDDTMRRLATIPGVGPITAATIVALVPDPRAFTSGRHFAAWIGLTPKMHSTGGKERLGRISKMGNPVLRSLLVVGATAVSRHARRGATVSPWLTGLLARRPAKVAAIALANKMARVIWALLTKGGVFTRRPATAAQHAA

SEQ ID NO: 163474 - protein, 345 aa, unidentified
MLIIGCDFHPGFQQLAIFDNQTGEIRHRRVGQMEEARAFYASLSAPALVGMEACGHSQWFERLLQELGHELWLGDAARIRASVVRLQKTDQRDAEHLLTLLLEKRFPKLWVPSAEERDVRQLLVDRHQRVRWRTQVKNQLQALALNQGLQKKRQLWTREGRQQLQKLILLPFAARRRDELLKMLHELDQQIAALTAVVKAEAEKRPQAVLLMTHPGVGPQTALAFVLTIGPVERFDNAKKISSYVGLIPREHSSGGKQRLGHITKQGSPLMRFLLVEAGQSAVKGDAELKRAYLRLALRRSRGQAKVAIARRLATRLYWMLRTGKDYAQLKASGAGKPESFRGAA

SEQ ID NO: 163475 - protein, 460 aa, unidentified
MRILGIDLAVVAKHRAILADERGRFIGRLVKFRTCQADLERVYALARRGMTPDEPLAVVLEATDIVWYPVAIFFQQRGATVYLVNPRMAADLARFYQRYAKSDRLSAQTLARLPVVNPDSLYPWVRSGPDYLALQRSCKEVERLTTQASAIQNRLRSTDHLGWPDLHRRVFANPFSRAARWFRDHFYDPRCVVEAGVSGLRQAWRAAEVYDGDEDWIEPLLTLAQEVLSLYGEQGSYLDYRALAEEVQREQRRLAELEADAHFVRLQVMRPRYRQLHPSRNLETIKGVGQDGAAVHVAFVGDPSRFASNRAFRGWSGMVPYSDQSGEREGKGLRITQAGPDPVKKYAFLEAESARQWDPQIAAIYHDQMVNKGNHHTQAVCACATHLLDRIRVILTQDRPYELRDVDGTPVTTQQARAIIAERYTVPEEVRRRNTRRARRERAERRAERKEKKKRRSRSR

SEQ ID NO: 163476 - protein, 368 aa, unidentified
MDNCITSFAGLDVHKDSTAIAAAEAGREMPRFIGTVGPEFAQLLKALKSLGKPETMLVVYEAGPCGYGLARQLRSRAYHCEVIAASKIARRPGERIKTDRRDALTLARLARSGDLVKVMVPDERDEAMRDLSRAREDAVRARLKARQQLKALLLRHGHRYGGKSSWTLAHERYLAEVSFAHPAQHIAFAEYRQAVREGQERVERVTEALRTQTEQWRLKPLVAALSSLRGIDFVAAVTLAAEIGDFNRFAHPRELMGFLGLVPSEYSTGDTQRQGDITKTGNGHTRRVLVEAAWNYRFPARISRILQVRQEGQPKAVRAIAWRAQLRLAHRYQRLSSRKLHPNKLCVAIARELAGFLWDIARQVQVAA

SEQ ID NO: 163477 - protein, 399 aa, unidentified
MLAVGIDISKSKSVAAILNQDGSMHTSPFEFHHTQPELDAFIKYILNNKQSATILMENTGHYHYPVLKAFQEAGLPVCMVNAYQIKKFGDMDLRKAKTDKKDAVRIARYALEKSYSLVPYTSMEQKYEDLRFLARQYNQRMLTLKTNKVFLLNLLDETMPGITNILPLTTRTPETSLSVLFINRFKSYDRIKKMGKSRFLDAFEKIARKSRNRQTKTYGLAIYEAALRNITTRGENEYTLAAQDQCLELVCESQKAADSIILKMQTLAETLPEYAVLRSMAGVGDRLGPLILAEIGDIRRFHSGKALNAYAGNDAPPYQSGTFESHNRHISKRGNAALRKYCFEVMQALKLTRPQDDPVYLFLLKKEQEGKPYNVAKMAGVNKFLRIYYARAMETLKQQ

SEQ ID NO: 163478 - protein, 366 aa, unidentified
MQKISTMSRSGNRILKKCQLTIGLDLGDRFSSYCVLDDDGEIILEQRGATTPEAVKQIFGRMAPCCIAMETGTHSPWVSRLLTALGHEVIVAHAQKVRLIVKSRRKDDRIDARTLARLARIDPELLSPVQHRSAQAQLHLTEIRARAGLVSARTALVNAARGLVKSSGERLRKCGTQQVRRESTSTLSAGLQEALEPLLREVESLNERIQEYDRRIARMAKETYPETALLKQVKGVGDLIATAYVLTIEDPHRFRKSRDAGCFVGLQPGRRNSGESEPQMHISKEGDEYLRTLLVQGAHYILGPFGEDSDLRRWGQQLAARGGKNAKKRAVVAVARKLAVLLHRLWVSGEVYEPLRNSQKELRAVA

SEQ ID NO: 163479 - protein, 335 aa, unidentified
MSIMGCDLHTRYQFVAVVEAEDGEVVGRCLEHQNGEAKAFYAQLPKPSLIGIEATGYTQWFERMLAELGHELWVGDPAEIRARAVRRQKTDTRDAEHLLDLLLSKRFPRIWVPSVEERDLRQLLKHRDKLVHLQTSVRNQLHFLAMNQGLCRKKKLWSAQGRGELESLSLGEWASLRRQELLDLLDRWAGRVEELNGAVKAAAEQRADCRELMKVKGVGPVTSLAYVLTLGPIGRFASSRALVSYLGLNPSEHSSGGRQRLGKISKQGNQMLRWLLVEAGHGVAQFDPELRRKYQRVKFRRGGAVASVALARHLAVRLYWMLRQAGTASAAGSHA

SEQ ID NO: 163480 - protein, 337 aa, unidentified
MSVYVGIDVHRKRSQVAVVTGDGQVQLNKNVVNGSEPFLRLIGDLPSGTPVAFEAAFGWSWLADLLEDYGFDAHLVHPLRCKAIASARLKNDKVDAAILAQLLRADLLPEAWIAPAGVRQLRALLRHRIGLVRLGTQLRNRIHAVAADHGYDRSASYWTGPGRGWLAELDLPPSSREIVTDCLAVIDGLAPLTDRIDGELHQHAKADPRVKVLKTLPGVGEFTALVMLAEIGDISRFGSARKLASWAGLTPTVRGSDLTVRHGHISKQGSAWLRWVLNQAAQTAKRSPQFAASYAAIAKRRGKKIATIAISRKLLTRAYHLLADMQAADTTTPLRRP

SEQ ID NO: 163481 - protein, 353 aa, unidentified
MITIGVDAHKQVHAAVAVDDAGRDVGRWRGPNSRAAWDELNRWAAQFGDERQWGVEGAGGFGRGLAQRLVDVGEVVFEVNPRWTASGRRSARKGEKTDALDATAVARTVRQEGSALPRVHSDDESSILSVLTTERDELIRESNRIRNQIHQLLLQVDSEYKGQIGRLVIRRSLGALSRYAAPDGGALQEHRAAAVRRLAVRLELVKHHIDDVSLQIKELAAARFPALTRLCGVNALTAGVLAGLLGPGQRFASDAQLAAYAGVAPLEASSGMRVRHRLSRSGNRRLNSVIYWIVLTQAHHSPEARTYLARRVAQGKTRREAHRALRRYIARALWRLWVECHSPAVSTPVRAAA

SEQ ID NO: 163482 - protein, 387 aa, unidentified
MQASTVGTPTAGHCGTIFVSIELSQKAWLVTLHSPDKGKMSRHKLEGGDHAGLLALIGRERDRAARALEAVPAVVSCYEAGYDGFWLHRLLMAAGITNYVFDPASIAVDQRARRVKTDRIDGEKMLRTLMAYLRGEPQVVRIVRVPAPEQEDVRRASRERGRLIKEQTAHTTRIKALLRLLGMAVGNPRRRDWLSWLATQRDWQGQAVPPRILSEIRHEHARLMLVREQLEALAQTSAQADPTPAAIQMTERSDLLLRLKCLGPAFTTTLTNEVFYKDFRNRREVASYFGLTPSPWQSGGIDRDQGISKAGNPRARCAAIELSWLWLRHQPESALTRWFRSRTQNNASKRNKRIAIVALARKLMVALWRYLTTGLVPEGAVLKAVKP

SEQ ID NO: 163483 - protein, 352 aa, unidentified
MNQITTVGVDLAKDLIVACAADVAGRTLFYKRFGFHGFAAWAAKLPPCTIAMEACSSAHYWARTLSALGHNVKLLAPDLVKPFRKSQAAKNDRNDAQAILITALQPDMRFVAVKSLEQQSILAVHRMREGWKSERTALINRVRGLLAEFGFWLGRSPQTLTRRLPQLMQEDQLPARVRALLAQAHDQLLRLEALMQQCELDIQAHARHSEAAQRLGAVNGIGPITASAIVATVGNAADFRNGRQLAAWNGLVPKQSSSGGKERLGKITKRGDTYLRGLLTQGARSTLNAALARPPDKRSRLEHWIVALRHRVGYHKSLVAIANKHVRICWALLARGERYDPHAASRRVRPAA

SEQ ID NO: 163484 - protein, 345 aa, unidentified
MQTMYYIGLDVHKKKISYCVKDGSGHIHAEGAIPAARSDLDRWMKTLPAPWTAAMEATIFTGWIYDHLKPHAAALKVAHPLMLRAIAAAKKKNDRIDANKIADCLRCDFLPECYMASTEIRERRRTLRYRNLLVHQAVQLKNKISGLLMEAGVSYNKQKLHKVGYFKELLAINPDINEGLKPLLRLCRETLVRLQKTESALVRSLQRDSLLAERVQRLMTIPAVGPITALTWALEVGDVKRFSSIKKAISYCGLCGAEKSSADTVKRTPISKQRNKHLQSVLVEAAKMAPRLSSELALIYDREKQKGNANRATLAVARKLVAYLVAIDRSQRDFLVVEKENCAAA

SEQ ID NO: 163485 - protein, 396 aa, unidentified
MFYCGIDVAKHKHAVAFLDERGQPCRAAFTVENNRAGMDTLVRELVATGGEVNVALEATGHYWLSLYDVLTRHGYPVVVINPLQIAAYRKSGLRKVKNDRTDAIWIADFLRISNLPASSRDIPTLLQLRELSRFHYWLSEQIGDCKRKLLTILDRVFPEYESVFSNIFVQSSRALLQEAVSAQEFADFDLQELTEMLIKTSRGRFGAEKAQQLQEQARQSIGVGFLANAAQVEMRCLLAQIELLEEQQAEVDKASAALMEQIPQHITTVPGVGLITGAAILSEIGDVTRFPSEEKLVAYAGIDATVYQSGQFEAGERHMSKRGSAYLRHALWQAALMAILHDEEFKAYYKKKRAEGKVHGVATGAVCRKLLIRIYAILKENRPYVARKLPHKTLDS

SEQ ID NO: 163486 - protein, 431 aa, unidentified
MTVTINSLIFFMEVVMEAIVERCAGLDVHLDTVVACILYGDLDKKPNKEIKTFSTTTKGLLQLLDYLNINRCTHVAMESTGVYWKPVWNVLESGAFELIIANAKKIKNVPGRKTDVKDSEWIASLLRCGLIEKSFVPPEVIRDLRDLTRLRKELLSEITRHKNRIHKVLQDANVKVSSVLSDVFGETGKVIINELISSRCITMNFVESLYEGRGKSRLKATPNEMYEALNGKIRGQHIILLTIHNNNILFLEKQIEEIEKEIDVLLQKESESIDILNTIPGINITSAACIIAEIGSDMSVFPTEKHLSSWAGLCPKNNESAGKKKRSSIKSGNPWLRSILCECAWASIKKKDSRFKSKYWSMVPRMGKKKALIAIANLLLRLIYHLLKNKSTYEELEIQYYVDKDKIRENKIIKELKSRGYIVQKCSLETI

SEQ ID NO: 163487 - protein, 400 aa, unidentified
MLSIGIDVSKGKSTVCGMKPGGEIVYAPFEVQHTREGMSELVSLLRSSGEEVRVVLESTGSYHCPVVAALLENGIFVSVVNSLRMKRFCSQSIRKVKTDRIDAMQIALYGLAYWQELQPTRLPEDTYRELQLLARQYYQMTSLLIKAKVDFNAICDQVLPGMQELMNDHAGRHKLSDFVLRYRHTTHILEMGETRFRKDYCKWAEKKGYRNCERMAALIFATAQNGIPVLPNAPSTQIVITEAIRVLHTVEASRDAILTQMQALAKTLPEYSLVREMPCIGDTLAPRLIAEIGDVRRFHSKRALIAYAGIDAPPYQSGKFCANNRHISKRGNRYLRKTGYEVMQSYVMHKPANDPIFTFIEKKRGEGKSGKLAMVAGLNKFLRVYYGKVTELYRSLPAIE

SEQ ID NO: 163488 - protein, 432 aa, unidentified
MVVATTGEVVVLEEDLQAGEIVARVAALDIGKAEVVCCVRVPHEGKPGRRLQEVATYSTMTRSLLAMSDHLRCLGVTRVVMEATSDYWKPVLYLLEVQGFDPWLVNARDVRHLPGRPKTDKLDAVWLCKVAERQMIRPSFVPPEPVRRLRDVTRYRIDLVGVRTAEKQRVEKLLEDAQIKLSVVASDIFGVSGRQMMAALIGGQTNPKALAQLARGRMRAKITQLEEAFTGHVTDHHRLLLTKMLARVDALDADIAELDATIEEMVAPVALAVERLDEIPGVGVTAAQVIIAEVGVDMSRFPTAGHLASWARFAPGVKESAGKKKGTGSTGHGNRYLARVLGEAAVAAGKTNTFLGERYRRIARRRGKKRAIVAVGRSILVIIWHLLSDPEARFHDLGSDFYDNRIGPERKKRNHIRQLEALGYKVTLEPAA

SEQ ID NO: 163489 - protein, 453 aa, unidentified
MGKTTTGGHPDLKMVNPGAAAIDIGSKMHMAAVNPDSTDMPVRAFGTFTRDLHDLAAWFRSCGVTNVAMESTGVYWIPVFEILEQHGFDVILVNARYAKNVPGRKTDVSDAGWLRQLHSYGLLRGSFRPEAEIATLRAYMRQRERLVEYAAAHIQHMQKALMEMNLQLHHVVSDITGATGMRIIRAIVAGERNPDVLASFRDVRCHSSVETIRAALVGNDRAEHIFALTQSLDLYDVYQTKMADCDRKLEAAVAALTVKASGPISPLPKARMKGKQVNAPSFDVRAALHGVLGVDLTQIHGLGPSLALKLVAECGTDLTAWPSAKHFTSWLCLAPGNKISGGKLLSSRTRRSSSRAAALLRLAAVTIGRSDTALGAFYRRLSARVGKQKAVTATARKIAVLFYNTLRFGMAYRDPGAAAYDERHRTRVLANLHRRARSLGYMLAPTPDAEAVS

SEQ ID NO: 163490 - protein, 378 aa, unidentified
MNRIIKIGMDVHTTNYTLCIFEPSFEHDGTVHCITQVKPEIKNIIHVIETFKKKHENEELNIVCGYEAGCLGYSLYHELKEKGIECVILAPTTMKTEKGGRKLKNDYRDAKMIAECLAYGGYSAVHVPTELDNSVKEFIRMRDDIKENLKSIKQQIIAFLTRNGKQFEGKSFWTRKHIDWINTVSFSEPLLQDTLKEYMIEYNHLCDRVETLDRQIEEISLKEEYVEKVQQLQCLIGIKTHTALSLIVETSDFNRFKKGNMYSAYLGLIPGDDSSGGHEKKLGITKAGNSHLRKLLVEASQGYTRGRVGFKSKDLKARQEKCSSEVVAYADRANERLRRKYYRMTLRGKKYNVAKTAIARELACFVWGIMTDHIDLCS

SEQ ID NO: 163491 - protein, 348 aa, unidentified
MEELNIQTITTIGLDIAKSVFQVHGIDAEGTVILRRQLKRRYVLVFFQKLPPCLVGIEACASSHYWSRELKALGHAVRLMPPAYVKPYVKRQKNDATDAEAICEAVRRPTMRFVETKTPEQQSCLMLHRTRHLFIRQQTAVVNAIRAHLAEFGIVAPVGRRGVEELLNVVADANDERLPEVARACLAALGDQLRVLKAQVLKFDRMITVWHQSNEMSKRLDELPGVGPALATALVASVADPKAFRSGRNFSAWIGLVPKQSSSGGKQRLGSISKQGDRYLRSLFTAGALAVIRYAKIHGTGHRPWLTALLARRSTKVAAIALANKIARMAWAMMARGERYREPVALAA

SEQ ID NO: 163492 - protein, 315 aa, unidentified
MIRSRAVLLNVYIGIDVAKAHLDVAWQKRLRRFDNDKAGRATLVKWIKQKQSDPVQVICEASGGYEQELLDALAEADLAFSLVQATRVRQYARAAGILAKTDKVDARVLARFGAAMRPEPTSPRSAAQKLLRELEAQRRHLSDLLVAEQNRLEQLNDEKLRRLTRALMGTLKKQIALIDSRIATLIMQDQELCQKAQKLTSVKGVGERTAALLLAQMPELGTLNRREAAALAGLAPFNRDSGTMRGKRLIFGGRRAVRHGLYMAALVASRRNPILSSFYRRLRIKDKPHKVALTAVMRKLLLALNQALTPNQSFT

SEQ ID NO: 163493 - protein, 333 aa, unidentified
MYYSGIDLHSDNCYITTVDDTGAVIKQQRIENSNELLLDYFHCLPGSHQAVVESTTGWYWLNDLLQDNGIELVLAHAKYLKAISYAKVKTDKVDSQTLAMLLRQNLIPPAHKISRELRGLRDTMRIRLRLVQQRSDTLRRLKSIQAKFNGSVPDPYRFQLAVLEHTRDTFNDQILALEKSLHPVLIPNDDIQRLLHIPGIGKLSAFTIYLEIDGIERFASHKHFVSYCRLVPAADNSNRTVHHRSSKDGNKYLKIVFADAAVHAIQYYPEYKRFYQKLARRYSKATARTVVAKELAKIVYYVLKNKTTYKGLKGQPISRQKSQQWPRLSSPLP

SEQ ID NO: 163494 - protein, 338 aa, unidentified
MLYSGIDLHKRTVVIATVDETGKVVCEASLPTSRFAVARYFAELPDSTRATVEATSSWYWLRDLLHQEGVPLTLAHAKFVKAIAYAKVKTDAVDALTLAQLHRVDLIPRAHMVSPELRPLRDLLRTRLQLVEKRVSAKNSVHRLLEKFNVPDPASLPDEAALSASLYEEQIELLDSQIRRIEQQLQPRLIPEHDIQRLLWIPGIGKITAFTLYLEIDGIDRFPSVRQFFSYCRVVPGAHNSGSKNRHGRRKDGNRYLKLALSHAAVRAIQYYPEIKRFYQRKARQKNPAIARTLVQKELARSVYIVLAEGVEFNHTFKGQPLERRKQSKWPRQASPDV

SEQ ID NO: 163495 - protein, 408 aa, unidentified
MNTLYVGIDVSSKSNVVYLMLPNGDKHSNFSVANSHEGSTLLVKKIYSALTSHSLDTVLIGLEATSVYGVNLVYFLREDATLAPFNRKIHVLNPKQVKKFHDTYNDLPKNDYVDSFVIADCLRFGRINKEVYMGEYRYKALQNLTRARFFAVQNLVKEKQRFMNVLFKKYSTMTQEKVFSDAFSTTALAVYDEFESAEALANMDLHELTDFIIEKGKNRFPDPDAVAKAIQKAARSSYRLPKTVNDSVNQVLSISITSMKALESQIKEFDKAIKALMELLPNVLISIPGIGPVYSAGIMAEIGDINRFDNQASLAKYAGLAWKQHQSGGFEAEVTRLIPSGNRFLKYYLCEAAFSLVRCDKEYSDFYHLKYKEVNRCQHKRALALTARKFVRLVFRLLKDNRLYCPAK

SEQ ID NO: 163496 - protein, 334 aa, unidentified
MVYAAIDIHKRAFQAAVLDPESGQLVEERFLADRESLARWAEPWRGRVAAVAIEATTGWRWVWRELAGMGFEVRLVEPVQARGLLGRRRSAKTDRLDARWLARLLAKEMLPESWIPPAEIQELRDRTRLRKALSEDRRRWGQRLHAFLLHEGWPCTRSNLLRPPGLRWAASLRLPAHARLQVDSLIAVMAALEAQLETVDAELRRFAHGDERCQALQSIYGVGPIIACHLLAEIGEARRFRRPEQITRLAGLDPMVEESGESRRRGKLAKAGSPHLRWALVEAAVHAHRPTAPDLALYRATRERQHTAAARLTVARKIGKRAFHALRELELAAA

SEQ ID NO: 163497 - protein, 319 aa, unidentified
MQDKTFIGIDVSQDWIDVADTSEPPQHQRIANTAAALNNWVIGLDPARVALLAFEPTGGLERPLRQALHKAGLPFVPVHPNEVVAFRAARAIKAKTDRIDAALLARFARDELSQRGLAPAVAGDDTLRDLIARRRQLVGLRQAERCRLSRAASEAVRASIQTVLALLTCELDALDAAIANHIACNEAQAFLRQLLCSFKGCGLILAATLLGEVPELGRLSGKEIAALIGLAPMTRQSGKGCQRAVTGHGRPGVRQALFQAARCAIRWNPLIRAFFLRLTEVNKRPGKVALTAVMRKILVILNAVARDRKPWAGAALTPA

SEQ ID NO: 163498 - protein, 350 aa, unidentified
MIIIGADYHPAFQQIAFVDTETGELQERRLEHPEAAEKFYRELAAQGKRVRVGMEASGQARWFERLLVELNLELWIGDATEMARKRERKQKTDRQDAQHILHLLLKDDFPQIWVPSWENRDLRQLLWHRHRMVQARTRMMNQLQAVALNEGLRCKKKLWREAGRKQLEAFRLAPWASRRREDLLELLDRLNPKIAELSQAIEQEVQNCPAAQPLMTHPGVGPLTALAFVLIIGRAERFQCGKQVASYLGLVPLEDSSGNRRRLGHITKPGRSILRFLLVEAAQVTVRSLPEWRSKYLHLMMRRGRKIAKVAMARRLAVRLYWMMRQGWDYQQWVKFGSHAGQPGNRHGVQ

SEQ ID NO: 163499 - protein, 407 aa, unidentified
MIFVGVDWAEAHHDVQVQNEDGRKLAGGRLPEGVDGIARFHEMVGAHADEPADVVIGIETDRGLFVGALVAAGYEVYAVNPLSTSRYRDRYSTSGAKSDPGDAKVLADMVRTDRHNHRPVAGDSELAGAIKVLARAHQTMIWSRTRQTNFLRSTLREFYPAVLVAFDDLTSGDALEVLKVAPTPTLGAGLSRSKIAAALRRGGRQRRIDQRAEEIQVALRAPQLQGPALVATAMGSSVSATAAVIATMNAQIVELAKELDAHFEQHPDAEVVRSLPGLGTILSARVLGEFGDEPNRYATAKSRKNYAGTSPITRASGTKRIVLARFVRNMRLADAIYLWAFASLSASPGARAFYDYRRAAGDTHHAALRHVGNRLVGILHGCLIRHTNYDENTAWGHRAELELARAA

SEQ ID NO: 163500 - protein, 448 aa, unidentified
MARRSKPTGLPIINPRAGAIDIGSRFHVVAVPPDAADEPIQTFQAFTGELHRMAQWLKVTGVTTVAMESTGVYWVPVYEVLESAGIEVVVANARDARSVPGRKSDVNDAQWLQRLHACGLLRPSFRPDREIAALRAYLRIRERHLEYAAAHIQHVQKALTFMNLQLHHVVSDVTGVTGLKIVRAIIAGERDPKVLAGMRDVRCKATAETLEGALQGNYQPEHVFALKQALELHDFYQHQVDQCDVQIEAALTRLKADKDAPAEPLPAPRHKTKGSNAVAFDVRPSLYQIAGTDLTQIHGIGPYLALRLVSECGTDLSRWPTVKHFTSWLSLSPGCKISGGKVLSSRTRKTANPIAAHLRLAAVTVGRTSTALGAFYRRLAARIGKAKAVTATARKIAVLFYNTMRFGIDYRDPGADYYETAYRDRVVKQLHKRAATFGFQLQAVEGVS

SEQ ID NO: 163501 - protein, 400 aa, unidentified
MRVVFGIGVSKASSEVAILVNGERVHGYTMPNDIIGFSRLLEVLKTVSNPEIIFEATGVYSRRLQAFLEENSYDYTRLNPLEAKKQLDGLRVRKTDKIDAEKLASSQFVLNRKPTYVQEEVYQNLHDLSRFYQNLTEDIVRTKNRLHKVLQVAFPEIENLLSTPTGEQYWNLVSIFPTKHWVLELSEVELKEAIRNSTSKRISENRVGNLTEKLVGLAKQSYSGISKTSPMVEEVKYDAQELIRLTNRREQVLQQLIALAEPLPEYKILLSIPGIAETTATSIIGELGDIRRFKSANQLNAFIGIDLKHYESGDFLGQEHITKRGNPYARKILYKCIHNIASASHTNPCHIADFYEKRKRQSTIASTKPHTIASIHRLIRTMYYLIRHNKLYDYSLTQNR

SEQ ID NO: 163502 - protein, 338 aa, unidentified
MAIVFVGIDLAKNVFAVHGVDEAGRPALVRPAVPRAKLLEMVAALPPCTIGMEACSGAHHWARQFQAHGHKIRLMAPKFVAPYRLSGKRGKNDAADAAAICEAVQRPNMRFVPPKSLDQQGRLMVHRARQGFVQARTATLNRIRGLLGEVGIVLPLKASTVRSQAAARLEELPGWANTVIGDLLSEVHRLEQRIDEYDRHIAAMAREDDRVARLMRLPGIGPTTATALVASIGSGHEFGNARQLSAWLGLVPGQYSSGGKARLGRITKAGDAYLRSLLILGARAVLNSAAGKTDGISRWAQALVERRGYWKAVVAIAAKNARMAWAVLSRGEGFVMPA

SEQ ID NO: 163503 - protein, 308 aa, unidentified
MPQAVIGCDLSRALIDICELPSGRIGQIANTPDAITTWLDTLDHDIRLVFEATSGCDGDLIAALATRGHPFSRVNPRQAREFARATGTLSKTDRVDARVLAQMGAALDLPATIPLSPARSRLADFLRRRRQLVDMRKAEKLHRHSAGQPEIAQAIETMIRVLGQQIAELDRQIAGFIAQDPALSEQARLLTAVPGIGPTVLATLLGELPELGTLCRRKIASLAGLAPHARESGTWRGARRIWGGRRKVREALYIAALNASRRIPVLTAMRDRMRAKGKAPKTILIAVARQLLVILNAMIPKRQPIALA

SEQ ID NO: 163504 - protein, 402 aa, unidentified
MEQSTRFIGMDVHKDTIVVAVTAAGDVGKAVLYGTFPNTAATVEKLVRRLRQAGSGPLKFCYEAGPCGYGIHRALTKMNEDCMVVAPSMIPRKSGDRQKTDKRDAASLAVLHRGGLLTAVWVPDAAHEAMRDLIRARLAAVRAVRAARQQLSAFLLRHERIYPAGRTAWTKAHRGWLADQSFAQPAQQIVLEESIEAVRLGEQRRDRVDGYLRAQIPAWSLFPLVQNLSALRGLDTIASAGLAAAIGDPSRFVSAPDLMAYLGLVPSEHSTGPKRRIGAITKAGDVHARSLLIEAAHSYRFPARVARHKLTAVDAVPDAVREIAWKAQTRLCQRYRHMMAKGKLKQVVVTAIAREHWPGSSGPLPASRQTLLRRPRRRQRLPRKWFAQPSPQVARTCHAASR

SEQ ID NO: 163505 - protein, 343 aa, unidentified
MDHFAGLDVSVKDTSVCIVDDTGRLVREVKVASEPEALLAVLANPAYHFKRIGLEAGPLSQWLFGALAEAGLPVICVETRHMRAVLKAQINKTDRNDARGMAQMMRAGLYRPVHVKTLRSQKLRMLLTHRKLLQGKAIAIDNDLRGTLRNFGLKVGVVRTVKFEARIKELVENLPDVAVLVEPLLIVRRVLREQIAVLHRRLLVIVRDDEVCRRLMTIPGVGPVVALTYRATVDVPARFRNSKAAGAVFGLTPSKYQSGEINRTGAISKCGDAMMRVMLYEAAQSMLTRTIRWSWLKAWAMKIARHRGMKKAIVALARRLAVIMHRIWVDGTEFRWTRETAVA

SEQ ID NO: 163506 - protein, 343 aa, unidentified
MDKISMIGLDLAKNVFQVHGVEASGRVVLRRQLRRGAVEKFFAQLPPCTVGMEACGSAHHWARVIGRHGHQMRLMPPAYVKPYVKRNKNDGRDAEAICEAVGRPTMRFVPVKSVEQQATLAVHGTRALLVKQRTMAANALRAALSEFGIVAAQGFAGLHELMAKLEAPSEEIPEMLRGALLVLARHWQALDADERAIERQIAKAARADREARRLMEVPSVGPMIASTVLAKVPDARVFGSGRDFAAWIGLTGRDHGTGGKHRPGRISKQGDRVLRALLISGASAHLRQQKRRGISDPWLRDLLARRPYKVAMVAFAAKTARILWAMLVKGGPYYDRASASAAA

SEQ ID NO: 163507 - protein, 316 aa, unidentified
MLYVGIDVAKNKHDVTALNVPGKTVLKPLTFSNNKAGFELLDLSLRQLNQDCLIALEDTGHYAFNLLNFLHEQGYKVYTYTPLLIKEFAKSLSLRKTKTDKKDAHGIALKLLSDPNREQFQHDNRQVELKILARHIHRLKRKQSDWKVQYTRCLDIIFPELDKIVGKHSEYTYQLLTCYPNPQKRLEAGFDKLIEIKRLTASKIQDILSVAPHSIGTTSPAREFEIIENIKHYKRLIDKAEKCVNDLMAEFNSVITTVTGIGNRLGAVILAEIQNIHAFDNPAQLQAFAGLDSSIYQSGQIDLAGRMVKRGSPHLR

SEQ ID NO: 163508 - protein, 409 aa, unidentified
MRYYLGVDWADQTHAVWVVDERGTKVAMRTVPHTAEGLSEWGRELDEWRAQGIELWAAIERPEGRVVDFLLDHGVVVYPVNPKALDRARDRFRQSEAKSDPFDARVLADFLRTDHLHLRALQPSSEAAQELKLLTDDYQRQIRQQTRLVNQLTTTLKAYYPRGLEVAELTTALAREFLQAYPTPAALTALTDRQWQRWARAHRLSEARTRELWAVLQGPQLPVPAHVVRAKARLMQSLVAQLTLVVEVVGAYREAIEDFFGRLPAAQWIRTLPIGDHGITAPTLWARLGDAPGRWESFRHLQAQAGTVPVTIRSGKQQVVRFRFACDKSLRYVIDHVAFLSLRWSEWARAYYDEQRARGHPYRQALRALSAKWLKIIFVMWERHIPYDEQYHLATMTRQQLRLRQKQIA

SEQ ID NO: 163509 - protein, 449 aa, unidentified
MREPQEIEDEEHEQVWERVAAVDVAKASGMVCTRVPHQSRPGRRVTKVWDVDATTNAITELADHLVRHGIEKVTVESTSDYWRPFFYLLEAAGLRVQLVNAREVKNVPGRPKTDKLDAVWLAKLTERGMLRPSFVPPAEIRQLRDYTRLRVDLTQERARHWQRLEKLLEDALIKVSSVASKLDTLSARDMIEALIVGERDPKVLAGLARGKMQAKHAVLAEALTGRFDDHHAELARMLLDQIDALSGQISKLTARIEQLIAAIPAAQGVDADGATGPGAGGGDDAVVLPAAARLDEITGIGPGTAQVVIAELGLDMTQFPTAGHLVSWAKLCPRTIQSGAKTRSGATGKGNPYLKGVLGEAAAAAAKTNTFLGERYRRIVKRRGKLKALVAVARSILVIIWHLLADPAARYADLGAGYHANRIDTGKKARNHIRQLEALGFTVTLAPAA

SEQ ID NO: 163510 - protein, 354 aa, unidentified
MKILAVDLGKMKSVACDFESETGEHSFETVRTAPAILEDLFRRRCPDRVVIEVGPAAGWVTDLTARMKIELQVANPSHQGWRWRGVKSKTDRIDALKLAELSSVNQLPQVTLPSKEVREWRSLIHYRQSLVARRTMIKNTIHAILNRQAIDMPPGKRAWSNAGRRWLENQARVGDDPTEFWTKLDPTQWWRGQLAEELRQLREVECSISSVERKLDTYAATQEPVQRLRSTPGVGPRLSEAVVAIIGDPHRFKNGRQVAAYAGLVPRVFQSGKMDRKGGITGAGNRYLRSILVEVSWLGLRTNPWMRQVFDRVCRGCPSRRKIAIVAVARRLLIWCWAMMRDDEDWNPRALEAA

SEQ ID NO: 163511 - protein, 357 aa, unidentified
MQKKNTKVDFSGQDIYVGLDIGKKSWQVTILTKEFEHKTFSQPPKPEVLVGYLRKHFPGARYLCVYEAGYFGFWIHDALRQQGVDCLVTHPADVPTKDKERRNRNDTVDARKLARSLRNGELTALYVPERKALEDRSLVRMRASMVKKQTRCKNQIKGSLNFYGDIIPDDLVKARWSRNFIQWLEDLSFQQESGKQALQVLLEELKHLRQSIAQLTRQIRALAQQKPYGTQVKLLETIPGISTLTSMILLTEIVDINRFKALDQLASYVGLIPGEDSSGEQKKITGLTRRRNAHLRVMLIECSWVAVRKDPAMLMAFNKLSERMPKNRAIVRIAHKLLNRIRYVLKNQEPYETCIVA

SEQ ID NO: 163512 - protein, 356 aa, unidentified
MTVTIVETRAQARAQARAITGGVDTHADVHVAAALDPVGGLLGVQEFPAATAGYAQLLGWLGGFGTVCLVGIEGTGSYGAGLARHLAAAGIRVVEVDRSDRQDRRRAGKSDPLDAVSAARAALSGRAAGAPKGRDGQVEAIRVLMVAKRTARSERIQTINQARSLIMTGPEDLRARFAGHSADDLVAELATLRPRPGSMVRYHTLLSLRELGRRAEFLDGQLQRLDDLIIPLVTARAPSLLALYGVGHDTAAKLLIAAGDHPGRLRSEAAWAHLCATAPIPASSGKVTRHRLNPGGDRQANHALYRIVITRMSSHPPTRAYVSRRSKEGLSKKEIIRCLKRYVAREVYPHLRPGRG

SEQ ID NO: 163513 - protein, 427 aa, unidentified
MKKADLLSTLFVGIDISSRENVVVLLEFESKKPLLSFAVSNNYPGAAILAQKLAEFLSSHHELSSIIIALESTSFYGIHIANYLSSCQLLMPFNTAVYCVNPKMIANYKKSFIDLGKNDYIDAFVIADFARVGRITIKPWRGSQFLALQRLTRHRLHLAKALTREKTYMLSNIFLKFSEFSMLEEEQQPFSDNFGATATSVLTDFLSTEEIINMPMDLLISYVCEKGHNRFSNPENTAKLLQQAARNSYRLDKCLYEPLTIAIASSFNLITTYTKEMKAVNAAIEKTLKGLNPNAYQSLLSIPGIGPVMSAGILAEIGCIDAFKSQDALAKYAGLVWRENQSGQFKADDTILSKAGNAYLRYYLIEAVSHIKKHCNEFAVYYQKKFDEVKLHQHKRALVLTARKFVRLIFGLLAKNQLYSSSRVDQI

SEQ ID NO: 163514 - protein, 390 aa, unidentified
MQPTRVQDFTRDEEVLAVSLELASKSWKVGLDDGKRNSPAVHGVDHATPEGRLEEAIALIEKAKRKWGLAPGVRVVVVYEAGQDGFWIQRALSERGYEALVVDAASIPVERRARRAKTDRLDAIRLVLALRAWLRGERDRMKVVRVLAVEAEGQRHLVRERGTLQKEIGQHRDRLRKLLSTVGCWGSVEGDLRGRLERGEVKGYGGSALPEQLRERLVRECARLTQVEKQLAQLEKTLPEQLTEAARQRMVQLMQLKAIGPVGAQRLQLELFWRQFANRREVGACVGLVPQPYDSGESRVDQGISKAGNRRVRALLIEMAWMWLRWQPHSELAQWFAQRTRGIGSNKRSKRIAIVAVARRLAILLWRYLKDGVLPKGVELKPVKLTLKAA

SEQ ID NO: 163515 - protein, 366 aa, unidentified
MASVSRTKGPIHLGLDVHKDSISVAILHPDSEAVDVERIFHDETSVRRLVGRFPEPRALRACYEAGPTGYELHRLLTSLGVRCQVIAPSLIPKAPGDRIKTDRRDARRLARLHRAGELTAIRVPRPEEEAVRDLCRARDDAVADRTRARHRLSKFLLRHGHVWRAGNQWTLTHDRWLRSLRLSEPALQATFRHYLGVLEVRDADLRSIDADLVPWYSSGPFAEQVGRLGAYRGIDQLGALTLASEVCDFRRFASAQMFMGFCGLVPSEHSSGERTRRGRITKAGNAHLRRQLVESAWSYRFPANLTDRMRRRQEGLPRETVTRAWAAQLRLCGRFRRLAARKESKTIVATAIARELAGFLWAEMVA

SEQ ID NO: 163516 - protein, 354 aa, unidentified
MNTTQNSTKSKIVKVIGVDLAKDHCDVIGYDENGKICLRLDGCSYAKLREILSNLPQAVVLMEACKGSMFHARSIADLGHEVRLVKGADVKALRNVNHKNDLRDAAYIAKLYFVPGTTYVYIKSQQQQSLQFLQNEYKSLQELRIQAGNQIHAGLEEFGCPVRKSSKFIKTRMVAHLEKHAELIPEDVMASFKRRREIWLNLRQQEEEAKRRLEQVATTDANAKRIMTVPCVGPQTAVGLLVHVGVDFGRFKNSRQFAASLGLVPKQNSTGGNNTLNHITKCGPKRLRSNLVQCAQLVLMYAEKWKGNFGDWVRKMRDNGKKHGVIVCAIAAKLARIIYRLMKDKVDYTPVLSC

SEQ ID NO: 163517 - protein, 462 aa, unidentified
MRIIGLDLALVTEHTAIVMDERGLFLTPILRVHTNAEDLDKLFARAREGAAPGEPLVVVMEPTGMAWFPVAAFCERRAVTVYLVNSQQVADLRRYYQKHAKSDRIDARVLAKLFLISPEKLHPLHVASARHLACQRGCKELDRLMTQCVAIQNRVQAIDGFAWPGLDQVFKKALFSPHARWFRDHWYQPQAVLAAGAAALEHAWQTAPIESTASESAKDWAVQLVALAERALALYGREAQYLDYAAVHAEVQREQARLAELEEQHHTLQLETVRPLYRQLHPSRNLETLYGVGQDGAAVYVSFIADPQRFADHSHFRSWSGLIPNSHQSGDHEAKGLHITQAGPDLIKKFVYLGAETARQWDPQIAAIYYAQMVKGGKHHCQAVCACGTHLLDRILTIFQEDRPYVLRDVDGTAVTSEQAREIIAARYTVPKEVRERNNQRARRARAEKRAERKTQRESRPT

SEQ ID NO: 163518 - protein, 332 aa, unidentified
MKQVTQVGVDVDSEWLVCAMHRGGERLPLATFANTAAGHRKFIRWATKGGRVARVCLEATGIYSLEFALALHHAKKVEVMVVNPRAIKDFTRACMQRAKTDAVDAGGMLEFLERMPFVAWQPPAPEILELQAINRRIVQLTTELTREKNRRHASQFAGAAAIAHDIEVNIHHLERRIERMHDSGLKLVRGVPALATKLAHLVSTKGIAETSAMRLLAELLVLPDDLAAPQWVAHAGLDPRPYESGTSVHRPRRISKVGNRHLRAALYMPALVAIQHEPNVKAFYNKLVTAGKKPMQAVVAVMRKLLHAIWGMLKHDQDFDGEKFLKIAKENA

SEQ ID NO: 163519 - protein, 386 aa, unidentified
MQTLNNLSRSLIALEPASTLIAVIEMSLSSWLVAGIVPGIERQPLKKLAVDESALLRLLHRWREEAEKAGCRIERIVVAFEAGRDGFWLARWLKARSIEAHVIHAASVAVSREHRRAKTDRLDAELLKRAFLGWLRGERNHCKVVAIPTLKDEDAKRPSRERESLVGEQSRIVNRMKAALIRLGIRGFNPKLKRAAGRLDSLRTPEGEPIPPNTLAELRRDMERRRLISNQIRQIEEARLKHFEQAPNDGPHAMVRLLARVIGVGIETADMLVHEVLSRNMHDRRAIARYAGLTGSPDESGRKRREKGLARSGNGRVRRGMVQLAWRFLTYQKESALAQWYRARTENARGARKPMIVALARKLLIALWRFVWQGVVPDGVVLRLAQ

SEQ ID NO: 163520 - protein, 409 aa, unidentified
MEKTEKRYIGLDVHKHYLIALGVDAELNVVLPARRVELSRLETWMKKTLTKQDEVVLEMTTNTWQLYDELVEYAGSVMVVHPPHVALITRSQVMNDKIAASILARLLAKGLLVGIWIPPQEIREARGLVAQRQKMVRLATQAKNRLHAVIQRHHLVPPAGNPFGASNKAWWQALALGKLEKMNLQSDLETLQFGEKQVKRLSGIMEGMAAEQEEIGRLLHLAGFGVVTAVTVWAAIGDIGRFAEPKYLVGYAGLGTRVHDSGMTSRSGKITKAGRRDLRTVLIEAANVAANNHPHWKAELARLEPRLGRNKAVVAIARKLLIAVWYVLQGKTDKYAEPKALAQKMLRFAYTLGKSNRPKGQTAAQFARVRMDALGLGSELTSIPWGSKKPIPLPPSRLGKKEGSDVPNR

SEQ ID NO: 163521 - protein, 357 aa, unidentified
MAEGTLVGVDLHARSAVAGVLDQVSGELRVERVPAASGLLVEWLRSLPPPVRVGYEAGPTGYELARACAHAGIGCIVAAPGKIPRAPGDRVKTDRRDAERLVRLLRLGELTSVRVPDELEEAARDLVRAREDARADLMRARHRLSKLLLRHGLVWPESAWTLAHERWLRGLSFAPRPLKLAFDESYGAVAQAKARRDALDRAIAETASDERFAAVVARLCCLRGVSTLTALALTVELGDWRRFQPGRLGAFLGLVPSESSSGERRRQGAITKTGNSHARRLLVEAAWHQRRPLRPSLALTGRRSGQPAAVRAQAEAAARRLHQRWWDLERRGKRRTIVAVAVARELAGHCQQLATMD

SEQ ID NO: 163522 - protein, 440 aa, unidentified
MKKVTVFETVHEHAAGIDIGAQKIYVSYDGTEVVTFDTYTADYYRCAVYLQEKGIEDVAMEATGVYWIALYAILESCGLKVCLVNPKETKQVKGRKTDVQDCRWIQKLFTAGILRKSFIPSEKYMELRQLVRERLDVIDMGSVYVNKMQKCLELMNIKLKEVISQVHGASGIKMIKAILSGSRDKTYLLSLCDKRIVNKKGEQILKALEGNYNECYLFLLEQNLQMWEKHQEQIIVIDKRIEKHLEHLCILQPPVEVNSKAKPVRHHAPKIEGLHGKLVQLYGVNVSSISGINDYTLLRLIGETGVDMSRFPTVKHFVSWCGLSPKHHKSGLMHKKVKGTKCNKAGQVFKECAQGLLNSKYLAIGSFMRKLKARKDTGIAIKAGARKLAIAFFNALTKGTDYVEQGTKKYEEQIKQRERAALYRLAKKHNMQLIEKQEAA

SEQ ID NO: 163523 - protein, 402 aa, unidentified
MTAVMIGVDPHKGSHTAVVIGVAEQSLGKLRVDASAGQAGELMAWASEWPERTWAVEGAAGLGKLLAQQLVAAGERVLDVPPKLASRVRLLEAGDTNKNDPNDARSVAVAALRSRAVRQVAAEDHGAVLKIWARRHRDLARARNQVACRLHAVICDLIPGGVRKEISAGHAAKVLDKITPTGPVETARRDLAAQFLEDLRRLDSQLAETKKKLAAAVRASGTTVTEVFGVGPVNAGTIIGDAGDISRFPSRDHFAAYNGTAPVEVSSGNRKIYRLSLRGNRRMNHAIHMAAITQIRHAHSDGRAYYDRKIAAGKSHKDALRCLKRKISDAIYARLRADAAITSPPAGKGPGGQKGNDSDSSAAGSHPERRLFGQATPGPRHHPTTPSPDPAPAATNPASKRS

SEQ ID NO: 163524 - protein, 454 aa, unidentified
MSCHLMACLSWSPSSLPGRVIGTREQPLRGPNNEEPTVDPAPAAMSACGGDQVFCGWDWGSTRHGVCVIDAEGVIVRRWLVQHTDDDLARLFEELDDVVDAKALPIAIERGEGLVVGLMADAGHPVLMVEPAAFKAARPRWGSAGAKSDLGDAFMLADYARTDGHRLRRIEPVCQATRELGALVRARASLVEARTAASNQLWAVLAEHWPGAGVLFQKLISPIALAFLTDYPTPQSAALLGEGRMSLFCKRHAYRGAKTPVELLGRLRAAPASADPIAPAVLTVIVWSSVAQIRMLNTEIAQLERELRTALSTHPKAGLLETLPRVGRVSLAQLIAEIGPLLDRCDNPEQVAAMCGAAPVTRASGKTRTVGFRYAANKPARVAITGFADNSRHQSAWAGDAYRRARARGARHPHAVRIVARGWIRVIWACWHTGTVYDPSRHRREQLLTTPDLT

SEQ ID NO: 163525 - protein, 260 aa, unidentified
MEAPVAGIDISKDKLVVYFQGKYYEFQNNKQGFEGVKQVLPKGCKVAIESTGIYHINLAKYLGKEYDVRIINPFILKKFKDIRGKKSDKNDKKLAELVVSIGSEFTTSEAKELTSQWDFVTRSIARVKNRLRRDLILLGYRDSLSRKNLNEVLRGEDNAALSEIRFLLGELERLEARKREIEEELEDLVPKDSLIFTIPGIGRTLGCIILARVGDVKRFGDKKRFVAYCGPLVESSGKSVVSRGISKRGDAVLRSSILQL

SEQ ID NO: 163526 - protein, 454 aa, unidentified
MAKRQEKRECRAVVLEPDAAGIDIGAEEIYVAVPPDRDEESVRMFSTFTCDLHALADWLVQCRIRTVAMESTGVYWIPLFQILEARGLEVYLVNARYLKSVPGRKSDVSDCQWIQYLHSVGLLRASFRPSMDICAVRSLWRHRASLLQMASEHILHMQKSLSQMNLQIHHVLSDLTGASGQAILDAILAGERNPVQLAQLCNCRVKSPREKVAKALEGDYRPEHVFTLKQSLDGYRYYQKLIAELDREIQRLMQTLPSAVDAGQEIPRRTKHSAFQRQGNDPSFDLRGQLYRIAGVDLIDIPGVSVVTAQVILTEVGPDLHRFRNASAFASWLGLCPENRVSGGKVLTCKTRKVKSRAALALRLGANSLCRAKGYFGEFFRRMRAKLGTAQAITATAHKIARVLYHVLLTKEPYAETVFHRSDEHARRRAEMRLRKQAALLGFQIIPVPADSAT

SEQ ID NO: 163527 - protein, 310 aa, unidentified
MDVIIDKGCGLDVHKETVVACVMGTGIRKEIRTFDTMTGSLLRLKSWLIDLGITHVAMESTGPYWKPVFNILEDSFEVILANARHIKNVPGRKTDVKDSEWICKLLRSGLLTASFVPPQAIRDLRDLTRYRRKLIQAVSAEKNRIQKVLEDANVKLSSVVSDTFGVSASRMIKAIMSGNFDTDSLAELAVGRLKGKKEKLKEALQGHFRDHHGFMIQASLDHIASLEKIIADLDRQINEKLKDYHRERELLASIPGVKEQGSSSILAEIGAAMNVFPSEGHLSAWAGMSPGNNESAGKKKVARQPTAIKT

SEQ ID NO: 163528 - protein, 437 aa, unidentified
MAMRVEIEAEPAAVEGRERCAGLDVHRSTIVVCVTSPVGGGRLKKVWNEFPTTSAGLVRLAEWLAELEVSHVAMEATGVYWMPVYAALEKAGVFDLTLVNAHHAKALRKRKTDIKDAQWLAYLVRHDLVNKSFVPAQPFRDLRELTRYRRKLVEAQASERRRLIKLLESADIKLAGVISDIFGVSGRAILCALIAGGQSPFDMAKLARGQLRRKRPQIIDAVSVEVSEHRRAILAMQLARVEAAETDIAKIDEMIAHHLEPYQEFVERLVSIAGIDWIIAAIVIAEIGTDLSSFPTVQHFAAWIGVCPGNNESAGKRKPIGARKGNPYLVTALCNAATSAARTRGSFFKATYHRIKSHRGGGRAALAVAHKIAIAIYYMFTRKTSFRDLGEHHHEARHAQRSVNRYLRGLKRLGYTVILQPQTAPTPQQTQAVANPA

SEQ ID NO: 163529 - protein, 331 aa, unidentified
MDKYVIGCDVSKNKLDVALLLSLEPLKIRSKVVANDQPGCMALIEWARRQANCRAQQLHVVMEATGVYHEAAAYALAEAGVGVSVVNPGPVRDFAKGLALRNKTDALDRVVLARYGATVKPPLWQPPAPEVVELKALLGRLQAVEADLQRESNRLEKAQVSMTPRVVLDSLRESLLFLEQQKRALLKRIDDHIEAHPRLARDRQLLESIPAIGRKTANRMLCLLHARAFAAAAAAAAYVGLVPVQHRSGSSVYRPPHLSKAGPSAIRAALYMPAVVAIRSNPDVRMLYERLITAGKSKMSAIGAAMRKLVHICFGVLKNQQPYQPRLRESA

SEQ ID NO: 163530 - protein, 353 aa, unidentified
MNKKIVKQAAGIDVAQKELVVTLGRMYDDWTPELYSYKVFPNNQKGFMALVSWVKKQSAEEVRVRFTMEATGVYHESLAYFLTENQYDISIILPNKISSYSRTLDIKTVTDKTASASIARFGLERKLDNWKAPDPIYKRLRQLTRERDQLVAERTMVKNQLHAEQAEAEPNKGSVERIKKRIVFLNKQELEIKAEMLVLTKKEESVQKSIELLTSLPGIGQLTAATILAETNGFELIRNKRQLTSYAGLDVREKQSGTSVKGKPRISKKGNKYLRKAMHMPALTAIRHDERFKAIFARLVSKHGIKMKAAVAVQRKLLEMTYILFKTNIPYDKNYLKKDKVESLQVEHHAEKN

SEQ ID NO: 163531 - protein, 412 aa, unidentified
MVTCGIDWAQDHHDIAIVDADGRLVAKRRIPESVAGFSELTAMLADAGDDPEDPIPVAIETARGLLVAVLRASGRPIYPINPKSVARYRERTSMSGKKSDHADAVTLANILRTDADQHRRLPADTELAQSISVLARAHQDATWRRNRAGNELRSLLREYFPGFLHTFTHRPGGITAPEARAVLAIAPTPAKAARLSKPQIAAALRRAGRQRGLTTLAATIQQQLRLPQLRQPVPVEDAFGVQAVALLATLDAECASVDRLGEATAAAFTQHPDHRIITSFVGLADLTGARLLAEIGDDRPRFADARGLKAFAGSAPVTKASGRSIRITHRHVKNNRLAAVGFVWAFIAAGCEGPTRAHYLARRDRGDRHPAALRHLYNRMLGQLYHCLQTDQTYDPIKAYGPPPTHPTRAAA

SEQ ID NO: 163532 - protein, 381 aa, unidentified
MDPHKRSATIEVMTAAESIVGGGRFDTDRDGYAAMRKYASQWPSRVWAIEGCQGIGRHIANRLLADGEQVLDVPPKLSARARVFATGQGRKTDATDAHSIALVGTRMAGLRPVVNDDQLALLRILIDRRRSLGVDHTRMVSQLHQLLLELIPGGAKKSLSAAQAKALLAKVRPRDTVGKARRRVAAELISDLERVYQRTKNADKELKELIASTGTTLMDLHGIGPSGAARLLVEVGDITRFPNRAHFASWNGTAPIDASSGDQVRHRLSRAGNRQINRVLHIMATVQLRNPTEGRAYFDRKKASGKTSMEAMRALKRRLSDIVYRTMINDATVATAASPGGQRGTTTDSSVTSSHPQAGSSEKSLPGPAKTQLRTPLPAMS

SEQ ID NO: 163533 - protein, 311 aa, unidentified
MDELYVGQQVVGLDLHRRRTVMVRMTPAGEQLEAVRFVSDPAVLAEQIAKAGPAPEVVAEATYGWYWVADVLEEAGARLHLAHPLGVKGFAYRRVKNDFRDAADLADLLRMGRLPEAWIAPKQVRCQRELVRHRHKLRQLCSGLKAGAHAVLAKNGLLIPRSDMFGLDGRRRLEELALPEAFRVRLNSQLRLIDTLEAEIADLDGRIRATLRADAGYRALLRVPGIGPVFGAILRAEIGEIGRFPSPRQLTSWAGLTPRHRESDTTVHRGAITKMGCGGRRRRSMRPTASNWGGCRVSGGWNRYSSIPVDI

SEQ ID NO: 163534 - protein, 391 aa, unidentified
MVCVGIDVAKDKHDCCILDSEGTTLVDCFTIPNNMDGFKSLLQTIQDCSQKSDKIKVGLEATGHYSCNILGFLLDNDLPVYVMNPLHTNLYRKSLSLRKTKTDRVDAKTIATMLLSDVDLKSYTDTAYHNEELKSLTRYRFDKVQERAKLKQSVSRLVTILFPELEQLVSSIHGTSIYALLSEYPGAKQISEAHLTRLANILVTTSRGHYRKDRATHIRDAARTSIGSVMPAKSLELKHTIKLIQELTSEINEIEDAIRKIMDELKPPILSIPGMGFYSAAMILAEVGDFSNFNSPDKVLAYAGCSPSTYQSGKLTNCYAHMEKRGSRYLRYALYTATKYVCYWNPVFTEYLTKKQAEGKHYNVALSHATKKLVRLIYALQKSGKAYLAVT

SEQ ID NO: 163535 - protein, 346 aa, unidentified
MSIDACSGVVVGVDTHRDSHAAAVCDARGRVLSQWQVPATPAGYAELLAWAAGAAGGQQLTWAVEGTRHYGLGLVRHLAGAGQAVAEIDGARHLGKRRAGKSDPIDAIRAARELLARPVPAQVRADGDREALRLLMCDRDNAVQSAKTARTVLTSLIVTAPAQLREELRHLPARRRVQACAALACPEGADRPARVAYQTLIRLGQRIAGLAAVAAELEEQITEIVEDLAPGLVAAEPGLGVLSAAQILLSWSHAGRIRSEAAFAMLSGTAPVPVSSGRTDRYRLNRLGDRQLNRALHVIAVNRMRHHPPTLAYVQRRRAEGKTDKEIRRCIKRYLARHLYRLLNSA

SEQ ID NO: 163536 - protein, 372 aa, unidentified
MDRVCGLDVHKDSVFMCILTANGEKIEDVFGTLTPELDRLRDTLVSHGVGKVAMESTSIYWVPIWRILECDFDVKLVNPYFIRQLPGRKTDIKDAQWIATVLQKELIKGSYIPDSKIQELRQYSRRIFHLTRRKQQAESAIDLTLQRCNIRLSNYVSDIGCKSMRKVVNALICGETDSEVLALLVHKRIRNKHCHEVIKSSLTGIVSSSDRDMLKMSLEEVELYDRQLLECKEKMRIICEGHYAEELEILQTAPGIKEESAMRIIAEIGVDMKAFLTASALVGWAGLRPRNDQSAGKIKGRKTLHGNKYLRVMLTQCAWGACRTQTSKFYSRYHTLKKRMNHNKALMANARKLFVVIWNLLAKKQPYMPFVN

SEQ ID NO: 163537 - protein, 412 aa, unidentified
MDVIYSCCCGLDVHKKTVAACLITSTEGPEPVKEIRTFRTMTADLLALADWLQDVGCTHVAMESTGVYWRPVYNLLEGQFELLVVNAQHIKAVPGRKTEVKDAAWIAELLRHGLLRGSLIPSKPQRQLRELTRYRSTLVQDHARALNRLQAVLEDANLKLASVVTDIYGVSARAMLAAILAGERDVETLADLARGRLRAKRDQLREALEGRVTAHHSFLLTEHLSTLEYLDEAIARISAEIDQRLTAEQEAIALLDTIPGVGPGAAEMHIAAIGTDMTRLPDAKHLASWAGMCPGNHESGGKRLSGKTRKGSRWLRQILVEIAHVASKTKTTYLAAQYRRIAARRGKKRALIAVGHTVLTIVYTMLTRQQPYQELGAAYFDQRERHRVERRLVQRLERLGYEVALQPKALAS

SEQ ID NO: 163538 - protein, 429 aa, unidentified
MMADTQSTTVETFLVAIDIGKAFHAVLVEGPDGRRQPFRMANSAEDYDRLVRFLRALPGPARIALEPTGNFHRTLAYRLLQEGFPVVSVSSVAGARYREVLFNSWDKNDPKDATVILHLLKQGIVQHYHDPLRAGDHDVQELAKTYQQVTRARKRLADSLLNHYLPLYFPEMARYWESTRVEWFVEFLEQFPTPGAVRALSREAFVDAAWSLVGRKVNKRAKLEELYELAQRSIALPVAVDSPAIESFRLQLRQLRVLAESRQTLERRAHALLKDRLDFQHLCSLPGVASVLAMVILAEGGDLRRFPHHRQFLKYCGLDLAKCQSGQSRGREQLSKRGNARLRMAFWMAAQRAVRMAENSFRDKYERYIKQDPGNPDVRRKALTAVTAKMARVAYAVVKRGQPYRGYHEHALPSGSIPLVGAIGAISTP

SEQ ID NO: 163539 - protein, 340 aa, unidentified
MTAPDHSKSPASSGLSVGVDVSKASLEVALLGGEDSASRRFSNNEEGFEALLSWVEKKTDHSLEDSPKQVHVCLEASGGYQRPVARFLHERGLTVSVVNPKRTSAYADSQLTRSKTDKVDARLLARFCQREEPTPWEPTPSEQKSLKELTRGLEQLKKERDRLKNQIGQSENPTVTGSLESVLESINEQIDQLEEAIDEHVESTDTLARNRDLLETIPGVGSTTAALVLAELGDHERFESARQAAAYAGLTPSHHRSGSSVHRKPRLSKVGSSRLRRALYFPAIAALRFNAAVEALGDRLAERGKEKMVIIGAAMRKLLHICYGVLKNQTPFDPSLHPGT

SEQ ID NO: 163540 - protein, 393 aa, unidentified
MICVGIDVAKDKHDCFILSSEGEVLADVFTIQNNAEGFDMLLQTIRRCARPEDKIKVGLEATGHYSYNILGFLLDKGLDTYVINPLHTNLYRKSLSLRKTKTDRVDARTIAAMLMSDVDLKSYTDTAYHNEELKSLTRYRFDKVRERAKLKQSVSRLVTILFPELEKLVPTLHMASVYALLSEFPGAKQVAEAHLTHLKAVLHDASKGRYGRDMAVTLRDAARCSVGSVMPAKSLELRHTIRLIRELDSEIQDIEAAIQTMIEEIASPITTIPGIGVRMGAMILAEIGDFSRFDSPDKILAYAGMSPSTYQSGQMSLTGAYSHMEKRGSRYLRYALYNATKYVCHWDPIFSAYLAKKRAEGKHYNVALSHAAKKLVRLIYALEKSKLPYSSAT

SEQ ID NO: 163541 - protein, 419 aa, unidentified
MNQDKTKQTISVVHPVCCGLDVHKKSISACLIFNDSSGQEQSIIQEFDTFTDSLIRLREWLIEHSCPIVAMESTGIYWRPVHNILEEAVEVILVNARHVKNVPGRKTDIADSRWLAGLLRYGLVKGSFIPPKHVREWRDITRCRQKHVQTQNDYKRRVHKLFESANIKIDSVLSDPFGATGRRLIALLADPEAEITLEDVKKAAHGRVRHKAFELFRSIQGHFTAHHAFMLRSLLRSISHHEQEIETLDCRLKELMSEHTPILEELDRIPGINEVTARAVLAEIGPDLEAFPSCSHLTSWAGLCPGNNESAGKRKGGKSPVKKHHLKTILVEAAWAATRKKDSYYKEKFHRLKSRRGPKKAIVAIAHRLLKAIYHVIKFGTAFRDLGAHYLQQRAQAATLRYLRKQASVLGMKLVPTEA

SEQ ID NO: 163542 - protein, 402 aa, unidentified
MARSLGLDVHQATIYITALDLQAGTLEQYEVAVEEKALQVFEQTLRPDDRLALEATTNSYYFHRRLQPRVSSVVIANPIKLRPWIAQEDKSDRNDSFWLALLNNFNRLPSVWVPDEQTEQDRRLLSLRTDLVQEQTRCLNRIRALLASNGLQSPAADLRGRNCREHVFRLRARLPETARLVLDVLLRQLDSLNERLEPVNAAVALRAGERPEISLLMTVPGLDQLLSLSILAAIGDIDRFSRAASLVKYSGLCPRENSSGGKPCRGSRRKPGSRRLRWAVTQAAITLVKRPGRLRNLYRRLKRKGENLAMAACARKLLVWIWHILKTGEAYRDRDAKLDERKRARVATRMRAARHTLAARPTSLEKLLKHAPLLKELSGGKFGLPAGLRFPARVEPPATLTG

SEQ ID NO: 163543 - protein, 456 aa, unidentified
MGEKRGGRQHVLERINLHACGIDIGASGHHVAVPPGSSPDGMDVLEFGAFTEDLIGIAQWLQACEVTTVAMESTGVYWIPLYDLLDSHGFDVHLVDPRQLKRVPGRKTDLLDCQWLQELHTMGLLSGAFRPPDQVTALRAFVRQREMLVRYASDHIQHLQKALTQMNVKLQHVVTDVTGVTGMAIIRAIVAGERDPKVLAAHRQAGCKHDESTIAKALEGTWREEHLFSLRQALELLDVYQEKIAACDVAIEAHLAGFPDRTGGAVLPPSGRARRRKNQPGFDLRSSLVRMTGVDLTRIEGLQATTVLKVISETGTDMAPWPSVKHFTSWMGVSPGSKKSGGKNYSGRTKPCANRAAAALRMAAQSLHHSKSWLGAFLRRKAMQRGMPKAITATAHKLARLIYFMLKYGTEYVAKTQDEYEQRHRERTLASITRNAKRFGYVLVPAGDLIPSECPG

SEQ ID NO: 163544 - protein, 334 aa, unidentified
MENIALIGIDLGKNSFHIHCQDRRGKAVYRKKFTRPKLIEFLATCPATTIAMEACGGSHFMARKLEELGHFPKLKSPQFVRPFVKSNKNDFVDAEAICEAASRPSMRFVQPRTESQQAMRALHRVRESLVQDKVKTTNQMHAFLLEFGISVPRGAAVISRLSTILEDNSLPLYLSQLLLKLQQHYHYLVEQIKDLESQLKRKLDEDEVGQRLLSIPCVGTLTASTISTEIGDGKQYASSRDFAAATGLVPRQYSTGGRTTLLGISKRGNKKIRTLLVQCARVFIQKLEHQSGKLADWVRDLLCRKSNFVVTCALANKLARIAWALTARQQTYVA

SEQ ID NO: 163545 - protein, 339 aa, unidentified
MTKLYGGIDLHANNSVIVLVDDQEQVMYEKRLPNDLVKILAQLRPFQEGLQGLVVESTYNWYWLVDGLMVAGYPVYLANTAAIKQYDGLKHTNDHSDARWLAQLLRLGILPTGYIYPKEERAVRDLLRKRSQLVRQKTSNLLSIQNLITRNTGASITGNRIKTLTAEQVHDVLPTAELALAVTSTLTVMRCVADQIVELERAIKAHVSLRPPFRPLLTVAGIGQTLALTIMLEAGEMQRFPTVGQWASYCRCVNSTKLSNGKRKGQGNTKNGNKYLAWAFIEAANFAVRYYPAIQRFYQRKKAKTHGVVAIKAVAHKLARACYYVLRDQVPFELDKAFA

SEQ ID NO: 163546 - protein, 409 aa, unidentified
MEKLIERCGGLDVHKATVAACVRIPGPKGKREQHVRIFGTTAAELLALRDWLLAYGVTHVAMESTGVYWKPVFYVLEEAFTCLVVNAAHIKQVPGRKTDVQDCAWIAQLLEHGLLRGSFVPPAPIRELRDLTRYRKVLVQERTRAANRLHKVLQDAGIKLASVATDILGVSGRAMLGALVAGTSDPNALADLARGSLRKKLPALREALVGRFRPHHAFLVAQLVAHVDYLEEAMATLSARIEQLMAPFAEEQARLETIHGIKRRTSEVVIAEIGVDMSVFPSARHLTSWAGICPGNNESAGKHKSGKTRKGNRWLRAALTEATLSGVQANNSAFGARYRRILRHRGHKKAVVAVAHAMLRTIYHVLANCRTYQNPGADYFDRRHAQRVTRRAIHTLERLGYRVTLEPAA

SEQ ID NO: 163547 - protein, 358 aa, unidentified
MNRNAGMNVGQIIGTMNGQQVIGLDIAKHVFQMHTVDMGTGEVINVQIKRAKVLEHFANKPPSLIAMEACGGAHHWARALVVLGHTVRLLHAKAVRPFVAGNKTDATDARAIWLAVQQPGVKFVGIKTTAQQATLTLHRQRELLMKMRTMQTNALRGLLYEFGATFAQGRKALFKDMEQTLEELSAQLPQMVADSLREQLERVKALSQDIQLIEKRLGLQLKADTQMQRIAQIPGVGLLTATAAIATMGQACAFKSGREFCAWLGLVPKQTGSGGKVRLGGISRRGDTYLRTLLIHGARSVLSHAREPGPWLAQIKARRPANVVIVAQAAKMARTIWAVTAKEQAYQLGFKSVRPLAA

SEQ ID NO: 163548 - protein, 403 aa, unidentified
MNAVGIDVSKGKSMVTILRPFGEIVSSPFEIKHTSSDIHSLIKLIHSIEGESRVVMEHTGRYYEALAHQLSAADLFVSAVNPKLVKDFNNDSLRKIKSDKADSVKIARYALDKWQSLEPYSITDELRAQLKVMNRQFHFYVKQKTAMKNNLIGLIDQTYPNANTYFNSPTRSDGSQKWVNFVSTYWHVDCIRKMSLNAFVEHYQNWCKRKKYAFNKSKAEEIYTKTKELVPVFPKNEITKHIIRQAIDQLNSTSVTVETIRTLMNETASKLPEYSIVMQFKGIGPSLGPQLMAEIGDITRFTHKGALTAFAGVDPGVNESGSYAQKSVPTSKRGSSHLRKTLFQVMDVLIKTMPQDDPVYQFMDRKRAQGKPYYVYMTAGANKFLRIYYGRVKEYLSVFPDPS

SEQ ID NO: 163549 - protein, 355 aa, unidentified
MGTGKDIVLVADYHAENIVFRSFNEATGQEQTGRYATGRDAILRHVAEATAALTPGGSVVWIMESTTGWARVKELLAGKVTFILANVLQMPLPPKARRKKTDSIDTGRLLREYLAGKLPQSFTPDRWWREVRRLVDFRQDLVERATALKNQISSLLSHETWTQRENLWSGPGLRRLAAAELSPGDRARVALKREELELLEQQRTTIEQAMADVYREWPEAQWVDEIRGIGMITAVSVLAHIGPIARFATADDLIGYAGLAPGTSQSDATTHHGRIGGGGTDTHLRYLLIEAATWLCQIPRYQETYERIVQRRGRRIGRIVVARLVLRSIHKMLTAKIRFNPGKTTHPGQGAGQAA

SEQ ID NO: 163550 - protein, 468 aa, unidentified
MTPRKGNRFRTSARTEPAASFVLHNPHAAGIDVHSDVHFVAVPQGDVPEGFINPETRLPAGVRKFGANTGDLEALAAWLKDCHVTAVAMEATGVYWIPLFELLERQGFAVILVDPRQTKHAPGRPKSDVLDCQWICRLHSYGLLTASFRPSDEVVVWRGYQRQREMLIRYAAQHVQHMQKALEEMNVKLTEVVSDITGLTGMKIIKDIVRGVRDPLKLAKHRHEHCKATEADIASALYGTWRKEHLFALKQAVAMYEFYHRQLRDCDMQIEACLRGFADKSDGKILTPKPPKTGKKNQTRFAARALLFRMAGVDLTVIEGIEEATALVILSEIGTDLSQFPTEKNFVSWLGLCPQHRGSNRRIMSRRVRKGSNRAARALRMAAQGCHHAKNAMGAFYRRIQARCGGPKAVVATARKIAERVYRLLKYGEVYVRQAEAAYEEQYRLRTLKAMARKAATLGYKLVPETIE

SEQ ID NO: 163551 - protein, 319 aa, unidentified
MHCIGVDVSKQELVTFDGTRERIFPNIPGLSEFGHFLNRSEDALVVFEPTSTYSHRLEALCRTRHISCCQLNPRVVPHLRQVGKGRSKTDSTDAELLYRYGVERGQREATQLSSDALAESIQARLACYRVVQKARVAYQGVEEALSQDPATPRVLLAELKAEIAELKAKERHHLVAAQQLVEEDEQAAIRLTAMLSTPGIGPITALTLLALFRKYADVNRSQIVALAGLDPIRFQSGTSVHGKSRISKCGNREVRKRLFEATLSAARYNPSVRAIYRRLKEQGKPDKVARIAAARKLLLIAHAIYNSGELYRDPSAKEA

SEQ ID NO: 163552 - protein, 407 aa, unidentified
MQIFLGIDWSHTHHDACCLDERGQVLSRVRVEHTAAGLAQLDQARDQLGVSRDNCWVGLETAHTLLIDFLWDQDYPHVFVIPPGAIKGAQRRYRQTNAHTDQSDAWVIADVLRTDPATLHPWRPDGLIVRQLRAKVSLLHFLTKEIRRLSNRLGAVLARYYPAALHVFRDPASLIALRFLQAFPTPEASAALTRQAFGQFARAHRYRQPDSVLSAAYARLQAAYPVAHATTVAAYQPEAIWLAQHLLTAIEHKKSEIARLHELFQQHPDHELFASLPGTGDYLAPALLAKFGDDRERFPQPSSLQALAGTCPVTEQSGKSRRVHFRQACDHEFRQIAQQWAKASIAQSSWATTYWHNVREHSRSTSHAYRCLANRWLAIAWKCWQSRQPYDEALHLQNRARRLARRA

SEQ ID NO: 163553 - protein, 362 aa, unidentified
MAKIICKPVSRSIGVDLGKRTSHVCVLVDGEVEREFKVSSTAEAWQKAFEPLERGRLIMEVGGPSPWVSRLLSKMGFDVWVVTPWTLKEIFKKQRRKNDRNDAAALALAGAQSPGLLKRIEHNGEQVQRDRITIVQRDTLVRARTRMIGCLRGVLGSLGIDVPICSSDAINRRVEEHVPQDLRASLAPMLVALATISAQIKQLDDAIEELGERYGATNVVRQIKGVGPLTALAFVLKVEDPRRFSRTRSVGAYFGLAQGQQQSGERDPQMPITKAGDDLMRRLLVQSAHYILGPFGDDSDLKRFGEAICARGGPRAKRRAVVAVARRLAVLMLSLWKSGEVYEPLRINNARPSATDASASTN

SEQ ID NO: 163554 - protein, 346 aa, unidentified
MGVDTHLVLHVAVALDQLGRRLGELTVLTTTRGYERLLRWAEGFGPVGCVGIEGTSSYGAGLARRLKNAGVLVMEVERPKRRHRRRNSKSDPIDAEAAARAVLAGEAVGEPKSGDGKVEMIRTLRSARHSAVKARSQAANQLKALLVTAPEELRHRLRELPTKELVATCVRFRPGDDPDDVRTATKFALRSVARRHETLSEEIAELDTQLDRLVAEVAPALISLPAIGTHHAATLLVVAGDNPERLKSEASFASLCGVSPVEASSGKVVRHRLNRGGNRDANRALHLICVVRMGSDKRTREYVARRTAEGKSKWEIMRCLKRYIAREVYRLLLSSTARPAPIGTSS

SEQ ID NO: 163555 - protein, 424 aa, unidentified
MNCNQNFKISQVTEGTLVLGIDVGSNTHYARAFDWSGLELSKVFKFKNSFEGFQSFVLWVNDLCCKYNKSKVIAGLEPTGHYWFSLGELLKENNITIAIVNPYHVKQSKELDDNLQTKNDSKDPKVIAKLVIDGRYSFPYIPEGIYGELRVADKLKNDITQQIISIKNKIHRWLSIYFPEYENIYSSIDSKSGFLLLKETPLPKDIVELGSEGIVERWKQTKLRAVGLDKAKKLEEAAKKSIGCKNITSSARFEIKLLIEDYEYKQNQLNSITEELNKLCEKIPMIKEIAEIKGIGIATAISFVAEVGDIRRFKSAKQVQKYAGLALKENSSGKHKGLTRISKRERKKLRTILFRATIPLIGFNKEFSSIYNYYIERKDNPLKKKQALTAICCKMIRIFFTILSKGIKYDETKMLHDIKRPVAA

SEQ ID NO: 163556 - protein, 312 aa, unidentified
MEKLSYGGIDVSKDRLDVVVLPEGWFFSVSNDTAGWAELVARLRPLAVCAIGLEPSGGYERGIIRALLAAGLSVRRINPNKLRQFARARGVLAKNDRLDARLIAEYVAIMPTRVVQRDGAVERLAEVVTMRRQLCDEHVAVENQAAHLQDAMLRRLSKRRLVRLEADIRLLDKRLAEMVATNAAFARLYELLTSMPGVGPVLAFTLIALLPELGKMSRKQIAALVGLAPYDFDSGKLRGHRSIYGGRMPIRNVLYMAALSASRYNPALKTFSNRLAHANKKSKVIIVAVMRKMITILNAMLRDNAAWQPRSA

SEQ ID NO: 163557 - protein, 310 aa, unidentified
MESIFVGIDVSKDRLDVAVRPSGETFFVERNARGLEVLVVRLRELSPHIIALEATGGFETIAAAALAGAGLPVVIVNPAQIRAFAKAIGRHAKTDPIDANVIAHFAEATKPQVRPLPDEATRVLADLVTRRRQIVEMIGAERQREKRITVPRLKKSIARLLTALEKELASLDDDIDDAVRGSPAWREKEDLLASVPGIGPIIARTLIADLPELGRLGRKEIAALAGLAPFTRQSGQWRGKSFITGGRAAVRAVLFMGALVARQHNPVLKAFFERLVAAGKPKMVALVAVARKLLTILNAIIRDNRPWQTA

SEQ ID NO: 163558 - protein, 429 aa, unidentified
MPNCASLAPNIVAWVGLDWADQAHAVCLQAADASPLEHCELQHTPEALQLWVAELRGRFPQGQVAIALEQSRGSLFYALMTYDFLLLYPIPPKALADYRQALYPSGSKHDPGDAQLLLEFLRKHPERFRPWVADDARTREIALLVQHRRKLVDDRTALSNRLQAFLKGYFPQALAWVGDLTAPLAWDFLAHFPSLEAAQKGSRLQVLKVYRTHTRRSPEELEQLLEEMRAARPLTSDAAVIESSALMVQALVEQLRALAAGLERLEKRLQELFAAHPDHDIFNSFPGAGKALAPRLLAAWGSDRQRYETAQNMECLSGSAPVTEQSGKKCWVHWRLACPKFLRQTFHEFAGQSILWSPWARVYYQQMRQRGADHHPAVRSLAFKWVRIFYRCWKDHTLYDEARYQQALERHGSPLAAALRQLPNQEARA

SEQ ID NO: 163559 - protein, 428 aa, unidentified
MKKKNNSLTKSDRIGKPGKARGPVQRDAKEVMAELVTKLSQRFEPQSARTIKDEGRQGIPGPNRDRLTVGVDLGDKWSNFCVLGLDGEKLTEGELRTGQEDFAEFFQSLAASRVVMEVGTHSAWARDVVARSGHEVLVANPRQMEGPKRRKRKNDRIDAHKLARVGRMDPQSLFPIEHRSVEVRQDLVAVRARDALVAVRKDLINTTRGLVKSMGARLPKCSTQSFAKKAEGALPAAVREVLLPLVRLAETLSSYIQEYDERIEKLATGKYAHTELLRQVKGVGPLTSLAYVLTLEDPQRFVKSRDVGPYLGLVPKQEDSGDRQPQLRITKMGDMMLRRLLVGSAHYILGPFGPDTDLRRYGLRLCERGGKNAKKRAVVAVARKLAVLLHRLWVSGEVYEPLHQALPKVTQEQAARPAPAEATEEEAA

SEQ ID NO: 163560 - protein, 405 aa, unidentified
MNAVGVDASKGKSTVVIMKPFGEIVKEPFEVAHTASDLKKLADLIKSLDGEARTIMENTGKYHLPIAKYLTDSGLYVSAVHAKLIHDYGNNSLRNVKTDKADAMKIANYGLSNWQALKRWNEEDGLRVQLKMYSRQYHQYVKQRTMLKNNLISILDQTFPGINELFTSPARDDGHEKWIDFCMRFWHCECVKKHSRKKFTTMYGAWCRKNGYQTCEKKAAEIYALAEQAIPTLPADTFTKQLIKIAATQLNAIAESSAKIHKTMHEMASLLPEFPVVMAMNGVGKTLGPQLIAEIGDIRRFKKKESLVAFAGVDAPPYQSGNVDIKSRKISKIGTAKLRRALFLVMSSLLQNAPDDNVYRFLDRKRAEGKHYYSYMTAGCNKFLRIYYARVKEYLNEIAQKEKAA

SEQ ID NO: 163561 - protein, 352 aa, unidentified
MAGVMIGIDPHKASHTAVAISGTEEQLGQLRVRASAAQASRLLEWAAAWPERTWAVEGARGLGHLLAQQLLSAGERVLDVQPKLGARVRLLATGNVNKNDPNDACSVAVAALRSPGVREARPDDHAAVLKVWSKRRRDLSSSRTQVVCRLHAVLCELVPGGVPKKIIAAHAARLLDSITPPDAVAAARLELAGTLVEDLRGIDARLRETRQKLDAAVRASGTSLTGLFGVGPVIAAAVIGEVRDVSRFKNRDRFAAYNGTAPIEVASGQRKVNRLSRRGNRRVNHAIHMAAVTQVRQKHSEGRAYYDKKLAEGKTHREALRSLKRQISDAVFTRLREDARRAERQARDPGGQ

SEQ ID NO: 163562 - protein, 402 aa, unidentified
MRFFVGIDWASQAHAVCVLDDTGRLHWQGSVPHTAAGLTQLVDRLRRFGARGALRVALERPSGLLVDTLVEAGMEVVPIHPNALMASRPRYSAAGGKSDPGDAFILADLLRTDGHRFRPLRAPSDDTRALRALVRGRDGLVAQRVALANQLRAVLERFWPGAAAIFADVDSPIALAFLARYPTPPSAARLGEKRLAQFLVQHAYCGRRPVAELLARLRTAPASQVGEAEAEASGEVVRALVAVLTPLRAHLQQLSAAVTAALLHHPDGPLVQSLPRSGAVNAAQILAELGDDRARFPTAEQLAAEGGLAPVTQASGKHHGVVFRWACNKRLRRALTTFADNSRHASRWATLVYQRARARGCRHPHAIRILARAWARILWRCWQDRTPYDISRHHAAQALMAA

SEQ ID NO: 163563 - protein, 348 aa, unidentified
MLHAGLDLSRKRLDVCLLSEEGEQLDQLAAPPDADGLRGLVRQVSSYREPVHAVIESMTGARFVHDTLEAQGWEVEIADAHKVKGLAPLACKTDRIDSQVLATLSHRDLVPAIWLPDPRVRRERELARFRLHLVKHRSQLKHRIHSALMTFGKPCPVTDLFGVEGRALLDRLEIPEPWRGNIDASVELIDSLERQVDHINRQLRQGGAEHPYVPLLLTVPGIGWVLAFTIAAEIGEIERFASPKKLAGYTGLCPRVNQSGDKDRRGPLTKHGPRYLRWAMLEATMHALRHPAYSERYQRTKRRLGKQRGAKVAQIDIARKLSEAIWHMLTRNQPFRPAPRGAAFRLAA

SEQ ID NO: 163564 - protein, 457 aa, unidentified
MPQPKHSRSRTGLSAVHPAAAAIDIGATMHVAAVGPDRDAEPVRTFQTFTDDLHRLADWFARCGVKTIAMESTGVYWIPVFEILEQRGFEVMVVNARDAKHVPGRKTDVSDAEWLQRLHEYGLLRPSFRPQAEIAGLRAYLRHRERLLDYAATHIQHMQKALMQMNLQLHHVVSDITGVTGMTIIRAIVAGERDPNVLASHRERGCHASVETICQALVGNYREEHVFALSQAIELYDVYQTKVAACDKQIEVILKRLKKSATPPASKLLPPKHRSRQSNAPSFDARAALHAILGVDLTQIHGLGPYLALKLVGECGTNLTAWPTAKHFTSWLGLAPHNKISGGKVLSSKTRRTSNRAASLLRLAAVSVGRTDTALGAFYRRLAARAGKAKAITATARKIAVLFYNTLRHGMSYADPGATYYEERYRRRVLGNLQRRAKSLGYVLHQADRDPTQMVVS

SEQ ID NO: 163565 - protein, 314 aa, unidentified
MQDSPLFIGVDVSKAGLVIATSAAQRLRSIANDALSIGRWLRQVPSHALLAMESTGRYHALLAHLASQAGFKVYVLNARDVYFYARALGTRAKTDGVDARVIARYLAEHHARLHPWQAGSALEQQLQQLLSRRAQLGVSQARLKQLLADTELDARALLGAFESLLQALDAKVQALIAGDVPLSQGYQRLRTITGIGPQTAALLATLLSRFEFANADALVAYCGLDPRANDSGTKRGHRRLSKKGPPLLRRQIYMAGFAASSSKALKPLYRALRAKGFAATEAFIILGRKLLRVAFAIWKGTASFDPARLLPTTA

SEQ ID NO: 163566 - protein, 391 aa, unidentified
MTKPKTKTVNDFSRCLDPLDMDATLIAVIEMSQSSWLVAGIVPGVERQPLKKLAIDEHALLNLLNRWRAEAEKQGHRITRIAVAFEAGHDGFWLARWLSAQGVEAHVIHASSVAVTREHRRAKTDRLDTELLKRAFLGWLRGERGHCKMVAVPTLAQEDAKRPSRERETLVGEASRIITRVKAAFVRLGIRGFNPKLKAAATRLETLRTPEDEPIPPNTLAALKRDLERHQIVKKQIREIEQTRLDVLKQAPEKGPHAMVLLLARVIGVGVETADMLVQEVLSRTMRDRRAVGRYAGLTGSPDESGAKRRDKGLARSGNARVRHGMIQLAWRFLLFQKDSALAQWYRQRTADAPSTRKTLIVALARKLLIALWRLARDGVVPEGVRMRPAA

SEQ ID NO: 163567 - protein, 344 aa, unidentified
MYYIGLDLHKKTISFAIKLADGTVHREGVVNATRASLDEWIQHLPLPWTAAMEATLFTGWIYDHLLPHAASLKVAHPMMLRAIAASKRKNDRVDAGKIADLLRANLLPECYMAPTALRERRRALRYRNLLVRQSVQMKNRMAGLLMETGVTYNKQKLHQKRYFAELLQQSEEIPPALKPLLKIGRETVDRATTTEKALLRALQQDPALATRVERLTTIPGIGVVTALSWALEIGEVSRFTSRKHAVSYCGLCSGENSSAGVQKRSPISKQRNPHLQTVLIEAAKLAPRWNPELALLHDQELARGNRNRATLAVARKLVAYLLAVDRREKPFQKGGRKQAPDRAA

SEQ ID NO: 163568 - protein, 412 aa, unidentified
MGKSNIEYEQVIDRGCGLDVHRDTVVATVMGKGIKTETQTFGTTTSSLNELGVWLESLKVTDGAMESTGVYWKPVLHVLRTYPVNLIVVNARHIKNVPGRKTDKADSQWICKLLISGLLKGSFIPPENIQELRDLHRYKKKLIGIVASEKNRIIRVLEDANIKLSSVVSDTSGVTASYLIKGLIEGRKDLERLISECYHRKLQASPEQIKEAIIGRLTSHHAFILKSMQKHIASVEEQIAEIDVEIEKYIKDFEKEIELLQTIPGVGKGGAIGIVAEIGVDMDVFPSEHHLASHSGMCPGNNESAGKKKSSRTRQGNKHLKATLTELAWGATRTKKSYYKAKYESMVGRRGKKRALIAIGHKILCASYHIIKNKEAFKELGYEYLAERRKKNRLEYLKRELKEQGYKIEKAA

SEQ ID NO: 163569 - protein, 354 aa, unidentified
MTSTKYIGMDVHKESISIAVMNAVGKIVMECVIETKANMIVECIDGLRGDLYVTFEEGTSAAWLYDLLKPHVTKLIVCDPRKNASMREDNQNDKIDARRLAELLRIDHLTPVYHGEHGLRTLKELVRSYLTVTKDLARVKTRLKAIYRSWAIPCNGKEVYAACHRAEWLEKINELGVRRRAEFYYQELDGLRVLRLGVRRELLAESKKQKAWKLLCQIPAIGPIRAAVLLGILQTPHRFRAKRPLWKYSGLAIETCSSADHRSINGQLQRSKKNSVRGLNQNCNHDLKNLFKGAAVIASSKPGPFQEFYTALLAKGMRPEMARLTLARKIATIVLIVWKKGVSFDAQHLKPQTA

SEQ ID NO: 163570 - protein, 311 aa, unidentified
MNQNLVHAGLDIAKATLDLHFQGHAWSFAHDSPGCAALLTRLRAAGAPVQVICEATGGWERPVLAALHAAGQAVSVVNPRQVRDFARGRGQRAKTDRIDAQMLAEFGAANTPAPTPAPSAAQAELAAWVTRREQLQAMLCAERARQIPGLPKAVAKDLAASIARLEKHLAKVVAHLAAILAATPELAGKSARLCTIQGVGPGTAATLLGHLPELGTLTGRTIAALAGLAPFADDSGPRKGQRHIAGGRASVRSALSMAAFNAIRYNPILKPFYERLRAAGKAFKVALIATARKLLTTLNTLLQDPHFIPCS

SEQ ID NO: 163571 - protein, 364 aa, unidentified
MLPRPEGRDDGLPKITPTHTQSVNRNLTAPIGRGPSIVASKRWCGPPRVYKRGHYSMNGEFYGADVSKDHLDVACGGRVERIENTKKAIRGFVNKMPAGSVVAMEATNTYHQELADTAHCAGMRVYVVNPRVTRHYREIRSLRGHTDRLDALTLAGFIEREYEHLREYQPQSAGQRRLKTLLRRRSKLVATRVKLEQSMGEIKEVRQEVKGVIDRLERLIKRIETLVEEQLDGNQDRARIAQIAGVGRIVSSALICDLESGSFRSADAFVAFYGLDPRPNDSGKSRGRRRLSKQGQRLGRMLLYNAAMSAVTTRAWAQIYQSCLNRGLTKVQALVVIARKIARTAWSIYTHKTVFDPLRLCAAP

SEQ ID NO: 163572 - protein, 373 aa, unidentified
MFHFTTLFIGMDVHKESFSLCYYDMMANQFKHSTKVGPNVSYIVNYVNELRRLYGQDAEVLCGYEAGCLGFTLYHQLQAHGIPCIVMAPTTVMKEGSKRVKTDKKDAAQLAKALAFRSYRPVHIPTVEDEQVKEYIRMRTDHKVALKKIKQQILAFCLRHDFRYTEGSSNWTQKHVRWLRSLNPDGLYAEILTEYLLTYEKLVDQIERYDARIEQLGQSDSYQEKVSRLSCFIGIKTLTALSIVTEIGDFNRFATAQHFASYLGLTPSENSSGDKERRGAITKAGNSHARRLLIEAAQSLAKGTIGYKSKELKRRQSGNRVEVIAYADKANERLRRRYRTLVLGKNKKQNVAKTAIARELSGFIWGMMTGRIA

SEQ ID NO: 163573 - protein, 402 aa, unidentified
MFIVGIDVAKRSHEVCMITSDGRTVQRPFSIRNNCTGYNLMLEKIRKHTNIKSQIVFAMESTAHYWLALFTRLRKDGYHVILLNPIQTSAMRDMFIRKIKTDAKDSFIIAELIRFGRYAESNVAQDRLLALKELCRNRFYLVDMAGDLKRKLIALIDRVFPEYEAQFDTIFCKSSVAVLKKYPTPQKLSNAHLDKLTELLWNSSNGHFGEWKARELKELARNSFGVEDCDGAYSTLILLMLDQIQSLSGKADALEKEISRLFQSFDTTVTTIPGVGPIIGAVILSEVGDISRFSSADKLAAYIGVDPSVNQSGEFQAAHAHMSKRGSPYLRRCIWMASQVAVQRDPMFRAYYEKKAAEGLKYMTIIGHVTRKMTAVIFAILRDHKVYEPVPVSYTHLTLPTT

SEQ ID NO: 163574 - protein, 344 aa, unidentified
MSKLDTCGTEVSAKELVVALRHEEALQPLKTFPNTAEGHQALICYLRRAGRVVRVCLESTGRYGLDLALALSAQAGIEVMVANPRAVRHFATALMQRSKNDQLDAGVLEQFAARMPFQLWTRPSPAALALHALARRLGQLVEMQTAEKNRQHAAELSQAIPAAIRRDLARSLRAQARAIARLTREARKVIAPEPDLAERFALLDSVPGIAETSAIQILAELAVLAPDLEARQWVAYAGLDPREYSSGTSVHKKTRISKAGNKYLRRALYMPALVAVQHDPHLRAFYQHLLERGKFKMQALVAVMRKLLHAFHGMFKTHQPYDGSKLFQLQLTSAQEVPLATIAA

SEQ ID NO: 163575 - protein, 340 aa, unidentified
MTITTVGIDLAKNVFAVHSVDQNGRTVLVKPKVSRAALPELIASLPPCVIGMEACSGAHYWARLFRQYGHEPRLMAAKFVSPYRMAGKSGKNDAADAQAICEAVRRPHMRFVPVKDESQQAMQCLHRTRQGFIEEKTATYNRLRGLISEFGVIAPQSADALRHMVSVQKSSLPLQVQQCVDDLMEHVDRIEANITEYDRILSHIAKTDHRSQRLMELKGVGPTTACALVASIGNAHDFKNGRQLAAWLGLTPSQYSSGGKSKLGRITKAGDSYLRTLLVQGARSVLIGAGKRTDSFSRWVCMLVERRGYWRAVVAIAAKNARLCWASLHYGDDFRLYSVN

SEQ ID NO: 163576 - protein, 466 aa, unidentified
MRKNTKKAEKTQHASNFRLAPMNPCVAGIDIGASSVFICIGFADGHQEIREYLTFTEDLKNMLTWIQQNGIQSVAMESTGVYWIPVYDILAQAGIEVMLVNAYYLKTVPGRKTDVKDCQWIQQLQAYGLLRGSFRPNDEGVMLRGYVRQRSRLFELASQQVQLMHKALVQMNLQLNHVISDITGATGMNIIRAIVCGERNPTVLAKYRNIRCKKDEKEIAKALDGNYREEHLMALKHALEAHDFFHQQVLECEKAIEQMMNKWEKQAEESTPAQNTIPVERSSKNGRGIQKKTEYNLSPYHFEVESSLQKILGVNLADIPGLDINGIIKILAEVGMDMSKWPSAKHFASWLGLCPGNKISGGKILSGKTKPSANRAAQALRLAANVLYRSQTALGAYFRRMRARLGAPKAITAAAHKLAKILYTMLKERKSFTEVGQAAYEQAYKERQLLSLQKRAKELGYELKAC

SEQ ID NO: 163577 - protein, 310 aa, unidentified
MERLFVGLDVAKDRLDVHIRPTDEQFAVAYEEAGVATLVHRLVGLQPTLMVLEATGGYESAVAAALAHAGLPAAVVNPRQVRQFALATGQLAKTDRLDARANARFAEVMQPVARPLATEQAQELGDLVARRRQLVDMLGAEQNRHRQARARGLQQRIRAHVTWLTRAIAEVDEQIARLIRTSAVWRETEDLLTSAPGIGDITAHALIADLPELGQLDRRRIAALVGLAPWNRDSGHWRGRRMIGGGRAAVRRALYMPTLVAIHHNPVIREVYRRLTAAGRPKKVAVIAAMRKLLTILNAMLRDRRPWQPA

SEQ ID NO: 163578 - protein, 420 aa, unidentified
MSKSNTARQLAQVQPGSLHAGVDLALEKNVVVVINEKAQRLDRFSFLQDRGGYEYFLQRLDGLCRKHQAPEVAVAMEPSNYFWKLLARELEEKKITYHLVNAYTVKKHREGNQLDRSKDDRRDAEQIAELSRNGHYTETHLQKGAYEELRQYATLYDQLTRNLCREKNILWGLVGQVFPELSQVFKDLSGETAQALLRTCVPAAHIRTLRVEDFIVQVRKAYLGKRLLVSKLRQVHHLATASIGVTEGLQAIHLAIQVHLDELLTFQKQLNQVTSAMTTCLASLPEAPYLLSMKSLHTVSVAIFLAEVGDPYRYRASAQWVKLAGIQPAPNTSGKKQRSLTPLSHQGRSRLRTMLYFTCLRLVHQDDHFAQLYTHLQRRQNNPLTKMQALGVLMNKLLHILWALIQNQTFYNPSFAQSIG

SEQ ID NO: 163579 - protein, 423 aa, unidentified
MEVMHQWVAGLDVHKETVVSCVRLMTGRKPARECRTFATTTEGLLALLAWLTASRVTHVAMEATGVYWTPVWKILSAGDFTLIVANAAHIKQVPGRKTDINDAMWIADLLACGLIKASFVPEEEIQELRSLMRTRKQLVREQTRHVQRLEKTLEEANIKLGTVISDLMGASGRRMIEAMIAGERDPHRLAGLAERTIKASPKALYDALHGRLREQHRFVLQLHLQQWDAIDAAIRQIDQRVAEQIKRMDAEAADRQPPFRELIPGLCAIPGVSFLSATAILAEIGRDMSRFPTAGHLISWAGLCPGQNQSAGKRKSSRLRRGAPWLKTMLVQCAWAAKRAKNSYYSAQFHRLRSRRGPQKAICAVAASILTAIYHMLKSGLPYRDLGVDYFDRRSPEAKAKRLVTQLAKLGFAAQLQPLAEAA

SEQ ID NO: 163580 - protein, 429 aa, unidentified
MKFKSYDAINQRIERITTDHLVVGIDIAKEMHVAGAVNFRGVQLGRTISFSNDKFGYEKLLRWVHDLRQTHNLMQVIFGAESTGHYFLNLAFWLHERNEQIVLVNPMTTKRNKENRDNKPSKNDAKDAIIIADAISRGYYSEWVIRETIYRRLRYLVSEREAWVTDLSAIGNQLQTALDQSFPEFTFVFKEWNGPRGIATLQAFPLPSDLKDLTPENVIDGWRKAGMQRAGGSRGSQQAVMLLAAARRSVGLTDIAPEIKRQIGRLLQRYKQMLSQIETVEHEIHELLSQVPPSARQPLTEIGLSPLFVAVVLANAGDLSRYTHGRQLLALAGLSLAESTSGKRRGQIILSKRGRRQLRKYLYLAVIGLVANHPAFRRWHDHNVKTLKMKKQRSIFKLIGKLARILVALARSGETFVESKANALPPQAA

SEQ ID NO: 163581 - protein, 322 aa, unidentified
MRYIGIDVSKATFVVAYSSDKGGEIRTFNNTTAGIRQFIGTLPKDGSIHCVMEATGNYSALLLYMLNVAGITVSMENPLKVKNFAKALLSTVKTDKSDARLITLYGEKMNPRPFKVQGEAILRLRQKRTAIRQLTKQITAMSNLRGSLACLPVPDKGATHTVDETIKFLEKKRDRLQAELTDLVEVEFSRQLALLTTIKGIGITLATALIITTGGFTYFQNAKQVSRYLGICPTYEQSGTSVNIKGHINRNGDAYTRGLLYIAAWPASRFNAQCKETYTRLRQNGKSGKLAMIAVANKLIRQAFAVVAHDKEYIDGFVSNRP

SEQ ID NO: 163582 - protein, 430 aa, unidentified
MLRNYSTKWEKIERITDETLIIGIDIASRRHYAKALTWRKAEVIKGLFFDNERQEFMRFLEWMNRAKEKMGATNIIVAMEPTGHYYFALEEYLEALGIEVVIVNARDVSYMGKTYNNDNSKNDPRDAYLIGYLCSDGRYSVTTRPKEGKYAEIRELTNHREHLVKRQSGSINELHCILTQIFPEYKEIKKSGLSEGLLAVFLELKNLDNIIEAGWEGVYEALKKHKKHQIGRVKAKQIHKLAKESIGVKRKVKTTQTVLISLIQEYQFYQDQINAIDDQINELIKGMDAAQRLMEIDGIGPVIAATFLAEVGDIANYKSAKQIQKLAGYAIRTNISGDTEGSTRTTKMGRKRLKKILYQAALSTIGTNKEIKQIYGYYTQEREQPLKKMKAVTTISCKLIRIFFSLLKYNHHYDGEKMLRDIKRPKGQVA

SEQ ID NO: 163583 - protein, 388 aa, unidentified
MEAQVVNAPSVASHDETVCCLLAIELSKKSWIVAVNTPLSDKISRYTLEACNWRELLDLCERIRTRVARETKKRVEIVSCYEAGYDGFWLHRLLEAHGIRNYVIDPASLQVDRRARRAKTDHVDVGRMLRSLMAYLRGEPKVWSVVRVPSVFEEDDRRLHRERDRLINERIQHVNRIKGLLAIHGIYDYQPLRRDRMQRLERLHTAGGRTLPPRLKAEILRELQRLELVLGMIKTIETERDAIAAAKTEAVHSRTKKIQGLAKIKSIGPEFATTLVGEVFYRSFDNRKQLASYVGLTPTHFQSGPMCRDQGISKAGNAKARTVMIELAWLWLRYQPDSSLSVWFRDRVGKLKGRIRRITIVAVARKLLIALWRYLETGLVPTGAVLKA

SEQ ID NO: 163584 - protein, 405 aa, unidentified
MPYILALDVSMGHSYSVLYKDDTCLFEDEIEHTQRGFHALLEEIQHLPERPLIVFEATGIYSRPVEKFFQDHHFSYCLLNPLEAKKQMEENTLRSWKTDKSDAHRLAQTHLKNQRQPKEVQSNFYLEMRDLARFYQEIEKKITRLRMDLHNCLQLTFPELEQFFSNRLTPYALTLIRLFPHPDFVLASTRTKIKNKLITKNGKKISANRAEQKADQIIHYAQCAYPAVEKDSIHCQKTIYYAELLQDLLEQKEALATQMIKKAEGSPCFLLYQTFPGIGALTAALLLGELGDITRFETHKQLNAFVGIDIRRYHSGKYTGQDRINKRGNPKARKIIFFTIRNMIRQQRAAPNHIVDYYYKLKKQPIPKKDKVATVACMNKLLKCMHAMVRAHTEYDYAYAVSVDH

SEQ ID NO: 163585 - protein, 391 aa, unidentified
MVCVGIDVAKDKHDCCILDSDGTVRADCFTIPNNSDGFKRLLQTIQDCTQKSDKIKVGLEATGHYSYNILGFLLDNGLPTYVINPLHTNLYRKSLSLRKTKTDRVDARTIATMLLSDVDLKSYTDTAYHNEELKSLTRYRFDKVRERAKLKQSVSRLVTILFPELEKLVPSLHGVSVYALLSEYPGAKQISEAHLTKLTNLLSIASKGHYGKEKAIQIREAAKSSIGSVMPAKSLELKHTIKLIKELTSEIDEIEDSIQQIMDELHPPILSIPGVGIQSAAMILAEIGDFSNFESPDKILAYAGCSPSTYQSGKLTNCYAHMEKRGSRYLRYALYNATKYVCHWNPVFAKYLAKKRAEGKHYNVALSHATKKLVRLIYALQKSGKAYLTAA

SEQ ID NO: 163586 - protein, 401 aa, unidentified
MNAVGIDVSKGKSMVCVMRPFGEVVLEPFEVLHTAQNLHDLAEKLKALDGETRVVLEATGNYHKPVAFVLHDAGLFVSVVNPVLIHDYDNNSLRRVKTDRKDAVKIANYTLDKWTRLRQYLPEDDTRLALKNCYRQYQQAVAIRTMLKNNLISSLDLTFPDANKLFSSPAKSNGCEKWVDFIGDFWHSECVSSLSANAFAKKYLKWCQKHGYVFTRSKSDEIYACAVNSASLPKSPTSKLLIQQQVAQLKAVSQSVAAFRQEMLRLSQQLPEFDTVMEMYGVGPSLGPQLMAEIGDVRRFSSKKSLIAFAGIEPQPNDSGKVVGNDKGISKVGSAVLRRTLFLIMTVILQTQPQDEPVFQFMNKKRSEGKPYKVYMMASANKFLRIYYARVKAVMDSKHSK

SEQ ID NO: 163587 - protein, 456 aa, unidentified
MKIPQSTIRLLTGRLVKILLNREVSTMKSNTQNAKIEAITEKTLVLGIDVGSEMHYARAFDYRGIEYSKKPFKFSNTEAGFLTFKEWILDLKERHEKDKVIPGMEPTGHYWFNLGKFLQDNEMKPVLVNPHHVKKSKELDDNNPTKNDRKDPKVIAGLVREGRYMIPYLPDGVYADLRTASNIRFQLQAELTRIQNRISRWFNIYFPEYRTVYGKPDAKSGMLLLKAAPLPEDILTLGIDGVNQIWRDAKLRAVGKARAKTLIEAAEHSVGSKEGAVSARMEIRMLLEDYESRNTRLQEVMILIEELVRKIPMAEKLLEIKGVGIRTVSGFLAEVGDISRFNNPKELQKLAGLALVENSSGKHKGETTISRRGRKRLRYLLFEVAMSLVSKNQEFRELHNYYTTRRLNPLKKMQSLMAIAAKLIRVFYAMLTKGVDYDPKKMVSDIKRPAVYLQAA

SEQ ID NO: 163588 - protein, 343 aa, unidentified
MDRLLIGADIAKDTFEVAAYGPSGEATWGEFCNTPAGFAQLADRLAQARISWDAASAPVLLVLEPTGGYELALAAFGHQQGWQVSRPNPKRVRDWAKSQGRRAKTDRLDARVLARYGASQPPARWRPLPVELSELDSLLGRQDELQQMLQAERNRQAALARQPASARLVVESLAAMITTLEGGLAEIAQAIKTHIRTHARLKAKLGQLRTVPGIGPKNGPYILLLLSRWEHLTDGKGEAKGLVAYTGLDPQTYESGTSVHRNASISRMGQSQTRRLLYMGALGGVRGQNPLREFYQRLVGRGKAKKLALTAGARKILVWAWAVYRHDTAFDPIRGRSKVAVQA

SEQ ID NO: 163589 - protein, 393 aa, unidentified
MNKIIYIGIDVHSSNFTLCSFEPGYGVTEDKIFGQVQFKEDFINNTEKYISNLKKQRKDIEVVCGYEAGCLGYVPQRELAKKGIKCIILAPTTMAVQKGGKKVKNDYRDSIDIARCLANGSYRPVYIPDTEDEDVRDYIRMRDDHNIALKHIKQQLNAFCLRHGFKFEGKSKWTQKHFKWIKELTCTEKQREIINEYLATFESLNNKIDALDVRIEDFSKQERYAETVKKLTCIKGIKTHTALSFTTEVSDFNRFESAEKFASYIGLTPGEKSSGDNERKTKITKAGNRHLRRLAVEAAWTYMRGNIGIKSAELKKRQKDMPSNVITYADKASRRCQRKYYRLTKMGKESNKAITAVARELCCFIWGMATSHFDSSDTGTIKCDSELSMSSLD

SEQ ID NO: 163590 - protein, 358 aa, unidentified
MQRNKKTFKGQNIYIGIDVHKKNWQVAVITESGYTERLSTAADAKALFKFLKSHYPDGNYRAVYESGFSGFATHYALSELGVSCVVAHAADIPSSQYELTMKSDRIDAEKLARALRAGLVRGIYVRPKDNLDDRGVLRIRKTIQIQVGGYKTRIKHLLHSNGVELPERFSRSGTHWSRAFIAWLREDVRLLSDTRRSLDLLLLQVETLRANLLEATRRVRALSMTDRYREDCALLMGIPGIGLTVAMTILTEVCDIGRFGNERLFASYLGLVPTSHSSGERVSHGEMTFRGNKHIGPLLVEASWVLIVRDRELGRMYTEYRWRMAGQKAIIKIARKLSNIIFAVLKTRKAYEPYRRDA

SEQ ID NO: 163591 - protein, 410 aa, unidentified
MDVIVERPGALDVHNASVVACVRLPAEKGRRDEQVAEFSTTTRGLLALHDWLWAHGVRQVAMEATGSYWKPIWAVLEDDFECLLVNARHVKQVPGRKTDLKDAQWLCQLLEAGLLKASLVPPKPIRTLRNLTRYRKSQIRDRQREANRLHKVMQETGIKLDCVASDLLGKSGRAMLDALVAGTTDPEVLADLARGQLRKKLPALREALNGRFSPEHSLVVGRILAHIDFLDESIEQLSEAIEEQIAPFAPAVELLCTIPGVGRRAAEVIIAETGGDMSAFPTAKHLTSWAGVCPGNDQSAGKRRSGRTTKGSKWLRGTLIEAAKAAARTKDTYLQAQYARLRVRRGASRASVAVAHSILTACWHMLQTGELYNDLGGDYFARRDPARTTKRLVAQLERLGHIVTLEQAAA

SEQ ID NO: 163592 - protein, 358 aa, unidentified
MQRKEFTFKGQKVFIGIDVHKKSWSVTTLLEVGTPKTHSQAPDAKMLFDFLNKHFPDGDYQAVYEAGYSGFSTYYALQSHGIDCIIVNAADVPSTQYENVMKTDPIDSVKLAKALRAGLLKGIYIPPLDKLDDRSILRFRKTIQAEIARYKVRIKHVLHSNGVRIPECYDRATHLSAHYLHWLRNDVTLLYSSRVSLDLLIDQAIISRKGLLAANQEIRRLFKSPKYNERAECLCSVPGVGPICAMSLLTEIVDFNRFSNERQFASYLGLIPLCHSSGEHVLTGEKSFRGNKKLGPIIIEASWKAVISDENLAGAYMNYKKRGLKPQEAIIRIARKLSNIILSVMKSGQKYISHAALQ

SEQ ID NO: 163593 - protein, 406 aa, unidentified
MKQIVSVGIDVSKGKSTVCAMIHPNTIIKESFEVLHTVEEMSMLADYIGSLDGEIRIVMESTGHYHLPVAQFLYQKGFFVCVENAYIIRQFSRIMLHGAKTDPLDAKKLAKYGLAYWSELKPYKFHPSCYTELSLLSKQYQTYIKLLIAAKQNVIHLMDEMLPGFKEALDTASSVQFSKVKYVDFAKEFYHVDMIKSMGKEIFRENYKQWCKEKGYRFQSEKADELFHLAEDGIPTLPTEFPSTRLCMEVATEQVSQLGYALEQILSQMQNLAKTLPEYQTIRQMGGMGEKLCVRFIADIGDVRRFHNGKALVAYAGINAPPYQSGQYTGTKRRISKRGNSALRKTGYEVMKSLKSHPPKTDTRVYDFIIKKENEGKSKKQAKIAGLNKFLQIYYARVMEIYKNIV

SEQ ID NO: 163594 - protein, 338 aa, unidentified
MSIQPVVAVGVDPHAETLSAAAVDRLGGLIWETTVPNTAEGIATLIGGTNGELWAIEGSGALGRLLADTLRDRNVRVAEVPTRLTARLRTRGGFSKSDRIDALAIARLALVESLPPVDHQPIIEALRVLYRQRESLVQTQVEAVNRIRARLRELNTVPRLGRLRSRRQIETIIRNLPTGETDPHHKALILSIRLQAEEALQRIDRIRLLETELANTLPPAGTRLTELPGIGLITATAIIVATGDIRRFPTEGHYARYAGAAPLDASSGRQQRHRLNRWGNRSLNHALHTAIVTQIQQGGPAAHYVTRRLQEGKTKKEAIRAAKTHLARHIYRLLKNLT

SEQ ID NO: 163595 - protein, 386 aa, unidentified
MQVAANHTEAPVAIRTNLGAIFVSLELSRSKWLVTSISPGAGEKMSKFNIRAGDIAALLARFVDLQRKAEARTGQCFGIISIQEAGLDGFWIHRVLEREGIESYIVDPASIATSRRRRRAKTDRIDGEALVRALLAYKRGEPRVCAMLRVPSPEDEDRRRAVRERKALLNERIRHVNRIKGLLFNQGVSGYEPLNRDRRERLETLVTGDGRPLPTALRAQISRELDRLELLIKQIGEVEEARNAMLVTAEKSAREPALLLNLKGIGPEFAAVLWSEGLSRHFDNRRQVAAYAGLAPTPWQSGQVSQEQGVSKSGNPRLRATLVQLAWLWVRHQPTSALTAWFKARVAQNGGRQKKSAIVALARKLLVALWKYVNAGIVIEGAVARA

SEQ ID NO: 163596 - protein, 343 aa, unidentified
MQAVTTIGLDIAKSVFQVHGVDAEGNVIIRRQLKRRYVLAFFQKLPPCLVGIEACASSHHWSRELRALGHRVRLMPPAYVKPYVKRQKNDATDAEAICEAVGRPNMRFVETKTTEQQGCLMLHRTRHLFIRQQTAVINAIRAHLAEFGIVAPVGRNGVDQLLGVVADANDKRLPAVARACVAALGAQLQMLKAQVLQFDRLIRAWHRSSEISKRLDEIPGVGPALATALVASVADPKAFRSGRDFSAWIGLVPKQNSSGGKERLGSISKRGDRYLRSLFTAGALAVIRYAKIHGTKHRPWLTALLARRPTKVAAIALANKLARMAWAMMARGERYREPAALAA

SEQ ID NO: 163597 - protein, 311 aa, unidentified
MDEIIIDKGCGLDVHKETVVACVMGNGIKKEVRTFSTKTNDLLRLKTWLSGLGITHIAMESTGPYWKPVFNVLEDGFTLILANARHIKNVPGRKTDVKDSEWICRLLRSGLLSASFVPPQGIRELRDLTRYRRKLTQALSAEKNRIQKVLEDANVKISSVLSDTFGVSGSQMIEAIMEGRLSEAEMADLAKGKLKSKKEEIREALVGYFQDHHRFMIRASLEHIKHLEKLISDLDQETKKRLAQYPKEYELLQTIPGVKEQGAASIIAEIGVDMEIFPSEGHLSTWAGMSPGNNESAGKKKVERRPTAIRI

SEQ ID NO: 163598 - protein, 338 aa, unidentified
MKLIKKVTGIDISKDSITVCFGVMNDECTKKFSKSFTFSNDKKGFKKLIQSANNIDVFRSEDNITSAWFVLEATGVYYENLAYYLAENNFKVAVIVPTKTKNFFKTLENKSKTDKLDAAGLAQYGLEKDLKEWKAPSLVFKELKELTREYNHTKELRGQLKNKLHAKEYSHKPNDETVKRLNQQIKFFDKQIKQILQQIKTLVDSDEDLKSRIKKVMTAKGIGLITVVSIVAETNGFDLIENCKQLVSYAGMDIIQNQSGTINGKTRISKKGNKFIRNAVYMPALCAARFNENLKHVYKRLCISKSNKKIAVIAVARKLLILVYTLWKKDEEFMLNFN

SEQ ID NO: 163599 - protein, 339 aa, unidentified
MDQYVGLDVSQKLTAICVIDQDGKQLWRGNCATSPASIAAVLQQRAPRLQRAGMETGPLAVWLYHGLRRLGVPIDCIHARHAHAALASQLNKTDTNDAHGIAQLTRTGWYRPVEIKSMASHEVRLLLRARHKLVGLRTAMYNQIRGTLKTFGVVLAAGKGLTFEQLVLSQTPRSSLIQHVIHALLDTWRHLNLQIRDFDKAIARLANTSHVCRRLMTVPGVGSLTAVAFASAVDDPARFKRLQDIGPYLGLTPKKYQSGDVDRQGSISKTGGPMTRQLLFEAASILITRLKKECALRQWALELASRCGLRKATVATARKLATVLLTLWRQDKDFVPGSA

SEQ ID NO: 163600 - protein, 348 aa, unidentified
MLYVGLDLSRKRLDWQALDAAGERVAIGVSPPDRDGLAQLRRRLGDEEVLAVIESMTGARFVHDTLEQLGWEVLIADAQKVKGLAPLACKTDKIDARVLAVLSERDLVPSIWLPDPHIRSEREQARFRLHLVKHKSMLKHRIHSTMLSFGHPCPVSDLFGVQGRELLEGSEIPDPWRQSVDASLELIDYLERQIAEINRDLKASGAEHPYVPLLLTVPGIGWVLAFTIASEIGEITRFPSAKKLCGYTGLCPRVHQSGESDRRGPLTKQGPKYLRWAMLETTMHALRHPAYSERYQRNKKRLGRQRGAKVAQIDIARKLTEAIWHMLTNNQPFAPTPASGGATSRLAA

SEQ ID NO: 163601 - protein, 370 aa, unidentified
MGKSVLYVGLDVHKMSVDVAVAEPGPGAEVRFYGRIGGDLEALDKVTRKLQAKGAELRFAYEAGPCGYQVYRHLTAQGHSCLVAAPALIPRRPGDRLKNDRRDALALARLLRAGELTPVKVPDADDEAMRDLTRAREDAICVERRARQRTVAFLLRHGRVYPGKTTWGRGHWAWLLEQVMDHPAQQIVLQEYLDAVREASARVLRLTGQIRDLVPQWHQAPFVAAYQALRGVSFIVAATVVAEVGDLDRFNNPKELMAYLGLVPSEHSSGASVRRGRITKTGNSHARRVLVEAAWAYRLRARVSRTLLKRQEGLPERVRQLAWKAQLRLCTRYRRLLARGKARQTIVIALARELAAFLWAIGRAVAPATA

SEQ ID NO: 163602 - protein, 370 aa, unidentified
MAHTSTLFVGVDVHKETIAVAYVGAEREAEVISLGTIGTRQGDIDKLVRKLQAKGKTLHFVYEAGPCGYGLYRYFTKQQLTCWVVAPSCIPRKARERVKTDRRDAMQLARLLRSGDLTPVYIPSIEDEAIRDVVRAREDVQKDLKAAKVRLKAFLLRHDIRYTGRANWTAAHLRWLANVVCPTPAQQIVFQEYGRAVSEQTDRLQRLEAELQALVQPWRWAPVVDAIQALRGIQFIAAVTLIAELGDLHRFDSPRQLMSYLGLIPSEHSSGERRRQGGITKTGNSHARRVLVEGAWAYRYPAKVSRHLQLRLETVPKVIQEISWKAQVRLCKRYRRLAARGKHVNQVVVAIAREMAAFVWAIAREVAPAR

SEQ ID NO: 163603 - protein, 344 aa, unidentified
MSVYVGIDVHRKRSQVAVVTGDGQVRLNRNVVNGTEPILKLIGDLPAGTPVAFEAAFGTGWLAGLLEDYGFTPHLVHPLRCKAIASARLKNDKVDAAILGQLLRADLLPEAWIAPPQVRQLRALLRHRVALVRLRTLLRNRIHAVLADYGHDRPGGCWSGPGRAWLASLQLPAVSREVIDDDLAVTGALELTIDRLDWEIRQRARSDPRVKVLTQLPGVGPFTALVILAEIGDVSRFGSARKLASWAGLTPTVRGSDRVAHYGHISKQGSAWLRWVLCEAAQTAKRSPQFAATFQGIAQRRGKKIATTAIARKLLTRAWHLLTDAEATTISQATTAAAPQTGMR

SEQ ID NO: 163604 - protein, 371 aa, unidentified
MKSIIYVGMDVHTTNYTLSCYTVENDMSFATVQVEPDYKNILKYLEQVRKNYGDPCEFLCGYEAGCLGFTLYEELKRHDVPCVILAPTSMPVYKKKEIKTDKRDAMKIAKCLAYNTYSAVHIPTKEDSDIKEYVRMRDAHKTALKKVKQQILAFCTRHGFRFSEGRNNWTQKHMKWLRELKLEGLLREVLDEYLATFSQETDKVERFDRRIAELAEGESYAKKVHCLSCMIGIRTHTALSLLVETGDFHRFKKAEQYAAFLGLVPGEHSSGDGQNRLGITKAGNSHLRRLLIEAAQCYNRGKVGYKSKELKARQYGNPAEIIAYADKANERLRRKFYHMTLKLNKTHNVAVAAVARELSCFIWGMMTGHVA

SEQ ID NO: 163605 - protein, 298 aa, unidentified
MAVTVLGIDLAKNVFALHGVDHKGNTILCKPKVSRAKLLETVANMPPCLIGMEACSSAHFWARLFKNVGHEVRLIAPKFVSPYRLSGKTGKNDDTDAQAICEAVQRPHMRFVSIKSEEQQSIQCLHRGRQGLNEERTAVCNRIRGLLAEFGVIAPLSPERLRNEFESMKVHLPALAATCMNELFLHIDNIERRLLKFDRLIKETAEQDERCRLLMQLKGVGPMTASALVSAISDGKEFRNGRQLAAWLGLTPSQYSSGGKPKLGRITKAGDNYIRSLLVQGARSIMASAGRKDDPLSK

SEQ ID NO: 163606 - protein, 398 aa, unidentified
MLSIGIDVSKGKSTVCGMKPRGEIVYTPFEVQHTREGMSELVSLLRGSGEEVRVVLESTGSYHCPVVAALLENGIFVSVVNSLRMKRFCSQSIRRVKTDQIDAMQIALYGLAYWQELQPTRLPENTYRELQLLARQYYQMTSMLIKAKVDFNAICDQVLPGMQELMNDHAGRHKLSDFVLRYHHTTHILEMGETRFRKDYCKWAEKKGYRNHERMAALIFATAQNGIPVLPNAPSTQIVITEAIRVLHTVEASRDAILTQMQALAKTLPEYSLVREMPCIGDTLAPRLIAEIGDVRRFHSKRALIAYAGIDAPPYQSGKFSANNRHISKRGNRYLRKTGYEVMQSYVMHKPANDPIFTFIEKKRSEGKSGKLAMVAGLNKFLRVYYGKVTELYRSLPQ

SEQ ID NO: 163607 - protein, 424 aa, unidentified
MADNLPVNNSPIVACIGLDWAKDQHAICLQAADSSRIETSVLEHKPETLHAWVSQLQARFPIGRVAIALEQSRGAVIHALMTYDFLVLYPIPPASLAAYRKALHPSGAKDDPNDARLLLELVSKNREHFRAWIPQDPLTRQLQLLTQYRRQLVDQRTALTNQLTELLKGYFPQALDWAGGLNTLQACDFLQKWPTLQAVQKTSKVRLRKFYHRHGCRNTEQIEKRLQQMAQAQPLTSDRVIIESNSLMVLAWVPQLMEVIPSISTLDQKIKTLFAQHPDSALFDSPPGAGPALAPRLLAAFGTDRSRFQTAQEVEQFSGIAPVIERSGKSVWIHRRFACSKFLRQTFHEFAGASIHHCDWAQAVYLQQRSRGKKHHVAIRAVAYKWIRILFRCWQNRTLYDESIYLQSLHRRNPQLLAMLPATS

SEQ ID NO: 163608 - protein, 434 aa, unidentified
MKLPKHLRNINQHAAGIDIGSRSHFVAVPEGADEQPVREFSTFTGDLERLAEWLGSCGVTTVAMESTGVYWIPVFEMLESHGFEVRLVNARHVKNVPGRKSDVLDCQWLQQLHTYGLLRGAFRPVEQVCTLRAYVRQRATLVRTSSSYVQRMQKALAQMNLQLHNVVADITGLTGMRIIKAILAGERNPDVLAAMRDKRCKNSESTIARSLKGHYRPEHLFSLRQAVEIYEFHQEKIADCDRQILKQLQCFDSQDVPNDAPPANVGEALQRMSGVDLTGIDGIDTNTALKILAEIGTDMSRWKTAKHFASWLGLSPGTKVSGGKVLSSATKPVANKAAAAFRMAAFTLFNSRSALGAYLRRQRARLGAPKAITATAHKLARLVYTMLTHGTSYVDAGQEYYEERYRSRVVQNLKRKAHEMGFELVSMQEVPASA

SEQ ID NO: 163609 - protein, 400 aa, unidentified
MLSIGIDVSKGKSTVCGMKPGGEIVYAPFEVQHTREGMLELVSLLRSSGEEVRAVLESTGSYHCPVVAALLENGIFVSVVNSLRMKRFCSQSIRKVKTDRIDAMQIALYGLAYWQELQPTRLPEDTYRELQLLARQYYQMTSLLIKAKVDFNAICDQVLPGMQELMSDHAGRHKLSDFVLRYCHTTHILEMGETRFRKDYCKWAEKKGYRNCERMAALIFATAQNGIPVLPNAPSTQIVITEAIRVLHTVEASRDAILTQMQALAKTLPEYSLVREMPCIGDTLAPRLIAEIGDVRRFHSKRALIAYAGIDAPPYQSGKFCANNRHISKRGNRYLRKTGYEVMQSYVMHKPANDPIFTFIEKKRGEGKSGKLAMVAGLNKFLRVYYGKVTELYRSLPAIE

SEQ ID NO: 163610 - protein, 315 aa, unidentified
MTNRKMSKTIINVGVDVGKQFLDVWIYEKSLHFQEENNTLGIKRILKRLAHYQVERLVMEATGRYEFNLAQAAYSKGISVCIVKPLLVRRYAGASNQLAKTDKIDAAVIAEFAAVMQPTITPKKSKNLIAIKDLVARRRQLMNLRTQELNRIKIMGKSFEISCNRIIRCLDAEIKRMEKRLAKHVEEQADWSEKQAILKSAPGVGDTLIYTLLADLPELGSLNNKEIASLVGVAPINRDSGRLRGKRRIQGGRACIRTVLYMATLSATLCNPVIKAFYKKLVAQGKHKKVAITACMRKFITMLNAMVRDNCVWAY

SEQ ID NO: 163611 - protein, 306 aa, unidentified
MNDKITSVYAGLDVAKASLQLHLQSKAYDLPNTIAGQAQLIRRLPAFPGVHVICEATGGYERAGVAALHAAAIPVSVLNPARVRQFARASGKLAKTDPIDAAMLTAFGQAFTPAPTPPRTATELKLAALVTRRAQLLELRVAEAQRADPCADLDLRKLFNSWLVQMGKQITKVEALIEALLQAQAPLASQVQRLDDITGVMVLATMPELGTLNRRQAAALAGLCPYNRDSGQWTGKRCITGGRAEVRRALYMAALSASQNNHLLKPFYDRLIAAGKPAKVALTAVMRKLIILMNQLLKNPNFSLAH

SEQ ID NO: 163612 - protein, 369 aa, unidentified
MTDLTLFVGLDVHKKTISVAMVEATTGAEVRFYGTIANTPDTIRGLCKKLTKDGQQLHFCYEAGPCGYGVQRQLTRLGHRCDVVAPALIPRKVGDRVKTDRRDAMMLAQTLRAGQLTAVWVPDEAHEAMRDLVRLRAQAMRDLRRTRQQLLSFLLRHGLVSPYGHWTKMHRRWLGELVFAHPAQHLAHEEMLQRIERAETLCDRLKGAILELVPQWSLAPVVQAIQALRGVSLIVASVIVAEVGCFSRFDSPRQLMAYLGLNPSEHSSGATIRRGAITKTGNALARTCLVEAAWTYRFPARVTQIIRDRLNGLPEPIRNVAWKAQVRLSARYRKLIAAGKAAPKAVVAIARELVGFIWAIARMVEPKFA

SEQ ID NO: 163613 - protein, 417 aa, unidentified
MNDKFLWFVGLDWAHEEHRICLLDGEGKQVAERDVSHDGASLSGLCDWLLERTGAQPGEIAVAIETPRGPVVEVLLERGFAVFAINPKQLDRFRDRFSVAGAKDDSRDALVLGHSLRTDPHAFRRLAVDDPLVIELREWSRIYDELKGEQNRLTNRVRQQLWRYYPQASELAEDIAAEWFLDLWQQVPTPAQAARVSEKAIARILKNHRIRRFDAAHVLRILRTPPLAVAAGTVEAATAHIGTIVARLRLINQQIREAERRLDELCDAIAAAAERAPGQICEQRDVAILRSCPGLGRINIATLLAEASEPLRARDYHALRVLSGVAPVTRRSGKSCIVIRRHACNDRLHQALYHWARVAIQHDPTSRRQYAALRQRGHSHARALRSVGDRLLSVLCTLLQRQVLFDPNYKTSQLAAA

SEQ ID NO: 163614 - protein, 345 aa, unidentified
MQLYAGLDLHSRNTYIGIMDKAFKRVFGKRVCNNLPLIIKTLEPFQDQLEGIVVESTFNWYWLIDGLMDAGYHCLHLANPSAIKQYEGIKHTDDQHDAFFLAQMLILGILPQGYIYPKKDRPVRDLARKRLFLVHHKTAHILSLQSLISRCCGQRVSANDIRKFTVEDLQQLLTEQHIVLSAQANLETIGFLKQQIKRLEKAIQKKVKLNKAFQQLLTVPGIGLILAMTIMLEVGDIGRFPKVGNFASYCRCVSSKRLSDGKSKGQGNRKNGNRYLSWAFTEAAHLSRRYNVLFRSYYNRKLAQANTSLATKALSNKLARICYYIIRDQVPFRGNLLSQQMGLQR

SEQ ID NO: 163615 - protein, 369 aa, unidentified
MGEYSEGFVAFDVAKTKHAVAIADGGRGGEVRFVGEIASSSGAVERLISKLAGRYGKLHFCYEAGPTGYGLYRQIEALGHPCLVVAPALIPKRPGERVKTNRRDAVTLARLHRAGELTGVWVPDAVHEAVRDLVRARETAADDRRRKRQQLLSFLLRHGRVYSGGGHWTLAHRRWLAKQSFAHPAQQIVFQEAVEAIAEADQRLHRLEQQLAVIVPSWSMAQVVEAYQAMRGASFIVAVTFAAEIGDVRRFDNPRQLMSFLGLVPAESSTGETVRRKGLTLAGNRRARRVLVEAAWTYRYPARVSETLRARLDGLPKIVRDIAWKGQVRLCARYRRLSAAGKKLPVVVAAIAREMAAFLWAIGREVAPA

SEQ ID NO: 163616 - protein, 412 aa, unidentified
MTHAQLTHFAGFDWAGDHHDVIIVDTGGQLVADFRFEHNAAGWQHWREKIAAWPHLGVAIETSFGAVVEQLINSGISVYPVTPSSAKGYRQRKYPGGTKTDRHDAWALADALRTDGHAWRTLCAKDPIIEELRMLCRDEVALIEERTALVNQARQAAREYYPAVLEAFEDWTLPGTWAFIERFPDTQAMLKAGRRAWEKFFHTHKLYRPETTARRIAVLEAAGQWHIAAHMINAKRLYLLTKIKQLRALQMQLEEYRRRIESVFASHPDSGMFGSLPGAGAKLAPRLLGEIGSDRALYADAQSLQSMSGTAPVSYQSGKLHKVQMRRACNRHLRHTMHLFSDLSRARCAWARVYYDGLKSRGKTHAQALRSLGQRWLNIIFRMWQTRTAYDAELHTRNQLQHGSWVLQHTPS

SEQ ID NO: 163617 - protein, 423 aa, unidentified
MDVMHERVAGLDVHKETIVACVRIMAGGKVTRECRTFDTTTAGLDALLSWLTESGCTQVAMEATGVYWKPVWNILSDGKFELLVANARHIKNVPGRKTDMNDSMWIADLVSFGLIKASFVPEQEMQELRSLLRARKQVTREQTSHVQRIQKTLEEANIKLDSVISDIVGLSGRRMIEAMINGVRNPWELAELAHHRIKATRKQLYDALHGRLTDHHRFMLRLHLRQYDALEDAIKEIDQQVDAAIARMDAEVAAGQATFRSLIALLCTIPGVSDLAAKTILAEIGADMSRFPTAGHLLSWAGLCPGQNESAGKRKSSCMRKGSPWLKTLLVQCGWAASRKKDSYYKAQFNRLRGRHGAKKAICAVAASLLTAIYHMLKDGTQHQDLGANHFDRRSTEIKARRLAAQIAKLGFKVDLRPLPEAA

SEQ ID NO: 163618 - protein, 337 aa, unidentified
MRYVGVDLHKTQFSVCWKEEDGSDKFERYAMSAEGLRRFRERLDEGTEVGVEATANSKYFYDQVVGSAKRVRVINPLQFKIISESVKKTDREDSRVIAEYLSKGLLPEVRVMEKERRELKSLIQTRDKLVKLRSSLKNKIHGILLEHGIQSKREMFSSQKALQKVLEAPVSETSRFELEVIVKQINSLTEGIKELEGEIKDKGKGLKGQGNLQSITGIGELSSTIILCNIGDIADFENKKKLAAYAGLVPRVYESNKTVRYGRITKRGDKIFRTTLVQVALIAIKYNGYLRSFYDRLKTKKGSGKAIIATARKMLEIIYDTLVNEWVFEDFNNFVLA

SEQ ID NO: 163619 - protein, 368 aa, unidentified
MKEVTTRYVGLDVHKATISIAVADDGVAPVLFGTIANDATAVRKAVSQLKRGGKLVAAYEAGPTGYGLHRQLTQLGVDCVVVAPALIPRRAGDRVKTDKRDAIALARLLRSGDLTPVWVPGQQDEALRDLVRSRFDAKDDLRRAMHRLAKFLLRQSIQAPPGIKPWSARHLQWLETLRLDHPTSQLVFQDYRVAVHAARERVRRLEADLERCAEQSPRLGTILALQVMRGVAFLSAVTIVAEVGDFRRFPNAPRFMSFTGLTVSEHSSGQSRRQGRITRAGNRYLRHILVQAAHNARFAPSLEGELKRRLKDVPADLVALSVTAQNRLHRRYRHLDRRIGRPKAVTAVGRELAGFVWAIGQRMEASAA

SEQ ID NO: 163620 - protein, 449 aa, unidentified
MAKKNVSMEVINPKAAGIDVGSRSHFVAIGQAAEQVKEFGVYNEDLHALTQWLLHNKIISVAMESTGTYWQTLFSTLQQAGLQVILCNGKFTKNIKGKKSDVQDCQWIQKLHTLGLLSGSFLPDTATEHLRTYCRHRTNLIDNSADTTRKMQKYLRLLNLRLDVVVNDITGLTGLSIIEAVCKGETNPQKLASLRNGNCRKSEEEIAKALQNNGRTDYLFALQQEYDIYKSLQQKIKQCDVAIEKLINQHINQDEHKKNLKAEDKPHKRVNKNAPKNMDINQIAYQYFNGVDLMAVEGLSHSTVITLMSEVGYEGIKKFDSGKRFASWLRLSPNNKISGGKVLSNKIPKGSNRLKIALRNAANAIGNLKDTHLSNFFKRISFRRGRAAAVSATARKLAIIIWNMIVKAMPYLPPSTYEFLDQKRKRKVLEMKRLIHKFEITSTDLGLQL

SEQ ID NO: 163621 - protein, 348 aa, unidentified
MLIIGCDYHPGFQQIAFVDTETGEVGEGRLTHREEAEQFYGTLKERKVRVGMEASGHARWFERLLSDLQFELWIGDAAEIRTKRVRKQKTDRQDAQLLLRLMMEDRFPRIWVADAANRDLRQLLWHRHRLGQMRTRIMNQLHVVALNEGVRRKKALWRPAGRSELESLLLAPWAKRRRQDLLELLDQFTPKIQQLTRALEEEVEKRPVARRLMTHPGVGPLTALAFELVIGTPERFRCGKQIASYVGLVPSEESSGDRRRLGHISKQGNVLLRFLLVEAAQVTVRSQVQWRSKFIHLALRRGRKIAKVAMARKLAVHLYWMWRKGWDYGQFEKLGSHAGEPGNRHGVQ

SEQ ID NO: 163622 - protein, 494 aa, unidentified
MNCNSVYPTPMKKPSNKARRPAPPIVARGKGPIRPATSLPVVHPHAAGIDVGASELYVCVPEDAVSPGESPVRRFGVFTGELDKLVEWLQSCGVKTVAMESTGVYWIPPYQKLEAGGLEVVLANARHLRQVPGRKTDVKDCQWLQRLHSYGMLQGSFRPAEEYCRLRSLMRHRENLVDGCVQQVQYMQKALDLMNVRLHQVVSDLNGETGLRILDAILAGERDPKKLTSLRDERIKRSTPPEMEAALQGDWREEQLFILQQGRETYRFVETQLARCDAQIEKVLQQIVVVAERRPSLETPPNPTAAPTPRKKKERRPRKTGHGLKRDLRAELQRICGIDLTQVIGLNVLSVLIIISEIGVNMSRWRSAKAFCSWLGLNPGNRISGGKVLSSRTPHVVNRVSLLLRTLATAVGRSETWLGIFHRRMKARLGPAGANTATARKMACMIYHLLKYQEQYIDVDTLIYAEKIQRIRLNKLRKTAQELGFELLPIKQAA

SEQ ID NO: 163623 - protein, 356 aa, unidentified
MKYVKDTKRFIEGKVVFCGIDVHVSYWIICFYCDGEVVEQIRIHGRYPILRHVLQNRYALARQIRLVYEAGFSGYWLYRELMADGYQCIVTPPTRVPKSGDKVKTDKRDALKLATYLAAGLLKEIAVPSPRAEADRRVGRQRRQLVKEQTRRKNRIHSFLHLHGLRRPEQISTCWSKAYMEWLSNLEFDCPSDSFHLQSLIRQYQSVRDELAEVTRQLRQLSRASAYQDHFRLITALRGVGLITAMTFLLELFDLPRFSSAARFCSYLGLTPSQHSSGERVRLGRITREGNAHLRAVLIESAWTVMRYDPHLREKFYRLTAQGTTKNKAVVAVARSLAVRLRRCLLDGVEYDVTVC

SEQ ID NO: 163624 - protein, 269 aa, unidentified
MSKRSIQIQETLYCGIDVSAKSLTVAIQRLGQPIEQRSFPNNPNGHRALIIWLRKAKSPVRVSLEATGIYSLDLAFALDAAEGIEVAVLNPKVANRFAQTIRRSKTDAADAEVLAEYARRMPFTAWVAPSPGSMRLRSIVRHIESLSVQSAQNQNRLHAAQGSTSTPGCIVQDLKRSVASLELRIHKLRREAMTLVRQDHLLRKRFELLISIPGIAQVSAMQLLAELSTLPPDLKVREWVAHSGLDPAHEISGSSVRKASRISRAGIVT

SEQ ID NO: 163625 - protein, 367 aa, unidentified
MSKSSKLFVGMDVHKDSIDLATGEERGEVRHHGAIGGDLAALGRAVRKLESLGKRLVFVYEAGPCGFVIYRFLRARGHECWVVAPSMTPRQASDRVKTDRRDCLKLCRLARAGELTPIYVPDAADEAMRDLVRTREDAVIMQRQARQRLSALLLRNDIRYAGKSAWTQAHRRWIAHLKLPAPPQQIAFEEYVQAVNEATARIERLEQAIATERGHWRWRPVAQALEAFRGIQAIHATRIVAELGDLRRFAHPRSLMGYLGLVPTENSSGARRRQGAITKAGNSSARRAFIEAAWAYQHHARVSWVIARRQTDLPQPVIELAWKAQLRLCARFRKLAARGLNRNKIVVAIARELAGFIWAAGHSVKPV

SEQ ID NO: 163626 - protein, 387 aa, unidentified
MTAQSKVSAFVARDYDIFAGLDVDKRSIAMTFSDHQSLLRSLRLPYSSEQLLNYVQKHFRGQRVAFVYEAGPTGFGLYDDLMANSQTCLVVAPSMVPTAPGQRVKTNRLDGKKLSLGLRGGELRSIHVPSRSYRELRHLVHLRDTQTAQLTATKLRIKALLLFEGIPFPEAPPGGQWSARVVAELRVLPCTEEVRFKLDHLIGTLHFHFNSAALVQKRIRHYCQNDPEIRNTIKLLTSLPGVGWITAAHSVARLGDWREITNVRQIAGFLGLVSSEHSTGDHENRGSITRSGDSRLRNKLIQCAWIAIRKDPELRDFYRRIYQRQPKEVAARKAIVAVARKLTTRMYAVLKQQRPFIIRPDSSLAPLTAEETVGPRERLDIPQHDQP

SEQ ID NO: 163627 - protein, 317 aa, unidentified
MNNHKNQTEINVGVDVGKSQLDIVLHPLDLHLSIPNDPEHIQKVIQVLKKHPVKRIVTEATGRYEHAFVFACDKANLPVVIVNPIKVRRFAQAIGVMAKTDRIDASVIAQFSAIIKPEIKQLPDEQSKIIKDLLIRRTQLLEMATMEKNRLQIMPKELHKSINTLLKSLNQQIDKLTEKLDKLVAQVKEWRVKSEILTSVPGVGKVLSYTLLSEMPELGKLNRKEIAALVGVAPMNRESGSYKGKRRIRGGRHRIRTVMFMAMMSAIQCNPVFKRYYQRLKAAGKMPKVALIACMRKLIVILNTMLKSEELWCAKNG

SEQ ID NO: 163628 - protein, 350 aa, unidentified
MLIIGCDYHPSFQQIGFVDTSSGELSERRLFHREEAEQFYGKLKEQSVPVRVGMEASGHARWFERMLRDLQFELWIGNAAEIRAKRVRRQKTDRQDAQLLLRLLMEDCFPRIWVADAENRDLRQLLWHRHRLVQMRTRVMNQLHVVALNEGLRRKKALWRQAGRQELESLALAPWANRRRQDLLDLLDQLTPKIQQLTQALEEEVEKRPVTRRLMTHPGVGPLTALALELVIGTPERFHCGKQIASYVGLVPSEESSGNRRRLGHISKQGNALLRYLLVEAAQVTIRTQAQWRSRFFHLAMRRGRKIAKVAMARKLAVHLYWMWRQGCDYGHLQKLGSHAGEPGNPYGVR

SEQ ID NO: 163629 - protein, 405 aa, unidentified
MPYILALDVSMGHSYSVLYKDDTCLFEDEIEHTQKGFHALLEEIQHLPERPLIVFEATGIYSRPVEKFFQDHHFSYCLLNPLEAKKQMEESTLRSWKTDKSDAHRLAQTHLKNQRQPKEVQSNFYLEMRDLARFYQEIEKKITRLRMDLHNCLQLTFPELEQFFSNRLTPYALTLIRLFPHPDFVLASTRTKIKNKLINETRKKISANRAEQKADQIIHYAQCAYPAVEKDSIHCQKTIYYAELLQDLLEQKEALATQMIKKAEGSPCFLLYKTFPGIGALTAALLLGELGDITRFKTHKQLNAFVGIDIRRYHSGKYTGQDRINKRGNPKARKIIFFTIRNMIRQQRAAPNHIVDYYYKLKKQPIPKKDKVATVACMNKLLKCMHAMVRAHTEYDYAYAVSVDH

SEQ ID NO: 163630 - protein, 412 aa, unidentified
MQVVYPCCCGLDVHKKSITACVLWVEARGEKRNEKRVFGTFTRDLLKLSDWLRECGVRQVALESTGIYWKPVWNILEGQFEVLLVNAQHIKGVPGRKTDQKDSEWIADLLQHGLLKGSFVPPCAIRELRDLTRYRVNLAEECNRIANRIQKVLEDANIKLASVATDTLGASGRAMLKAMIAGEENAEVLAEMSKGLLRNKMPELRGALEGRTTVHHRFLLQELMDHLEFVEGKMLRLEEEIAKRMHPFDDAVRRLRQIPGVDRITAWGLIAEIGVNMDQFGDSRHLASWAGLCPGNHESAGKRKSGRTRKGSAWLRRCLCQAAWAVSTKKNNYLSAQFRRVAARRGVKKATIATAHTLLVIAFHILKAPVEYRDLGGDYFDRLHPETLKHKLVKRLEALGLKVTVEPMAQTA

SEQ ID NO: 163631 - protein, 426 aa, unidentified
MARQKRSVEGEFDIFVGVDWGTEFHRACVLNARGEILRGCRIDHNGEAITEFLRSLQQLTNGGPSRIAVAIEVPRGPVVEAFLEGGFAVFSINPKQLDRFRDRHTTAGAKDDSRDAYVAADSLRTDQHCFRRIATDHPDVVRLRELSRTEESLGEALRRTVNQLYQLLLRYYPQLLQLNSAPDEPWVWALLEAAPHPQCGAKLTLARLKSLLAKQRIRRWAAEEVQVILRTPPLPLSAGSAEAISEHALLLLPQLRLLHTQRKKVHDRIEALLNHMTVVGRDHPECCQHRDIGLLLSIPGLGCLIAANLYTEAADSLAQRDYAALRAHSGVAPVTKQSGKSKQVIMRRGCSQRLRGSVYHLARCSVLHDPHSKQHYAHLRSIGHTHGRALRGVADRLLSMLVAMLKSGKPYDATRRSTAAATAPAT

SEQ ID NO: 163632 - protein, 345 aa, unidentified
MPIVGGLDIHRKQITFDYLDTVTGQVQRGQVSPADRAHLRAWLARFAGREDVAFAVEGCTGWRYVVEELAAAGVTAHLAEPADTAFARGRKRHAKTDKTDCRHLRMLLAEGRLPECWIPPGRILECRALLETYHDLRREHTAWAQRIHAVLFHQGAPALGEGTLRSEPGLAALREAAAGCLSPAGQLQVATALEVTDALDARLLELRHQLLDAARHLTGAKVLAARLYGVGPVTALAITCWLGGEGRFSSSRKAVRFAGLDVTVYSSDRKGPPGRLSRQGPPVLRWAVYEAGKTHARSSAPDHAYYAQVKDRCNGKRAALSEARKILRQACHILAELGDDALTAA

SEQ ID NO: 163633 - protein, 321 aa, unidentified
MSKHSMVCAGIDTAKHKLDVALEGCPDTLQVGNTADGHVTLSAWLRQHRVERVGIEASGGYEQAVVAHLRRDGFVVVVFQPAQVRAYAKFLLQRAKNDKIDAGLIAACTAATKKIHAPPDPRLAPFAEHLTLIEQITDDIARLKNRRESCRDPRIGGFWKAEIARCGSLLRIELKALAAAIRQHRDLAERLELILSVDGVGLRTAVAILVRMPEIGRVTREQVASLAGLAPFDDDSAEHEGVRHIAGGRERLRGSLYAAALPAAMRWNPQLMALYQRLIAKGKPHKVALVACARKLLIFVNTVVERGTPWVAEPPAQLKSS

SEQ ID NO: 163634 - protein, 377 aa, unidentified
MTIVAEPPTHVDAPGVALGVDTHSEVHVAAVIDPLGRHLGEATFDATVAGFKALHAWASEFGPITVAGVEGTGAYGAGLARFLTAEGVAVVEVDRPDRKMRRDQGKSDSIDAYAAARAVVSGRASGTPKTRTGDVESVRVLRVARTGAVRARAKALTQLKSLIVTAPDTLRAQLTGLDGVRLIATCARLRSHRDDAPTPSPFAKRPPRPGRLVDPTAATKRSLASIAQRVQQLDVEIAELDDDLEALLTPLAPALLALNGVGLDVAGQLLVTAGDNPDRIATEAAFAHLCGAAPIPASSGKTTGRHRLNRGGDRGANAALYRIVMCRLRHDPATRRYVERRTQEGKTKKEIIRCLKRYIAREAYNAIQTDLTARNAP

SEQ ID NO: 163635 - protein, 404 aa, unidentified
MDLAPIYRCAVGLDVHQAQITVCVLSEGADGEVVAEVREFGGFKRDRRAMAAWVAGFQPDVVVMESTGIYWKSPYAALEQAGIRALVVNARHVQRVPGRKTDIADAQWLAILARAGLLTGGFVPPANFRELRLIARQLQRLTGIRAGEKNRVHKVLTDGGIRLSVVVSDLHGQSAWAMVKALAAGETPQQVLRHASARLRATEQELRDALDGDLSDAHRFVLAELVDHVEDLDRRIACFRDRLLAGLAPQQRLLGALQTLPGFDELGAALLLVEIGDDMQAFGKPEKLAAWAGVCPGNHQSAGKRQSGKQRKGNPYVRRLLCEAAHAVSRTRCALAEKYKALLVRRGRKRAIFALAHKLLKLVFVLIDRGDYYRDATVDYEALSVARNAPRWIKMLRKHGYLAA

SEQ ID NO: 163636 - protein, 428 aa, unidentified
MPYKIAGLDVHKRMLAVVVSDVEVDGEYAFERRQFGSNPAQLRLLADWLLEQQVEEVVMESTAQYWKPVWAALERYWTPTCKKREGAGAMSGTQHLAQAQSNRARQGRKNDFADAERLVKRLVANELTLSFVPDPEQRLWRTVTRTKYQLTRNRVQLQNRLEALLEECHIKLSSLVSDLLGVSARRMVQALADGETDPAALAALANYHLRATQEQLRDALGACQALNPVYRRLLKLALEELQLIEKQISQLDQEIADLLRPYQDQVQRLAEVPGLGVDSAQQIIAEVGPTAATFPSAGNLSSWVGACPGDDESAGVSHSHRSPKGNRQMRRLLNQAANAAVKYKGGIFEILYRRYVPRLGHKQTIGVIAHRLCRLIWKILYQGVRYEERGPDVRKKSQRYRAARMIRELQSLGYRVEQANSQSADVPA

SEQ ID NO: 163637 - protein, 356 aa, unidentified
MSSKLNTAIAVAGIDIGKNSFHVIGLDKRGAIVLRQKWSRGQVEARLANTPPCLIGMEACVGAHHLSRKLQALGHDARLMPAKYVRPYSKGQKNDFRDAEAIAEAVQRPTMRFVATKTGDQLDLQALHRVRERLVGQRTGIINQIRAFLLERGVAVRQGLRFLRIELPGILAKRTDVLSPRMLHLIEGLADDWHRLDERIEVLSSEIGALACGDPACDRLMTVPGIGPIISSATVAAIGNGAAFSKGRDFGAWLGLVPKQISTGDRTILGKISRRGNRYLRSLFVQAAWVVLVRVGPKHWDRYGLKSWIEAAKKRLHHNVLAIALANKLTRIAWSVLAHGRSFEASKLAEGATQPA

SEQ ID NO: 163638 - protein, 322 aa, unidentified
MSSELPQDHPSVVIGIDVAKDKLDVHAWPTQQTLSVPNTPAGIDALVAALALLRISLIVIEATGRYERRVAFELMGRGYEVAIVNPRQPRDFAKASGQLAKTDAIDAKILAQFGALIGPRKSEKPSENQVLLDELVTRRRQLVEMITAERHRMEHVFDKRLRGSIKNHLDSLADHRDHVEKQIADLIERDDDWRERLTVLKSVPGVGAATAATLIAELPELGRLNRQQIAALVGVAPMNRDSGTMRGQRHIAGGRKSVRDMLYMATLTARSHNPLIKAMAARLSRAGKPFKVMMTACMRKLLTMLNVMIRSKQPWRSPTCPA

SEQ ID NO: 163639 - protein, 402 aa, unidentified
MAAYELWAGVDVGKEFHWVCVVDDTGTVVLSRKLINDEQSIRALVAEIDGLAERVCWTVDLTTVYATLLLTVLADAGKSVRYLAGRQVWQASTTYRGGEAKTDAKDARVIADQSRMRGTDLPMLRPDDDVISELRMLTAHRADLVADRTRTINRLRQQLVAVCPGLERVAQLTQDRGWVVLLARYQRPKAIRQSGLSRLTRVLSDAGVRNAATIAAAAVAAAKTQTVRLPGEQVAAGLVAQLAQGVIALDERIKTTDADLEGRFRCHPLAEVITSLPGIGFRLGAEFLAAVGDPALIGSADQLAAWAGLAPVAKDSGKRTGRLHTPKRYSRRLRRVMYMSALTAVRCDPASRAYYQRKRDQGKRPIPATICLARRRTNVLYALIRDNRTWQPDSPPITKSAA

SEQ ID NO: 163640 - protein, 339 aa, unidentified
MQVTTIGLDLAKNVFQVHGIDDHGEVAFNRALRRAQVLAFFERLEPCLVGIEACGTSHHWARELIKLGHNVKLIPPAYVKPYVKRGKSDAVDAAAICEAVTRPTMRFVEVKTPEQQAILSVHRTRDLIVRQRTQTINMLRAQLAEFGTVLPQGIYHALQFAKDCVNGEPLDLPKDAQEVVFNLCDELLFLHAKILRHSRHMTRIAKSEKRVALLRTIPGVGPITASAIVATVGSGKQFNNGREFAAWLGLTPLNRSSGGKERLGHISKMGDQYIRRLLVLGMTSRIRSIRLEPEKFDPWFADILSRKPSRLAAVAMANKTARMIWAVLTRNEPYKVRTV

SEQ ID NO: 163641 - protein, 350 aa, unidentified
MSEQYAGKQIVGMDLHRRRSVLVRMTETGERLETVRISNDPEYLRAVMTRAGEAPDVVLEACYGWYWAADTLAELGATVHLAHPLGVKMFSLRRVKNDERDAADLADLWRMGRLPEAWIAPPACRELRGWVRHRAKLVGLRSNLKCQVHAVLANAGVQVGMSDLFSAGGQDLLARVALTPESRARVDSALRLISGLDFEVELFGKLVANRLRSDPGYLAIQAIPGVGPVLAAVFVAEIGDIGRFARPEQLASWAGLTPKHHESDTTVHRGPITKQGSRLVRWAAVEAVQRVGGHTRLGQVRDRVGQRRGRNIGVVAAARELTELVFYGLRDGRLRCLTTPSASNTANPAA

SEQ ID NO: 163642 - protein, 321 aa, unidentified
MNKDHVIGIDISKQSFDVVDSHEKHQIYTQDLEGFKKFCKAIPKDSICVMEATGIYHLQLANYLFQNNIQVAVINPLRIKRFIQMRLRRNKTDKSDASMIRLYGINQDIDLYKPIDSNLQKSKDNYQTMEQFINIRASLKNKLKELQYKGSDTKLIQIVESQLVTLTESINELDAEITKLLNKNHGPLLSNLKSVVGIGPRTAAILIISSDAFKQFDSAKQLASYYGIAPSERSSGTSLRKKSHISKRGNPLVRKKLYMCSLQAARYNPACLELYQRLIAKGKPKKLALIAVANKLLRIAFAIAKSNIPYDREYRSYRKSA

SEQ ID NO: 163643 - protein, 409 aa, unidentified
MLPSDSTPKRSEAAHRFVGLDVHKHYLVAIGIDRQGTQVFGPHHVPIPRLEEWIAKHLTRQDAVVLEMTTNTWKMHDLLAPHVFSVTVVHPPHVALIVRAQVKTDKKAALTLAQLHAAGLLPGVWVPPQEVRELRALVAQRHKMVRLGATTKNRLHALLHARHIQPPEGTKLFDPETRSWWENLPLSALELYRLQSDLDALDFAKEQVKRLERCLAEFAARDPRMPLLVQLPGIGLINGVTILAAIGDITRFPDAKSLVGYAGLGARVHLSGNLHVTGRITKAGRRDLRRSMVEAAHHAVECSPHWKAEFERLEKRKGRSKSVVAVARMLLVALWHILTKAEADRHAAPQQVATSLFTLAHRVRVQNLPDGQTALQFTRNQLDRLVIGQEVTHIPWGSKRFKLPPSKLK

SEQ ID NO: 163644 - protein, 334 aa, unidentified
MDHVAIDLGGRESQICVRTDDGRVLEEARLATKGITRWLEQRSPCRLVMETCAESFAIADQALLQGHQVRIVPSTLVRSLGVGARRTKNDRRDALALSEASCRMELPSVHIPSTASRRRKTLCSARDALVSGRTKMINCVRGWLRQSARAPRRGSAESFARRVRELLGETIPQPIALLLESIDQLTAQIRQTDQLLSDEVKHDPVCVRLMTVPGVGPVTATRFSAALDVVERFPDAHTVESYFGLVPGERSSGDRVHRLGITKAGPGAVRTALVQAAWTARRYSPQDPMVRWCFEVERRRGKLVAVFALARKLAGILYAVWRDQSTYDPLRGAK

SEQ ID NO: 163645 - protein, 348 aa, unidentified
MDKITAVGLDLAKQIIQVHGIDAVGRVVLRKAVRRERLLALLAQLPRCVVGMEACSGTHHWARALRQLGHEPRIMAAEFVRPFRKSLAAKNDANDAEAVCTAVVQPNMRFVSIKSVEQQALLSLHRIRQGLIEERTATINRLRGVLAEFGVVLPQSAVRLQRALPAVLADEERLPVLVQRSVQMLREHLHELEARVAEFDRGIAQHAKSSAPAQHLVALSGVGPLTASAVVATVGNARDYRNGRQFAAWLGLVPRQYSSGGKRKLGRITRRGDAYLRALLIQGARSTLQAALRRAPARHDRLSAWIVQLAQRVGYHKTLVAIANKHARIIWALLARDQALDLARTTTR

SEQ ID NO: 163646 - protein, 358 aa, unidentified
MKNEVKTISFKGQKIYVGIDVHLKSWTVTVLLLHTFIKTFSQNPSAKELANYLRRNFPDGDYCSAYEAGFCGFVPHRELGSEGIQNIIVNAADIPTTDKERKQKEDRRDSLKIAKSLRSGDLMGIHVPPIGMVEFRSLVRFRKTTVKDIGRNKSRIKSYLYFNGISIPRELDGASKYWSARFTKWLSTVELTTPEGKMVLEKILGTVQHLRKDLLEVNRKLRKVAKEGVYSKFLQLLLSIPGIGLVSAVTLLSELDNITRFMNLDRLCSYVGLVPSTRSSGENDSTGRITKRSNQHLRTVLIECAWVAVKQDPALSLRFSELCQRMKKNDAIVRIAKKLLNRIRYVMKNETKYVYAVV

SEQ ID NO: 163647 - protein, 390 aa, unidentified
MFLNSTSVDVIRRINWDSQGTPAGVPCGRPRDRLDLGLRGRGTAGYRSALTSQTRTVAWAAAFSKPVFTRKGTLVLESQHAVSVGIDVSKENLDMDFAPNRRPFRFPNTPAGHGAIVERLAAMEMRVIVIEATGGYERAVVAELMVAGMPVVVVNPRQVRDFARAQGRLAKTDQLDAAVLADFGLAIQPPQRPLPDVETRQIREKLARRRQLIQMVTSESNRLEHATSPAVRRSIESVLELLRKQLQQIENDLDQTIRCSSAWQEKAELMQSVPGIGPQVSRTLLIQLPELGQCSRQQIAALVGVAPLNRDSGKLRGRRTIWGGRPEVRANLYMATLSATRFNPKIRKHYQHLLEAGKCKKLALTACMRKLLTILNAMIREKKTWHTANP

SEQ ID NO: 163648 - protein, 309 aa, unidentified
MTIHPCFIGCDIAKHHLDLFVETSGRHVRIANTSAAIAEFLAGIEAGPAFVAFEATGPYDRLLREALAHGGHRFARINPARARDFARATGRLAKTDAIDARLLAAMARSLALKPDEPAEPDRIALAALHKRRDQLVEMRATEKVRAGEADDATGSFARHLAWLDAEIVLVERAVAAALRAAPTLAKTARLLRSAPGIGPVAAVTLTALMPELGRRSAKTIAALAGLAPFNDDSGKRKGRRAITGGRARIRRALYMAALAAARFCPRFKAFYQAVLARSAAAKVALIAVARKLLVTLNAMIKTNTAFQHA

SEQ ID NO: 163649 - protein, 342 aa, unidentified
MAQVTTLGVDIAKNGVCVHGIDTQGHVIVKKRLARQKVLPFVAQLPPCLIGMEASGGAHYWAREFTKLGHTVKLMSPQFVKPYVQSQKNDPNDAAGICEAVERPRMRGVPVKSVAQQDVQALHRIRERQIKARTALINQIRGLLAEYGIVIPQRASQVRHKLPFVLEDAKNGLTATACTWLSALAEELKALDQRIATTDTQIEEVFKSDDACQRLAQLAGIGPLTATALVAAVGAATAFKNGRQFAAWLGLVPRQHSTGGKTTLLGMTKRGNCYLRTLLIHGARAVLRVVDRQTDPWSRWLQGVQARRGTNCASVAQANKIARVAWALLARGERYRPRPAAA

SEQ ID NO: 163650 - protein, 434 aa, unidentified
MSNKVIFNLDDLFISVGIDVGADFSWMSIALPNQQFVGKPYKILHNSIDSLTTAVSKIKEAEELYSLESRIFLESTGIYHYPLFCYLRDKGFNCSVINPIITKNSTNINIRKVHNDRFDSKKAALVGLKPDLKVSLMPSDLALNCRNLCREYYDLMDNRSAYVNKLQGELRMAFPQYLGIFSKVTINTSLTLLETYASPSAFLEADKQEIIDIIRSTARFGLTYAQNKYNAIIQAATDANQFGYIINSNIKRIRLYISFIRKYDEEINSILESLHELVDANEDADFVKQIHLIETIKGAGFLSAVSIMGEIGDFSAFSKPKQLFAYFGLDPAVKQSGKFEGTKVQMSKRGSAIARRLTLQSISISRNGEAKNPVLREYYLKKCDSKPKLVAMGAVSHKVCNMIFAILRDNKPFEIITPQEHIKQYNAAKCDMTA

SEQ ID NO: 163651 - protein, 349 aa, unidentified
MESVSINKQYYCGVDLHADVMYACVMTKAGKVVFHHEMPTDFKCLLKHLKPYLSSIAVCAESTFNWYWLADGCAKHTIPFFLGHALYMKLIHGGKTKNDRIDAQVMANLLRTGFFPPAYPYPERMRATRDLLRRRAHFTQLHAETLRHIKTVLYQQGYTDLPAVHNYNAQKIRATFSVYKLPADATFSLQTDFAMLEHLDTQIGKLEWQIEKTARGHDLHALALLRTMKGLGRIISLTLLYEIHTIKRFKSAQCFSSYARVVRVERSSHGKKLASKNQKIGNPYLRNAFGMLAISAQRYYPSIKVYTDKLVKKYGNAKAYTLLAHKFAVTVYFMLKNKTAFDVKRFVAA

SEQ ID NO: 163652 - protein, 346 aa, unidentified
MEHYVGLDVSLKLTAICIVDQTGKIVREGMVPSDPEAIAGFVQSHAPHVARVGLETGATATWLWNELNALGLPVICIDARHAKAALKMQINKNDRNDAAGLARIMQCGWYKQVHVKDNGSHAIKALLSSRALLVKLKRDLENQIRGLLKNLERVIGRAKMNVFARRAAELLEDRPELAAATLPLLRAREAVEQEIADLDGKVLRLARRSAQVQRFMTVPGVGAITALCFLATIDHPTRFKRSRSVGAYAGLTARGYASGETDWTGRISKCGDTMLRSYLYEAANVLLTRVAKWSALKARGLRLAKRSGLRKAKVAVARKLAVILHRMWMDGTDFRWSSQEADQQAA

SEQ ID NO: 163653 - protein, 395 aa, unidentified
MEQVIIGVDPHKLSATIEVVDHLEQMLGSGRFTTDRAGYSAMRDYVKSWSERVWAVEGANGVGRPLAQRLLESGEQVVDVPAKLAARVRLFDTGHNRKTDARDAHSVAVVAVRTPNLRILRVDGELEALRMLTDRREALTRRRVQTVCRLQALLAELLPGQAKRDITALQAKRLLATVRPRDIAGKTRRRIAAEELAELIVVDAKIKRATAELKAVVLARDSRLMDIDGVGAVVAARILADVGDVARFADRNRFASWTGTAPLDASSGEQDRHRLSRAGNRRVNHMIHIAAVTQIRLDTEGRAYYRRKRAEGKKPMEAMRCLKRRISDAIYRQLVADAQRVESADPGGHCGASQESSAVDLPPLIDTSDQPLPDPQPRRYAAPRRPRKSRPARTS

SEQ ID NO: 163654 - protein, 434 aa, unidentified
MPAARTVEEKSMDVLYERVAGLDVHKDTVVACVRIMVDGKTARECRTFATTTEQLVALRAWLEECRCTHVAMEATGVYWMPVFRLLDADKFALIVANAAHIKNVPGRKTDMNDAMWIADLLACGLIQASFVPNEEVQELRALTRTRKQLVREQTRHVQRIEKTLAEANIKLSSVISDIMGASGRRMIQAMIDGVRQPNKLAELAGKQIKASPKELYDALHGRLTDHHRFLLALHLKQWDSIDETIRKLDGELDQRIGRMATAAEDRTIPFRALIELLTTVPGVSAVAAPAILSEIGPDMSRFPTAGHLVAWAGLCPGHNESAGKRKSSRLRKGAPWLKTMLVQCAWAAKRTKDSYYRAQFFRLQAKRGPQKAICAVAASILTAIYHILKHGTEHHDLGSAHFDRRPVEVKASRLVAHLKKLGFNVQLQPIAEAA

SEQ ID NO: 163655 - protein, 336 aa, unidentified
MQITTLGIDLAKSIFQLHGIDAEGKVLLRKKLRRQVLLSFLAGLPPCLVGMEACATAHFWAREVAALGHEVRLIPPAYVKPYVKRQKNDMADAEAICEAVSRPNMHFVAIKSADQQAVLMLHRSRELLVRHRIAMINALRAHLAEFGIVAARGAHKMRDLVGELQSDETDIPAVGRTALLSLVRQLDALETEIANLDREIHAWHRQSEISSRLATIPGVGVITATAAAATVADASLFTSARQFAAWLGLVPRQASSGGKDRLGRITKMGDGYLRKLLVIGATSIIRSAGKADPRTREWVQALLERKSARLASVALANKMARVVWALLSKGEIYRTE

SEQ ID NO: 163656 - protein, 466 aa, unidentified
MENNYILYVGMDSSKGKADAAILKVSDRRSVKPKFLRKKLSFKFVKSEVTSFLETVRSYSDDNCTSICFALEVTGIYSTNVYNFIKDNLNDNESIKFLNTDFVNQWRNAHNIAKSDPLDAQTISTIIGTDSDVQYVNDNVFENKNGYQDLKALVHRHYQIKKIYSQEINRLIAQCDCLFPELQYVFEPKSAAFIAVLSSYPTTHDIINASRLEVFNVVYEATKHRCSMDKIDKLFDLCHDTLVPDNISSYGRSIILDLVENIKNIKGQLKMIERYIRDVASLNPAYKLLLTITGCGPLTAATVIAETGDIKRFKNADCFVSYSGTSPRNKRSGTSVETMGKISKRGSRYLRHAIYMIAEFARRHNPVLKHQFERIKNGNKKRHKLANIAIANKIARYIYSIMKNESSFVILHEHIMRLPEETQNTFFNSISLDFPENTRKQIYQYSDIDGEVHKFVYTKLEETMII

SEQ ID NO: 163657 - protein, 315 aa, unidentified
MSDVPCFVGIDVAKAQLDIALRPSGERWAVPNDASGVTTLVDRLQVLHPTLIVLEATGGLERAVTSALATAGLPVVVVNPRQVRDFARATGQLAKTDALDARALAHFADVIRPTPRPLPDAQTQELRALLGRRQQLVGMRTAEQNRLAGTSGRLQTDIEAHITWLNERLATLDDDLERVLRASPLWRANDDLLQSAPGIGPVCARTLLLELPELGTLTRQQIAALVGVAPLNCDSGTLRGRRTIWGGRAHVRTVLYMGTLVATRFNPRIKTFYERLLAAGKVKKVALTACMRKFLTILNAMLKHRTPWQAQEVPG

SEQ ID NO: 163658 - protein, 456 aa, unidentified
MKKPLKQIKKNPTLNCVNPNAAGIDIGAKSHFVAIPEGRDQTTVREFNCFTSDLHAMVTWLKTSNIDTIVMESTSVYWIPVFEILEQNGFTVLLADARHVKNVSGRKSDVLDCQWLQQLHALGLVQGAFRPEDDIVQLRNFIRQRSMLIAHASEHIQHMQKALSQMNIQIHQVLADITGVTGMKIIRAIISGERSSQVLASYRHEKCHNSEETIKKSLEGNWRQEHLFSLKQAVELYDFYHKKIAECEEEIQKKLNTFEMKVDPLTQKIISKKGKKKPRKHDYRFDLQTELVRMSGVDLTKIPGIDTGTALKIISEIGMDMNRWPTSKHFASWLGLCPGTKISGGKRLSGRTKACANKAAIALRLAANTLYHNKGALGAYLRRMKARLGSPKAITACAHKLAICIYNMLKKGMSYVEKGMDYYEQEHKSRVLKHLRRRAKDFGLVLVEPDQKIATC

SEQ ID NO: 163659 - protein, 357 aa, unidentified
MAIAPSFNVIGGIDTHKDTHAVAAISATGEFLGAAQFNTNPSGYRNLLAWLREFGVVLRIGIEGTGSYGAGLTRYLRSEGVDLVEVIRPKREWRRRHGKSDPSDAEAAARAALSGEAKGTPKGQDGQIEAIRLLRLTRRSALLGRTQAFNQLQAVIETAPVELREQLRHLRHSDLLARARRFRVAVIDTPTAAARMALRSLSVRWLALNDEVAALDAHIGQLVRQAAPQLCAVWGIGPDTAASLLVAAGDNPERLISEASFAALCGVSPVDASSGRQHRHRLNRGGNRDANRALWVVAMVRMAKHARTQAYVQRRTQQGLRKKEIIRCLKRYIAREIYKILSGGIVPTGPRNEGTTS

SEQ ID NO: 163660 - protein, 412 aa, unidentified
MQDILTCSMGLDVHRDIIVACLVKGAVDAEPEAETRTFSTLIPEMQKLRDWVIESECRNIAMESTGIYWQPIYEMLESCFDGEISILVVNARHMKNVPGRKTDMKDAQWIATLLRAGLLKGSFIPDKAFRELRHLTRYRKSVVHDITAQKNRIDKFLQSSGFRFTAFLSDTFGASGRNIIRHLIEHGSIDREALDKCLKTKTRNRIDEILVALNGSLSEHQCRFLNMVFRHLEDLEAHKHTVEDEITEEVLKHTDTLNLLCSIPGIDVTAAAAIIAEIGTDMSSFPDSQHICSWAGLSPGNNESAGKRKSVHINKGNPYLKSMLCEVAWIMASHRKLYLSGWYWKVKQRKGAKRATIALARKILSIIYTMLKTGTPYNEECFEQRRLRCERKRANRLVNELQKLGYVVVAPD

SEQ ID NO: 163661 - protein, 337 aa, unidentified
MKFCGIDLHSGNSVVVIIDEQDNVKYSKRHANNLSEILEALAPHREALSGVVVESTFNWYWLVDGLQENGYRVHLANTAAIKQYEGLKHRGDESDARHLAHVLRLGLLPEGYIMPKSERAVRDVARKRMQLVQQRTTQILSIESAMSRHTGARASSNAIKQLTQEDLGHLNLGQFETLGMQANLVIMNALQTQIEGLEKELANYCRTKPGYRVIKSAAGIGEVLATVILLETGDIQRFKDAGNYASYCRCVSSTHLSNGKKKGQGNTKNGNRYLAWAYVEAANFAVRYCEAARQFYQRKKAKRNAVVAIKAVAHKLARACYHMLKTGEEFSVERCFR

SEQ ID NO: 163662 - protein, 397 aa, unidentified
MYIVGIDIAKRKHEAAVIDGEGTVIIKPFSFTNNCSGYNRLLAMLTKAKLPLDEVSFAMEATGHYWLALFTRLQKEGFRVQVINPVQTNSIRSFYIRQAKTDPRDALLIAEVIRFGHFSESTLHPENIYELRELCRGRHAIVSMQADVKRKVVALLDQVFPEYETAFTNLFGDTSMAILQTCPTPKELSEMPLEELCHLIEVSSHKRFRMAKAQELQELARNSFGFAMAGDVFSTMIRLYAKHLDFLKQQVREMDRKIAEIMETLDTPITTITGIGPTLGAYILSEIGDISRFSSAAKLAAYAGIDPTMRQSGEYNGVRNRMSKRGSPYLRHAIWLAASSAVLHDPALKLYFQKKRDEGKPYMASVGHACRKMVSIIYAVMRDNKAYTPYIPNEISA

SEQ ID NO: 163663 - protein, 418 aa, unidentified
MSNKVTRAASPWSEQYQKLLPRTKGGVMVFVGIDVAKDKHDCYICDSDGLELYSPFIIANNREGFEELMERIRCVSDDLSKVKVGLEATGHYSYNILGYLISQGTPISLINPLHTNLFRKSLSLRQTKTDKVDARTICMMLSSGMDLSSYSESSYHMEELKSLTRYRFGKVGERAQLKQSLSRLVTILFPELETLVPTLHMKSVYALLSEFPGAIYVANAHLTRLKHLLADSSKGRYGKEFAETIRDTARKSIGSDMPAKSLELKHTIALIHVLTEEIDEIEFSIQKIMDTLDAPILGIPGINYCMGSMILAELGDLRRFSSPDKILAYAGMSPSTYQSGQLISSYAHMEKRGSRYLRYALFNATKYVCMWDPTFKSYLAKKRAEGKHYYVAISHAAKKLVRLIYHLQMTGEAYCPQT

SEQ ID NO: 163664 - protein, 316 aa, unidentified
MNSDTEIIVGIDISKNKLDIQIQEDDQYFTCGNNIIDIGKLVEKLSKIQPGLIVLEATGGYEKGVVSALIEEKLPVAMVTPSWVRYFARSSGTLAKTDKIDARMLVRYGRANHPPIMKVRTELQEHMSVLMARRSQVSTALISEKNHLSTITFPDVKKLIEASIENLEQQIMQLEEMIAEIIDLSPELKNNEKIICSVPGAGKITAAILLADLPELGTLDHKKIAALVGVAPFNRDSGYYRGKRRIKGGRQSIRKVLYMAAMTAMRWNPVIKEFYEILLARGKAKNVAIFACMHKLLTIVNAMVRAQTLWSPVVRS

SEQ ID NO: 163665 - protein, 389 aa, unidentified
MIYVGIDVAAEKHACCILTESGKVLKQFTFSNDMPGFEKFHKALLTPSETKIGLESTGVYGNNLAEFLRRNGYETHIFNPLLVKKSIQATTLRKTKTDKSDAKHIAQYTKEHSQPNPKISYHTSELKSLSRGRFSLVRERSKVKTQAKGLLVQLFPEFSQIFSDIFGAAASAVLRQLPSARMIAQCPVDVLTDLLRTASHGRLGKVKAELLIDLAEHSVGIQSMALELQMQMLLQQIDLFTLQINRYEAAIKSEMETIQSPITTIPGIGCVLGAAILSEIGDIHRFTTPAKLQAYAGVDPSVGESGTSVSTPGRMVKHGSHYLRWALCQAARCVSLYDPIFAAYMKAKRDEGKHYCVACSHVAKKLTRVIYSILKNNTAYSLTYSQIGA

SEQ ID NO: 163666 - protein, 422 aa, unidentified
MSKTKSSVAGLAALYVRVCGMDVHKNSVVACVRILNAKDSTVQSTLRKFGTMTADLVELRQWLAEQQVTHAAMESTGVYWQPVFNVLEGHLAVWVVNAQHIKKVPGRKTDMKDAEWIAQLLQCGLLKPSFVPDRQQRELRDLTRQQTKLVQQRNAVDNRIQKVLETANIKLGSVASDVLGVSGRKMIEALIGGEKDPRVLAELAHKRLRAKIPQLQRALEGEITEHHRFLLRQLLDQYDFLEKEIARVSERLGAVAPPSFRAAVEQLDAVAGVAERGARALLAETGTDMSRFPSHKHFASWAGRCPGNRESAGKRKSGKTPAANRHLDAVLTEIAHAAVRKKDSYFKSQYHRLAGRRGKKRAIGAVKHSLLVTVYFMLRDNKPYNDLGADYFDKLNPQHQIRYHVRKLKELGKEVELSAMAA

SEQ ID NO: 163667 - protein, 347 aa, unidentified
MKEYAGLDVSLKAVSICVSDGDGRVLWRGEVVNESDIVIAALSRHAPNLVRAVLETGSCGVPLYRGLEAAAVPIICICARHAKGVLKCKVNKSDANDAEGLAQLARTGWYREVYVKSAEAHVIRAHLLARKQITKARRDFENQIRALLRISGFKVGAAPKARFEARVRRLLEQIPALHLPVDQLLMARRSLLASQDALESEAKRLAKDDHRCRTLQTMPGVGPLTALALVSTMDGPARFAKSSSVGAYLGLTPRGHQSGEVAWTGRISKTGDGVSRALLYEAANSLMVRVKAGAPVKTWPPLKVWAVNLAERVGGKKARVALARKMAVILHRMLSDGTAYRWTPEAA

SEQ ID NO: 163668 - protein, 355 aa, unidentified
MSQEKYIGMDVHQATISAAVRNAQGKLLMESVLETKADTILEFIQGLRGTLALTFEEGTSATWLHDLLKPHVSRLVVCDPRKNALLKDGNKNDRVDARKLAELLRTNQVKPVYHEKHGTRALKEVGRSYLTVTKDVTRVMNRIKSVYRSWAIPCAGTSVYTRCHRAEWLAKLVEPGVRTRAERLYQQLDSLQPLRQAARRELLLESRKHAAVKLLRQIPAIGPIRSALLVALLQTPHRFRTKRQLWAYSGFAVEVHDSGEYRWVRGKLQRNRERITVRGLNDNHNKDVKNLFKGAATSASTRPGPLHDFYVARVESGMRPTMARLTLARKIAAITLTMWKKGVSFDPKQLQRQAA

SEQ ID NO: 163669 - protein, 362 aa, unidentified
MNYVGVDIHKKYSVLCAVDERGRKLREARVEGNAPFGFAQFFSGLGGPSKAVVEACWNWGRIHDELEELEGIEEVVLAHPYKTRLIADAQIKTDRLDAYALSTLLRGNLVARAHVPRRETRVRKNLLRQRLYWARLRTMLRNRIHALLDRQRSLELPQCSDIFGVRGLSFLRRLELSETDAALLREQLALHDLIAQQMKAQEKRIGLEFGSEAMHRQLMSVPGIGPTLAAVIACEVDSIERFSSAEKLCAYAGVVPTTHSSGGKTRHGQLLPFCNKWLRWALIEASWVAIGCSPYFGALYKQHRARGKKANSAVLIVARRMCRIIWQLLHEKRDFEKRPLRPNFNFPGCSVVRLTAATAARP

SEQ ID NO: 163670 - protein, 313 aa, unidentified
MITLGLDPHPGSHTVVALDNNGAALGHLAVPNTPEGLKQLHEFGSRFSPRRWAVEGAGNHFIAAFVAELLANLESVFSIPPSLTSQYRARRGRKKSDVVDAENVARALLANAQLPPLHAVEHQRELQELTRTQRRLSEQLKASRGALKELAAGSSVREVLQPVIEILVDQLKILRQQIRLMVKNIMPALLDVQGVGPIVAGILLAEVGNPKRFASANHFASYCGAAPVERGSGQNCRMQVNPGGNRRLNWALHIVAMVRLGNDGGRSKTFLDKCRLRGKSQRSALRVLKTYIARELFSVMHHNIRANIEGLST

SEQ ID NO: 163671 - protein, 316 aa, unidentified
MKFCGIDWANDHHDALSIDEHGRQLGRIRVAHSPEGLSQLDGYLEQIAGPGGKEQVACMVETTHGLLIAHLLEQGWAVSPVNPRTVERRRAPSGAKTDLIDAYLLAKTGRADFADLRRLKPDSEQIQELKTLTRDQDGLVQMQTRLVNQLTACLKAYYPVVLELFGKIQQPSTLAFLRAYPTLQAARSASVEELAATLKQSRYPGARQKAQQIATHLQLPCLQASEVTTRTKSRLMLALLDELEPLLKQIAEYDKEIERLFLRHEDLELFQALPGAGLRLAPRLLAELGDDRSRYDSAASLQARAGTSPVLFQSGT

SEQ ID NO: 163672 - protein, 322 aa, unidentified
MDTFQRGIDVAKAKLDCALRWPEGKLRHKGVENTQDGFLALRTWLDKQGVRTLHVCMEATHTYWEPVAEFLAPIESVTVSVVNPAQLKAFGASRRVRTKTDKADAKRIAEFCAERRPAPWQAPAPAEQVLRARVLRLEALHARHAQESNRLDVARPAVKEGIAQPLQWLDKQIKWIIQAIRDHIDKDPTLRDKQRLLDSVPGLGERTLAILLAFYATPGRFGHARQAVAFAGLDPRQQESGTSVKGKPRMSKVGHALLRKALYRPARVTLYRTDWGKPFRSRLAIAGKPPMLIIGAMMRKLVHVAFGVLKSGKPFDPARQGA

SEQ ID NO: 163673 - protein, 449 aa, unidentified
MERYAGVDWASEKHDVLVQEATGEHVLAATFAHDERGLSALCATLVRLGVVLVAIERPDGLLVERLLDAGLRVMAIHPNQVAAARPRFRTSGGKSDGFDAFVLCELARTDSHRFRVLVADGDDTKALRALSRARADLVQTRVQLANQLRAELERFWPGAALVFAEIDSPIGLAFLARYPAPGDARGLGEKRLAAFLARHAYCGRKQPTELLAKLAGAPAGRAGDAEIEARRAIVLALVAALKPIVVKISQLTREIAHRVRCHPDGHVFLSLFRDPKSVVCAAALLAEIGDCRARYRNAEALAADAGMSPVAVESGKRKVACFRHGCDHRLRSAFATLADATRHWHPWAADRYATARSRGQDHQRAIRTLGRAWCRVLWRCWQDNVAYDPAKHRGLQDHIAVTIPDGSSPRLDLKATQRMAGAAVTRRAGRRPEREALDGKPTTATHTRG

SEQ ID NO: 163674 - protein, 448 aa, unidentified
MSNEIAVTAAVPEPEWAAFVALDWADQKHHWRLAVVGSQKQKQDEGELENTPEAITAWAADLNVRFGGRPIAVCLEQTRGALVYMLLQFPQLILFPVNPIMAARFREAFYPSGSKGDPCDTEVLLDILLHHRDRLRRLKPDTVETRLLQRLVEQRRRMVNERTRQSNRLTACLKLYFPQILKWFEDVTSPLVGALLERWPNLEQLQRAHDGTLRDFFHKQNCRSKERNQERIEAIRQAVPATTDVAVLEGEAMVAHCLVKLIATLRDNIAELDERIAKAFAAHPEKGLFDGLPGAAAVLSPRLLVAFGTDRERFASAHEMECYSGIAPVTEASGQSEWVHFRWACPKFLRQTFHEFAGHSIAKSEWARAFYDLQIGKGKEHHAAVRALAFKWIRVLFACWKKRTPYDEQIYLQSLRKRNSPLKALLPPGAGLGWKDVAGFQKLSEDPS

SEQ ID NO: 163675 - protein, 347 aa, unidentified
MLADEVDYVVGVDTHRDGHVLAIVAVPVGAVVAQRAVAANARGYAQALRFADQHAAGARVWAVEGAGHYGAGLARHLSGRGETVLEAGRSPRGERRLHGKDDKLDAIRAARAALGHELASPRAGQRREALRLLLVARRSAVDVRREALVQLRSVIVTSPDCLRDELRRLPVQRLLERCSRLRRSATARPDELAVRLVLRTLARRIEAVTIEAAELEREILAHVRLLAPQLLDEPGVGPIVAAQLIVAWSHQGRVRSEAAFARLAGVAPIPASSGQTTRHRLSRGGDRQLNRALHTVVLHRRQHDAATKDYIARRIAEGKTRRDATRLLKRYLARRLYRLLQQEPLMA

SEQ ID NO: 163676 - protein, 346 aa, unidentified
MYKGMKKIIIGIDVSKEEIDVSHQDMDRQTVPAYLGKYENSPKGYKAMVKDLSRMHKGICPGQWLFCCETTGAYDRPMCYWLCANGFNVWRESALQIRWSLGIRRGKDDKADSMAIAEYAWRHMDKACLFHIPEEKLAALKDLFVYRMQLVDRCKAQKARLKSLDAQGKAASAAAALIKHDIKKEIEAIEKSIAKFENEIMTVINSSPDLKNSYKRITSINGVGMVTAVSMIAFSDNFTNIPTPNKMATYCGVAAFRKKSGDSIDKRQDVSNLSNRRLKGILSMAARSAIHYNPDIKSYFERLVANGKPYGIAVNNVKNKLIHIMYALIKNASEYKPGYQHERKSA

SEQ ID NO: 163677 - protein, 340 aa, unidentified
MDLGDKTSRYCVLGEQGEIVQEGSVGTTKKALAQKFGALRRCRMAMEVGTHSPWVSRLLKSLGHEVIVANARQVKLISQSSRKDDRLDAQTLARLARVDPQLLRHPAPQRRSASALDGDSGASGTVEMRSSLVNTARGLAKSVGERLPKCDTDQMGVERMEGLPAELQQALQPLLEQIESVTEKIKESDGRIEQIARTEYPETALLKQVSGVGTLIALTFVLTIEDRDRFQKSRDVGCYVGLRPKRSQSGESQPQLRISKEGDIYLRKMLVQGAHYILGYRGPDTDLKRWGLQLAGQSKNAKKRAIVAVARKLGILLHRLWVTGEVYEPLRNSRARPAAA

SEQ ID NO: 163678 - protein, 451 aa, unidentified
MDVGVSVPVEEPVVVRAAALDIAKATAMVCTRVPDEGRAGRRVQQTWSVAADTAAILELGDRLRCQGIERVVMEATGAYWKPFFFLLEARGLECWLVNARDVKNVPGRPKTDKLDAVWLCKLNERGMLRASFVPPLEIRQLRDMTRTRAVLVRERTRHKQRVEKLLEDAQIKVSSVVSDLFGVTGRAVLEALVAGERSPAVLAELARGSLRDKKPQLRAALLGGFTEHHAFMVGQFLELIDTLDAHIAQLTARIEEHLAAMDTGAPHADAPHTGGGVPLRPGALALADRLDAITGVGQTTAQIIIAEIGTDMSRFPTADHLASWARLTPQTEQSGPVTRSRGTGKGNPWLKGALGEAAAAASRTHTFLGSRYKRVVKRRGHARALVATMRSILIIAWHLINDPNATYQDLGEHWHQRLTNPARKTRDLVHQLERLGHQVTLAPTPDPDPAT

SEQ ID NO: 163679 - protein, 340 aa, unidentified
MRQLYAGCDLHGNSNFLGIIDEQGKRIFKKALPNEFPLIRHTLQPFQGELGGIVVESTYNWYWLVDGLMEEGYRVHLANPSAIQQYGGLKHADDKHDAFWLAEMLRLGILPEGYIYPKEERPVRDLLRKRGHLVRLRTSLVISLENILSRNLGKKVSAHDVEGLREDRVTPLLERNEDLALAGRVSKDAIDHLTRQIHKIEGAVQKRMGVKESYRYLLTLPGVGKILALTIMLETGPISRFETVGDYVSYCRKVPSQWISNGKWKGSGNRKNGNKYLSWAYAEASEFARRLYPEPRSYYHRKLQKTNEAVAHSALSNKLARAAYYVMRDQVPFRPEKLFG

SEQ ID NO: 163680 - protein, 324 aa, unidentified
MTKVKNFAGFDVSKKFFDVSVSNREDSEKQFVYDRKGLAAVIEWLPKDCHCVMEATGPYYLQLAIYLHQNGFIVSVVNPLVIKRFSQMRLLRAKTDKSDARMIAAYGATEQPPQWQPPADYIIKLQQLEAVLQQMQKQRTALLCQTEAFAASGLMDKEMNHFLQKNIAHLNKQIIYLEKRMENIVEEHHLQMLNNITTIPGVGKKSAIALIILSGGFTKFSNYKQLSAYVGLSPRIYQSGSSVRGKARICKMGMSRIRAMLYVCAWSAKRCNKACVELYERLVLKGKSKRLALIAVANKLIKQVFSIATNNKKYNRDYVKNICL

SEQ ID NO: 163681 - protein, 343 aa, unidentified
MEHYVGLDVSLKETHFCVMDGTGEVVARGREATHPELLSRALARHAPDARVVVLETGGQSSWLQGELEALGTPAVIVDARRARKALSCRMNKTDANDAEGLAHLARTGWYRRVAAKRRATRLARSLLLARQQLVKHRRDLENQVRALLRGFGLAMGSVSRAGFEERAWRLIEREPLLEDAIGPLLQVRRALCLQVRGLEGRIGKTVKQSDVCRRLMTVPGVGPMTALAFTTAIDDPGRFGKSASVGAYLGLTPRRHQSGEVAWSGRISKHGDGLARHMLYEAANSLLSRTRAWSAPKAWAARLARRIGGKKARVALARKLAVILHRIWLDGTEFRWSAKEAAA

SEQ ID NO: 163682 - protein, 409 aa, unidentified
MSLFCGIDWATEHHDVAVIDDDGRVVARGRVSNDAPGFAALLTLLAEAGDSAADPIPIGIETDHGLWVAALRETGRTIYPINPLAASRYRARYAVSGAKSDATDAVLLANIVRTDPGAHRPLPAATEAAQAIRVLARAQQDAVWARQQIGNQIRDLLKDFYPAAIVAFADLDGGLTRPDARTILAAAPTPAQAAKLTPARLRRLLIKAGRKRYLDRDVARLREVFTDTYLHQPPAVENAMGIHLTALLGQFEAACTAADALAEAAIDHFEQHPDAKIITSFPGLGMLAGARVLAEIGDDRSRFTDARGLKAFAGSAPITRASGKKTVVLHRHIKNRRLAAVGPIWALSSLRASPGARRHFDARRAAGDWNHQAQRHLFNKFLGQLHHCLQTGRLYNEHLAFPPPLELAA

SEQ ID NO: 163683 - protein, 317 aa, unidentified
MSKHNTVCAGIDTGKYKLDVAIDESADQLQVDNSPAGYRCLSAWLRQRRVERIGIEASGGYEQAVVSFLRADGFVVIVFQPVQVRAYAKFVLQHAKNDNIDAVLIARCTAAATDIHEPPDARLAPLAQRLTMIEQLTEDVAQLKTRREACRDTRIRAFWKQEIDRLKRLLQGELKQLVAAIREHRDLADRLDLIASVDGVGPRTAVAILVRMPEIGRVSREQAAAIAGLAPYDDDSSQRRGLRHIKGGRQRLRQSLYAAALPAVFYWNAQLKALYKRLIAAGKTHKLVLVACARKLLIFVNTVVARGTPWKSAPATT

SEQ ID NO: 163684 - protein, 323 aa, unidentified
MPSTYVGIDVAKATLQVHLNGHQIEFNNNSKGHAKLTKKLAQLTRPHVICEATGGYERPVVAVFHQDKILVSILNPAHTLAAAKAQGMRAKSDCCDAEALTDYGQRYQPEPTVPVPQELREMTELALWLQQLIDQRAVAKTQAEHHDNAFVRHQHQELLAHYDEQIKTVEKEIKKRIQSQPEFQQRLDCLVEIQGVGFRTALMMLVLMPELGQMNRGGAAALAGLAPWTRDSGTMKGKRCIGGGRAQVRPVLYMSALCASRCNPVLAPFYAALKQRNKPSKLALTALMRKLVIYMNHKLKALATMPPAQETKNATKPKKVLAN

SEQ ID NO: 163685 - protein, 337 aa, unidentified
MKYYAGIDLHSSNNYIGIIDEKDKRLFGKRIDNDLPDVLSVLEPFKSNLDGVVVESTYNWYWLVDGLQQHGYQVHLANPSAVKQYEGLKYTDDRWDSFWLAHMKRLNILPEGYIYPKQQRSVRDLLRRRVLFVQQRTSQVLSLQSMIARNLGIRISARQMNKLTDKDIDRMFEANQAFMARNQLSTIEFLNKTILNIEKQVLGQVKLKKEFNLLQTMPGTGKILALTIMLEVGDISRFKKVGHYSSYCRCVKSEKTSNKKKKGENNKKNGNKFLSWAYVEAANFARRYSQEALRFFQKKEAKRNRIVATKALSNKLCRASYYIMRDQIPYDEARLFS

SEQ ID NO: 163686 - protein, 430 aa, unidentified
MNSNTQNKKIEAITEKTLVIGIDIGSETHYARAFDHRGIEYSKKPFKFSNDEAGFASFKAWILEIKEACEKDKVVPGMEPTGHYWFNLGKFLQDNDMKPVLVNPHHVKKSKELDDNSQTKNDRKDPKVIAGLVREGRYMIPYLPDGVYADLRTASNMRFQIQSELTRTLNRISRWFNIYFPEYKTVYGNLDAVSGMLVLKTAPLPEDVLALGVDGINKIWRDAKIRAVGKKRAQTLVSAAEHSVGSKEGTISARMEINMLIEDYESRSARLQEVMALIEELVKKIPMAEKLLAIKGVGIKTVSGFLAEVGDISRFKSPKELQKLAGLALVENSSGKHKGETTISRRGRKRLRYLLFEVAMSLVSKNREFAELHQYYTTRKQNPLKKMQSLMAVAAKLIRVFYAMLTKGVDYDPKKMSDDIRRPMVGSQAA

SEQ ID NO: 163687 - protein, 361 aa, unidentified
MSESMALVGLDVHRAQTVAAVLDPVTGELSVERLRGAPAQVVLAFLEELGRPVRAVYEAGPSGFGLARTAEEHGIDVRVVAPGSIPRAPGDRVKTDRRDAKRLVRLFAAGELSFAFVPSETDERFRDLVRCIDDARKDLMRSRHRLSKFLLRRDLRFTGRSWTVPHQRWLGNLVFDDALSRATFIDYRCAVEALAQRRRALIGVLEEAAPQSSHGETIARLRCFRGIDTLTAAGLCAEVGSFERFAKPALLSGFLGIVPCEYTSDTKRVQGQISKAGPPHARRLLVEAAHHYRHRPAVGETIAARQAGQDPRVAAIAWRAQKRVNARWTHLGARRGKHTGTVAVACARELAAFCWEAATLD

SEQ ID NO: 163688 - protein, 279 aa, unidentified
MIIIGCDYHPSFQQIAFVDTETGELQERRLQHREEAEKFYRDLAARGMAVRVGMEASGHARWFERLLAELQFELWIGDAAEISAKRVRKQKTDRQDAQLILRLVLKDDFPQIWVPSWENRDLRQLLWHRHRMVQARTRIMNQLQAVALNEGLRCRKKLWRDAGRGQLEAFQLAPWASQRRGDLLELLDRLNPTIGKLTQAIDLEVEKCPAARRLKTHPGVGSLTALAFVLIIGKADRFECGKQIASYLGLVPLEKSSGNQRRLGHITKQGNSLLRFLLV

SEQ ID NO: 163689 - protein, 371 aa, unidentified
MPDVSSNQPADVRLWVSLDVHKLSIVAATLAPTGGKPEVQRIETTEKAIRRFIEKLGGPNGLAVCYEAGPGGFELYRLLIRLGVRCDVVAPSLIPVRAGDKVKTDRRDAKKLVTLYRGGLLRFVAPPTPETEGLRDLLRCRDDLRCARTAARHRVSKQLLRHGRIYREGKHQWTVKHRDWVARQQLDDPLAHAALEEMLVHLDGIERQLATLDARLEQVARSERWASQVQILTRFRGIATLTALGLIAEIGDFARFSHPRELASWLGITPSEYSSGDQQHRGHITKTGNRHARRLLTEASWHYRHPPRRPKTGPEPDQRAWQAQLRLYHRHRHLTQQGKRSTVVTMAVARELAAFLWAAMTDQPHRQEAAA

SEQ ID NO: 163690 - protein, 358 aa, unidentified
MKPISDRLRDFTGQNIYVGMDVHHKSWKVHIYSDEFELKSFSQAPDVEQLYNYLNKNYKNGNYQIAYEAGFCGFWIQRSFASKGVNCMVVNPADVPTSNKEHLRKTDNVDSKKIAKGLKNGELNCIHIPEIELELDRQLLRNRERLIKNSTRCKNRIKAFLKLHGIEIPGTYSKGVWSKKFIAWLQQLKFQADSGNKAMQIYVTELMFLEEQKKLVDKEVLILSKSPRYNGNVTLLLTIPSIGLLTAMILLTELGDITRFKGLDELCSYCGIVPNCHNSGETERTGGLSRRGNSTLKRMLIECAWVAVRKDPALLLYYKQQISHMKGQKAIIKVTRKLLSRIRYVLINQQPYVNGIIS

SEQ ID NO: 163691 - protein, 426 aa, unidentified
MKNLDVLTTLFVGIDVGSQTNVVYAMDFHSNKLLKIKVPNNHSGAESLADAVCGLMEGTAFKAVVFAMESTSIYGVHIANFLSSCPQMLGFHPYVYCINPKLTANYRKSFVGLEKTDDRDAFVIADFARVGRITSAPWRGSQYLALQRLTRHRLHLVECLVREKNYMAANVFLKFSELATLKKSAHPFSSNFTATAEAMLTDFFSPEDIVLMSTDDLVAFLCEKSKGRFKDPESVAGILKRAATESYKLDKVLYEPLNTAIASSFNCLSAFEKETKAVDRAIERLAVGQSGNEYQILRSVPGFGPVYASGILAEIGSGSAFHSQDALAKYAGLVWPKNQSGEFDADDTPMSKAGNRYLRYYLVEAARSVSQYVPEYQAFYQKKFNEVKTHQHKRALVLTARKLVRLIYGLLAKDQLYTPNKVGGTS

SEQ ID NO: 163692 - protein, 328 aa, unidentified
MERNFVGIDLHKEFFVAVAQDSQGNQLFKERYNCTEEAVTLLVSRFAHPQSVVVEAGGNWMWFVRLLEKQNCKVQLAHPFRVKAIASARIKTDSIDAKTLCDLLRADLIPQSYIAPDTILDNRELARARISLVHDQTMTKNRVSAIMRKDNLRFQGKDTFGVKGRKWLTEQEVSQTKREVIRWYLGRLDDLKGTIVLVDRAIKQRSSSFPEVKLLQTIPGIGITTAFLLVSEIGTVTRFPNAKKFTSYFGMVPRLSQSGNHAYYGRITKLGNPYIRWALVQTAHRMVRINKKHKGFVDKLAVKHGRKKALRSIPLLYLRNPNGYSRLL

SEQ ID NO: 163693 - protein, 355 aa, unidentified
MSQEKYIGMDVHQATISAAVMDPSGKLLLECLLETKAATILEFIQGLRGTLSLTFEEGTWAAWLHDLLKPHVSRLVVCDPRKAALLKEGNKSDRIDARKLAEMLRTNQLKPVYHGEHGIRTLKELGRSYLTVSKDLTRTMNRIKSLYRSWAIPCSGNSVYAPRHRAAWLAKIVEPGVRVRAEHLYEQLDSLQPIRLQARRELLRESYKHAAVKRLRQIPAIGPIRAALLVALLQTPHRFRSKRQLWAYSGFAVETHDSGEYRWVRGKLQRNRERITVRGLNDNHNPHLKNLFKGAAISASTRPGPLQDFYLARVAQGMRPTMARLTLARKIATITLTLWKKGASFDPQQLRRQAV

SEQ ID NO: 163694 - protein, 347 aa, unidentified
MKHYAGIDVSLECSSVCVVDAGGKIVREGKVASEPAALIAWFGSLGFELERIGLEAGPLSQWLYAAMRAAGLAVELLETRHVRDAFKSMPVKTDRKDARGIAQLMRLGWFRPVHCKSVAAQEVRALLGARKLVQSKLFDVEMSLRGILRGFGRKVGPTTPRRFAARIRELVFGRATLEVIAEALLAVHAVLLEQLTGFEKRVRTMARDDERVRLLMSTPGVGAIVALTYVSAVDDPRRFTSSKAVGAHFGLTPKKYQSGQTDVTGRISKTGDAEVRTALYEAAHIILTRPVKGGALKSWGARLAKRAGMKKAKVALARKLAVVLHRMWVDGTRFNLTMPKAPVAMAA

SEQ ID NO: 163695 - protein, 332 aa, unidentified
MLTESGYRERHPQQASAKTLFDFLKKHFPDGEYHAVYESGFSGFATYYALKEYGIDCVVTHAADVPTTQYEEVMKTDKVDAAKLARSLRAGDIRPIYIRERENIDDRAVIRIRKTIQKQLSGYKSRVKHLLHCNGVEIPDRFASPGTHWSRAFIEWLKEDVVLLSPSRLSLDLLVKQVETIRQTLLDATRAVRRLARTDRYGSNCELLMSIPGIGVSVAMCILTEIYDVKRFRNENQFASYLGLIPTCHNSGGRTSSGEKTFRGNRHLGPMVIEAAWIAVYRDYGLGLAYARYKQSMKPQEAIVKIARKMSNIIFSLLKNGRKYEPYRWDKE

SEQ ID NO: 163696 - protein, 342 aa, unidentified
MSEYDGKQFVGIDLHRQRSVIVRQSESGEQLSAVRIVNDPVALGLQLEEAGADPEVVLEATYGWYWAVDVLQAGGARVHLAHPLGVKGFRYRRVKNDVRDAGDLADLLRMGRLPEAWIAPPETRELRELVRYRAKLVAIRSGLKAQIHAVLAKAGVLIAVSDLFGVTGRQRLAKVPLGPAYAQRIGSLLELIDILDGHEARFAAMIAERLDTHRGYQAIQQVPGIGPTLAAVFVAEIGDVHRFTDPAHLCSWAGLTPRHRESDTVVHRGHITKQGSKAVRWAAIEAVQRHPTTAKISADKQRIEARRGKNIAKVAAARKLLTLVYYGLRDGQIRALDRARAA

SEQ ID NO: 163697 - protein, 414 aa, unidentified
MDVVYSHCAGLDVHKKTVVACVITPDPQGKVQKDIRTFGTMTADWLTLLDWLQTHAITHVAMESTGEYWKPIYNILEGNLEVWLVNAQHIKAVPGRKTDVKDAEWIADLLRHGLVHPSFIPPVSQRDLRELTRHRANFVRERATLINRVQKTLESANIKLAAVASDVLGVSGRAMLDALLAGQSDGTALAELAKGRLRNKRDELARALTGRVKPHHRFVLTELLCQIDALDETIEHFNREIETYCVPFQEAIPLLDTIPGVAQATAEMIVAEIGTDMRRFPSADHLAAWAGLVPGHNESAGKRRSGKTRKGNRVLRTGLVQAAHAVSHTNNNYLVAQYPRLAARRGKKKALVAVAHSILVIAYHILQRKQVYQDLGGNYFDERDSEKTAQRLAKRIEKLGYQVTLQTQPTQVPA

SEQ ID NO: 163698 - protein, 303 aa, unidentified
MGGGFVGIDVSKDRLDVAFRPGGEHLQVGNDPRGMARLVRMLERSQPQLVVLEASGGYEAALFERLSAKQLPVALLNPRHVHQFARASGRLAKTDAIDAKVLAHFAEVMKPEPRRMADAETRKLRVLVARRYQLIQMMTAELHRQSHSLAALREGFVATIRCFKKQTLIQETPALREKAELLRTTPGIGVVASATLLARLPELGTLDRKKIAALVGVAPFNRDSGKLKGKRAIWGGRSDVRGVLYMSALVAVRRNPPLRDFYRRLRQAGKTPKMALTACMRKLIVILNALIKHRTPWALAVSC

SEQ ID NO: 163699 - protein, 320 aa, unidentified
MMAQNDLVVVGIDVAKDKVDACIRSLSLRGTWPNTVQDRRKLIAWLRKHKVGKAVMEASGGYERDWAKALREAGIEVRIVDPKRVRSFARSAGRLAKNDPIDAEMIAWFAETFSEAPGQAHDAAREKLAQIVNARQGLLDLQTRLKNRSEHAGPEPVQRMHARLLKKIAVEVATLEVAIAAMIKANPHFAELAEIIESVPGLAGTTSAGLIAGMSELGQVSNKVAPALLGAAPYDDDSGRHRGERHIKGGRRKVRNLFYMACLGAATQHNPVLKAFYRRLIAKGKEPKVALVACMRKLIVILNTMIARRQRWDPNLYGLD

SEQ ID NO: 163700 - protein, 472 aa, unidentified
MPVTVENQDVLLMSLTGLVSQNSQEDVVVQGSGLSRGDKRRNAKLARLRELVPTDNAILGIDLADEKQAIVLTDHDSQVLARPRVKAKAWRLGPVLRWGREQARKHGFADVTVGCEPTGHRWRVLDQLAAQQNMVLVCVQPLLTGRARESEDYTRDKRDDKDAVLIARLVAQLDCYAPERTDETWARLRHLGARRDRLISESTACVQQLRDLLECAWPAVLSAAAQPFDSVNWCAALAVVLERCNGDPRRLARLGPQGFEAAVRRELPRWGGQRAWRRIITAVFTALTDAAGVFAQRRGALERARWVLADWRTCQARLAEVETRMVEVLDELGLTEYLTSIPGISAVGAAAILAETGDPTRFDSPRALVKHAGLCPRENTSGTYTGQSRISRRGRPRLRLAAWRAVWGALPNNPVMAARYQHLTTRERNQLNDGQARAAIAAALLRWIHVIVTRRVTWDAALAGANELPAAA

SEQ ID NO: 163701 - protein, 345 aa, unidentified
MVIGVDTHKEIHMAAAVDWQGTLVGEECFPTTRQGYRLLESWARSLGDVLRVGVECSGSYGSGLTRHLAKNGFTVLEVAFPDKTVRRKRGKDDFIDAEMAAEAAFTGARTVTPKSRDGMVEALRMLQKARSTAVAARRAALQMIRADIISAPEELRDQLRGMTRMQLIRHLVATRPDSTDFKTPLGATKIALKRLAKRYVDLDDEISELDDMIDAILADAAPLLVRLKCVGAQSAAQLMVTVGDNPERLRSEASFAMLCGVAPVPVSSGMTYRHRLNRGGDRQANSAIHIIAIGRLRTDERTKEYIARKMSEGHTKMEAIRCLKRYIAREVYYVIKRQSELVNCS

SEQ ID NO: 163702 - protein, 312 aa, unidentified
MASDWGADVGKDGVVLACHGSGKVLELANRAGVLQRWVKGLEPGSRIGVEASGIHHRCLARVAVAAGHTVYVVNPRDVKHYAAGVGRRAKTDRVDARLIARYVAHEHKQLRAYREPDPRQQAIAELLVRRHAVVKGKVGLNQALGDLPGYEKVRASMEELLREIDAKLQALIDEQAGLHALCERLRSVPGVGPLLSAALGNLLMQHGFHSSDALIAFLGYDPRADDSSERRGRRRLSKRGPAELRRLLYTAAMAGARTKAWKPFYERDRARGLSSTEAMIVLARRIARTAYSIARHGTLFDPARLAGACTKP

SEQ ID NO: 163703 - protein, 406 aa, unidentified
MEVVHPRCSGLDVHKKSVVACVMVPGRKEVRTFGTVTAELLRLGDWLQEEGVTHVAMESTGVYWKPVFNVLETTGLELLVVNAHHIKAVPGRKTDVKDAEWIADLLRHGLVRASFIPPRPQGELRELVRYRKTVVEQRSRLVQRIQKLLEGANIKLSDVASDIVGVSGTAMLRALADGETDLDRLVELAKTSLRNKREQLRLALQGSFGSHQRFLLGKQLDQLEFLDRQIAELNLEVEQRLRPFEALLARLDAMPGIGPRNAEQILVEVGTDMSRFPTAAHFASWAKLCPGNDQSAGKRRSGRTGIGSRWLRSTMVEAAWSAARVPNSYFAAQYHRLVPRRGKRRAAVAVAHSMLIAIYHLIKDGTIYQDLGPNHFDEIDRQRITHRAVRRLQALGYRVVLNEVPA

SEQ ID NO: 163704 - protein, 363 aa, unidentified
MSTTDEERPGAALEVVLGVDTHFDAHVAVALDHLGRRLGVATLPTTEKGYEQLVSWAQGLGPVRCAGVEGTSSYGAGVARHLKSRGIEVLEIERPKRRQRSTSRRNGKSDHADAEAAARIVLAGEAAGVPKSGDGCVEMIHVLRAARRAAVKARTQAANQLRNLLVTAPEGLRGRLRELSTKALVATAVRFRPGDSPGNPEEATRFALRSVARRYRSLSEEIVELDVQLTRLVTRVAPGLVALPGVGTDHAATLLVAAGDNPERLRSEASFASLCGVSPVQASSGKVVRHRLNRGGNRDANRALHSICVVRMGRDRRTQAYVTRRTVEGKSKREIMRCLKRYVAREVYRILISTAAPPAPIGS

SEQ ID NO: 163705 - protein, 342 aa, unidentified
MENVSIIGLDLAKRSIQAHGARADGGVAFRKKLSREKVRAFLAEQSRCIVAMEACGSAHHWGRVIGDLGHEVRLIAPAYVKPFVKRQKNDAADAEAICEAVTRPNMRFVPIKTIEQQGCLVLHRTRHLLIRQQTATINSIRAYLAEFGIVAPVGRRGVEQLLTLIEGNDTRVPEVARACISALGVQLQALKAQILEFDRRIMAWHRSSEVSRRLDEVPGIGPALATALVASIADPKAFRSGRDFSAWIGLVPKQKSSGGKDKLGNISKQGDRYLRSLFTAGALAVIRYAKIHGTKHRPWLAALLARRPTKVAAIALANKIARMAWAMMTRGEPYREPVALAA

SEQ ID NO: 163706 - protein, 336 aa, unidentified
MSYVAIDAHQNTSTLAYLDPSTGEVGTCKIYTTHEQFIEFFARFDEPCIVAIEACRQSPAVCRWLLLLGAEVHLVDPQVLHELAKLHKAKTDAKDARLMLDALIHGYLPECYLASEEVVAARNLSRARLVLRREATRLCNLIRTWFTQAGADCPVSDLGGKLARENMSAWIAQLPSAFSDIVLKFWRLLKEVWKQLDGLDKKIKKQVRTNPVLRALAKRPGLGPILAFSLWAEIGDIDRFETAAQLHSYAGMVPKTMRSDKFQATGKLSNRCNKHLRYASVLGAQCASRCRKPNRVKETYQRIREHCGPNTAKIAGGRKLLTDVLWTWRTVLARSA

SEQ ID NO: 163707 - protein, 373 aa, unidentified
MKNTITYAAMDTHKKEHKVALHYPGQDEIRTISIRNTSSDISKMVKRILKKSPGEVRFCYEAGVCGFDLRRKIESLGCKCAVIAPSLTPIKPGDRIKTDRRDAVKLLAMFKSGLLTEVHAPDSRQEAARELTRLQQTARENLMRIHHQLLKFLTRHGYIYTEGDNWTGKHLRWLRSLEFDEPVLREVFDSYFTQMQHCMQRLDSLSKRVKQLAESGPYKKIVGLLRCFHGIDTLTAISIITEVFDFSRFSSPRDLMSYLGLTPSESSSGEKNKKGPITKSGNKRIRRLLVEVSWHHRHPYHISKALKQRRKNQPQWVIDIADRAGCRLRKRYWYLVNRGKMPCKAATAVARELAGFIWSVFKEYELRNIEKAA

SEQ ID NO: 163708 - protein, 406 aa, unidentified
MNKLNSNVACAGMDVHYKFSNVTFRDTNGDVVSRQRLDHPDRRKLRQRLAQWPPGLPVIMEASFGWGWLSDLMDEYGMKVALSNCFKVEQMRRARGGVKTNKKDADLLSLLGFEQTDWWKVWRAPSEVRNRREQMRFRADLVAMQTAVKSRIHAIFHRHGIFHDFSDLFGAKGRVFLNELCMKNTAHLSVEALAALRGQVKLLDHLRRQLADVTRVLHRQMARTPLTVRLKTVPGIGLVLAHVLAAEIGHIERFRTHKSLAAYSLLAPRSSDTGEADPRHSPQGRHLGVQGNRTLKWAWIEAAHGAVRSRGRWRDLFERVTDGGRKDRGRGYIKVARELVKVTYAVWSKGADYRDVRPTRGGSDTSTSKSKNMSKSMSKCKCKTRRKPSRSETGQLYHPMVHALTA

SEQ ID NO: 163709 - protein, 320 aa, unidentified
MMAQNEVIVVGIDVAKDKVDACIRSLSLRQTCPSTAQGHRKLMAWLRKHKVTKAVMEASGGYERAWAKVLREAGIEVRIVDPRRVRSFAQSAGRLAKNDAIDAEMIAWFAETFSEAPSQVHDAAREELQTLVKARLGLIDYRMRLVSQSEHAAPGLVQKAHAHILKSLASEIAKLEAAICAKVRSTPDFAERAEIIESVPGLAGTSAANLVAGMPELGQVSDGIAAALIGAAPYDDDSGKRRGERHIKGGRRWVRNALYMPCVGAATQNNPVLKAYYQHLLAKGKEPKVALIACMRKLIVILNTMIARRQKWDSSRDAVS

SEQ ID NO: 163710 - protein, 348 aa, unidentified
MLLYGGIDLHSNSNQSAILSEDRKRVMKRKLANDPALILSFWEPYKPDLAGIVVESTYNWYWLVDLLQDHGYRVHLANPAGIQKYSGLKHADDNHDAFWLAELLLLGILPEGYIYPKELRALRDLLRKRQQLVRVRTALILSLQNIVTRNCGTKLSADHLKSLKEDRAQVYLQENEDLLLAGSANKACIDALSREILRIEAAVGKKLKLRAPYPQLLNLPGVGRILASTIMLETGPIERFSKVGCYASYCRKVNSRWTSNEKVKGHGNKKNGNKYLAWAFGEAAERARIFHKTSREFYQRKLRQKKNAALAHGALAHKLARAAFYILRDNVPFDQEKMFGYPEEALDN

SEQ ID NO: 163711 - protein, 489 aa, unidentified
MGNARARKVPAQLVEDEDYQLRHERVAGIDIAKAKADVCTRLPPQRDGGRRASRVEEVPARAREILDLAVRLISDGVELVVMESTSDYWRIWFYLLEAAGLNVQLVNSSHARQLAGRPKTDRLDAQWIARLAEMGLLRPSFVPPPEIRALRDLTRTRLMLVRDRTREWQRLEKLLEGALIKLSSAVSSLARTKTARAILEALADGERDPKALAALAAAQVKGGRAAIERSLDGMMTGARHPMLIRAHLDHITLLDRTAAAIEDEIEAALGAIPAARGITADGVPSADPGPDAAALPAAERLAEIPGVSLMLARAIIAETGLDMTRFPAAAHLVSWAGLAPVARQSGPRSRKPGKGQGDAYLKGYCTQAATGAATTDTFPGERLRRLSRRLGGSRARCAVGRSILGQVAGARYRAPAPSEPDLPVIPASGSSKPLRTLRVAAAVLCPCAAGPCGRGCRRRVPGLWRSSRSARRPARVSLARRVRAGCPGA

SEQ ID NO: 163712 - protein, 356 aa, unidentified
MPRIAEQELLVTGGVDTHADTHMAAAVDQVGRVLGTEQFPATAAGYRAALAWLRGHGELAKVGVEGTGSYGAGLACYLAGQGAEVVEVIRPNRQARRRRGKSDAADAVAAALAALNGEASGQPKSHDGAAESIRMLRVARCGAVKARTKAGNQLRDLVVTAPETLRQQLAGLPRERQVELAARFRPGDLAGPAEGAKAAMASIARRYQELTAEIARLDAALGELLTRAAPKEFMAKKGVATQVAATLLATVGDNPGRVRKEASFAALCGASPVDASSGKQERHRLNRGGDRQANSALWRIVMTRMSCDPRTKTYVARRSAEGKTKKEIIRCLKRYVAREIYKALCRRGQPGRPPAA

SEQ ID NO: 163713 - protein, 392 aa, unidentified
MVVSVGIDVSKDKHDCFILSSEGEVLADVFTIPNTMDGFNCLLQRIQDCTGPQDKIKVGLEATGHYSYNLLGFLLDNGLTTYVLNPLRTNLYRKSLSLRKTKTDRVDARTIASMLLSDAGLKPYTSTAYHNEELKSLTRYRFDKVKERAKLKSSIARLVCILFPELEKLVPSLHIASVYALLEEFPGAKQVASAHLTRLKALLETASKGHYKRDMALEIRNAAKNSIGSQMPAKSLELQHTIRLIHELDAEIEEIEEQIQSIMDELHSPITTIPGMGFRMAAMILAEVGDFSRFDSPDKLLAYAGMSPSTYQSGQLKNCYPHMEKRGSRYLRYALYNATKYVCHWDTNFAAYLARKRAEGKHYNVAISHAAKKLVRLIFAMEKSGSPYHLTV

SEQ ID NO: 163714 - protein, 331 aa, unidentified
MTITTVGIDLAKNVFAVHGVDQNGRTVLVKPKVSRAALPELIASLPPCVIGMEACSGAHYWARLFRQYGHEPRLMAAKFISPYRMAGKSGKNDAADAQAICEAVRRPHMRFVPVKDESQQAMQCLHRTRQGFIEEKTATYNRLRGLISEFGVIAPQSADALRHMVSVQKSSLPLQVQQCVDDLMEHVDRIEANITEYDRILSHIAKTDHRSQRLMELKGVGPTTACALVASIGNAHDFKNGRQLAAWLGLTPSQYSSGGKSKLGRITKAGDSYLRTLLVQGARSVLIGAGKRTDSFSHWVCSLVERRGYWRAVVAIAAKKCKAVLGIIALR

SEQ ID NO: 163715 - protein, 341 aa, unidentified
MDYFAGLDVSVKETSVCIVDDAGKIVREARVASEPEALLQVLTLYRFKRVGLEAGPLSQWLYSVLAEAGLPVICVETRHMRAVLRAQINKTDRNDARGIAQMMRAGLYRPVHVKTLRSQKLRMLLTHRKLLQSKAIAIENDLRATLRNFGLKVGMVGTVKFEARIKELVENLPDLAILVEPLLTVRRVLREQITVLHRRLLAIVRDDDVCRRLMTVPGVGPVVALTFRVTVDVPARFRNSKAVGAVFGLTPSKYQSGESDRTGGISRCGDEMMRAMLYEAAQILLVRSAKWSWLKAWAMKIARHRGMKKAIVALARRLAVIMHRMWVDGTEFRWTREVAAA

SEQ ID NO: 163716 - protein, 370 aa, unidentified
MTSMPEPTPIDRARDEREEVVLGVDTHKDLHVAAVLSGLGALLATRAFPTTAAGYRGLVAWARSFGALRRAGVECTGSYGAALTRHLQAEAIEVVEVNQPDKATRRKRGKTDAIDAEAAARAVLSGRATATAKTSNGPVEAMRVLRMARNSAVNASTKAINQLKAVLVGADPALRDSLAGLGPATLVRRCAELPDPTPGSGLSEVDRAVVFTLRTLAARIMALKAEAYQLHKQLRALIAAHAPELLERRGIGPDSAAALLIAAGDNPERLCSEGSYAALCGASPVEASSGKTQRLRLNRGGDRQANAALYRITVSRLRWDSRTQDYLRRRLTEGKTRREAIRCLKRYIAREIFTLITPKAATALANQTAA

SEQ ID NO: 163717 - protein, 457 aa, unidentified
MCLEDRPVLEPNAAGVDVGAREMFVAVPPGRDENPVRVFATFTEDLERLTDWLEQCGVTTVALESTGVYWIPLFEILEQRGIRPCLVNARHMKNVPGRRTDWHECQWLPFLHSVGLLRAAFRPGQDVCAVRTLLRHRSELVSAASQHVQHMHKALTQMNLQIHHVISDITGLTGRAIVDAILAGQRDGAELAKLRDPRIKADTETIRKSLEGNWRPEHLFTLGQSRDLYRIYQQQIVNCDLEIEKMLQGFAPRIDPGERPLPTDRKRNRAGSTRRRKNGHPHPEFDLRTEAYKLFGVDISQIPGVEENALPRFSEVGRDMSRWPTAGNFISWLALCPDNDISGGKLLWRGTRRVKNRAGHLFRMAAYALHRSLTPLGNYLRRMKAKLGPQAATMATAHKIAVIFYTMVKNQVEYNETLWATRDAQREKRLEAKLKRQAKRLGYELVPIEPKAAERTG

SEQ ID NO: 163718 - protein, 338 aa, unidentified
MKLYGAIDLHSNNNVTVVIDEQDQVVYQKRLPNELPLITGQLSGFRDRLQGIVVESTYNWYWLVDGLMEHGHRVHLANTAAIQQYEGLKYTDDTSDARWLAHILRLGVLPQGYIYPKEERAVRDLLRKRSQMVRQRTTNLLSIQNLITRNTGSSLNGNRIKTLDTEQVDELLPNPDLALAVKANLAMIQCADGQIDILERTVTERIKLRAEFSFLKTVPGIGQILALTIMLETGEIKRFPTVGDYASYCRCVGSQKLSNGKKKGSGNTKNGNKYLAWAFVEAANFAIRYNARIKSFYQRKKAKSHGVLALKAVAHKLCRACYYIVRDQVAFDVTRAFA

SEQ ID NO: 163719 - protein, 389 aa, unidentified
MFYLGIDIGKNTHVASLVDDKKKVIFKAFSFSNSIDGAESLILKLEAFKNELEVAMEATGHYWLSLYSYLVEKNFTVRVINPIQTDGWRQGIEIRKRKTDVIDSILIADLLRYGDFVETSLSNEDYLSLRNLSRFRSYLISSIGDLKRKTIALLDQVFPEYASSFNNIFGKTSKEILSNFSTPSDFEDINSDDLNTFLESVSKKNYASKKIDELSKKASSSFGINFCLDSFSLQIKMLIEQISFIQNQVSNVENEIEVLLEKLNSPITTIPGIGSVNAATILGEIGDIKRFSNPSKLVAYAGLDASISQSGEYESTYNHMSKRGSPYLRRALFQSALRAEFCDPVFSDYYQKKISEGKHHLVATNAVARKLCHTIFAVLTKDEPYQVQN

SEQ ID NO: 163720 - protein, 423 aa, unidentified
MLGVGIDWAEEFHVVALGHLGEGVIEVLRVEHRPQAVAALVARIAGLEPDPAEVRVVIETRHGLLVEALVEAGYTVLPVNPQLVSRRRGPARKKDDAEDARICCLIALDRHAGLRRLIPHGELAGELRSIARDDERACRDERRLLNRLRADLLVTFPAALAIAGEDLGATRILRLLERWPTARSLAAASREEIIEFGRAQRTGYLARFADKIQAALAEDHFTAPEHLVRAKVDTIRLTARQLLLIDTQRRAWEKRMGELLLGPHASQQEAGDQPGQAFPGGEIYLSFPGLGRRLAARIAGEIGEHIEQFTTPNSLQCYAGRAPVTRRSGKRDLVVAHRLACNRYLADAVHKWAFASLRRSTWARDFYDTQRARGKNHHAALRALGNRWLEVLWHCLTHDVPYDEAVHAANRNRALAAVTSSAA

SEQ ID NO: 163721 - protein, 341 aa, unidentified
MSFFAALDVSLETTSICVVNGEGTIIRECEVATDPDAIAAFLSTSEQPLLRCGLEAGPLSPWLYRELARRNLPVVCLETRHAKAVLGAMRNKTDRNDARGLAQLVRTGWFRAVHVKSTESQELRMLLTSRKLLHGKCLDVENQIRGLLKAFGLRVGPVARARYDARVRELLANQARLLMVAEPLLRARAALLKEFNTLHLLLLRTARKDAVCRRLMTVPGVGPVSSMTFKTGVDDPTRFSRSRTVGAHFGLTPRQYSSGDIDRSGAISKVGDPMVRESLYEAAHIMLTRVRAHLAMKQWAERLIRKGGAQKAKVALARKLAVILHRIWSDGSVFDPHAATA

SEQ ID NO: 163722 - protein, 338 aa, unidentified
MNITRIGIDLAKQVFQVHGVDRNGKVGVRKQLRRAQMLTYFGKLPPALIGMEACGSAHYWARELSKLGHDVRLMAPQYVKPYVKSGKNDANDAEAICEAVGRPNMRFVAVKTVEQQVMQAEHRIRSRLIKARTALSNEIRGLLGELGIIVATSLGQLRRALPEILEDGENGLPGSFRRLLAGLGDELRALDATVKEYDTRIAQMAREDERIKRLLAVEGIGPVVASALVAAVGDAKQFGQGRDMAAWLGLTPRQHSSGGKNRLGSISKRGDKYVRMLLIHGARAALKAAENKEDGRSRWVTGLAKRRNKNIATVALANKNARIAWSILSRGESYRAAA

SEQ ID NO: 163723 - protein, 425 aa, unidentified
MNYKQNEKINQVKESTLVVGIDIGSTTQYARAFDWRGIELGKVFTFSNSREGFESFKAWMQHLQDKYRKSDVIVGIEPTGHYWFDLGAYLEDEGILLVMVNPYAVKQTKELDDNSQSKNDRKDPKVIAKLVTEGRYSAPYTPDGVYADLRIMVANRKRLIREMTQIKNRFARWFAIYFPEYTDVFGDYEAQSSMLLLKKVCTPEAIVELGAEKINQIWRDAKLRAVGMKRATTLCETAKRSIGLKKGSSAARYEMKLLLEDYEYKKAQLDAVMEEIEKLCRKIPESEQMLAIKGIGVITVAGFLAEVGDVRRFESPRQIQKLAGLSLRENSSGKHKGQTTISKRGRSNLRAVLFNAAIPLIAKNPEFKSLHEYYTTRANNPLKKKQSVIAISCKLIRVFYDILANGVTYDAQKMLSDIHRQLQAA

SEQ ID NO: 163724 - protein, 415 aa, unidentified
MKLFVGIDVSSETLDTCFLNDELDVLHEESYPNDTLGAFDLKTQAIKLHKRFDFQSIVIGMESTSMYSFHPAMYFQMDDELKKIGVHTTIEDPHRIKQYTKMYDMDKTDPIDAFMIADYLRIQRYMNSPVREEKYMALQRLTRARYQMVKQLVETKQHFIENLSYKCNTLKKELRDSDGSTTIFSATIMSLLTDDMSLDDMLQMPLENFAQLLQEKGRNFKDPEALAKTITKAIRSSYRLGAVMDESIDIVLGILVREIRSLESAIKDYEKAIIDLVESIPEYQCLTSIPGVGLVYAAGMLAEIGQIERFDDQAKLAKYAGLNWKRSQSGRRESEHTPLTKKGNRYFRYYLVEAANSVRRHLPEYRAFYQKKYAETPKHQHKRAIVLTARKFVRLVDTLLRNHQLYTPPRGYEDK

SEQ ID NO: 163725 - protein, 330 aa, unidentified
MGANKNRGRNSNPLAEEERLSIGIDVSQDYLDMAAYPSGQIWRYKNNRSGIAKIVAKLEVLNPKIVVMEATGGLECNLRQALDEAGLAIAVVNPKRIRDHGRSMGMLAKTDKLDARVMAHFAAKIEPKAQSPRSKAELSLDSLVTRRSQLSDMLTAERNRLKEHLDQAVRADIQEHIRWLEAKIAILDKEVRQRVRQDASFKEKDKLYQSMSGVGDVLSSTLIAKLPELGILNQREIGSLVGLAPMNRDSGKLRGRRMIQGGRAMVRKALYMPVLSAIRFNPAIRRLYLRLIAKGKLQKVALTACMHKMLTILNSMAKNNITWRRADAKV

SEQ ID NO: 163726 - protein, 343 aa, unidentified
MQTITTIGFDIAKSVFQVHCVDAEGKVILRRQLKRRYVLAFFQKLPPCLVGIEACASAHHWSRELQALGHTVRLMPPAYVKPYVKRHKNDATDAEAICEAVTRPNMRFVATKTPEQQSCLTLHRTRHLFIRQQTMVINAIRAHLAEFGIVASVGRNGVEQLLGVAADSNDKRLPEFARACVAALGAQLRMLKAQILQFDRMITAWHRSNEASRRLDDIPGVGPALATALVASIADPKVFRSGRDFSAWIGLVPKQNSSAGKDRLGSISKRGDRYLRSLFTTGALAVIRYAKIHGTRHRPWLTALLTRRPTKVAAIALANKIARMAWAIMAKGERYKEPAALAA

SEQ ID NO: 163727 - protein, 317 aa, unidentified
MNNATPITAGIDTAKAKLDVAIHASPVRLTVDNKPTGYKRLSAELRLAGVVRVGIEASGGYERGVIKHLREEGFEVILMQPLQVKAFAKLHLRRAKNDTLDAALIAACAAIIQSHATEEDKRLQPLADALTFVEQLEEDIVRFKTRLEKTANPQHARMLRDDIKRQTTRRRAELARIVATLRKHTDLARRLELVQSIPGIGERTAVAIVLRLPEIGTISREQAASLSGLAPFDDDSGSRRGLRHIAGGRERLRRSLYAAALPAAFHWNTALKALYQRLIAAGKPHKLALVACARKLIIYANTVVQRDAPWKCKTATI

SEQ ID NO: 163728 - protein, 316 aa, unidentified
MLSLVPVAGIDVGKHFLDLGFHPAAKPLRCDNTPAGIERLIAALRPRGVLRVALEAIGPYAHPVTVALAEAGFAVALVDPRRVRAFRTAEGQIAKTDRLDAALIARFAQRMPEHLHPAPALDQVRLKALSTRRRQITELIAMEKTRLAQALDPLVADSHRTVIKTLEGACAAIEAELDQRIGADPALARRRVILTSIPGIARRIATVLITDMPELGALDRKAAASLAGMAPHPTQSGGHPGRHAIAGGRPCLQTAFYMAGMVAARTCPTFKLPYRAMRDAGKPAKVAIVATGRRLVVLANALLKDDKTFAESNLMA

SEQ ID NO: 163729 - protein, 481 aa, unidentified
MSQQEKRTNQPGEEKTAVGRGKRGRKRKGMCLEDRPILEANAAGIDIGAREIFVAVPPDRDEHPVRVFSTFTEDLEKMAEWLVSCGITTVAMESTGVYWIPPYDMLEQHGVKPCLVDARGMKNVPGRRTDWHECQWIQFLHSVGLLRAAFRPDGDVCAVRSVMRHRTELVEMTSQHIQHMHKALTQMNVQIQHVISDLTGVTGLAIVDAIIAGQRDPVALAKLRDPHIKASEEAIRKSLVGNWRPEHLFTLRQSRKSYQHYQEQIAACDEEIERLVLAFVPRVDPAERPLPPDRKRKQRGRKKKNVNPKTGFDLRTESYKLFGVDLTQIPGLMAMVLTLFSEVGRDMSRWPTAGQFVSWLALCPDNDISGGRVLWRGMRRVHNRAGDLFRMAAYALHHDQTPLGDYLRRMKSKLGPAGATTATAHKIAIIFYTMVKKQVEYDGTIWEQRDAQREKRFEAKLKRQAQQLGYKLVPIEEKPAA

SEQ ID NO: 163730 - protein, 415 aa, unidentified
MALKIVYKICCGIDVHKNFVVACIAKTDKQGITTYERHHFSTYTKGLKQLLKWLLDRNCKDVCMESTGKYWIPVYNVLEHDCSIVLAHPKYVKAIRGKKTDKKDAKWIADLFKHDLVAGSFMPPADIRQLRDLMRYRFKLTCFMSSEKNRLQNCLTVSNIQLASVVSDTFGKSSQRILDKILENPDDTSFDIEPLIHGSMKKKLPELELAIDGFITPEQAGKLKVIKKHFEDLESRKAELEKLILALASPYQQELDLILTAPSFKNKFTAIGIISEIGVNMEAFPSAKHLCSWAGLTPTNNESAGKKKSVRVSKAGCYIKPLLVQCANSVVKSEKHPEIRNRYLRLRKRRGHKKAIIAIARMLLTALYNMLKNKEPYNAELYRKSDVLPVNREITIEQAILMAQFQGYKIKSAAE

SEQ ID NO: 163731 - protein, 412 aa, unidentified
MEVLHARCCGLDVHKDTVVACLRLASGARPITEVRTFDTTTASLLALSQWLTENGCTHVAMEATGVYWRPIWSILSDGEFELLLANAAHVKNVPGRKTDVNDATWLAELLAHGLIRASFVPDPPTQELRTLLRTRKQLVRERTRHVQRVQRTLEEANIKLDSAITDVMGKTGRAIIATIIAGETNPTKLAALADPRVKSSQQDLCRALHGRVKKHHRFLLRLHLQQIDALDAAIAQIDREVDANLASFRTAIELLTSIPGVALLAAQIIVSEIGMDMTRFVTDAHLISWAGLCPRNDESAGKRRSTRLRKGAPWLKTTLIQCACAAIRKKGSYLQAQFHRLRARRGAKKAICAVAASILTAVYHMLRDGTSYHDLGPDHFHRASKQKQTQGLLKRLTALGYAVTLTPLATTA

SEQ ID NO: 163732 - protein, 386 aa, unidentified
MRREFAVIPHKVEGIDEWARSLHRRFSGPIAIALELSKGPIVYALQKYDYFVIFPINPSTLAKYREAFQPSRAKDDPTDAELALDLILRHPERFEPLQPQSVEIRKLAALVEQRRRLVSDRVRLTNRLRNTLKQYYPQTLEWFDRINTKLFCDFIERWPTLMQVKRARTTTLVNFFRAGHTRNPALLETRLASIRSSQHLTLDEAVIAPNKLHALMLVGMLRVILDAIKTYDQTIAELAPKHDDYDLFSSLPGAGPSLAPRLLVAFGEQRNRFKNAAELQKYSGIAPVTERSGTKHWVHWRWRCPNFVRQTFVEWAAQTINKSYWAGEYYRQQREKGSAHQSALRALAFKWIRILYCCWQTRTPYDEATYLKALQRRGSPLVAKAV

SEQ ID NO: 163733 - protein, 417 aa, unidentified
MNVYCGLDWAEHHHDAALVDETGALLAKKRITDDAAGYRLLLELLAEHGDTPENPIPVAIETSHGLLVATLRTGSRPIYAVNPLAAARYRDRHAVSRKKSDNGDALVLANILRTDMAAHRPLPRDTDLARAITVLARAQQDAVWARQQLANQIRSLLRNYYPAALDAFLGKQNGLIRPDTRIILTAAPTPARAAKLTITQLQAALRRAGRVRGVATEAERLKEVFRGDYVRHPVAVEDAMGLQLTALLLQLDAACRAADQLATAVEEAFLKHADAQILLSFPGLGVQLGARILAEIGDDRARFADARALKAYAGSAPVTRASGKKTYVGRRFVKNDRLMAAGFLWAFAALQGSEGANEHYRRRRSAGDWHAAAQRNLFNRFLGQLYHCLQTGKPFDEAKAFIAAATGPTPLSPVGQK

SEQ ID NO: 163734 - protein, 424 aa, unidentified
MKVTYQTCCGVDVHKSFLVATIVKTTGGIEPSYQKKRFSTFNNSILEFKQWLLDNHCHDVCMESTGKYWVPVFNLLEDKINVVIANPKWVKAVKGNKDDTKDSKWIGDLFRLGLVKGSYIPCKAVRIMREYTRYRYKLVSCRSSEKNRYQNALTVCNVALDSVVSDIFGKSSTSIIDYLLEQSGTSINHEEIASKLLRNLKSKEDAVIESVEGYQMTDTQKYRMRLVRAHMDYITAEINDVDKMIENMISSNPDFENAVQFLCTIPGVKRDSAITIISEIGTDMSQFSGSKRLCCWAGLTPGSNESAGKKKSVWITRAGVYLKPALVQCAHAAVKSDKSPYYKKKYEALVKRRGKKRAIIAIARMILTAIYQMLSTGEEWNPSNLYKIDMPVALVEKQKAKAIRQAKKLLQREGTLPPDKPLAS

SEQ ID NO: 163735 - protein, 344 aa, unidentified
MNSTTIAVDVAKSVFEVAVSEYPGQVRERHRLSRGRFSRFLAEHPPATVVMEACGSAHHWAREAQSRGHRVILVPPHAARPYVLRNKTDRTDAKGLLEAFRNDDLRPVPVKSETQQALAALHRLRSTWVATRTARLNTVRGILREFGVVIPTGAHHVVPHVRALLEDADAGVPGLLRVPLSEAIREIGELEERILAIERQLARTAEPALLIGRLRTIPGIGILTATALVAAVGDVQRFPSGRHFASYLGLTPREHSTGQRRHLGAISKQGDTYLRMLFIHGARSVLHHAKSKTAPATDRLRTWALQVERLRGHNKAAVALANKLARIARAVWRSGNDFTAAAAV

SEQ ID NO: 163736 - protein, 401 aa, unidentified
MEGPIVSIDVSNGNSHYMCFIKNNKRFGKVKKIDHDIEGFKRLLEDIQKLEAETNEKVCAVFEATGVYTKPLERFLSKNSIKTYMINPLESARKRKEEIHNKKTDKLDPISISKVYYDKEEMMELKKKDETYNWLRKKNRLYEDQLNHLRKYKVTFQNQLSICFPGYLDLFKDGYSDIPMTILKKYPHPDLLKNKKAETVARYLEKNTCHNHKVSLEYALKIIEFAKKTYPGCEKDDVEVEIFKILLDKVIETQRECEKTLNEMITVASTLEEYRYILSIDGIGTNLAARIIAEIGDIEEFKSREALVAYAGLDPHIYQSGDQDGKHLKISKKGNKYLRCLLFLAVGCSIRGAKDNPVNRFYQKKKQHSSPLNSKATKTACTAKLLKIIYGICKNKTTYER

SEQ ID NO: 163737 - protein, 337 aa, unidentified
MEQLVIGVDISKGNFTSAEWVNQQARELPEQSNDRVGFTSFGAIVNERQSVNTAKSVLLVLEPTGGYEEALVAFAYEQGWQVALPNPKLVRDWGKGIGKRAKTDRMDAKLLAQFGVEQRPKPQPALAVEVSELDHLLARQHDLEGLLQQERNRLSEIGCRPHVPKGVIASLESRVQTLADALAQIEQLIQEQLNAPVALKQERQRLQTAPGIGPKNSLPVLVLLHRWQTLTHGQGSDKGLTAYVGLDPQPYESGASVYRRASISKMANSEIRRLLYMGALGAMRGKNPLRTFYDRLLARGKAKKLALVAASRKLLIYAWKLFSSKTSWNPDFHPLPS

SEQ ID NO: 163738 - protein, 485 aa, unidentified
MKPRVYAGVDLGGKFHQVQVTNAAGERLGKSFRIGRGKAGLAELDAGLRRVAGEEVEAVYTIEATQNYWLELVHPLQRAGAAVYLVSPSKSTALRTFYRRHTKNDAIDAEALSRLPVVDPRLRAATESTPKWDMLRRLVRHSWLLKGQMANRKRRIMGRVLMVYPGYETVFRNRYCGSSLLFFRRYLDPAKARRLGRRRLSVLMRKRAMGKFDEIRAERLWQVIENAPELNLCYDDLQLLVNQDLDLLEAEEKSQQALRERISELYGELDPNTRLTSLPGLGDYLAAAITAFIGEPGRFTNADQVVALSGLCARLKSSAGTDTSNQPITQHGDPVLRGCAYLAAEISRHYDPELRAFHRRLTARGKHYKQASCALAAKILRRCFALLRDQRDYQVAHQEHLTRSRNEEGKTIRESVHEVAERLNDVAGVPSPGAKARPATASMQPQAGDPAGSRGNRKRRMPAQPRTRPSTTCDSGLIETERSLS

SEQ ID NO: 163739 - protein, 331 aa, unidentified
MIIIGCDFHTRYQQIAMANDETGELLLERRLDHESGEAHAFYRGLQGPVRVGIEATGPIHWFERLLAELGHELWIGDSAKIRASEVRKQKTDERDARLILDLLLAKRFPKIWVPTPAERDLRQLLWHRHKLVCLRKLFTKKGRTELTGLALGPWTRRRREELLKLLDQLDPAIAELDRAVLEEAQRRDDAVLLMTHPGIGPVTSLAFVLAIGPITRFPRSKKIASYLGLNPSEESSGQRRRTGAISKQGNTMVRWLLIEAVYPAVRKDLALRQDYQRLKFRRGHAVAKVAIARKLAVRMYWMLRSGAAYAQLVRRQGSPAATLVDANPSLG

SEQ ID NO: 163740 - protein, 406 aa, unidentified
MKHNAFIGLDIHKKTIVWCAKDARGRTLGEGTINATRRALADWCAAQRRPWIGAMEATLFSGWIFDFLQPHARQLKVAHPFRLRAIATAKKKNDRVDAAMLADLLRCDLVPECVMAAPEIRELRRVLRYRRLAVEQMAKMKNKTAGLLMECGVEYNKKRLHGKKYFAALLEQSGSELPDSVRDLMVLSRQAMEMFRDTSRRLTAGLREHPLLAERVERLMTIPAVGEVTALTWALEIGDPTRLGSIARAISYCGLCSAQRESAGHAQRGPISKQRNRPLQSVLVEAAKLAPRLSPELDRLHARELTRGGRNRATLAVARRLVAWLLAVDRRATPFQTRPENANEFSDHAMTGQKTKAPKADAGPVSGAPSHGAVVALQQSAATTIVPRHASVGKRKIAAASRRRPD

SEQ ID NO: 163741 - protein, 324 aa, unidentified
MFVGLDVHKNYLQAAVVDERGILLKEQRIPNDIREIEKFFADMDDAKIVIESSSAWYHIYECLSKRFRVILSNPLKTKAIASAKVKTDRLDALTLADLLRGGYIAESYVPPRRIMDLRGMVRHRAGLVKIRTSLKNRIHAHLLMHGVKIEGTPFTRAYMDKLRVIHDYRIDGYLNVIDALNREIDQVSRKITVEAKDDEYAQLLRTIPGVGYYSALLIISEIGDIERFPDSAHLCSYVGLTPSTHSSGGVTYHGNITKTGSKHLRWILMECTQTHIRTEPDSSITRFYNRLVKKKGKAKATVAASMKLLKVIYWVLMEKRPYHS

SEQ ID NO: 163742 - protein, 350 aa, unidentified
MTAKKGYIGIDAHARNSVMGWRDGRGKYQGAQRFETSESNLLKHLQDIPAQEKHLTIEEGPLAGWIARTLMPHAKRILICDPKKNTSIQRDSNKNDLADTEELSRLLWLNQLTEVYHPADDERAIFKAAVQQYLDLRNEQVRMKHKIKAKYRMWGVSAVDGMKVYGPKNRRSFLEQVQQPSIRHQLQRLYVVMDTAEEQMEKSFEEVRALGRKYPEIQEFLKIPGVGPVGSHVFDAFIQTPRRFANKQQVWRYSQLAIRDRSSDNKPLGFRRLDYNGNPELKAMSYWAWMGALAREEDNEVKRLYQASLERTHNHVHARLNTQRKIIAVMWTLWRKQEAYKPELFFLSPT

SEQ ID NO: 163743 - protein, 379 aa, unidentified
MGHHSEAFVGIDTSKLRNAVAIAEAGRRGELRYLGEVDTRETATRKLVAGLAAKYRKLTFCYEAGPTGYGLQRLIESLGHTCIVAAPSLIPKKAGERVKTNRRDAEGLARLLRAGELTAVWVPDERHEAMRELTRARDASRQDLTRKRQQVSSMLLRLGQHYPGIRTWGARHRAWLANQKFVHPEQRLAIEELLLAERQAGERIARLEQAIRSAVADWSLAPVVPALQAMRGIDLVSAVTILAEIGDLSRFASPRQLMAYLGLVPSERSTGESVKRGSITKAGNGRARRVLVEAAWAYRHPPRVGYEKQAQVAAAPVRAREIAWKAQVRLCKRFRTLSRKGKKSTVVATAIARELAAFIWAINREVSGQIKTAETSRRA

SEQ ID NO: 163744 - protein, 463 aa, unidentified
MRRSIGIDLGVTSSSRIAVADGATILSNRRVRSTPSALTSAIEQASDGRPVDIIVESTAMTWFVAGVAAEPSGVEHTLHRVSGRKAAALRTFYRAHTKTDRIDAPVLARMKQVDDALLEFTLPSASELALKRLVTYRQRLQREATKAVSRGRSLLHWAAPRVLDAASGTSNGLLRVLRRWPDLRKLASAYALTIAREGGMSREQARDLRQCARDGVAFYGERVDYALLALEIDLGLAHHASLQQHLARLDEAIASEYQRTYPNDVLQSIPGVGAIVGSVVRASVGDARNFKNASAFRAYTGLVPREDSSGDAQRRGRVSKAGPNLLRWALYLAADTARKHDPQLADLYRRLMVERGRHHNQALCAVATHLADRIYALLRDDRPYQPRALDGTLIEATEAKRIAASLAVDPETRKRLRVLNKREEGPRGPGSRQPKAPHDTSRPSNTSLSKTQAPVPSRGVDTA

SEQ ID NO: 163745 - protein, 411 aa, unidentified
MEVLVERQSALDVHKAQVTACVRLPQEGGGRRELVEQFSTTVPGLLALADWLAAHDVKHVVMEATGDYWKPVWHLLEEDFELMLVNARHVKQVPGRKTDVSDAAWLCRLAEAGLLTASFVPPKPIRDLRLLTRYRRTQIAERKREAQRLHKALEDTGIKLDCVATDILGKSGRAMLDALVSGTTDPEVLADLALGKLRKKIPALKDALQGRFGPLHALLIGSILAHLDFLDEHISGLSAAIEEQIAPFAAARDLLMSIPGVGQRTAEIVIAEIGVDMSCFPTAGHLASWAGQCPGNDQSAGKRRSGRTRKGSKNLNLALKDAAIAAIRSNGTYLQALYRRKRPALGHGRAVGAVKHAMLCACWHMLSTGELYNDLGGDYFQRRDPERQTKRLVAQLQRLGHTVTLQTANAA

SEQ ID NO: 163746 - protein, 376 aa, unidentified
MKEHTRKMKRQNSNANTTAASKAASKKEEFAFYIGIDLGDKNCEVCVFNPAGEHKESFRLAMKSADLQGYFATIGRSRVAIEAGGQSRWVAEVIEQCGHQVYVSNTRKVAYIHASDDKDDPGDAYKLAELVHFKPRLLHPIQHRSREAQADLSWIRAREVLVESRTQLVNAVRGISKAFGERLAKCSTEGFTAKLATQVPEAIRGAVAPLLETIDHLNDQIRYYDQMEEHIARERHKKYWLLQQVNGVGVHTALSFMLTIGDAERFEKSRLVGAFLGMRPRKKDSGESKPQLGITKAGDEYLRKTLVNCAHYILGPHGADSDLRRYGQRICERGGKNAKKRAVIAVARKLAVLLHRLWVTGEVYEPLRNSKKPVAA

SEQ ID NO: 163747 - protein, 320 aa, unidentified
MMSEIVLGIDVSKKTLDAALIIENRTLCKQFQNSCDGFKELAAWLAFLKITCLHACLEATGVYGEAIALFLHESGHRVSVVNPLRIKGYASANMQRNKTDRLDARLIASFCRTQKPDAWQPPSEEVKQLQSLVRRVEVLAEMLQAEENRLANAASEIKPSIGRIIGLLTEEIKELEQQIKRHVDQHPNLKEQNQLLQTIPGIGRRTANLLLSEIEFERYSSARSLAAQAGVTPRKRQSGTSLKQTSLSKLGNARIRRALYFPAIVAKQHNKIIREFAERLKKNGKTPMQIVCAAMRKLLHIAFGVLKHRRAFDASLAFSA

SEQ ID NO: 163748 - protein, 410 aa, unidentified
MRIIALDVHRSFAQVAILENGKLRDAGKIDLDRNRLLQFAKKLKSDDEIVIEATGNTSAIVRLLSPFVGRVVISNPILVRAIAWAKVKTDKIDAATLAKLHASGFLPEVWMPDEETETRRRVTAERTQLVSQMTRLKNRIHSVLHANLIPPYKGVLFSKRGRAWLEAQPLSEDQRRVVLRHAGELDRLGAELAEVEKNLAQKALDEPLVKRLMTIAGVNAIIAISVLAAIGDIQRFSSPQKLVSYFGLNPRVRQSGDRPAYHGRITKQGRAHARSMLVEAAWVISGAPGPLRAFFIRIKDKRGKQVAAVATARKLAVIVWHMLSKNEDFIWNRPALSQWKLRKLDLAAGNPSRRGGKQKGPAADYSKKSVRDSEREMIGDAEEEYRRFVATWKTQSPKGRSGATNEVRRS

SEQ ID NO: 163749 - protein, 418 aa, unidentified
MKYAPIRVLPDVPPGGVCAGIDWASAVHAVCVVDVKGQVRDRFTVDHDKGGIAGLIARLRGHGACEVAIERGDGVLVDMLMAAGFTVVVITSRQVRNLRSRYVASGAKDDGFDAYVLADTLRTDRARLRPLVPDSPATAALRQAVRFRKDLVRDRVRAANRLRAHLQTAFPGAAGLFSALDSPLSLAFLAAFPSRQAAARLDERAIAAWLATVPHRGRAAPAAVLAARLAGAAPGTGDDAAQAAVTIQMAGAAADAAARIRALDAHIAAQLDAHPDRHVFASLPRAGTVRAARLLAEIGDCRARYPDPQALAGAAGVSPVTRRSGTWISHHFRWDVSAHLRDALCDFAADSRRASPWAAALYDAARARGKDHPHAVRILARAWIPVIWRCWQDGTAYDPAKHNALQNTLARQDATHQH

SEQ ID NO: 163750 - protein, 342 aa, unidentified
MKNIIIGVDLAAKVIQVCVYADKKVQSNREMTPKQFSAYLSNLSPSLVVFEACASSNYWNQIATSLGHTSKLISSRLVKAVRQNQKTDKNDALAIIQASQLPEVTFVSGKTNSQQQAQSMLKLREQAVKQRTALKNQLIGLMREFNLPVSRNHQGFTQSIELILEDAANELTVDFRHMLKVSLDLYLVLCEAIDTYDRSLDQWIRSIQECRKLMKIEGIGKLNAIHLYIALASGELGQFKKGKDVSACIGLTPLQHSSGGKAKLGHIDKRKNSTLRSLLITGAMSVVQQVVKRDAKTKKEQWLQALVVRRGKKCAAVALANKTVRTAFAMLKSDTEYRASML

SEQ ID NO: 163751 - protein, 424 aa, unidentified
MSSDLEIAAFIGLDWADQQHVIRLRVAGSAPVESQLLDQKPETLRSWIGQLRQRFGGRPVAIALEQSRGSLLYALMNVDFLLLYPVNPQNLAQFRKAFYPSGAKDDPQDALLLLEMLEKHRDRLRVWVPDDADTRCLRLLAENRRKLVNRRTALTNQLTSLLKESFPQALDWAGPLDSVRACDFLEPWPSLPLLQKTSTSRLRKFYRDHTRLDSDALHLRLDQIRQAQPLTRDSAVLAAAELMIPALVRQLRCLIESIQQFDQQLKDRFLQHDDYTLFHSFPGAGPALGPRLLSAFGSNRNRFECAAEVQMLSGIAPVTERSGKSHWVHWRLACPKFLRQSFHEFAAQSILFSTWARAFYDQLRSRGTSHHAAVRTLAFKWIRILFRCWKNRTPYQEQIYLASLRRHGSPLCAALSPPTPGANL

SEQ ID NO: 163752 - protein, 340 aa, unidentified
MLLYGGIDLHANNSVIVLLNEQDEVIYRKRLPNDLSTIIEQLDPYHTAIKGLVVESTYNWYWLVDGLMDAAYRVHLANPAAMQQYSGLKYSDDHSDARWLAHLLRLAVLPEGYIYPKAERAVRDVLRKRAHLVRQHTANVLSVQNIMARNTGARFSVKRIQELTKKDLTSLLAEEPQVLAVTSSLTVLDCLRQQITTLAKTVHKRLNHTPSYEQLLTVAGIGPILAQTITLETGDIRRFPTVGNYASYCRCVDSTKLSNGKRKGTGNVKNGHPYLAWAYMEAAQFAMRFQPEAQRFYQRKRAQSRNNTVLARKSVAHKRSRACYDLMRDLVPFEATKAFG

SEQ ID NO: 163753 - protein, 354 aa, unidentified
MSQQLNTTIAVIGIDIGKNSFHIVGLDKPGAIALRQKWSRGQVEAHLANMPPCLIGMEACVGAHHLSRKLKALGHDARLMPAKYVRPYSKGQKNDFRDAEAIAEAVQRPTMKFVATKTTDQLDLQALHRVRERLVSQRTGIINQIRAFLLERGIAARQGQRFLRAGLPTILTTPPDVLSPRMVRIIEGLASDWRRLDERIEGLSSEIKAIACQDSSCERLMSVPGIGPIISSAMVAAIGTGDTFSKGRDYAAWLGLVPKQMSTGDRTILGKISKRGNRYLRVLFVQAAWVVLIKPKSWQRHGLKPWIEAAKKRLHRNVLAIALANKLARIAWSVLARGRGFEASTINDTATQPA

SEQ ID NO: 163754 - protein, 412 aa, unidentified
MQVVYARCAGLDVHKKTVSACVSVCEAEGKKRQQMRVFGTFTSDLLALADWLAEHQVTHVAMEATGVYWRPVWAVLEGQFQQMLVNPQHIKAVPGRKTDAKDCEWIADLLQHGLLKGSFVPPAPIQDLRDLTRYRAELRQSQNRVANRIQKFLEQANLKLASVASNALGVSGRQILEAIIAGEENAEQLAKLARGRLRNKIPELAQALEGRVRDHHRFLLAEYLDEWEVLGQRIARMEAEIDKQIRPFEQAVALWETIPGVEHVTACNLVAEIGVDMNQFQTAQHLASWAALCPGNHESAGKRKSGKTRDGNRWLRRTLCQAAWAVTRKKNCYLSAQFKRLAARRGVKRAVMAVAHTMLIIGYHMLKTGKPYHELGGDYLEQINKDQLQRYFVKRLQRLGLTVTVEAAPEAA

SEQ ID NO: 163755 - protein, 409 aa, unidentified
MKLFVGIDVSSKDLKVCIMNHEGDTLKSFTVDNNLHGAGHLRDQIIDLADKHSCQDIQIGMESTSVYSWHPAMFLNEDEALKNRQAKVYTINAKLINKFKEAYEDLDKTDDIDAWIIADRLRFGRLPKTMVMQEQYVALQRLTRMRYHLTHNLVREKQYFLQNLFFKCSAFTNEVESSVFGNAIMELFLEQFSIEEISSMDISDLADFLKEKGKNRFPDPERVAKCIQKAARSSYRLSKCVEDSIDILLATSIETIRSLKAQIKQLDKAIEKILDGIPNTLQTIPGIGPVFCAGILSEIGDINRFKDQASVAKYAGLTWRRRQSGDFEAEETKKIRSGNRYLRYYLVEAANSVKTYEPEFRSYYQKKYREVPKHQHKRALVLTARKLVRLIDTLLRNDQIYTPERKVNR

SEQ ID NO: 163756 - protein, 343 aa, unidentified
MQAITTIGLDIAKSVFQVHGVDAKGNVVLRRQIKRRYVLAFFQKLPPCLVGIEACAWAHHWSRELQALSHTVRLMPPAYVTPYVKRHKNDAIDAEAICEAVTRPNMRFVATKTREQQSCLTLHRTRHLLIRQQTSVINAIRAHLAEFGIVAPVGRNGVDQLLGIVADASDKRLPELARACVAALGTQLGTLKAQILQFDRLIMAWHRSSEASRRLDDIPGVGPALATALVATVADPRAFRSGRNFSAWIGLVPKQHSSGGKDRLGSISKRGDRYLRFLFVAGALAVIRYAKIHGTKHRPWLTALLARRHTKVAAIALANKIARMAWAIMAKGEHYKQPVALAA

SEQ ID NO: 163757 - protein, 331 aa, unidentified
MDEVKRFVGIDVAKVALDVFIGSPGRAFSVANDEVGIRELLRQMKPADFVILEATGGLETPVASALAAAGIAVAIVNPRQVRDFARATGRLAKTDRLDAEVLAHFGEAVRPEARPLADEQAQALEALVTRRRQLVEMLTAEKNRRARAPKVLHRSIDEHIRWLEKRLSGFDDELGELIRNTPLWRERDELLRSVPGVGKVLSSTLLAQLPELGMLNRKQIAALAGLAPFNRDSGSMRGSRCIWGGRAQLRRVLYMATVAGVRSNPTIRTFYLRLRTNGKHAKPALIACMRKFLVILNAMLHHKTHWQTPALAPSTVALSPLPGAVSEHGCC

SEQ ID NO: 163758 - protein, 315 aa, unidentified
MTQTNTTTAGIDTSKAKLDIAVHGRTERRQVANALPGWRTLAVSLAKAGVTRVGIEATGGYERGVVEHLRAAGFIVLVLQPIQVKAFGRVHLRRAKNDALDAELIAACTAAIDDPRIAPDPRLAELAENLTFLEQLEEDIARFKTRLEHIDEPGLRRLVNSDIVRLKARKAAQIRSLAKRLRAHSDLARRLDLVLSIPGIGERTALALIIRMPELGLISREEAAALAGLAPFDDDSGKHRGQRHIAGGRGRLRRSLFAAALPAAFRWNKALIVLYARLVAGGKAHKSALIACARKLLIYANTVVQRGTPWTEKAA

SEQ ID NO: 163759 - protein, 375 aa, unidentified
MNNNNTLYVGLDVHKESITVAYAINSEPVELMGKIGTSPTDIQNLCKRLRSKSSQVSIVYEAGPCGYGLYRRLVKSGFDCMVCAPSLIPKKPGERVKTDRRDAIRLVRSLRAGDLSAVYVPGIEDEAFRDLVRAWASARDDLRHARQRLKSFLLVHGVHYVGRADWGPAHRRWLSKYSFESPWRQLAFDEHRRTIEDRLAQCERLESALKEAVTEWRLYPVVEALQAMRGIQFITAVGLISELGDLTRFEHPRQLMSWFGITPSEYSSGGSRHQGSITKAGNSYARKLLVEAAWSYRHPARISPAIQKRQENLPRPVIDRAWDAQLRLCKRYRKLQAKGKNVNITIVAVARELAGFIWDMGRIAMSVAQQPQCHK

SEQ ID NO: 163760 - protein, 331 aa, unidentified
MGNVTTVGIDLAKNVFSLHGVDASGVVVLRKTVSRARLMEIVAQQPACLIGLEACSGAHEWARRFKELGHSVKLMAPRFVAPYRKNGKNDGNDAEAICEAVSRPSMRFVPIKTLEQQAVLCLHRVRQGFVEERTATINRLRGLLAEFGVVLPQKAAEVRRRATEWLEQLPPRAACAIRDLREHLRVLDERVREYERSIEAHARDHEQAKLVQQRLGIGPMSASAIVASVGDLREFKNGRQFSAWLGLVPRQHSTGGKQRLGHITGRGDPYLRTLLVMGARSVLQRASGRSDPLSRWALAVRERRGYHRACIAVAAKNARVVWAMLNQHASA

SEQ ID NO: 163761 - protein, 412 aa, unidentified
MLKIVYPVCCGMDVHKSFIVACIATTNDHGVTTYRSKRFSTFTGDLRRLAAWLRACSCTDVCMESTGKYWIPVYNILEPSCKITLAHPKYVKAIRGKKTDKKDAKWIADIFKHGLVSGSFIPPADIRQLRDLMRYRSKLTGFSSGEKNRAQNCLTVSNIKLDDVFSDVFGKTASAITSRLLEANAPFDVRPFLSKKLKASAEQIQAAVDGSICTHQAGKLRVIRSHMENLAACKKSLESLILGLAEKHLPTLDLILTVPGIHVFAAVGILSEIGADMSVFPSSKHLCSWAGLTPQNNESAGKKKTTRISRAGAYIKPLLVQCALAAIRKKSNPEIRSRYLNLKKRRGHKKAIIAIARMLLTAIYNMIKRNEKYNAALYRKADVPPRNREVSVNEAIYILQRQGYLVTAPQSA

SEQ ID NO: 163762 - protein, 397 aa, unidentified
MIATILSKSGEKRQQRFERNDDGILALKNWVISDNCDVVACESTSDFWVPIYDSLIHHLPVIVGNARDMKAFTHKKTDKVDSEFIAQLALNNMIQASRIFPKDHREFRSYVRLRHELVQKRTDLKNEAHAILAPEMFNLKDVLTDIFGKNGRNILSGITSGKTIDEIIENLSPNVRKKSDQIRTVLNREISQSAVFRLQMCLKLITHLDNEIESLDKEIFNYAYGNHQREMEILMSVPGIGELGAAFLIAEIYNFKDFSSGDKLASWLGIVPNVYQSADKFYNGRITKRGSKVARWILTQIAQSAARKKNSKLKEFFNRKKKSIGFAKAIIALARKIATIIWQLITNDEMYEDETGYEKGEIQKRKIVETEVLSVDERIKIISGIFAIIGKEERGST

SEQ ID NO: 163763 - protein, 342 aa, unidentified
MKHYAGIDVSLEQSSVCVLNASGKIVREAKVASDRQSLIDWFSSLGFGLERIGLEAGPQSQWLYAGMKEAGLAVELLETRHVRQAFKTMPVKTDRKDARGIAELIRLGWFRPVHCKSMGAQETRAILTARTLVQSKLHDIEMSLRGLLRGFGLKVGRSTPNRFAGRIQELVGDHPTLRIVADALLAPREVLLRELKGLEKRVRLMARDDTRARLLMTATGVGAIVSLTYVSAIDDPARFKRSKMVGAHFGMTPKKYQSGETDITGRISKIGDKSVRTALYQAAHVILTRPVKASALKSWALRLAKRVGSSKAKVALARKLAVVMHRMLLDEKPFNLAAGAAA

SEQ ID NO: 163764 - protein, 352 aa, unidentified
MGLDVHARSIVAAAIDGVTGELIQSRLTPSHVHIRSWLADLPGPVAVAYEAGPTGFGLSRSLTAAGIRCEVVAPSKLQRPSGDRVKTDARDAVHLARLLRLDEFTAVWVPTLDQETARDLVRAREDARGDLMQARHRLSKLLLRQGLVYSEGRAWTGAHEAWLRRQRFQSPALQLAFESDFEAVLTVQARRDRLDEAIAMAQDSEFTPIVRRLGCLRGISNLTGLALAVEVGDWHRFTGNSIGSFVGLVPSECYSGASRVQGSITKTGNTHLRRLLVEAAWHHRARYAIGKTIQDRWELAPVAARARGDAGNRRLHARWNSFRERRKRHVVANVAIARELSGWCWSLAVLEE

SEQ ID NO: 163765 - protein, 404 aa, unidentified
MLGASNIKEAVFLSRVWVGVDAGKGFHWAVAIDEEGEILISRKAHNDEADLSALVEEALSLGPDLVWATDQPGGSTALLLALLWEREQRVVYAPGVAVNRARDAHRGESKTDARDARLIAELARMRRDLATLEPGAQLLAELRLLVAHRRDLVLDQSRSIVRLREALVALFPGLERTLDLRTRGPLVLLTRYQSPGALRRSGQKRVEAYLRSKGVRNAARLAENALRAAKAQRVVLPAEGIAAGIVRELTERALGLKERIAELDQELEDRFFAHPLSEVLESLPGMGPVLGTEFLVAVGDPTETFENADRLAAYAGLVPAAYDSGKRVGNRRRMRGGNKLLKSVFYRSAFSSLRHHQASRAFYERKRAEGKKHRQALIALARRRVNVLWAMMRDGERFDPVRAA

SEQ ID NO: 163766 - protein, 321 aa, unidentified
MVYIGIDISKSSFVAAYPSAKGYRTQTFPNTAAGVRKFIATLLVTEYHCVMEATGNYGFLLLYLLHQSGIAISLVNPKQIKHFSRMMMVVTKTDEKDACMIAMYGEKMNPPIYKMPSQAILLLKQKKTVIRQLRKQLVASKNLRGSLVVLPYRDKACVRTLDKTIDFLTKQIEQLEAELADIASSEFDKQLKALTSIKGIGITLATALILTTGGFTCFDNAKQLSRFIGICPTYQQSGTSVNIKGHINRNGDENLRSLLYVASWSALRSNAACRECYLRLKANGKPSKVALIAVANKLVRQAFAIATTDSTYIDGFVSTKK

SEQ ID NO: 163767 - protein, 410 aa, unidentified
MRLCVGDDWAEDHHDVEVMDEAGQVLATRRLPEGVAGIGQLHELIGRFQPASGDAEVQVGIETDRGPWVAALIAAGYTVFPVNPLQASRYRGRHGVSGAKSDGGDAHMLADVVRTDAHQLRPAAGDSPQAEGVKVLARTHKTLIWERSAVVLRLRAQLLEYFPAAVAAFEDLDAPDALELLGKAPDPGRAARLTRAQVSAVLKRAGRYKIAERTDAILAALRSPQLGQPPALTAAYAATVRSLAAVITTLNEQVASLQGQVEAHFGRHPDAEIYLSQPGLGAITGARVLGEFGDDPHRYATAKNRRNYAGTSPITRASGKRKIVAARFVRNDRLIDALMIQAFAALRVSPGARAFYDAQRAKGLDHNDALRRLASRLLGILHGCLKTRTCYDEATAWGHRENSGQSPAAA

SEQ ID NO: 163768 - protein, 403 aa, unidentified
MTVRPLVWVGIDVGKTSHHACAVDETGKVLWNQKVSNEQRAIEQLIARAHKGADEARWAIDLTSPMALMLITVLLGAEQSVVYVPGHVVNTMTGAFRGEGKTDAKDARVIAETARMRSDLSEVAMPDELVVELAQLTGYRTDVMADWVRGVNRLRSLLGSIFPGLEAAFDYSNRTPLILVAHLCTPAEIRAAGIKGVTAYLGDNGGWPTAIAKTAATAVAAAKQQPLALPGEAGTAALVKRLARKLLDLDHEIKDIDKTITERFRDHPYAHIIESLPGFGPGLGAEFVVVTGGDLASFATAGRLASYAGLVPVPRDSGRISGNLHRPKRYNRRLRRVFYMAALSSIRGDGPSRQFYDRKRGERFIHSQALLALARRLVDVLWALLRDGREFTPDKPTPATAAA

SEQ ID NO: 163769 - protein, 387 aa, unidentified
MYYIGIDISKFKHDCAVIDDVGDVITPSWSFTNDHEGFSQFKELLDSLGTETRIGLESTGHYGMNLKLFLESIGFSFMEFNPLLINRFVKSKSLRKTKSDSIDCMMIARYLMTVEYRPYPSLLYHTEKLKSLTRFRDSLIRQRSRQLVELTNILDKVFPEFKPFFSGRFSVTASHILSNYSSPEKISNMNSKSYEALRKLSRGRFSTVDFAKLKQLAKNTVGSTEDYLLQEMQIVLELYSKLDSMIDETERSIKECISDMNPPMLTVPGIGIESAAVMLAEFGDFSKFDNASQMLSFAGIEPGYFQSGTSETTGKMVKHGSSYLRYTLMNCAQTVVNYEPTFAMFYSKKRAEGKPHRVALSHVVKKLLRVVYTLQTKNIAYNAELVR

SEQ ID NO: 163770 - protein, 454 aa, unidentified
MARRKQRRARLAVTDLPEQLQHVNLNAAGIDVGSDRHVVAVPGGRDEVTVREFEAFTTDLHALADWLTKCGITSVAMESTGVYWIPLFELLEQRGFEVKLVDARQVKNVSGRKSDVLDCQWLQQLHTYGLLAGAFRPPDQVCVLRGYMRQREMLVQASSMHIQHMQKALQQMNLLLHNVVSDITGVTGMKIIKAIINGERDPQVLARQRDQRCHSSVATIAKSLLGNYREEHLFALTQAVSLYETYQAKIVECETAMASYLKQQPNRTDDEPPPQDKSVRNRDRLRGGVDVRSQLYKMTGVDLFNLPGLAADTLLTLAGEVGFDMTPWSSEKHFTSWLALCPGTRKSNGKVLSRKTKRSANRAAAAFRIAAASLSRSKTALGAFYRRIRVRVGPAEAITATARKLAVLYYSLLKHGSAYVEIGQTAYEQKYQQRRLDSIQKQALAMGYQLIPAA

SEQ ID NO: 163771 - protein, 428 aa, unidentified
MAEDTTLTSQTWLVAIDIGKAFHAVLVEGGDGKRQQFRMANHVEDYDRLVVFLRGLPGPARIALEPTGDFHRTLAHRLLREGFSVVSVSSVAGARYREALFNSWDKTDPKDAHVILQLLKHGLVQHYHDPLLAGDHDLQELAKTYHQIVLARKRLADSLLNHYLPLYFPEMGRYWESTRVEWFVAFLEQFPTPAAVQALPKEAFVRAAWSVVGRKVNKQAKLEELYELAQRSIALPVAVDSVAIETFRLQLAQLRRLAELRQTLEARAHALLKDRADFQRLCSLPGVAAILALVILAEGGDLRRFPHHRQFLKYCGLDLAKCQSGQFRGREMLSKRGNARLRMAFWMAAQRAVRMNENSFRDKYERYTRHDPGNPDVRRKALTAVAAKMARVAYAVVKHDQPYHGYHEQALPSGSIPLKRAVGARATP

SEQ ID NO: 163772 - protein, 317 aa, unidentified
MTENRKVVGIDVSKAKLDCAAVPVRSSLQVSNDDLGIAQLATWLGEAKPDLVVLEASGGYETTVATALAGALFRVAVVNPRQVRDFAKAKGRLAKTDRIDAEVIAEFGVAIDPQISQLPDEDTKLLQGLLARRSQLVGMRTQELNRLAQATAALRPQIKDHIAWLEEAIRTGNIDLTAKLRSSPAWKAKDDLFRSMPGIGPINSRMFMACLPELGQLNRQKICALVGVAPFNRDSGKFKGHRCIWGGRAQVRQALYMAAITSRRCNPIIRPLYERLIARGKPHKVAMVACMRKMLIILNTMTKNNATWDPAWKTIRN

SEQ ID NO: 163773 - protein, 363 aa, unidentified
MTSMTTTTSHVTGGVDTHGQTHHAAALDSVGRQLGDREFPTTPAGYRALLNWLQAFGHLERVGVEGTGAYGAGLTRQLRAAGVTVVEVNRPDREARRAQGKSDPLDAYSAARAALAGKATGVPKTRDGRVEAIRMLRVARSSAVKARSQATNQLKALLVTAPAELREQLRTLSNTKLIATCARLRPTGDIADTEHATKTALRRLARRHQYLSEEISAADTELRTLVTAAAPRLIALPWVGTEVAGQILITAGDNPDRLRSEAAFAHLCGVAQIPASSGKTHRHRLNRGGDRRANNALYIVVLGRLRYDSRTRAYATRRTTEWLSKPEIIRCLKRYVAREIFTILTARTANAQSRTATAMSTAA

SEQ ID NO: 163774 - protein, 346 aa, unidentified
MSKMLDKSQATVFTGIDVSAATLAVAVQQQARDGFRQKQFANSASGHKQLIAWLLKCGCLVRVSMEATGTYSLDVALALDAAEGIEVAVLNPKTVNRFAQTQRRSKTDAADAQALAEYSRRMEFAPWQRPSRSGLELRTLSRHIATLTEDHTRWGNRLHAAQASATTPRCVLDDLKRGRAAIAKRILKLRSQAVTMVCEDAELARKFQQLKSIKGVGETSAVQLLGELAGLDPEMTVRQWVAHSGLDPVHQVSGSSVRKPSRISRHGNSHLRRALYIPALVGARHDPHMRAFYELLQSRHKTKLQALVAIARKLLHAIFGIFKTGTPYDGRKLFPHFDIPYLPTSC

SEQ ID NO: 163775 - protein, 375 aa, unidentified
MTKIARIGIDTSKSVFQLHGVDEKEQVVLRCRLRRRNFLAFFAKLEPTVIGLEACGASHYWARELEKLGHEVVLIPPQYVKAYVARGKNDKIDAEAICEAMSRPRVRARLVPIKSVEQSAGQMLLGVRESLVNRRTQLSNTIRGHAAEFGLVAAKGLDKIEPLLARIAADDTLPALAKEMFAVLGQELAELGPRITWIDKRLMAFHRSNELCRRLMEVPTIGPIGACLLVTKVVNPQAFRSGRMCAAWLGLTPKDHSTAGKQRLGGITRAGDESLRATLVRGATAYLRHVRSGRTTASPWLAALLKRKPAKLVAVALANKTARIAWKLMVSGQRYDHTRRAAREGLGAAQREGSAPSPSLHPDTTAHGNNARVAA

SEQ ID NO: 163776 - protein, 346 aa, unidentified
MLYAGLDLSRKRLDFCLLDQLGEKVEVGAAPPDADGLRSLTTRVGRLGEPVFAAIESMNGARFVHDQLELAGWRVEIADAVKVKGLAPLACKTDRIDAWVLAELARRDLVPAIWLPDPQIRADRERARFRLHLVRHRTSLKQRVHAVLLAHGKPCPVSDLFGVAGRDLLERLALPEPWLGTVAASLQLIDELDQQIGNCERELHRLGAEHRYVPLLVTVPGIGWVLAYTIAAEIGDISRFATPTKLTGYTGLCPRVYQSGQSDRRGALAKNGPRYLRWALIEATMHASRHPLYRDRYQHTKQRLGKQRGAKVAQIDLARRLAEAIWHMLTRDQPFAPAGAADPLAA

SEQ ID NO: 163777 - protein, 416 aa, unidentified
MGRVVIGMDPHKRSATIEVCDERETVLATGRFGTDRDGYQQLLAAGRRWPDRVWAVEGCEGVGRHLAQRLVADGEPVVDVPAKLSARARVFSTGQGRKTDATDAHSVAVVALRTPGLRPVQVDDATAALRLLVDRRDELGAARTLTVNRLHRLLVELIPGGAKTFLSATQAKALLATVRPRDVVGKTRRKLAAELIVELDRIDRKIKVASKELRGLVEVTGSALLELHGIGPSGAARLLGDIGDVSRFPARGHFASWNGTAPIDASSGEQRRHRLSRAGNRRINRVLHIMAIVQLRNDTEGRAYYRRKLAAGKTPMEAMRALKRRLSDVVYRQLVNDQKRLRQTVHVTGPGGQAGAATGSSAADSHPNVDASEKSLPGPASPEATPAAATLPDRSSTRSRRPVTAPTRSRRQAQSA

SEQ ID NO: 163778 - protein, 334 aa, unidentified
MEQITTVGIDLAKSVFSLHGVDGAGHVVLKRTVRRDQLLEVVAGLSPCLIGMEACSGAHEWGRRFQEHGHTVRLMAPKFVAPYRKSGKNDGNDAEAICEAVTRPSMRFVPVKSAEQQALLAMHRVRQGFVVERTATINRLRGLLSEFGVVLPLRSVTVRRQAAAAAENLPELARRAIGDLLDELRVLDERIGGYDREIEAQARLCEPAQRLMKIRGIGPTTALAIVATVGNAREFKNGRQFAAWIGLVPGQYSTGGKTRLGHISKRGDAYLRNLLVQGARSVLHTAAAHRDHVSRWALELQPRRGYYRTLVAIANKNARIAWALLAKNETLRTG

SEQ ID NO: 163779 - protein, 340 aa, unidentified
MDQISRIGMDTSKHVFQLHGVNAADVPVLRKKLRRKEMIAFFQKLAPTVIAIEACDASHHLARLFEHTAKLIAPQLVKPYVKRGKNDAADAEALCEAMSRPTMRFVPVKTTEQQAALMLVGVRDRLIRNRTQLANTIRGYAAEFGEIAAKGMAHLVPLLERIQADESLPVLARELFAIQAKEYVELQAQIDEVEAKLTAWHRADECSRRLAKIPSVGPIGAVLLRMKTPDPAQFRSGRQFAAWIGLTPRDHSTAGKVRLGVITRAGDEGLRSVLVVGATSVIQHAMRSGKASPWLAALLKRKSPKLAAVALANKTARIAWKMMLTGEPYSAKSAASAGAV

SEQ ID NO: 163780 - protein, 317 aa, unidentified
MTEPCGVGIDVAKATLDVAWSTNPTARWQTTNDEEGWAALVAHLRTLQPTVIVLEATGGYEIGAASALSAAGLPVAIVNPRQVRDFAKALGRWEKTDAIDAGVLAAFAVRMQPAPRPLPDDLHADLQALVTRRRQLVDMLTAERNRVPLARGAVRKNLRDHIAWLEKQLGKTDRDVRTRIEASPIWRVRDRWLQSVPGIGPATSACLLACLPELGTLTHRQISKLVGVAPVPDDSGLRHGYRRIKGGRSDVRTALYMATVSAITHNPPIRAAYRRWRAAGKLPKVALVAAMHKLLIHLNAMLKQQTGWHPIPTAPTT

SEQ ID NO: 163781 - protein, 448 aa, unidentified
MAQRSQLKRMEIANPNAAGIDVGSASHFVSVPSDRDDEPVREFKSFTEDLEHLADWLVSCGIDTVAMESTGVYWITLFELLESRGLNVFLVNARHVKNVSGRKSDVLDCQWLQQLMSYGLLSGAFRPKDEICALRSVMRQRAMLLSYQSRHVQHMQKALTLMNVQLANVISDVVGETGQKILRAIIAGERDPLKLADLKNGRIEASKEEIAKSLQGNWREEHLFALTQAVELFDAYSKALQRCDVQLESMLKALSRSEADPGPSRRRVGKAKNAPKFDARTYLFRICGVDLTAIDGIDVTTALKVVAEIGPDLSRFQNAKHFASWLGLSPGTKISGGKRLSGATKGNANRAAQALKLAAAALRPSQSALGAYYRRMCGRLDKGKAVTAVAHKLARLVYAMLTKGTAYVDQGQAYYEERYQQRVIYHLRRKAAAMGLELVPIQAQGQSG

SEQ ID NO: 163782 - protein, 343 aa, unidentified
MNTTVSVIGLDISKNVFVAVGRDVHGKVAWKKTMARDEVLPAFVNLPPTAIGIEACAGSHYWARQLKDLGHEAKLIAAQHTRAYVTGNKNDANDAAAIAEARSRAATKYVAINTEAQQDLQMLHRARQALVDEKKAMVCRIRALAHEYGMIFPLGVVQFRARFTVWLSDAGNGLSGMALDTFRDLVAQLDDKETRLQVYDRRLAEAARTNEKSKRLLAVPGIGIITATALLASVSDATDFKTGRDLSANLGLVPREHSTGGKQRLYGITKRGDRYLRTLLIHGARSALRCADGKDDRMLRWARSLAERRGANVAAVALANKLARIAWAMIAHGGIYQPNYAAA

SEQ ID NO: 163783 - protein, 347 aa, unidentified
MKITTSGIDVAKSVLQVHGIDEHGKVVMRRQLRRSQLLLFFSRLEPCLIGMEACATSHYWARKLIAFGHTVRLMAPQFVKPYRKNDKNDGNDAEAICEAVQRPSMRFVPVKSPEQQADLAVHRVRRRLMCGRTALINQLRGLLAEYGLVLPQGANQVRSKLPALLHDCSESLPPLAIELFRDLYEELVQLEQRIDAHDRRIERLYRANPVCQRLGQQEGIGALTATAFVATVAHAAQFKNGRQCAAWLGLVPKQDSTGGKARLLGISKRGDVYLRTLLVHGARSAMRHTPKRNDPKSRWVEQLRKRRGENIAAVALAAKHARILWALMVRGQSVGQPPDHQLEQSAA

SEQ ID NO: 163784 - protein, 365 aa, unidentified
MKKSSTAMAASNKNFERKLTIGLDLGDRSSWYCMLDEAGEVMGEQKLGTTPKAMREVFAAMPRSRVALETGMHSPWVSRLLSELGHEVIVAHARNVRLIGESRRKDDRLDARTLARLARIDPQLLSPVKHRSARAQADLTVIRARASLVRARTALVNAARGLTKSYGERLRDCNPRNLDTEKAQALSPELQAALGPLLQALESLSERIAEYNQQIEAIAQQSYPQTALLKQVKGVGTLIALTYMLTLEDPHRFRKSRDVGCYAGLQPGRRNSGQSEPQMHISKEGDPYLRTLLVQGAHHILGPFGADSDLRRWGLKLAERGGKNGKKRAIIATARKLAVLLHRLWVSGEVYEPLRNTNRTMSAAA

SEQ ID NO: 163785 - protein, 357 aa, unidentified
MEPVSPFGRVEARTVDWVRTEPGVTRTSPATASRPRNSGRGGLFVTSEKIGLGIDVAKATVDFATSDGLAGQVPRTPRGLRRMLDSLDGRPIDRAVVEASGGYERAVLEVLFGAGVPVVLIQPARARHFAKALGRYAKTDAIDASVLSTMAVFATDHCPLWSPPSPEAATLRALVDRRRQLVTMRDSERRRRQQASAVTLSGIQAHIEFLQEQIQEVEVQLELALEQVEEFRGRAERLTAVRGVGLVTAASLLVYLPELGTLTRREVAALAGVAPIARESGSWSGQRFIFGGRGAARRVLYMATLAAIRHNAHIKAFFTRLRERGKKGKVAVVACMRKLLIHLNAELRRHRLQAALA

SEQ ID NO: 163786 - protein, 412 aa, unidentified
MQDILTCAMGLDVHRDVIVACLAKGELGTDPEIEIRSFSTLIPEMRKLRDWVIETGCHHIAMESTGIYWQPIYETLEPCFDGQINILVVNARHMKNVPGRKTDMRDAQWIATLLRAGLLKGSFIPDKTFRELRHLTRYRKSIVHDITAQKNRIDKFLQSSGFRFTAFLSDAFGASGRNIIRHLMEYGDISREALDKCLKTQTRKRIDEILVALNGSLSEHQRSFLRIIFEHLESLERHRHTVEDAISEEIVKHEAALNLLCSIPGIDVTAAASIIAEIGTDMSAFPDSQHICSWAGLSPGNNESAGKRKSTHINKGNPYLKSMLCEVGWVIAGKRTLYLSGWYWRIKQRKGAKRATIALARKLLALIYTMLKTGTPYNEECFEIRRKQSERKRASRMVNELQKLGYFVVAPD

SEQ ID NO: 163787 - protein, 504 aa, unidentified
MDRMIIGVDPHKASVTIEVVDRDGVLAATGRFPTARGGYQALMRFVRQWPQRTWAVEGTGGAGRPLAQRLVRDGERVLDVPAKLAARVRVFDTGQGRKSDETDAHSIAAVAVHTRGLRELTADDEDLDVMRLLCGRRDELAHWRVQIVNRLHRLLTELIPGGAGKKDLSSAQARRMLAGVRPRDPAGATRRRLAADLVGDLETVDAKLKALTAELRIAVRRNGSTLMDLYGIGPAGAARILVDVATVTRFPSKNHFASWNGTAPLEASSGEQVRHRLSRAGDRRINHVLHIMAIVQLRNDTAGRAYYRRKVAAGKSSMEALRALKRRLSDVVYRQLVADALVVQPPGQEADPPGHAGARTDSSADGLATPMVVSSDTSLPGPATTHARPAPLEDTPDELDPDVDDDPADQERRAVAGAGPSLPLIALARARRGSAVQGGPKGRRRGDPRQRALDGGGAGPYQRGAGDPRAAAPEETGGEAATDQALTQLIPQAGPSTNSNNALT

SEQ ID NO: 163788 - protein, 433 aa, unidentified
MRARPLDFHERGLRAGTLTLEAPMDMLYARCAGLDVHRDTVVACVRLQTDGRASTEVRTFGTKTGELLELLAWLSEREVTHVAMEATGVYWQPVWHILDGDFELVLANAAHVKNVPGRKTDVNDATWLADLLAHGLIRASFVPPTPVQELRMLTRTRKQLVRERGAHAQRVDKVLQDANLKLGSVLTDIMGVSGRAILAALVAGETDVKKLSARVHGGVKKSRAEIEAAVRGKVTAHHRFLLKLHLGQVDALTAAIAQIDTEVGERLEPFRDAQARLIKIPGIGEVAAAAVLSEIGVDMDRFPTSGHLVSWATLCPRNDESAGKRRSTRIRPGGPWLKPMLIQSAWGAARTHGSYFQAQYLRLRARRGPKKAIVAVAASMLTAIYHMLKNKTEYQDLGANHFVRDRTRAANQLLRKLSRLGFEVPEIRDRAMA

SEQ ID NO: 163789 - protein, 341 aa, unidentified
MSIVFAGLDVHRSQITFDALDTETGEIATGRISATPEAVEKWTERFSGRELHVALEACTGWYFVVRALQRAGAVAHLAEVTETRALRGRKRRAKTDRADARWLRTLLAEGRLPEAWIAPDHICWLRIRTRLRKTLSDESTSWRQRLQATLFHLGLPSLPEKLKGEQARLWLAELELPAAAAERVEVCLAMMQAIEAQLAPIDAELRAYSRRQPGCRALCRHFGIAGATAPTILAELGDVSRLRRSRQAVRLAGIDIGVDRSDRRSRVGKLTKQGSPELRWALYEAAQSACRSTSPDHAQYLELKERGLSHTRASLTISRKLARRCYHTLRELGPAALQEAA

SEQ ID NO: 163790 - protein, 355 aa, unidentified
MWSLGIDQHARQITISLRDENGDVLRARQVSTQPEKIQAFFQQLTQDRLQKGEEFVAILEVCGFNDWLIRMLQDYRCHKVILIQPDDRQKCKTDRRDAAALSELLWVNRARLLAGKPVRGVRQVDIAASSDQENRRLTTLRKEARQARTRVINKIKHIVRRHNLQWHLPTKTFPTKPAVAWLKALVLPATDRLEMNYLLADLEHLEQRYLDLEKVIAQRCAASEQAIILSSMPGVGNFTATALACRVGRVERFPRSHSLPNYWGLTPGCRNSGEKTQRLGRITKAGSSMARWLLAQVAHQVLRKDARLREWFKNIKRRRGASIARVAVMRKLATIIWHMLKHRKTYAECRAVVSK

SEQ ID NO: 163791 - protein, 326 aa, unidentified
MTNVAKIIGIDISKEKFDVCFSSKNDSCTSCSYVYNKNGIKSFLKNVPHNSICIMEATGIYHLKLAYALYEQNIFVAVVNPLSAKNFSRAVMCRTKTDKSDAKQLVEYAKKMDLVKWEPTADNYIRIQQMYRSIELLQINITQANNQIEAILNSPIYDKTLLVMLQKHIKHLRKCIERLEEQIERSICEDDASAIKRICSIPGVGKKTAIAILTSTKGLRHFYNYRQVSSYFGLCPRIYDSGKSVHGKSHICKMGMGWIRKLLYMCSISAIRYNSACITLYERLREKGKPAKVAMIAVVNKLLKQIFAIVKNNCFYDENFSKNICF

SEQ ID NO: 163792 - protein, 382 aa, unidentified
MSAERVNDCYVALELSQRTWLIGFLLPGTDKVQIMTGAGGDAEALLSALGRIESLAGTRLAAECTMVSMRVCYEAGYDGFWLARYLIDRGIDTTILDPSSFLVSRRGRRVKTDRIDVEAMVFTLKAYLLADRSVCRPVRLPSVAEEDAKRLSRERTQLKKERTRHVNRIRALLVLHGIRSVPGLWGGRWKEALSNIRTGDGRELGRFIFRELCRQFERLDLVHSQLKSLEKERIQACETEGAINDSGKIRVLKQLDGIGEVGATQLVAEVYHRTFKNRKHLASYLGLSPSSYSSGEVHRDQGISKAGNKQARVMLVELAWCWLKYQPQSELTRWYRARFSGHGSRSGKVGIVALARKLAIAFWRFIEDGVVPEGATLAVATK

SEQ ID NO: 163793 - protein, 418 aa, unidentified
MTSNKTEKIKTINEKTLIVALDIGKNIHYGYFRTPKNKEIKPFRIYNTGQSFNKFWEKLCRFKDKHILDEVVVGFESTGPYAEPISNYLRKKSVNLVQVNPMHTKRIKELTGNSPNKTDQKDPRIIADVISLGHSLTVIVPEGAAAHLRRLTQARERAIERRTAMSNQLQHLVFLIFPELVHIIKPSTKTGMHLIKHYSDPKKLLFAGVDKLNAIIKKVSRGRLGTDRAEQLHGAAKKSVGITEGKESILFEIKHLVSKIESENLYVEDLEKQMGDYLEKIPYSHSILSINGIGNVTTAGLIGEVGDFRKFKTISEVLKLAGLDLYEISSGAHQGCRRISKRGRALMRKLLYFAAINTTRKNGILHGPYQRHLAKGMPRIKALMAIARKLIGIIFALVRDHSNYIADYSSQLVFKKAA

SEQ ID NO: 163794 - protein, 364 aa, unidentified
METVYYIGMDVHKDSVRIAVLKDCETKIEFERTVENDTSAIVRILDGYVKKGTVIAAYEAGCLGYTLYRAAKAKGIDCRVLAPNKVVRSGSDKIKTDKRDAILIARMLKHNEGESIHIPTEEDEATRDLLRCRSDLKEDMKRAKQRLQKFFLRLGYIYDSDRYWTIRHREWMKKLVFANVAQTATFEQYYTYIESLEQRIGRIDATIIETAQSAPFKERVDELRCFKGIDYIVALSVVCEIGDFRRFRNAESFMAYLGLVPSEYSSGGKRKQGRITKTGNSHLRKLLVESSWHYRHRNVISKRLAERRQGMDESLILYADKAQARLHSKFQKLVDRGKSVQVSVTATARELAGFIWGTMNHAYC

SEQ ID NO: 163795 - protein, 335 aa, unidentified
MHYLYYVGLDVSKETFDASLVAFEDANEMAHRKFANSRKGICSWLHWVEKRHGILLDDVIFCAEDMGSYISEMAVCASDRTLNFNFSLISPLVIKYSMGIARGKTDRVDARRIAEYAITHYRKIALYLPAEKELCQLRTWLILRAHLAKQRVAKLVLLEKLDYKEKFADVSIQRSMLQEEIAYAETHMKTIEREMKELIAADSNICRNYKLLTSIKGVGPITAIVMLCSTLNFTKITDHRKFACYCGLAPFEHSSGTSVRGGCHTSSMANRDIKVQLNRSALIAIRCDPQLKAYYERKVAEGKHKFSVLNAVRAKIAARCFAVVRRGTPYVALQI

SEQ ID NO: 163796 - protein, 441 aa, unidentified
MNTHNTDSKKSPLDLNNYAALIGIDWADQTHALATLALPANDHAEPELSTLEHKTDALIQWISSVQERFAGGRIAIAIEQRKGALIHFLSAFDFIDLYPVEPLSLKSYRKALYPSGAKSDPVDAALLVQFLIKHHFRLRCYTPQSAPVRQGAQYCEDRRRFVDQRAQALQCLTASLKLFFPLALELFEDLSTSLARAFLQRWPTLEELQRVRPATLRAFFYRHGSRSHQLIQYRLELIAAARPLTSDPGVIEPQVLRVKSLLEHIGTLSRIIASYEQRIQSLLQVLDADGIFASLPGAGSCLIPRLAVLFGQDRTRFESARELQLLTGTAPVTRQSGKKKLVTMRWACSNFQRQSLVEYALSSLRFSKWARAFYDLHMPKDPNADKPTYSVLRKLAFKWLRIIYRCWQTRTPYDESTYLQSLHRSGSPVWQQLQQAKACPL

SEQ ID NO: 163797 - protein, 339 aa, unidentified
MKKFLFIGIDFSKSKFDVSVLENIEQKSFAQETFANSETGYKSFLKWVSKQSKIKRDDWLFCGEHTGIYSRNLSNFLVQKGLFIWLENPLQIKRCSGVKRTKTDRYDSIVIAQYACRYIDKAVAYKPAEKQIESLQMLVAYRSRLVKSKVAIEVGAGEMRDVIKRDETARFIYEKSQLELKRIKKQISDIERKMHETIMNSALKENYLLINSIKGVGMQTAVMLIIHTNNFSGFQTPRQLASYCGSAPFPNESGTTDKGSHISRLANRDLKVLLSQCAISAMLHNNEISTYAQRKIAEGKPKRVVVNNVRNKLIQIIFAIVKSKIPYRENYLNPFAECA

SEQ ID NO: 163798 - protein, 411 aa, unidentified
MDKENFIYVGIDLHKETHTAVMIDCYNQKLGEITFPNRPADFPKLVTKVKKCNTDAKEVVYGLENAYGYGRPLAVWLIDKGYFVKDVNTAISHRQAKHRGAMYRKSDSDDAEAIALATLNMLDKLPDACPNDAYWSLGQLVHRRDNIMKQRTRLVNQLHEQLCIAYPSYKSFFNDISRPTALYFWEHYPSKKYLKGKSVEDLRAELVPVSHNKCSTKTCEKILDAVASDKVKNNAYQDARDMVTLSIVSDLQHYDSQLAEVDKMLEQMYKMLGCTLTTIPGVNVITAVKILAEIGDIKRFSNANKLAQFAGIAPLHLSSSGKGKDVATKQGNRRLQATIYFLAIQMVQVSSKGTPRNPVVRAYYEKRKAEGKTSQQALICISRRLISIIYGMLKYGTEYRMPVVENAGEKL

SEQ ID NO: 163799 - protein, 458 aa, unidentified
MYRELQPLRQALSSEMKSSLPAPGVGIDQEPLLQSYLDRLTLYIGCDVADQTFTLYAQTAGGDEVSHQINIPNRTQGFQQAWSWLESLREQQHLRILLLAMETTGVYYWAWWDFLSGRPNLARVLYNARTTEHMTEVLSKKVRNDLVDAYALAEQVRLGGTPETLLTEDADLQTARYCSRFARDLAQQANRKKTQLRSILRAYNPVLEQVFPKNQLHHPAVYALLERYVFPPEFVQAGAEAVTQILVDQCRYAFGEKQAKQLVELCGQQLVRPIGQEVIHQRVRQLCEDILTIKRRQKVFLKTGYDLIRDRPETKLLSGSVGAGLSNTLALVSEVGDVSRFPDGEHLASFLGITTSKHISGTSIFHAKHITKQGSPNGRYAIVNLAQHLCRKVPKYQAMYQRIKTRKPARIGYLIAVVAVARDFATNILYDMWRNQRPFFLEVGDYRKYRQEHPNSPA

SEQ ID NO: 163800 - protein, 403 aa, unidentified
MYSFFVGIDIGKWNHQAAFLEVSGKETARSLAFQNTSEGFQSLLESLAPFDKGQTVIGLEATGHYWLALFSFLVDNGWTVKVINPMQSDALRNMNIRKAKTDRKDCVVIADVLRFGRYTETVLPDEDLLQLRELSRCRVAHVELLGDLKRRVLGILDRIFPEFASCFSTVFGAAPMELLQECTDPEELADYDVDKLIKLLEKESRGRHSREKAEELKAKASRSVGMRFGRDALKFELKMLLEQLDFIKGQVKEFDKFLKKLMKNHELIYTIPGISVTLGSAILGEIGDVKRFGTPQQLQAFAGMDPSVTQSGNFQGTQGKMSKRGSPYLRRAVYLAANAARRFDPVFKDFYDRMIARGKHPKQALAAVGTKLLRVIHAVMTSQKPYNPQKLLPPAARISQSNP

SEQ ID NO: 163801 - protein, 347 aa, unidentified
MQITTIGLDIAKNVFQVHGIDAAENVRVRKQLRRTQVTKFFEALPPCLIGMEACATAHYWARELTRLGHQVRLMPARDVKAYVKRNKNDAADAAAICEAVRRPTMRFVEVKSAEQQGRLMQHRTRDLLLRQRTQTINALRAHMAELGIVAAQGQEGLKQLLTVVADEKDERLAIDARATLIVLAAQLQALQTMIGAIERRIMAQHRADETSKRVATIPGIGVLGASAITATVTSPGAFRSGRDFAAWIGLVPRQDSTGGKQKLGPISKQGDRYLRRILVLGAHSVLKRAKQEPEKYPWLAQLLARRPFKVVAIALANKMARIAWALLANGETYRRPQLAAAKEWACR

SEQ ID NO: 163802 - protein, 381 aa, unidentified
MPRISNKHERTMFQKKILKELEKVPNTKIDLGLDLHKSSIHAAIFIDGATLTDWRTTANYGDFADQILPFLPFTKTVAYEAGPTGFSLARILQGHGFNVVVCAPAHTPRPSARQNKSDRIDSIKLAQLSAAGMLKAVTIPTEQEEQDRLVLRHRNALVDKSRRVKQQIKAEFLFIGTGEVGSWGKKEIKRLAEFKCSENQRFTLDSMLRELGMLDDEVKVTTARVDLIMRERHADVKAILESHPGVGPITAATFALELFRSPQRFRNGRHVASFIGLAPGKDQTGESDRPQPLLKRGQARLRSHLIEAAWRWIRLDPKAREAFGRIACKKKGNGKKAIAAMARRLAVRLWTMWTRGEMYNPEKEIQRQHQRVARKAEATAS

SEQ ID NO: 163803 - protein, 349 aa, unidentified
MKIIGCDFHPSYQQIVMWDKATGEMLERALSHERKEEVRAFYAGLQGPVRVGIEASGQSQWFEQLLAELGPEVWIGDAAKIRASCERKQKTDRRDAELLVKLLDEERFPRIWVPTPAERDARQLLLHRHKLVRMRTQLKNQLQALALNQGVQRKWKLWSETGRKQLEALPLMPWASRRRTELLVLLDQLEASIGELDGAATEQANTRAAVRRLMTHPGVGPITALAFVLTIGPAQRFRRGKQVASYLGLIPTEHSSGGRGQRLGHISKQGNPFLRGLLVEAAQSAVRHEPEMRREYQRLAQRKCRALAKVAMARKLAVRLYWMLRTEVDYAQLIQGSHAGQLESFRGRS

SEQ ID NO: 163804 - protein, 342 aa, unidentified
MKQYVGLDVSQKETSVCVVNEAGRILFEGKAKSDPGALTALLRERAPHAERIGFETGAMASWLWHELRRVDLPVVCIDARHAHAALSVRMNKSDQNDARGLAELVRVGWYREVKVKSEESQKVRAILVARSRLVAIRRDIENQVRSLIKEYGLLFPRAIGLQFRNQVSELLGHDHQLLGVIAPLLSIHEHICEQQSKFDDEVRRLAKSDETTRRLMTVPGVGVVTALTFRHTIDDPSRFRSASTVGAYLGLTPRRNQSGETDTNGKISRWGDRLLRSYLFEAATVLLYRTKKWSSLKAWGMKLAKRIGVKKAKVAIARKIAVILHCIWVDGTSFDWGQAKPA

SEQ ID NO: 163805 - protein, 425 aa, unidentified
MHTKQYSKQQEKRKRIGNQTLVIGMDIGSEFNAACFMDKEGNVLGRYPTVYNSRKGFDYFQTMVMKIKRKHKLTDVLIGMEPTGHYWRKIAFFAKEQGYEVRFVRTTAVKHQRGLDESSPAKSDSKDAFTIANIVREGKYIDTVIEESVFRQLRTLAHARERILRYIVGSTHGLQAHLNDYFPELRKLFWSMKAKGLWSLLETYPFPEDVRSAGVAAVVTLLAKGRGKKRHIREQAEQVVKAAAESAGLTAIGRADRARLAMYLDEIKRSDARRQLLEREMKELLKEIPCAQYILSLPGMGKVGCAVFLGELGNPEYFNNPRQIIKYAGYDPKENDSGLRVGRKIISKKGRWLLRKCLFFMVLRLVHRSSFFKAYYEHKKKGCDRPLEKTEALCAVILKLIRVLFALMRDRRMFTEEMPRCEKAA

SEQ ID NO: 163806 - protein, 410 aa, unidentified
MDAIVERVSGVDVGQAMVVATVLVGGAHQRPTKATRRFRTVTRDLLAMREWFQEHGVTHVALESTGVYWQPVYALLEDAFEMIVGNAHHIKNVPGRKTDVKDSEWLANLARHGLIAKSFVPPKPVRQLRDLVRYRRKLVESRTAERNRLLKLLETANIKLASTMSDVFGVSGMLMLRALLEGRAQPSEMARLAKGQLRQKTEDLELALDGRLEDHHRFLLTLQLRRLDRVESDIAQLDARIDEALAPYQEQHERLQQIPGVGRVQAAVLVAELGTDMRVFRSAKHAAAWAGVCPGNNESAGKHGGTPVRKGNMHLRSALVEAAIAASRKKGSYLRDKFYRLRARRGVKRAAMAIAHKILIAAYHILSDGGAYRDLGDTYLDRHEKRRVTRGLVRRLERLGYEVTIGPQVA

SEQ ID NO: 163807 - protein, 459 aa, unidentified
MGQSKGKKRESVRPSTDWKALEVVHPDAAGIDIGGQEHWVAIAAERDPEPVRRYGCFTADLQEMARWLVEKGIRSVAMQSTGVYWMPAFEILEQHGLDVYLVNARHTKNVPGRKSDIQECQWLLKLHAFGLLNNSFQPSDEIRTARTLWRHRGNLVAEAGSCIQRMQKALIEMNVQLSNVLSDLSGVSGMAILQAILEGERNPQTLAALVQPEVKATPEDLAKSLEGNWRPELLFVLGQQVDLYRTYQEKIADCDVQLREHLESLEGKVDLKAQPIGPRPKGKKASKNAPAFDLRSELYRLTGIDWSQVDGCDVLTAHTVITEAGLDLAAFPTEKHFTSWLGLCPTNERSGGKILRRKTRKVVNRASVAFRNAASTLLKSQSYLGAQYRRLRTRLGAPKAITAMARKLACLFYRLFKHGQQYVDKGAAHYEERYREQQIRAVLKRAQKLGLKVVLPQSA

SEQ ID NO: 163808 - protein, 364 aa, unidentified
MYDSTTTVAVGLDVHAGSIRLAAVRADELLEERTLAYDEEAVEWALRRWPGACCCYEAGPTGFGLHRFLVERGIDCVVVAPGLVPQRPGDRVKTDSRDARKLARLLAGGLLEPIHVPSRELEAVRDLVRAREDARLDRMRDRHRLSKFCLRRGRRLPTSSWTVARRTWLSEQRFELTAQQQTFDTYVHTVDLVDARIEQLEQAIRATAAEEPWRSLVARLRCLRGVDTLTALALVAEIGDFGRFKTAEEFMAFVGLVPSERSSGDQRRQGSITKVGNAHVRRLLIESAWHARRRPTVGYQLARRQRGQDAVVIERAWRCQQRLYSRWQRMAGRGKPQQKIVVACARELAGFVWAIATDQPLRNT

SEQ ID NO: 163809 - protein, 387 aa, unidentified
MHTVTSTTVVAATARANNITLFASLELSKSKWVVTINSPGSEKFSKHVIEGGDGAGLLDLLSRLRAKAEQRYGVQVKTIVIQEAGLEGFWIHRLLIANGIESHVVDAASIAVPRRHRRAKTDSIDGETLLRTLMAWARGERRVCSMVCAPSAEDEDRRRLTRERGTLLKERIQHTNRIKGLLNGQGIRDYHPFRRDRFERLEGLRTGDGRELPSMLKAEIRRELERIAVVTTQLAAVERARDALICTDAEEPDNPAGMLLRLKGLGPEFASLLWLESLFRSFANRRQVAAYGGLAPSPWQSGGVERDQGISKSGNRRLRKTMIELAWFWLRHQPDSALSRWFRARVGAAKGRVRRIAIVALARKLLVALWRFVTQGVVPEGAVFKAA

SEQ ID NO: 163810 - protein, 341 aa, unidentified
MENCGIDVHAKSSQVTIVDDEGEVLERASIPTTRVGLERWFGQRAPMRILVEASGSSPWVVRVLKELGHDVGVVDPRRVRMVAESTLKTDRIDADTLAELARLGTRLRTLVWQRSEETQRQRGHLRVRRALVQARAGFIVTVRGLVRSFGGRIASCRADRFAARCEATALPAELGEVVAPLLAAIRELDARIAAMDKLVEVVGHNYPAVESLQAIPGVGPVVALAYVLSLEDPTRFRRSRDVPGYLGLRPKLRASSDVVRRGGITKEGDPDVRRLLVQAAHALLRSHVDTALKRWAENLVPRLGKRKTIVALARKLAVLMHRLWITGEVYQAFPDAAEDAA

SEQ ID NO: 163811 - protein, 345 aa, unidentified
MHIASIGIDLGKTTFHLVALGEHSKILLRKKFSRTQLLAYTANLPASLIGLEACAGAHFLGAALREQGHEVRLIPAQFVKPYRKSNKNDFLDAEAIAEAVTKQNMRFAQIKTQEQLDWQALHRVRDRLVQRRTALINEIRGFLLERGITSAAQPIHLRKNLPGVIEDAEQNLSPRLRWLLDRMWQEWKQIETDVQAITDEIERISNEDPRCRQLRQIPGFGPLISTATVAAIGNGAAFRRGRDFAAWIGVVPRQHSTGGKQKLYGISKRGNVYLRRMLIHGARAVLFRVKHDTGGFGQWVQRLAQRAPRNKVVVAIANKLARIAWAVLSSGQDYRHQPLQQPAAA

SEQ ID NO: 163812 - protein, 327 aa, unidentified
MFYLGIDVAKAKLDCCLLDMTNGKHSTKVVANSRAGLTDLLGWLGKRHTEPSHVHVALEGTGVYHEMAACGLHDAGLSVSVVNPAQVRAFATGMGVRTKNDMVDSHVLARFAMHAQPMRWSPPAPEARILQALMARREALAQDLQRERNRHEKAEITAPTALVLHSILETIEFLERHLASLQREIDDHIAAHPGLKANLMLLQSIPAVGPQVGRTLLAIMHARHFDSAEQLAAYLGLVPVQRQSGSSIQGPSRLSKAGPPKVRATLYMAAVVAKRYNPHIKALCERLAARGKSTMSILGAAMRKLVHLCFGVLKTRQPYRANYVAIA

SEQ ID NO: 163813 - protein, 427 aa, unidentified
MLKHNTEPNPAEEFAAFLAIDWADEEHVFHLQVEGQSKVETGTLEQKPEVLGPWVAKLRERFGGRPIAVGLEQSRGALIHGLMAYDFLVLYPIHPTTVAKYREAFKSSGAKSDPLDAGQILEILTKHRDRLHRFNPDTVETRLLGRLVEDRRKAVDLRTTHVQALGANLKEYYPQALELTNGNLSSRLAGDLLLKWPTFADFQQAKPSTLKRFYYGHNVRSPQVLERGLALAQKSQALTTDPAIVESGSRLSQMYVRLIQALNPVIEKYDQRIQRVFDAHPEVKIFTGLPGAGPVMAPRLLAFFGTDRSRYAAALNVQSFTGVAPVTKSSGKSRVVYARAACPKFDRQTFHEFSRLSVSNCQWARNYVQYYTDKGKKYHTIIRALAYKWIRILHKCWKERTPYNDDLYMEILKKRGSIFATLHLQTK

SEQ ID NO: 163814 - protein, 424 aa, unidentified
MKSLTDGEFAAFIGIDWADAKHDICLQVANTEKREFAVLPHRPDAIDEWACSLRQRFQSRPVAVCLELRKGPIVYALQKYEFLILFPVNPVTLAKYREAFTPSHAKDDPTDAEYQLELLVKHRDKLKALRPQSAPMRTLESLVEQRRCLVDDSKRITNRLTSALKQYYPQAVQWFEEKDTALFCDFLSRWPTFKQVKQARRATLEGFFHERHVRSAKLVEERLAAIKSATSLTDDIAVITPHRLLAQALVDQLRVTLQAIERFDAEISAISQTLPDYLLFRALPGAGAALAPRLLTAFGEQRERYESAAGVQKYTGIAPVTERSGKQRWVHWRLQCPTFLRQTFVEWAAETITRSFWAGAYYRQQRDKGCTHQAAVRALAFKWIRILYRCWQNRTPYDESKYLNALKRRGSPLLNAIAEVAKNT

SEQ ID NO: 163815 - protein, 449 aa, unidentified
MSKIKTKNEKVKRISQLPVIRPATAGIDVSDAEMMVAYPISSEQLEIRAFGCFTTDLHSIVKCLKENGITSVAMESTGVYWVALFLLLQEEGFEVYLVNAKHVKNVTGRKEDESDAEWIQKLHSCGLLNASFQPDNMTRTLRSMVRHRKNLVRTSSSYINRMQKALELMNIKLHTIISDIDGKTGLRIIEAILEGERNPEILADMRDKRIKASREDIVKSLEGYWTTEHLFELRQCYQLYCTHRQMIEECDREIEKQLVEQIASRNEGIIPDIPKVKRKVSGGKHKVPFNLTAHLREILGVDVTEVVGISEISALTIMSEVGTDMSKWKTEHHFTSWLGLAPNTKVSGGKTISSRIMKKKHHAGQAFRMAANSLNNSKSPLGDHYRRIRAKAGAAKAVVATARKLAIIYYKMVANKEAFNPKALEDYQQKYKQKKINQLKKKIALLEAA

SEQ ID NO: 163816 - protein, 465 aa, unidentified
MRGEEDKKTSGSRKQLQGLPLLRPDVAGIDLGSQQHWVCAPTVDGTGREVAGFGATTSELIRLAEWLKARHVKSVAMESTGVYWIAPHEILEAQGLEVLLVDTRQLASVPGRDDKSDPTDCEWIQRLHSCGLLRGSFRPPEAICMLRTLVRDKGTLVAESGDWVRRMQKSLDQMNVRVHRAVSDIDGVTGMAILRAIADGERDPKKLAQLRHSHCRKSEEEIAEQLSGHWREDHLFSLQQALKMYDAIAERIAAYEDQIQRKLREMEPPQSRGTTAPPLKNANKANGIKRRGEEPMRQALYRMSGVDATQIDAIGVETMAIILSEYGPDLSRFATEKEFVSHATLAPRVPKSGGKPLKKKKPHSASTRVANALRMAALSLRHSNTALGAYYRHLAQRKGADIAVFASARKLATHIYRLLRWGQPYIDEGAQAYETRYEQQRLKTLGYKAKSLGYQLIPLAPNPQP

SEQ ID NO: 163817 - protein, 316 aa, unidentified
MQTPSVYVGIDVSKTRLDVAVRPSGGLSHVTYDAAGITTVVTQLSQKQPIRIVVEATGGLERPLVRALVAAALPVIVVNPRQVRDFAKATGQLAKTDALDAQVLARFAEVIHPSLRALPDPQTQELAALLARRRQVLAMQRAEQNRLDRAPVRVQNRIEVHLHWLGDELARLDEELDDQIQQSPMWRAREDLLQSVPGIGPVMCRTVLAELPELGLLNRKQIAALVGVAPFNRDSGRLRGHRTIWGGRAPVRTALYMATLVATRWNPVIRPFYQRLRDAGKAPKVALVAAMRKLLTILNAMLHHGTPWRPVVLSEA

SEQ ID NO: 163818 - protein, 388 aa, unidentified
MQIVTDRPQAPTAIRTDLGAIFVSLELSRSTWLITSLSPGGGEKMSKHTVRSGDVAGLWARFSQLKDKVQVRTGHVVPIIVIQEAGLDGFWIHRLLQDERVESHVVDPASIATSRRRRRAKTDKIDGEALVRALLAYKRGEPRVCAMVRAPTPQEEDRRRICRERKTLTAERVEHVNRIKGLLFAQGISDYEPLLRKRRERLEELRTGDGRPLPEHLKAQIGRELDRLELTLQQIKSVEAERDAMLSPSDEGTPAPGAMLKNLKGIGPEFAGVLWSEGLFRSFSNRRQVAAYAGLAPTPWRSGSVAHEQGVSKAGNPRLRTTMIQLAWLWVRHQPRSILTLWFHQRVQLNGGRVRKVLIVALARKLLIAFWKYVTAGVVLEGAEITAA

SEQ ID NO: 163819 - protein, 338 aa, unidentified
MKTFVGVDYHKKFSYGTIMTETGQIIKQGRFANHPNSVAGFLGEYGGSSCSAVLEATRNWTVMHDWLEELVDQVTLAHPLKVRAIAEAKVKTDKIDATTLAHLLRCDLIPAAHVRSPQARILTNLLRHRMFLVRLQTMTKNRIHVVLDRHPLIRSERSAGELFTKVGICWLKQLKLPKYDRYILDSEVALLEHLQEQIKQADRWLAGVGRKDERVKRLMSIPGIGRAFALLIVCEIDDVRRFASDKKLHAYAGLVPSTHSSGGRTFHGRIIRGGNKYLRWAMVEAVWPAIQKDVGLNTYYHRIARRKGANPAKVATARRLLTIVYKVLKEQREYRYGG

SEQ ID NO: 163820 - protein, 427 aa, unidentified
MKYALVRVLPDVPPGGVCAGIDWAAADHVVCVVDMAGRVTDRFGAAHDKAGIAAMIARLRRAGAGEVAIERSDGVLVEALLAAGLTVVVITSRQVKNLRARYGAAGAKDDRFDSFVLADTLRTDRARLRPLTADTPATVALRMAVRTRKDLVAHRVAACNQLRAHLAVAFPGAVGLFCELDSRLSLAFLGRFGSQDAADALDEQQLASWLATLPARGFPAPASVLCARLQAAARGTAGPAGAAQAGVTAALTGTLTALSGQIKALETQIAAQLPAHPDGHIFTSLPRAGTVRAARLLAEIGDCRSRFPDSGALASLAGVTPVTRQSGTHTARTYRWAVNRQLRDALCDFAADSRPASPWAAAIYADARARGKDHPHAVRILARAWTGVIWRCWQDGTAYDPAKHNALQRSLDRQQASSTSPARPEDR

SEQ ID NO: 163821 - protein, 368 aa, unidentified
MWYIGIDVHKKMCNACIKDLDGNIQKELEFPNKSTGTDKLLDVIDGREAKAVIESTGNMWLRLYRGLEEAGVDVVLSNPKKTKAIAEAKLKNDKVDARTLADLLRAKLIAQCYVPPESVRELRGLVRHRINLTRDMTRVKNRIHAILDKYELEFKGTDMFGKAGMMWLWSITSELSELDQFIFDAELRHIETLKGLMKEVEARIAKESAESEDVKLLMGIPGVNYYTALLLTSEIGDFSRFSSANKLVSWLGLAPRVHQSGDTIYNGRITKEGSPRVRWALVQAARSAVQWDDHYRTKYQRIRERRGDGKAIVAIAREIAVAMYHMLNRKEEYRFSTESFKTKKLKKLEGESNKWAKMMEVPAGGMKA

SEQ ID NO: 163822 - protein, 448 aa, unidentified
MAGRVQVVPDEPHERVFGRVAAVDVAKKSGVVCTRLPDSAGRQVARWWAVTATVSEVSGLAAELAGAGIEKVTLESTSDYWRIWFYLFEAAGLDVQLVNASQARQLSGRPKTDLKDAMWLARLTEMGLLRPSFVPPAGIRALRFYTRTRTRLVQDRTRCWQRIEKLLEDALIKVSSVASKMTTLSVRDMLEALIAGERDPQVLAGLARSRMKAKHDALVQALEGRFEDHHGEIVRMLLDQIDFLDRQVTRTEILIAEQLASLPEAWGADPDGVTGPDAGTGQDAPALPAAARLDEIPGITPGLARSIIAETGLDMTRFPAPDHLVSWAGLCPRTIQSGTRTKQGKKPGNTYLRGYLGQAAAGAAGTATFLGERHARIARRRGPARAQVAVARSIAVIIWHLLNDRDARYHDLGPDWHQRHTDKNKKTRNYIRQLEALGYTVTLTQTAA

SEQ ID NO: 163823 - protein, 341 aa, unidentified
MKNKSFIGIDISKNVIDASIFTEGTSIKDFPHAVFNNSRKGFGEMSTWLKKNHVVLSNCLFGMEFTGSYSMELEKFLNAKKFQFCMLSTHVVKHYPMGPKDKSDKIDSAKIADFLYRYNGTECVKPYKMPDKTLQRLKALMNERKFLVEQRTCFMNRRQLCTTKEDTQLYDGYIKKLSHDIENIELEEQKLLATDDSLLATYKNLLTIPGIGFVNAINVIVITRNFTAFETARQYASYVGVAPHSHTSGTSVKWCPRPSARCDGQAKADLSMAATVAVQYDAELQSFYNRKLGGKQDSYTKRKALNAVKFKLVLRMFAIGKQNRKWELLDSKSSNEKLAIS

SEQ ID NO: 163824 - protein, 345 aa, unidentified
MNVTAVGIDLAKNVLQVHGVEARGKAVLRRQLRREQVTAFFAQLPPCLIGMEACASAHHWGRTLQRFGHTVRLMAPQFVKPYLKTNKNDMADAEAICEAVTRPNMRFVPIKSIEQQAVLSLHRVRQGFVKARTAQANQIRGLLGEFGLIIPKGIWHIAQRVPGLLEDASNELPLTLRQLIDRLVCHLKELDRQVRELEREILAWHRSSDLSRRLEQIPGIGPLAATALVASIADARSFDNGRQVSAWLGLVPRQNSSGGKPTLLGISKRGDAYLRTLLIHGARSAILAARRRNDSKNGWLANLLTRRHANIAAVALANKNVRTVWALLAHGRDFRPDYVPVRAAV

SEQ ID NO: 163825 - protein, 344 aa, unidentified
MDISTIGLDLAKNVFQVHGVDAQGTAVVRKALRRSQMLPFFEKLPPCVVGMEACGTSHYWARELIKLGHEVRLMPPAYVKPYVKRGKTDAADAEAICEAVTRPTMRFVPVKSAEQQAALSMHRTRDLFVKQRTQLINMMRGLLAEFGIDIPQGINRALEKARAIVDGEAPDVPSDALRIVERLSQQALDVHAQVREIERDLIGWQRKSDVATRLMTIPGIGPIGATALAASVSDPSQFRSGRQFAAWLGLTPLQKSSGGKERLGRISKMGDRYLRKLLVVGMTAVVRNAKRKPEAVDPNVLALLARKPARVVTVALANKTARIVWAIMTRGEVYRERHVPALAA

SEQ ID NO: 163826 - protein, 347 aa, unidentified
MLADQLDYVVGVDPHRDTHALAVVEVRSGAVVFEATTQADAEGYACVLRLVDRHAPGRRAFAVEGTGSFGAGLTRFLVAQRERVLEVGRLRRERQSGKSDALDAIRAARSVLGQTRPARPRAGGEREALRALTAAREGAVTARRAGLCQLRGLLVSAPEPLRAELRSLTRAQLLRRLAAVRPERRQDPELRGTLLALRALAQRVQQLTAEERELAGEIETLTRKLAPQLLEQPGVGPLAAAQILISWSHRGRIRSEAAFARLAGCAPIPASSGQTIRYRLDRSGDRRLNRALHMILVTRRRAHPPTIAYINRRIQEGKSRREASRCLKRYLARNLYRLLEHGAPLAT

SEQ ID NO: 163827 - protein, 411 aa, unidentified
MELLHPRCAGLDVAKDEVVACMRVPDGRGGRGQEVRTFQTFTSGLEALADWLAGEGVTRVVMEATGQYWKPVWYVLEEQGLELLLVNARHVKILPGRKTDVCDAAWLAELLEHGLLRGSFVPPAPIRELRDLTRYRKRLIQAHASEGQRVQKTLEDAGIKLDSVAADVLGASGRAMLSALVAGERDPEVLAELAKGRLRAKLPQLRQALRGRFGAHHALLIRLALAHLEQLEASIAELDAHIDRMLAPFAQARDRLDTITGVGKRAAETIIAEIGVDMAVFPTAAHLASWAGRCPGNNRTGGKRRSGKPTKGNRWLGEILIECAWAAARSRDTYLSAQYWRLARRIGKKKAAVAVGHSILVIAWHLLTNDCDYNDLGGDYFVRRDTDRQRQRAIAQLQALGYRVALEPLAA

SEQ ID NO: 163828 - protein, 324 aa, unidentified
MYLGLDVSRNTLDCRLNKDGFFYACKISNNEKGFEKLKAWLDGHGCDETLHCCCEATGNYYEAAAEYLAAHYKMSVENPRKIKAYAVSELKRSKNDKQDAKTIAEFCEEKSRKLKVWKPKNQTEKELQSITRYIARLKQQKASETVKRQTASDNIKDLIDETIDYLGSKIKEAEGRLKTYINQNPKLKQKAANLTTIPGIGVQTAAIIMTALSGNNDFKTAKQFTAYLGLDPAEYKSGTSVKGKDRISKVGDGTTRAALFSPALVAYRIGTFPRLVANMRQNGKHIMQILTAIMRKLAVVAYTLHNTNTTFEKQRYTRIQQKAA

SEQ ID NO: 163829 - protein, 366 aa, unidentified
MKKSSTMAMERIQIFKEHQLTIGLDLGDRTSHYCILNEAGEVILERKLPTTPKGIEEVFSRIPRSRIALETGTHSPWVSRQLTQLGHEVIVAHARNVRLIGESSRKDDQLDARTLARLARIDPGLLGPVRHRSAKAQIHLTVIRARAALVRSRTALVNAARGLTKSYGERLRSCGTEQMNRESAKGLSQELRDVLEPLLAEIESLTERIAEYDGRVEQIAKEIYPQVAVLRQVKGVGPLIALTFVLTLDDPHRFRRSRDVGCFVGLRPGRRNSGMSEPQLHISKEGDRYLRTLLVQGAHYILGPFGQDSDLRRWGLKLAERGGKNAKKRAVVAVARKLAVLLHKLWVSGEVYEPLRNNRKAMSAVA

SEQ ID NO: 163830 - protein, 350 aa, unidentified
MLIIGCDYHPSFQQIAYVNTESGELGERRLAHPEEAEQFYGELKQRNLAVRVGMEASGHARWFERVLRQLQFELWIGDAAEIRTKRVRKQKTDRQDAQLLLRLMMEDRFPRIWAPDAENRDLRQLLWHRHRLVQMRTRVMNQLHVVALNEGLQRKKALWRPAGRKELESLALAPWAHRRRQDLLELLDQLTPQIAKLTQALEAEVEKRVVARRLKTHPGVGPLTALAFELVIGTPDRFHCGKQIASYVGLVPEENSSGNRRRLGHISKQGNVLLRFLLVEAAQVTVRSQPQWRSKFFHLAMRRGRKIAKIAMARKLAVHLYWMWRQGWDYGQFKGFGSHAGAPGNRDGGK

SEQ ID NO: 163831 - protein, 351 aa, unidentified
MFIIGVDYHPSFQTIAFLMEETGECGEQELNHSDGEAERFYRDLKQRGICVRVGMEATGYSRWFERLLAELGFELWIGDPAEIKAKRVKKKKTDREDARLMRKLLLEDRFPRVWVPDPENRDLRQLLWHRHRLVQMRTRIMNQLQALAMNEGYRWKTKLWSGQGRAQLEKLSLAPWASRRRQELLELLDRMNPTIEELTAAVEREARKRTEVMRLMTHPGVGPLTALAFVLIIGTWKRFPRGKQIGNYVGMIPSEDSSAGKQRLGHISKQGNSLLRFLLVEAAQAAARCSPDWRRRYFHLAMRRHKSIAKVAMGRRLAVRLYWMWRNGCEYSQSLEFGSYAGQLGTGHGVK

SEQ ID NO: 163832 - protein, 414 aa, unidentified
MFAVGVDVSNGRSMVAVLGARRSVVVQPHEVPHTADGFAELAARLHALDGEVRIVMEHTGRYYESFAMSMYRAGFFVSAVNPLGIKGYQEGISVRKVKTDKADALKIAQFAIDKWEILPHYTPMDTIRYDLKTLHRQFQLSSKTKTALNNNLIALLEQSYPGANRYFDSPVRPDGSQKWVDFVDTFWHVDCVARVSRKAFVERYQKWCKRHGYNFSEAKAVEIHEDVRQRFPLVPKSDTCKLMVREAVAQLNAVSRTVETYRAEMDRLASQLPEYETVMVMTGVGKSMGPQLIAEIGDLRRFAHQKSLVGFAGTDPIKDDSGDKVSDSKPSSKRGSPYLRRTLFVIMTILLQLQPPDDPVYQFLDKKRSEGKPYYVYMTAGMTKFLRIYYGKVRDCLKEKGLWEQPNVDEVNPV

SEQ ID NO: 163833 - protein, 424 aa, unidentified
MNYTQNEKIEQVTESTLVLGVDIGSSEHYVRAFDYRGRELTRKVFRFSTDINGFNSFYDWVTQICIKHGKNEAMIGCEPTGHYWYTFYQFVKDHGMKLAFVNPASVKKAKELDDNSPEKSDLKDPKTIALLVKDGRFSTSYLPSGVYAEIREASVCRDQIMKQHVRLSNQIQGWLQKFFPEYFECYADWDSTSGLMLLREAPLPQDILKIGAGGINQIWRDAKVRAAGIKRAQTLVEAAQNSVGLEAGEAARLEIWVLVNDYILKAEQLKRLDEYLEEKVKEVPNVEKLLAIKGVGMSTVIGFIAEVGDIGRFTDPKQIQKLAGLEIVKKSSGKKKGQPRISKRGRRKLRRTMYESARALMIWNPAFQDVFLYYRNRTKNPLGGMQAKIAVACKAIRIFYVVLQTGCDFDEEKFRKDIIRPEAA

SEQ ID NO: 163834 - protein, 431 aa, unidentified
MDDVTRFEHFCQFRSNIRASRKHLIVGIDIAKDKHHAFFGTPYGKTLWRRLIFTNDLTGYSRLVEQVEVLIQQHQLKEVVFGLEPTSNYHKPLAHWLIQQGYSVVLVGGKAVKDNRELIDGRWDKNDTKDSANVADLISQGKCQFYEHPDDNMVAVRSLLVVRKQLKKEEHRLRMRIRNGLIAKYFPEMDRHWGSCLEENLAIVRWYLDPRKIAATEFDQFVRHVTTTDRGLRQVNRLKAIYQAAGQSVGLPVDTCACYEAQVVVERLKRVKEEILQTMHQIESVCQKIPGYKLLLSIPGFGPYIAALVLAAIANPLRFTSRKQVIRLAGLDLNASRSGKKSLDSVPVISKKGDADLRYALYQAALIASYHNDGFRRLYQRMLDGRQGERGIKTKARVKLAAKMLVIAWTLLKNNEPFDETRLLVESGDGR

SEQ ID NO: 163835 - protein, 361 aa, unidentified
MTTEEKRRTMFVGVDVHKDTHTAVGVSPFGEKLFELTVGNYDKDFRRLVETARSEADKHVLLPYFGLEDCSGYGERLALHLSNVYPLVHVPSIMVDRQRARNTHPEKSDSLDAYGVAEVMIRKIDTLPTFTVSEESKKAKQLKELSMEREYLVNERTRLKNHLHVLLHRIYNTGYRDKFKDPFSKKALAYWCAARPTCDPFTLKSMKRKARRLRDIRDEVIEIEKEMDVLLEGYTIQTASGCGTVIAATIIGEVGDVARFTSPAALAKYAGCAPRECSSGKNHRHRKTRSGNRRLNCAFHRMALSQISRMGNDAARTYFEKKVREGKSKSQALVCLRRQLVNIVWMMLKHKTEYRYPHTEG

SEQ ID NO: 163836 - protein, 398 aa, unidentified
MAVTIGIDPHKGSHTAVALDEHEETLGQLTSLCEWAKAWSDRTWAVENASGLGYLLAQQLVGAGEKVLDVPPKLAARARLLDNGDVNKNDPNDARSVAVAALRAKRLSEVTKEDHAAVMRLWARRRKDLTSSRTRVANRLHAVILELVPGGYTGEIYANKVARLLEALEPAGAVPAARKELAEELLGDLRRLDTQLKELKERLAVVVAASRTTTTRIFGVGPVVAAITVGLTADVRRFPDKDHFAAYNGSAPIEVSSGPKKIYRLSMRGSRQLNHALHMAAVTQVRHAHSEGRAYYDRKVAEGKTGKEALRALKRRISDALYAAMVADARRERREDQTSGGPGGQTGNGSVACAAGSHPAKPALRPSHSRAKAKPRPLRQAAPAIGLREDQKKISKAS

SEQ ID NO: 163837 - protein, 427 aa, unidentified
MNYTQNQKISQITPSTLIIGIDIAKDKHVARAQDDRGIEFGKRLIFENRIHGFQNLLQWVERHQKQNEKDRVIFGVEPTGHYWLNLAYFLTAKGYDFVLVNPMHVKKSKELDDNSPTKNDTKDAKVIAQLIKDGRYSVPNLLDGIYAELREGVKIRDQLVEQLMITEGRIQNVIQRYFPEFFDVFKDWKGKAALCTLKLFPFPLQINEKTSEEVLAAWKPFVQRGVGIKKATKLVETAKKSIGVQNGIQFARREMDCLLEQYELYNEQLEQLDQELEGLVETMPGAKEMMVIKGLGPPTVALFFAEVGDITKYSHPQQLVNLAGLSLREHSSGKFKGQTRITKRGRSRLRRALYVAIRPLVAHNPTFKALHHFYTKRPDRPLKKQQSLIALCCKLLRVLFVIGNRQCEFDGSKLLQGLPQIETLQAA

SEQ ID NO: 163838 - protein, 369 aa, unidentified
MIRPTCFKNDTSGFDFLIDQINRLPVKPDLIGMEDTGHYHLNLLQFLLQKNFKVALINPTSTDMARKMQGSITKNDKTDTLLICDMLLSSSRKKPYRIIQLEDDELTEAKYLTRHHHDLKEERNTYTNKLQQCIDRVFPEFNSLFKSKYGIVYMRILKTFASASNIAHANIRSLRQCFAAQKKGRPISLTPEQLKEAARKSVGTHSDAMVLKIKHLIARIELVDEQLSEIDKKIEEFSEKINSPILSIPGISHFSGTSIIAELGNIGKYSKPSKIIKFAGVAPKEYESSEYKAQHTAISKKGSKYLRKTLYQVIFPVIQNNPVFKAYYNLKISQGKGHLCALGHCVRKLMRVIYHLLSTGTYFDPDLLR

SEQ ID NO: 163839 - protein, 423 aa, unidentified
MNETPAQPGDQPALFIGIDWADQKHDCHVIDRHGKEFHQELKHSAESIDTWVGEMLKLAGGQPIAIMLEQSRGALVYALMFRQNVLLYPVNPKKLARYRESYPGDGKNDPTDAKYLARMLCERITTLTAWQPDDENTRLLANLSRQRRKIVDGQTKLRLQLTSLLKSYFPLLLELFGKDHQLPLLLTVLGRWADPRKLRRADRRLIRRVLREHSNGSQEQHDQIIARIRSAQLLCDDEALITPSAMAAKFLGSQIQQSQKTIREFDAKIDEVMKQHPDAHLFTSLRGAGKVLAPRLLCAFGSQRDRWENAESVASFSGIAPVTKKSGKRCHVHRRFACPKYLRQTFHEFADSARIHCPWSKARYRMLRDRGMKHHAALRKIARSWIRILFRVWKTRTPFDCDRYIANLKQRCPEINQYLAQES

SEQ ID NO: 163840 - protein, 411 aa, unidentified
MQRVIGMDIHRTFAEVVFWEAGRLRPGGRVDMTRSGLEGFGRSLSKEDEVVVEATGNAMAVVRVLSPYVARVIIANPLQVKAIAHAHVKTDKIDAGVLASLRAAGFLPEVWLPDADTELRRRLVARRNQVVRHRTRIKNEVHSILQAHLIPPCPHADLFGRLGRSWLGRQELPVDERAAIERHLRELDRLGEDLELLDREIAERVIEDQSVKRLLTITGVNIIVAAGLVAAIGDIQRFSSPQKLVSYVGLNPRVRQSGLGLAQHGRISKRGRSHARAMLVEAAWAAAKAPGPLRSFFLRIRARRGHQVAAVAVARKLAVLCWHLLTKDADYQWARPALVANKIRAMQLQAGQPARKGNKRGAAYAYNIKELRDREIDVARHAEHAYEQFVSRWQPRGPGKRRTGAANEERR

SEQ ID NO: 163841 - protein, 333 aa, unidentified
MAKSTAMRMVGVDVSARWLDAARGAADEAPTGQQFANTAAGQRQLARWATQGGRAARVVLEATGLYSLDVALTLQRTARVEVMVLNPRVSKEFAGAYGQRARTDATAAVSLREFAARMPFTAWVPPSAAALAVRALMRRVVALVEMRVQEANRLHAVERTAALPAVLGEDLRAHQRELTRRLRRLEQEALAVVEAAPELRARYRRLRSVAGIGQRSALLLLAELAVLPPELGARQWVAHAGIDPRPIRSGSSVHPPVRISKRGNVYLRRALFMPALVAVRCNPAVQRFAAALAPRGKAPLQVLVAVMRKLLHAIYGMLRTDTDFDGEKFRRAA

SEQ ID NO: 163842 - protein, 350 aa, unidentified
MQTIYIGVDFHARQQTICYLTTDSGELLFHQLKHEDKALVRAFYAQFRGHVIVGLEASGYSPWFERLLEELGCEVWLGHATEIRRRARWRHKNDRRDAELILDLMVHNEFPRLYLPPLQSREVLRMLRYRQKLIKMRTIGKNSLQALALQSGLAKGPHLFTKTGLQELRSATMSPAMQWQREQWLQLLEPLNERLLETMRWLQQQSQADQRISRLRTHPGVGLLTALCLVHSLEPVRRFANTRKVTAYAGLDPVERSSAERQRFLGISKGGSRVLRFLLVEAAHTALRKDADLKRFYQRLAQRHGRPKAKVAVSRKLLIRTYIMLRDEIDYAEFQRRAVAARPVLPAHGL

SEQ ID NO: 163843 - protein, 426 aa, unidentified
MRFIGLDVHKDFCEVAVVEDHACWSGPRVRSTPEDLEVFGQSLGPEDHVVLEATGGALAIARILERYAGRVVMANPMAVRAIASAKAKTDRLDARTLAKLLATGFVPSVWMGDERTRLLRRLVSRHAQLIRQRTRAKNQIHAVLQRTLKGRPPASDLFGKRGRAWLGVQDLPADERETVQAALRHVEFLDGELRLVDRTIAQQVLGWPEVRRIMTIPGMGASAAAGVMAAIGDVRRFPTPRHLVAYLGLDARVRQSGSAPARHGGISKRGSSEARHLLVEAAWAAIRTPGPLRAFGERIRARRGANIATVAVARKLAILCWHLLTREEDYAFARPSLVRQKVRLLELAAGDARRIGYRNPVRVFATPAQHRLEREVGDQAEKAYRRFVKDFLATGKKGAGAITGARISVPRKGQAPRQEQAPDPAL

SEQ ID NO: 163844 - protein, 398 aa, unidentified
MNAVGIDVSKGKSTVAVIQPFGVVIAEPFDVSHTESDLNKLVQLIKSLSGETKVVMEYTGAYYEPIANALHNQGIFVSVVNPLLIDDYGTKRVRKVKTDKKDSLKIASFAIDKWLDLREYIPANDIRKTLKILNRQYVQYNKILVMQKNNLISLLDSCFPNANTLFTSPRRESDGHEKWVDFVLKFPHIHSISKLSLSAFKVKYQSWCRKNNYNYSDKKVADIHSYCKTQISVLPMTVSVIKIITEAAVMLNSTLETLCTFRDEMDRLSSTLPEYNAVMGIYGVGKVLCSQLIAEIGDVRKLNNSKSLVAMAGIDPPPNQSGKVDTKSRSISKRGSPVLRKTLFQIMTIIIQNKPVDDPVYQFLNKKRSEGKPYRVYMIAAAHKFLRIYYARVMQALN

SEQ ID NO: 163845 - protein, 362 aa, unidentified
MAKCITYVGLDVHKDTIAVALAEAGLRGEVREYGRVPNTAGALKALTEKLAAGRRELRFCYEAGPCGYGIHRQLTAASHQCVVVAPSLIPRKPGERIKTDRRDATKLAKLHRAGELTAVWVPDQAHEAMRDLVRARQAAVRTLRQARQQLSGFLLRHGHHYHRPAWTQLHRRWLASLKFEQAVHYIVLEDCIAAIEAATARRDRLEAHIEAALPEWSLAPLVQALQALRGVGLVAAATLAAELGDITRFTNPRQLMAFLGLVPSEHSSGGTRRQGGITKAGNGAARRMLIEAAWSYRFPARISREKLLRQERLAKPIRDIAWKAQERLCRRYRRLARTGKLSTVITAAIARELAGFVWAIAN

SEQ ID NO: 163846 - protein, 431 aa, unidentified
MTATDSTARTRILVAIDIAKAKHEVLVELPTGKRRKMIVRNQLSDFRQLAAYLKRLDGALEIALEPTADYHRNLAYFLKTQGFEVKLVSSIAVARTREALHNSWDKNDPKDAQVILHLLRNGNTQYFYDPVIEQTNDLQELSKTHFQVSLRKTRVRHSLLNHYLPLYFPEAERFLSNSWSHWFARLLIEFPTPQAITQLPENEFIERASQLLKRKQSKAAILRALYAKAQESVALPVPLESQAIATFRLTLAQHLELCRIRAELEETAHELLQDRLDYQILPSVPGVGPIIALTVLAEAGDLRRFGHERQFLKFCGLDLATSQSGAYRGRTQLSKRGNSRLRSALWMAARRATHMQENTFRQKFSRYLRSDPTNTDLRRKAYTACTAKMARTIYGLIKHQQFYRAYREDAIPEPGGRTRSHGPLRQAAVVA

SEQ ID NO: 163847 - protein, 341 aa, unidentified
MSNANIYIGADLHKKTCYLTVMAKDGKIKKQTEISTDTDKVAEFFKKYKGANVAVESTMNWIPFYENVESIGCNVVLSNPLQTKAIAFARIKNDKVDSKILADLYRTNLLPTAYIQPRDIRDLKEIVRQRIGYVELRTRIKNKIHSVLFKNNIKHPFTNLYGKAGMIFLQKLALRNIYREELDQYLKTLEFLNEQIDEISDKIKSVAKEDYDCKLLMTIPGISYFSALTIKSEIGDIGRFPNGKKLCSYAGLIPSTYASAEKVRHGRITKRGSRWLRKTLVDAITSGSRNQNKISVFYQKLKKNKGTGKAKVAAARKLCEIIFAMLSDKQPFREFVPVKQR

SEQ ID NO: 163848 - protein, 356 aa, unidentified
MISADKYIGMDVHQATISIAVLDSTGKLVMESILETKAATILQFVHGLRGNLHVTFEEGTSAAWLYDLLRPHVTELLACNPRKSASLKDGNKNDRIDARKLAELLRAGLLSPVYHGEAGVRTLKELARSYLTINKDLTRVMSRLKALYRSWAIPYAGKLVYAPCYRANWLEKIPEAGARRRAGRLYQQLDLLQFLRKEARRELLAESRKHRANRLLRGIPSIGPIRAALLVALMQTPHRFRTKRQLWAYSGLALETRTSGEYRFVEGQLQRSKKQPAIFGLNENHNHDLKNIFKGAATRASICAGPLRDFYSALLAKGMKPSMARLTLARKIAAIALSLWKKGEPFDAEQLKRQAA

SEQ ID NO: 163849 - protein, 336 aa, unidentified
MKKKFFIGIDVSKYTIDVAFIKAQQNNKPQWKIFNNTDKGMQQLGLWLKECAIPFSNNTLIVIENTGVYHRRLLNFCLNYKLPVCVENGAQVKWSLGIARGKSDKVDSRRLAVYAMRFADRLKPASALVSGIQKVKDLISMRSRHRIQLSALKAYLKELRQTSDLKDALHLQKIHEPFIKAARQLIKKIETDIIKTLQANDDTCRQYRLLLSVPCIGPVTAAYLIACTNAFTNCNSAKQLACYCGVVPFTHQSGISIKGKHQVHKMANKTLKALLHLCSLAAIKYVKEFQDYFNRKVLEGKHKMSVLNALRNKLVLRAFAVVTNDRPYVDKLQIES

SEQ ID NO: 163850 - protein, 412 aa, unidentified
MQVLYPRCAGLDVHKATVVACVMITAADGAVVSETKTFGTMTADLLSLGDWLKSQAVTHAAMESTGVYWKPIYNLLEGQFELCVVNAQHMKAVSGRKTDVQDAEWIADLMRHGLLRASFVPAQAQRELRELVRHRTNLVIRRAQAVNELQKCLESTNLKLGNVVSDITGDSATEMLKALLAGQTDPEVLAELARGRLKDKKLRLQAALAGTVREHHRLILSQLLADIGWCEEQIAEVSELIAARLKDQQDLLERLDQIPGVNRRVAEILVAEVGTDVKRFPTAQHLVSWAGLCPGQNESAGKRRSSRIRPGNRSLRGGIISAAHAASHKKDSYLSAQYRRLAGRRGKKRALVAVGRTILQTVYYLIGRRTNYQDLGADYFERRDPEGLARRLALRIEKLGFDVTWQPAQKAA

SEQ ID NO: 163851 - protein, 355 aa, unidentified
MTSVKYIGLDVHKESISICVRNSVGKVVMESVIETKASTILQFIDGLRGDLRVTFEEGTWAAWLYDLLKPHVSGVEVCNPRKNALLKDGSKSDRIDADKLSEQLYMNNIKSVYHGEHGLRTLKELARSYLTISKDLTRVMNRLKALYRSWAIPCAGKEVYAPRHRAEWLGKISESGVRRRAELYYQQLDALCLLRQEVRRDLLLEVKKHKAWKLLRQIPGIGPIRAAVLMAVMQTPHRFRTKRQLWNYCGLGLETHDSGEYRAVKGQLQRAKKQATVRGLNRDHNHDLKDIFKGAAMRASTTAGPLHDFYENLLAKGRKPTMARLTLARKIAAITLIVWKKEVRFDANYLKLQAA

SEQ ID NO: 163852 - protein, 347 aa, unidentified
MDSEKYIGLDVHQATISVAVMDCTGRIIMECILETKAVTILEFFAGLRGSLAVTFEEGTCAAWLYDLLKPHVGKLLVCNPRKNALLKAGNKSDRIDARKLAELLRGNQLKPVYHGETGVRMLRELSRSYLTIVKDLSRVMNRLKALYRSWAIPCAGRDVYYTRHRAEWLDKIKEAGVRRRAERLYQQLDMLQHLRQQARRDLLVESRKHPSIAQLRQIPYLGPIRSALVVALIQTPHRFRTKRQLWAYSGLALETRVSAEYSYATGQLRRSKKVISIRGLNKDHNHDLKGLFKGVATMASVRPGPFSELLRGFTGERDEADHGASDAGSQDCSYYPDSVEERRRLRR

SEQ ID NO: 163853 - protein, 347 aa, unidentified
MEPKTFVGLDVHKKTVVATAVDRLGNLIDQSEFGPSDDELIAYLRTLPGNQRVVLEASPVWEHFFDAASSTGAEVLVSNPYKTRLIAEASLKSDKVDSAALATLLRLDAVPTTYVPDERTRALRRAVRDRVYYRRLETSIRNHIYGALLARGIPYEAGVLLRKARREELRAHGITEVDRGLDALISLEATTKDATSTIHAAFRESSEAQLLHSIPGIGELTAVALVAFLCPINRFPSFDRLSSYAGLCPTNHQSSSTSYQGALKPDCNHILRWLLVESQWVHRHHCRNGYVARVGRRITRRKGGSRGAVAAAHALLRVVFATLKRGTPFTKDAPEGPSCKVKPAESG

SEQ ID NO: 163854 - protein, 456 aa, unidentified
MSRKRKSNPKSNPKTGGASLLSCLNLNAAGVDIGATEIYIAVPGDRDPQPVRHFSTFTEDLHAAAAWLKACNIESVAMESTGVYWIPLFQILEARGFTVFLVNAHHVKNVPGRKSDVSDCQWLQYLHSVGLLRGSFRPEQAVCTVRSILRHRDSLVQMASSHVQHMQKALDQMNLQLHHVISDITGLTGITILEAILAGERNPHQLAKLRDRRVKATEETIAKSLVGDYRREHLFTLRQSLEAFRHYQQLIGACDTEIEQYLEAFESKLDPPPGSTSPSKDGSKLKASEPRFDLQTHFHRIFGVDLTQVPGINVLTTQTLLAEIGPDFSRFATAPALTSWLGLCPDNRVSGGKLLSVKTRKVKNRAATALRMAALSLHRSQSFLGHFYRRMRAKLGAPKAITATAHKLARILYHMVTTGHAYDETICAQNEVQNRKRMEARLRKQAREFGLQLVAL

SEQ ID NO: 163855 - protein, 285 aa, unidentified
MKEKLRFLGMDVHAETIAAAIAEPDGEVRSLGTIPNRMESVRKLIKKLGPVEKLRVCYEAGPTGYVLYWQLAELGVQCEVIAPSLVPVKAGDRVKTDRRDAEKLARSYRSGDLTAVWVPDEGSEALRDLVRAREAAKQDQLRARHRLGKFLLRSGQRPPSGVRAWTHLHLIWVSQIRFTQAAQESTRLDYLHEVEHMRERVLRLEQAIVEAVKLASPALQEVITDLQALRGIAHISAVTIAAELGQVSRFAGARELMGYCGAVPSENSAASGPAAAALRRRATRT

SEQ ID NO: 163856 - protein, 366 aa, unidentified
MKKTITVQAFKSEIFKEQKLTIGLDLGDRWSFYCVLDEAGQVILEQKLPTTPEAMKQTFGKIPRSLLALETGTHSPWVSRLLSELGHEVIVAHAQKVQLITKSNRKDDRHDARTLARLARIDPALLGPVRHRSAQAQLHLTVIRARAELVSARTALVNAARGLVKSSGQRLPKCGTYQVSEKLAEGLSAELREVLVPLFKEIESLNERVKEYDERMEKIAKEVYPEVSLLQQVKGVGTQIALTYVLTIEDPYRFAKSRQVGCFLGLRPGRRNSGESEPQKGISKEGDRYLRTMMVQGAHYILGPFGEDSDLRRWGRKLAERGGKNAKKRAVVAVARKLAVLLHRLWVGGEVYEPLRNSQKAIREVA

SEQ ID NO: 163857 - protein, 326 aa, unidentified
MTKLPIGIDISKDTLDYHVHQAKQEMGSGRIGNQLNEIRSFLCQFCPNTHFLVAEPTGTYGDKLFELATQLGFDILLAPPWKSSQFTSVLGIISKTDRVAAYVLAQMGLKLNLDKYHPQSAVMKERKQVQMAINALSKQCQMLKNQLHALEQRFAPSQAAVSALSNSLATLEQEKQRLEEQLQDLDEEEAAEFRKYAQSVKGIGPKSAAMLMLYTNGMKYFDKKTQLPRFIGTAPTKHYSGTSIKVRGAITKSGPPELRACLYNAAKSAKRFNHACKALYERLRKKGKPHKVAMIAVINKLLHQVFAVVKSKNLFDNELYLKNYNE

SEQ ID NO: 163858 - protein, 355 aa, unidentified
MSQEKYIGMDVHQATISVAVMDAGGKLIMECLLETKASTIVEFIQGLQGRLSVTFEEGTSAAWLHDLLQPHVSRLVVCDPRKNALLKEGNKSDRIDARKLAELLRTNQLKPVYHGEHGVRTLKELGRSYLTITKDVTRVMNRIKALYRSWAIPCSGNSVYAPRHRVEWMAKLVEPGVRVRAQRLYQQLDQLQPLRLEARCDLLRESHKHPAVQLLRQIPSIGPIRAALLVALLQTPHRFRTKRQLWAYSGFAVETHDSGEYRCVRGKLQRNRERITVRGLNDNHNKDLKSLFKSAAISASTRPGPLHDFYVARVEKGMRPTMARLTLARKIATITLTMWKKGVSFDPQNLPRQAA

SEQ ID NO: 163859 - protein, 377 aa, unidentified
MESTRHIGIDLHRNCFTACVRLENGRNYLTEWRLEQLPKFVAKLRPNDEVAVEVTGNTRLFHDAVAPHVKRVVAVNPNQFQVITHSVKKTDPNDARNLALYLAKDLLPEVRMKDKTRAQIASLTQTRDTMVKLRTALKNKINNICSAHGVNLSKESLASEKGLKAVLEMPFDPLVELELKILVEQIRSLNKSIAELEETISRESQKLEGHKHLTSIKGIGGLSAGILLSIIGDIGDFADEGKLAAYFGIVPRISHSNETEHSGRITKRGTKLGRTTLVQCALIAQRYSPYTNGRRVAAPGKRSSHWHANFWESSIERLRTNGSLKISPTLYWRRKRRHEPQTRRLRLRSAQHGFAPAPAAPWSKTFWSDARAFDLPM

SEQ ID NO: 163860 - protein, 359 aa, unidentified
MSELTFIGLDVHARSVWAGVLDGSTGEVSSKAVPARSDELVSWLRTQGESISVAYEAGPTGFGLARACAAAGIPCLVAAPSRIARAPGERVKTDRRDALRLARLLRLGELVAVRVPSTCQEGARDLVRAREDARGDLMRARHRLSKLLLRQGLVWERKAWTQVHERWLATQCFGERGLQIAYAEAVATVESVRARREALDAAIAEEAAKEPWAGTVGRLACLRGVSTLTAFGLAAEVGDWERFDGRSIGAYLGLTPSESSSGERRRQGAITKTGNSHARRLLVEAAWHQRRPSSRPSRELVRRREGQPALVRVRAEAAGRRLHQRWQRFDARGKRSTVAAVAVARELAGWCWSLATMDA

SEQ ID NO: 163861 - protein, 353 aa, unidentified
MHTHQNSSNPVATIGVDIGKNTFHLVGLDKRGAIVLRTKVSRSQLERRLANVPCCLVGLEAGCGSHHIARQIRALGHDVRLIPAQYVKAFLKGHKNDYRDAEAIAEAVQRPTMNFVAIKTPEQSDLLSLHRVRSRLVGQRTAVINQIRGFLIERGITVRQGPAPLRKALPAILSSPTEVLSARMVRLITDLSEDWRRLDERIEAVSAEIETLAENDGGCQRLMTVPGIGPIISSAVVAAIGNGSGFHQGRDFGAWLGLVPKQESTGDRTKLGKISKRGNKYLRTLFVQAAHVVLVRRPAAAMRGLWPWIEQASKRLAHRNLLAIALANKLARIAWAVLARGRDYEPRIIPNAA

SEQ ID NO: 163862 - protein, 386 aa, unidentified
MQTLNNLSRSLIALEPASTLIAVIEMSLSSWLVAGIVPGIERQPLKKLAVDESALLRLLHRWREEAEKAGCRIERIVVAFEAGRDGFWLARWLKARSIEAHVIHAASVAVSREHRRAKTDRLDAELLKRAFLGWLRGERNHCKVVAIPTLKDEDAKRPSRERESLVGEQSRIINRMKAALIRLGIRGFNPKLKRAAGRLDSLRTPEGEPIPPNTLAELRRDMERRRLISNQIRQIEEARLKHFEQAPNDGPHAMVRLLARVIGVGIETADMLVHEVLSRNMCDRRAIARYAGLTGSPDESGRKRREKGLARSGNGRVRRGMVQLAWRFLTYQKESALAQWYRARTENARGARKPMIVALARKLLIALWRLMPEGIVPDGVVLRPAQ

SEQ ID NO: 163863 - protein, 341 aa, unidentified
MSSEKYIGLDVHQATISVAVLDSTGKLVMESILETKAATILEFFAGLRGTVSVTFEEGTWAAWLYDVLKPHVAKLVVCNPRKNALLKDGNKSDRIDAHKLAELLYLNKLSSVYHGETGVRMLRELARSYLTIVKDLTRVMCRLKAVYRSWAIPCAGRDVYYTRHRDEWLGKINEAGVRRRAERLYQQLDMLQYLRQQARRELLAESRKHAITVKLRQIPSLGPIRSALAVALIQTPHRFRTKRQLWAYSGLALETRTSAEYCYVKGGLRRSKKQISIRGLNKDHNHDLKGLFKGAATRASVLPGPFQDFYQRSLAKGIKPTMAQDCSHHADSMEEGRKLRR

SEQ ID NO: 163864 - protein, 428 aa, unidentified
MKFKQSMSQNQRIERITISHLVVGIDIAKETHVARAVNFRGIEQGRGISFSNNEAGFRKLLNWVRSLQTKYKLQAVIMGMESTGHYWFNLADWLLEQSVEVVLVNPLTTKRNKENRDNCQSKSDAKDALVIADVVSRGYYSELRTQDAFYKRLRHTVNEREYWSDLRANVSNRIVRWLDIHYPEFTTFFKEWDCPRGIATLKSFPLPSDLHSLTAEQVVDGWRKAGMQRAGGRLGLCKAVELMHLAHTTVGARETAEQARREIIRLLDEYERLTKRLEEMGQELSVLLQEIPQTMNLLSTIKGLSPLYIAVILANAGDLKRYAHGRQLMSLAGLNLAESTSGKKKGQIVISKRGRRQLRKYLYLAVIGLVANNPAFKQWHETNVQVKKMKKMRSIFKLIGKLARILVAMAHSGEAFQGEKAVALKVAA

SEQ ID NO: 163865 - protein, 349 aa, unidentified
MTVYVAVDFHAREQTISYCNTADGEIHRTKLRHQHDDVRKFYEQFTGEVIVAFEASGYSAWFEQMLAELGHPVWLGNAAEIRRKAPRRQKNDRRDADLMLDLLLKGDFPRVFSFSEESRTVMRQLRYRHKLVKVRTIAKNSLHALGINAGLPLKRKLLTQAGIEQLQALKLTPVMSSQRDEWLELLAAMNKRIATVEEALQQCAQDDAEVELLRTHPGIGLLTALALRYTLLPVSRFSTTRKVTAYVGLDCVEEQSSERRRLGSISKQGSRLLRFLLNEAGQTAARRDPELKQFYKRLLHRRDKPKAKVAVARKLLVRSFIMLRDQIDYAEFMRRGVAARVARETHSPK

SEQ ID NO: 163866 - protein, 341 aa, unidentified
MPAQRHIGIDLHRNQFTCCVRLENGRNYLTEWKLEELPRFVKKLRPSDQIAVEMTGNTRLFHEAVAPHVKRVVVVDPNQFQVISHSVKKTDPNDARNLALYLEKDLLPEVRMKDKRQAQLASLTQTRDTMVKLRSALKNKVNNILSAQGINLKREDLSSEKKLQEILAMRFDAMVQIELEVIIEEIRSLNQRIAKLEKTIVEEGSQLEGHKNLTSIKGIGPLSSSILLSVIGDIHDFAEEGKLAAYFGIVPRVSNSNETERSGRITKRGSKLGRTALVQCALIAQRYSPYLKRYYEQVKARRGTGKGIIALARKLLGIIYRTLKNNWVFADFPNFVLREAA

SEQ ID NO: 163867 - protein, 389 aa, unidentified
MPIAADRAEAPTTIQTHLAAIFISLELSRSIWLITSLTPGGGEKMSKHSVQAGDTAAVLARFSELKRKASERTGNSYPVVTIQEAGLDGFWLHRVLQAEGVESHVVDPASIATSRRRRRAKTDGIDGEALLRALLAYKRGEPRVCAMVKAPTPEEEDRRRLCRERKVLIAERVKHVNRVKGLLFSQGVSGYEPLRRDRRQRLDELTTGDGRLLPAHLKTQIGRELDRLELLLDQIKQAEVERDALLAAPQAAEPSSAGRMLLEFKGIGAEFAASLWLEALFRHFSNRRQLASYAGLAPTPWQSGSVDREQGVSKAGNPRLRTTLIQLAWLWLRHQPQSALARWFNERVNRNGGRMKKSAIVALARKLLVALWKYVTAGVVVEGAVMKSA

SEQ ID NO: 163868 - protein, 314 aa, unidentified
MADPCSVGIDVSKATLDVAWSTNPAARWQTTNDDAGWAALVMHVRALEPTVIVLEATGGYEIGAASALSTATLPVAIVNPRQVRDFAKALGLLEKTDAIDAAVLATFGARIQPTARPLPDDLQADLQALVTRRRQLVDMLTAERNRVALARGAVRKNVVAHIAWLEKELGKTDRELRTQIEASPIWRARDQLLQSVPGIGPATSARLLASLPELGRLSHRQISKLVGLAPLPDDSGRRSGYRRVQGGRGSVRSALYMATVCAITHNPTIRAAYRRWRAAGKLPKVALVAAMHKLLIHLNAMIRHQTPWHPPATA

SEQ ID NO: 163869 - protein, 445 aa, unidentified
MPHARKRYVGLDVHKDVVEYCILDAAGKKIDGGRIICEQSVLQQFATKILSTKDHVALEATTNTWSVVDIIEPHVAKIVVGNPLKTKAIAEAKIKTDKVDAMILAQLLRCDFLPDVWIPDAKTRVLRRLSSFRKSLVQDTTAAKNRIKGVLNHLLIKHAVVWSKDGLDELKQLDIPSHERIIMDCEIAVLEHLRTQIEKVESEIKKLAYEEDNVRLLMTLPGVGYNTAVAVVAAFGDISRFKDADRAASYLGLVPRVTQTGNYCRHGSITKAGASLARSLLCEAAQHLSRNEGPLGVFVRRLLQKKTWNKAIVAGARKLATIAYHMLKNKEPYRYAPVARTREKLACLRKSVTGKRSEYPRYRYDETLREHIETKSDVAVCFIPPISDVYEKAGLPAARSFTELSVGEKRAIKEMGLTEHVRKTEKVQVIVKPKKTRTSPSAKVE

SEQ ID NO: 163870 - protein, 368 aa, unidentified
MFTERTGVGLDVHARSVAAAAIDTVTGEVIERRLGGDYGSVVDLARRLEAGHGPLRITYEAGPTGFGLARDLAAAGLTVQVAAPSRLLRPAGQRVKTDRTDAMLLARLTINDDIVAVRVPTMSQESARDLVRARDDARADLMRARHRLSKMMLRRGWVYPGRTTWGPAHDAWLRRIRANDVPALGSGAAAAFDDAYDAVAHALARRDRLDEAITALAADSEFTATTTRLSCLRGISTLTGFALAVEIGDWNRFTGATIASYLGLVPCEHSSGQTRSQGGITKTGNTHARRLLIESAWQHKPAYRPGTTLRAAWAKAPAVVAERADRGNRRLHRRWTALAARHKRHAVANTAIARELAGWCWSLATMDA

SEQ ID NO: 163871 - protein, 372 aa, unidentified
MNYNTVYVGMDVHKESFSLCAYTIEAEKASQYQRTEADYKKVLNYLEFLRTIYGDDANFICGYEAGCFGYTLYHQLTANNVKCIILAPTTMLEQRSKKRIKTDRRDAEIIAKCLAQHNYSPVHIPTAKDEETKEFLRMRDDHKLALKKVKQQILAFCLRHNYRYDGKSHWTAAHLKWLKALTPEALYKEILDEYLLTYQTLSDKIERLDKRIEELATQDEYKEAVKKLCCFLGVKTHTALSVLVEVGDFKRFASAQHFASYLGLVPGEDSSGDDQNRLGITKAGNRHVRLLLTEASQCYARGQVGFKSKELKSRQSGNTPAVIAYADKANERLRRRYYKMVLNKYKKHNVAKTAIARELACFMWGMMTDNIA

SEQ ID NO: 163872 - protein, 339 aa, unidentified
MPHYAALDVSNDETAIHVVDEAGRTVWRGKRASDPEALAAALRRHAPDLVRVGLETGFLTPWLYHSLKAIGLPIVCLEARHARAATALQRNKTDANDAESLAQLVRTGWYREARVKSFAAHAVRHLVGARAQLKGVSVDLSNQIRSILKTFGLRAGKGAGHPFALRVRELLKGRPSLCAIIDPLLAAWQAVREQIAVLDRRLIGLAKGDPTCRLLMTCPGVGVIVATSFAASIEAPEYFRRSRSVGAYLGLTPTRHQSGEVDRTGGISRRGDRLMRTYLFEAAASLLIRVRQNSALKTWGRELAKRMGFKHAAAALARKLSVVLHAMWRSNTPFQAWPV

SEQ ID NO: 163873 - protein, 340 aa, unidentified
MNVKTIGIDLAKNVFQIHGVDEHGKRLFNKQLRRAQMASFFANIPPCLIGMEACASAHFWANKLISMGHNVKLMAPQFVKPYVKTNKHDAADAEAICEAVTRPNMRFVPVKTAEQQAVLALHRSRQSFIKQRTAQANQIRGLLAEFGIVVPRGIQQLQRRLPELVEDADNPLPVLFRTQLSLLQHHMAYLFDVIATLDKQIEQCYRQNALCQRIGKIPGIGPVTASALIATIGKANNFENGRQLAAWLGLVPRQHSSGGKQVLLGISKRGDTYLRTLLIHGARAVLQSAKHKQDAVSSWANQLMARRNNNIASVALANKNARTVWALAKEREYCAPIISA

SEQ ID NO: 163874 - protein, 374 aa, unidentified
MRNVCGLDVHKDSVFMCILKENGDKIEEKFGVLTPELDRLRDLLVCHLVGEVAMESTSIYWIPIWRVLCSDFDVKLVNPYFIKQLPGRKTDVKDAQWIATVLQKELIKGSFIPEPVIQELRLFDRKIFYLNRNLQRAEQAIDLILQRCNIRLSNYVSDIGGKSMQKVIDAIIQEITDPEILLSLVHKRTRNKHGDKAIKAALTGIISKADRMMLKLSWEEILMYERQIEECYEQMREICNSHFSQEIELLETIPGIKQEAAMRIVAEIGIDMKAFLTASAIVGWAGLKPRNEESAGKIKGRKTLHGNKYLRILLIQCAWAACRTKQSRFFYKYQNLSKRMNHNKALLANARKLLVIIWNILKKKQSYTTGLLTA

SEQ ID NO: 163875 - protein, 478 aa, unidentified
MARTRKKPVPAPAGEGVEVIDVPVQVIARAAAIDVAKGSGMVCTRLPSETRAGRRTQRVWEVTATFAAVVTLMDHLVNQGIERLVLESTSDYWRIWYYLAEAAGLEVWLVNARDVKHLPGRSKSDKLDCVWLCKLNERGMLRRSFVPPGQIRDLRALTRLRARLVHDRTRHQNRIEKILEDSLLKISSLISDLMGVSGRRMLAALVNGERSPKALAALGDYRLRATPAQLEAALTGRFRDIHAFEIGMLLELTDDLTAKITRLDQQITGLLEQIPGISGACTSCGVIGGGHAPACASDQAKVLSVIERLDEITGAGPDTAQVIVAELGTDMTQFPTPGHAAAWAKLTSRTIQSGATTKNGRTGKGNPYLRGALGAAVMTAANTDTFLGERYRRIARRRGKQKAIVAVARTICEIAYLIINDPGFRYIELGAGYYARLDPERQTSNKIRELEKLNPGMVVTLTPREPDPGTPATQTPAA

SEQ ID NO: 163876 - protein, 404 aa, unidentified
MHERTAGIDLASEEHRLIVVDAEGQTIDERRIPHSEEGITRLVQRLLELDVVRVAIEQPNGLVVDRLLDAGVSVVAVHPNQLAAARDRYRSGGGKSDGFDAYVLAELARTDMHRLRLLEPDRDETKALRILTRAREDLVEQRVRLANQLRAQLEAFWPGAARIFADVDSPICLAFLERYPSPVDARSLGEKRLAGFLARNSYCGRRSAADLLQRVRTAPQGRAGDGEVEARRQVVLALVAALRPLVGQIQLLTSEIRGLLNEHPDGKIFRSLFRDPKSVVTAAELLAEIGDRRERHPASSSLEAIAGQAPVAVESGKKKVACFRWACNKTLRSAVAVLADSSRKHNPWANKIYTDALARGHDHSHALRILGRAWLRVIWRIWQDGTPYDPARHGSLNRLLTTGG

SEQ ID NO: 163877 - protein, 409 aa, unidentified
MNHLTASKSNGNQLAVGIDPHEDILGIIYLDSNHSILKGFSIPNCSLHHFQQLSTDVLCVAKSISAVPVFVIESTNVFWRPIFSFLYHKGFGKLYTVNPYQTNSSRKTRMRKTKTDLIDAKNIAELYLQGKAHFTHFPPGNLFDLRELTRFYFWISDIKGRILNRIYGYMFQVFPEAMSVFPKKYFSKTLALLLKKKLIHPSTISEMNPAHLSDIVRRISRNKYTNRINQLVSLATHSTGLPEGKYAFLNILSSLVKIYQFLDSVNSLFESRHIKPIMDTVPNKFFSLKGFSTISQASFVSELGNLNWFTKADDVLAFFGLDPAIAQSGRRKGQGKHISKAGTKFGRETMFLAASPCIMHNPVIKRKYKKLRSQGRHYIDAKTIIAGVLTKICYAMYRDNSQFDPDKVF

SEQ ID NO: 163878 - protein, 384 aa, unidentified
MKESSTLYVGLDVHKDSIDVATADAGRDGEVRHVCSLGGDLVGLDKALRRLISKGQRLHVVYEAGPCGFVIWRHLSAQGIDCEVVAPSSIPKRAGDRVKTDRRDAMMLARLSRSGDLKAVRVPDAADEAVRDLARSREDAVRECRNARHRLKALLLRGGIGYAGKSAWTAAHLRWLATLKMEHAAQQIALQEYLNAVTESSTRIGRLEQAMRDTLPEWGLAPVVQALQALRGVQLVAAMTLVAELQDFLRFDNPRQLMAYVGLVPGEHSSGPKRRQGSITKAGNSAARRMLVEVAWHYQHSPRVSPIIAARHDGLPKAVTDIAWKAQLRLNAKFKRLVARRVLKNKAVVAVARELTGFVWAIGREVQTSGWQGVKVEPVGAAAD

SEQ ID NO: 163879 - protein, 315 aa, unidentified
MEAMIERCAGLDVHQETVVACVLFGSLDKKPNKEIQTFPTTTSGLLALSDWLSSHKITDAVMESTGVYWKPVWNVIECDFQLILANAQHVKNVPGRKTDVKDAEWLAKLLRSGLMEKNFVPPKEIRDLRDLTRYRKKLIHTRTSERNRIHKILQDANIKLTSVLSDIFGVTGCRIIEALINGEKIGVFELQQMVDSRVKASTTDIAEALNGGIRKPHIDMLRFHWDHINHIDETIEKVVERIEQALIPYQEECELLDTIPGVDKNASAIFIAEMGVDMSVFKSSKHLASWAGVSPGNYESAGKKKQVKLSTETNH

SEQ ID NO: 163880 - protein, 358 aa, unidentified
MQSNTLNFNGQKIFIGIDVHLKSWNVSIFTSNVKMKPFSQSPDAVALRTHLDRNFPGGDYFSAYESGFCGFSVHYDLLRCGIKNIVFNAADITDSHKERARKADSVDSAKIARNLRDGNLTPIYVPSQEDLSDRQLLRTRRSLVKNQSQTKIRIKSFLNFYGIKCPLSLECNGTHWSQRFINWVKYEFGNMADSQRKSGMFLLRTLEFQHAEVLSATRELRDLMRSPKYEKNMRLLTSVPGVGLIAAATFLLEIGDISRFSNSDHLASFIGLVPDTRSSGEKDAKIGITNRSNRYVREALIEGAWRAIRKDTALTLAYEELRKRMEPNKAIIRIARKLANRIMCVLRTQEPYVSAVIK

SEQ ID NO: 163881 - protein, 460 aa, unidentified
MNRKQRRETMRKIQSEDLNLEVIHPDAAGIDIGNEFHYAAVPPSRDNQPVRRFGCTTAELKAMATWLQQCGIGTVAMQSTGVYWVAVYDILEQAGLEVYLVNARDTKNLPGRKSDVQESQWLMKLHTYGLLRNSFRPSQEIRVMRTYWRQRNDLVQSAGRHILRMQKALTQMNIQLANVLSDVSGATGQAIIKAILAGEHDPYKLAAFRDPRVQASEEQIAQSLEGNWQPDLLFLLKQEQDGYQFCQKQMAECDRQLAQYLQQREDRSQGAPLPEEKRKGRLKKKRANKPRFDLREGLFRMTGTDLTRIDGIDVMTATTVISEAGYDMSKWKTENHFVSWLRLCPDNRISGNKVIGKGRLPTNNPVSIALKLAATTLRQSKTYLGAQFRRFRTRLGAPIAIKAMAAKLARLVYRMLRYGMKYVDQGAAFYELKHRQLQVQQLKWKAAKLGYKVTPIPAAA

SEQ ID NO: 163882 - protein, 370 aa, unidentified
MSKLLYVGLDVHKETISVTTAEEGRMGTICFIGTIPNTPTDIARMAKRLNKNGHQLEFCYEAGGCGYGIYRQILELGHGCLVAAPSLIARKPGDHIKNDRRDSQKLAIQHRAGNLTPVWVPDPVHEAIRDLVRARMDAATQLTRARQQCLAFLLRHGRIYGPNKKNWTIRHRTWLGLQTFEQKPHQIVFQDYVEAVWAAQERREQLETRITTMLAEWSMAPVVDALRAMRGLDTMSAVIFMSTIGDLGRFETPRQLMAYLGLVPSEQSSGSRIWRGGITKAGNAEARRVLVEAAWSYRYPPRLASEKIQVVAKQAKAIRDIAWKAQLRLCERYRKLSATGKKPTVVVTAIARELCGFIWAIGREVTLTQP

SEQ ID NO: 163883 - protein, 382 aa, unidentified
MHKAITGVRRFVGLDVHAETIAAAIAEKDQVARDLGAIPNREESIRKFAKKLTEGGAWAACYEAGPTGYALYWQLTKMGIPCVVIAPTLVPTKAGDRVKTDRRDARRLVSSFRAGELTPVWVPDAEHEALRDLVRAREAAKQDQLRARHRLGKYLLRHGKRPPQQMRAWTENYLQWIKGKVSFDQRSQQVTLEDYLNEVDHAGARIARLEKAIDEAVEQAPETMRELIQALQALRGVAKIGAVTIVAEVGTLTRFEHPRQLMGYSGAVSSEHSSGGKIRRGAITKTGNAHLRRVIVEAAWSQRYKAVLSPAMRKRQQGVSAEVQELASKARHRLHHRYMHLLGKGKTKQEVVTAVGREMLGFIWAIGVSVERAQGQRAKGAA

SEQ ID NO: 163884 - protein, 426 aa, unidentified
MNTIPNPTPPPVADPAPPPVAWIGLDWGHQAHAFVLQERAGPAQEGTLPHSAEALHAWRRDLEQRFGGRPVALALEASRGAVIHALVQYPWLTVYPINPVTSARYRSAFTPSGASDDLPDARVLLELARDHAAKLRPLETQDAQTLQLTGLVELRRDTVDRRTQVLNQLTSLLRNYYPQALTLVGDLDTDLAVAFLSRWPDLLALKATKPSAIKHFYSAHHLRRPAVLEARLKFIHGAMALTTEPARVHVAVLQLRGLLDQLRAFRKHVALLDAEVKTVFAAHPEAALFRGLPGAGPALAPRLCVAFGTLRTLYPDPASLQKHAGVAPVREKSGQSLWTHWRWLAPTFLRQSFVEWAGQTVVSSAWAQRYYERMKAKGKGHHAILRALAFKWIRVLWKCWQTRTPYDEARYLKQLLHRKSPNALPA

SEQ ID NO: 163885 - protein, 242 aa, unidentified
METNTQPVFVGIDVSKNKLDVALWPSGEGFAVERNAKGLNSLCAKIAALNPVTIALEATGGFETVAAAALAAAGLSVAIVNPAQVRAFAQALGQRAKTDPLDAAVIARFAEAARPAIRPLADAETQLLADLVARRRQIVDMIVAEKQRLGRAPAKRFKKSIERLLKALEKELSNLNGDIDTAVRASPLWRANEELLTSVPGVGPTTARTLIAELPELGTLTRKEVAALAGLCPFTRQSGQWR

SEQ ID NO: 163886 - protein, 343 aa, unidentified
MRAILKQVAGIDVAQNELVVCLARMREDLSTELFACKTFSNTPSGFSALVGWAVKHMDATVSLRYVMEATGVYHEAMAWYLAEQGLEVSIVLPSKISHYVRTLETKTITDKTAAQAIARFAVERTLQQWQPPKDLFERLRGLTRERGQIVEQTTMIKNQLHAEEKQARPLKTSVQRMKKRLMLLERQQKEILSEIKELLHLDQEVQELVEVMCSIPGVGLLTAATVLAETNGFDLIKSRRQLASYAGFDVQEKQSGTSVKGKARISKKGNRYLRKAMYLPALSLIRHDEGFKAFFNRLAEKHGIKMKAVVAVQRKLLELIYTLHKTKQPYCANYLQKSTAQAA

SEQ ID NO: 163887 - protein, 350 aa, unidentified
MDFAQIHSKYYCGIDLHARSMYVTVMDKSGKILFRRDMKNDFKIFLRYVSKYLPSMAVGVESTYNWYWIADGCHQAGIPFYLGHAFYMKAITGGKHKNDKLDSKTLADLMRGNLFPKAYPYPREMRPTRDLLRRRSYFVSLRAGAYTHIQEIFSQIAILDVSGQDVKNKNTRRLLVERLDDPILQLTVSSDLDLIERLDPIINTLEKTIRRQAKHHDPRAFATLNTTTGIGDILSLTTLYEIHKIDRFPSVQNFSSYSRVVRCERTSNGKSTGGGNNKIGNPYLKWAFDQIVLRAQIYSPSIKKAYERLISKHGPRQAKSIMGHKFAVAIYFMLKNGQAFDETRFLKGMF

SEQ ID NO: 163888 - protein, 392 aa, unidentified
MYIVGIDIGKNHHEASIVSPEGKQIGHSLRFATTHKGADSLMSFIFNNIGNSSCIFGMEATGHYWYPIYSFLKARGYTIYVINPIQSDSLRKMYIRQTKNDSIDSFLIAEVIRFGQFTTTSMADENILAMRQLCRYRDSVISSRTEIKLRISTIMEQIFPEYEKQFSSLWLSTSMGILEKYLTPENIENAPIDELFEIIKDKSHNKLTMKKAISIREAAADTFGIKIAQDAFSFQLKQLIDRMNFLDKQIEALDCQILEYYEKFDCYLHTIPGIGMIAAATILTEIGDINRFKSSSALVAFAGIDPTVRQSGEFSSTHNHMSKRGSPYLRHAIFLAATTCSFHNSPLNAYYKKKREQGKHHLTATGAVARKLTTVIYAVLRDGKPYEPKSFC

SEQ ID NO: 163889 - protein, 540 aa, unidentified
MLSGLTRFSARCDFRQVLECGCPDIIPKVIQQRGKGSVKKPSPELVNNFAAAHNRGGEQVATPEPRLGCPHPARVRQRSPTPVAAPGPSAERTLPQEGSYIRSHPLRVPEPLSIPTKMKTDWTEQTYFAALDWAKAHHDVVVVDRLGAIAAGFQFPHTAEGWKEFDQQMQPFGKCPMAIETSSGPAVDQLLQRDYPVFPINPKAAQRYRERKCPSGNKTDRIDAWSLADALRTDGQGWVQLIAQDDATMTLRLICRDENVLIEQRTALVNQLQAALTEYYPLALQSFEDWTKPFAWAFLRSFPTPQALSKAGKRRWEKFLHTQKLWRPGTASTRLEAWQKGQQLNASAAVASAKALLALSLVNVLQSLQKQIDEYRQRIRAAFEQHPDHDIFGSLPGAKDKLAPRLLGEMGSQRQAFPDAQSLSCRAGTSPVSFQSGQLRKARIRWACNDFLRHTVHLWADLSRRTCLWAQVYYAAKRESGHSHASALRCLGKRWLKVLWRMWQDRTTYDESIHLKSLQEHGSFVAKLLTPPPTQSASSL

SEQ ID NO: 163890 - protein, 405 aa, unidentified
MQEATQHDAVDVFVGVDVDVDVGKGRHHAVALRRNGKRLYNKALPNDEVKLRALIAELKTHRRLLFVVDQPSTIGALPVAVARAEGVLVAYLPGLAMRRIADLHAGETKTDARDAAIIAEAARSMPHTLRSLRLADEQLAELTMLRGFDDDLAAQLTQTSNRIRGLLTQIHPALERVLGPRLDHPAVLDLLERYPSPSALAAANEKTLANRLTKLAPRMGKNWAAEIVQALNEQAVIVPGTQAAAIVMPRLAQQLAALRKQRDEIAAEVERLVLAHPLWPVLTSMPGVGVRTAARRLTEATQKAFATAAHLAAYAGLAPVTRRSGSSIRGEHPSRRGNKVLKRALFLSAFAALRDPVSRAYYSCKIQQGKRHNQALIALARRRCDVLFAMLRDGTIYPPKSAPDA

SEQ ID NO: 163891 - protein, 368 aa, unidentified
MKKSITFVGLDVHKNSIAVALADAGRNAEVRNYGIIGGSLDELDRLVKKLVSPGKELHFVYEAGPCGYEIYRSLTAKGFDCAVCSPAHIPKSPADRIKTDPRDAMMLARLHRAGELTYVFVPRADDEAMRDLTRCREDAKKAQRTAQQQLNGMLLRLGFRYPKDNWTKAHFGWLADQKMPTPQQQVVFQEYIHAISDATDRVERLTNQIETLIPTWRMAPVVTALQSLRGVSIIVATTMIAELGDLTRFENPKKLMAFLGLIPSEHSSGEKKKRGGITKTGNGHARRVLVEGAQAYSYQARMTRPLLKRQEGLSQEVRDIAWKCQVRLCARFRRLMAKGKSRNTVVTAIARELAAFMWAIANKTQIAA

SEQ ID NO: 163892 - protein, 474 aa, unidentified
MRPILFQKGGPLSSRVKKNMSHVSKLPREFEQININAAGIDIGAQKHYVAVPRGRDPQGRDIRHFETFTTDLYALADWLKQCDIDTVAMESTGIYWIPLFDILEQKGFSVQLVNPRSIKHAPGRKSDVVDCQWIQQLHAYGLLPSAFRPDDQINVLRAYHRQRTMLVNHAATHIQHMQKALEQMNIKLTNVISDITGTTGLKIIRSILSGQRDPQKLARHRNPRCKSSAEEIAKSLHGNWRDEQLFALQQAVALYDFYQTQIQACDQQIQAQLSRFEDRSNGGDLPPASGKSSGSRKRLTFDAREHLYRMAGVDLTQIVGLNTPTVLNILSEIGLDMSRWPTSKHFASWLGLSPGSKISGGKNFSSKTKPSANRAAHAFRLAAYSLHRSQTAIGAFLRRKKAQLGAPKAITATAHKIARIFYEMLKTRTEYKDLGVDYYQNRYKERMLRNLKRKAKTFGLELVNSNQNQLNMEH

SEQ ID NO: 163893 - protein, 348 aa, unidentified
MAIVGGFDIHRRQVTFDYLDTVTGQVRRGRISPACRETLRHWLERFAGRADVTFAVEGCTGWQFVVEELQRAGITALLAEPAETAHLRGPKRHAKTDKTDSRHLRMLVADGRVPLSWIPPRQVCELRALLQLYRDLAEEHTAWTQRIHATLFHQGVPSLAGRLGDPQVRARLAADGAGMGLSPAGTQAVAVALRRMDDLEAELGPVHARITAFARRQAGCKALARELFGVGPLVAAVVWAFLGDARRFSSSAQAVRHTGLDVTVWSSDGKGPPGYLSHQGPPILRWALFEAGHQSSRTASPDHRYYADVAGRIDANRAALSVARKLARRSHHILRRLGDQAYTPVPGW

SEQ ID NO: 163894 - protein, 360 aa, unidentified
MTSMTTATVRVIGGVDTHGQSHHAAVIDGVGRQLDDREFPASPAGYGALLEWLRGYGELDRVGVEGTGTYGVGLTRHLREAGAVVVEVDRPDRRARRAQGKSDPLDAYSAARAALSGAASVVPKLRDGRVEAIRALRIARSSAVKARSQATNQIKALIVTGPAQLREQLRHLPTGMIIAACARLRPGHNLGDAEQATKTALRRLARRHQQLSEEIAEADHELDQLVHQVAPGLLALPGVGPEVAGQVLTSAGDNPNRIKSEAAFAHLCGAAPIPASSGRTRRHRLNRGGDRGANNALYVVVLGRLRYDSRTRAYVDRRTQEGLSKPEIIRCLKRYVARELYNALPTSIAENRSQQPLARP

SEQ ID NO: 163895 - protein, 351 aa, unidentified
MEYIAFDSHKRYTLASVEKPSGGQSCELRLAHQPGSIRQFLSRWTPGSPVAVETIGNWYWIVDEIEEAGMVPRLVHARKAKLMMAMVNKTDKLDARGLNRLQRCGTLPTVWIPSRELRDQRELPRTRMVFSRTRTRLKNRIHATLAKYGLSIPQVADLFGKKGRELLPQVLAQLPSHTLFSTEQLLAQLDTVEHQIQQFERRIKEVFAPSVELARVMSLPAVGFILGTVILLEVGKVDRFPSAAHLASYAGTTPRVHASGGKMHYGQLRPDVNRYLKWAFLEAANVICLNHRHLPQRHVHRLYQRVASRKGYQKAIGAVARHLAEATYWVLKKEEAYREPQASKKVSSTKG

SEQ ID NO: 163896 - protein, 427 aa, unidentified
MKYTQNEKILQVTEDTLIVGVDIAKESHYARAFDYRGVEYGKYLRFENNREGMTKFSKWAKDLMERHKKNKLIVGMEPTGQYWVCLVQYLKDNNIKVVMVNPFHVKRSKELDDNSPTKSDRKDPKTIAMLVKDGRYVEPTIPEGVYAELRIAMDIKDRLNKQIGMIKNQITRWIDIYFPEFNSVFSDWEGKAALITLKEIPTPEKIAEKSSGEILSIWKKEVQRGVGEKRAIKLIETARKSIGKKQGMKMAEYEIKTLIEQYEFFKKQIEEIEKKIEELIVEIPGVKELLGIKGIGVNTVAGFIAEVGDIEKYEHPKQIQKLGGLNLVENSSGKHKGETTISKRGRKRLRRVLFTAVMALVAKNEEFRELHKYYTTRAQNPLKKKQSLIVLGNKLIRIFYVILKKGVKYDPIKMMKDIKRPALQEVA

SEQ ID NO: 163897 - protein, 345 aa, unidentified
MTKAYFRTFHDFQFRAAIDISKHSYAIFCVDQTTGEIFEENRSEKDFLEFFRMKSKSVIAMEACATSKYWARRLSELNHEVLLLPPKKCKPFVDGCKSDRNDARGIYRSMESVRPSPRPITLELQQIDTLVALRKFVVKEYVSYTNALRSHLAEYGKAMPKTIKGFENNASICINELEQEGLGAFLIQRFRDMLQRYKDLRREEAEYSREINRLTKESRLGQLLRTIPGVGAIVAACALPLLSDPKAFANSREFAAFLGLVPSHTGTGGRTINGKITKRGDRYLRAMLVQGAMAALRQKVKAPWLERLISREPARKKVAVALAARIARVMWAIANTNQPFELRML

SEQ ID NO: 163898 - protein, 341 aa, unidentified
MEQCFVGLDVSKSETSICICDENGDPVFAVKKVTDPDVLYQALRKHLSSIQCVVLETGRMANWLYTELADRGLPVVCIDARQAHAVLSQMHNKTDANDAAMLAELARTGFYRKVEVKSRVAQERRALLKAREVALKSRVNVENTIRGLLASFGLRLPRHLHTYEERIHAILTDRPVLSRVILPLLDLRTTALRQAAALSKEMARHAKDDEACQRLMTIPGVGPVSALTFVATIDNPSRFSKSRSVGAYLGLTSRRYQSGDIDYGGRISKRGDPMLRSTLYEAASSLLNRVQPGKGSKLQRWARALKARTSHKKAVVALARKLAVLMHAIWTNGSTFQTKEA

SEQ ID NO: 163899 - protein, 385 aa, unidentified
MIKLDRSDTPAVAEHATVYLAFELSKAKWKLGVLLPVSQKLSRYTIGGGDLVALAARLADMRKKAAAAGRPVRILSCYEAGLDGHWLHRWLTEQGVINHEIDPSSIEVNRRARRAKTDRIDLEKLMRAFLAYLRGEPRVCSLVHVPTVEDEDRKRRTREREHLIKERTAHTNRIKGLLHGQGIRDVKPLDRSFIERLTHLRTGDGRPLPPRLIEEITREHQRLCLAARQIKELEAKSKTELQTAMPGSPEARIMQLIDLKGIGPVGGQGLVNEVFYRSFDNRRQVGSYFGLTGTPYDSGQRNREQGISKAGNRRARELAIELAWLWTVHQPDSALTRWFRERVGDIKGRIRRIAIVALARKLMVALWRYLTTGVIPVGAVLRPSS

SEQ ID NO: 163900 - protein, 397 aa, unidentified
MRTLFVGLAASKDDFKAAVKDDLNNLVIPVKTYRHDRPGMELLDRDIGTMKEQFRCGAIFGMEATGIYHLSIYQHLLDAGEHIRVFNALELKRFKSRIRKTKTDNLDAQSIAEALLLAREPSYHPASKPELIHIRELGRLRDRLVKKASRCKIQATRDMDILCRGYTDLFDDIFSPSSIAVMKASVRTTRLFKTKKEDLVDVLNRFMSRSGSEKKALKLSALFKNTVVPEHMREICILDIHMLIQQYEVLKQQLKRVESRIEHCIEKIDPWMISVPGIGPLTAGVILGELGDLCRFDSTGQITAYSGLDPTVMESGRSRRTGHISKRGSPILRETLYNAAFAAIRVNPVCKQFYQRLKAKGKHHKVCLVAVAKKLLHIAYSVEKYKRDFYVPSYITE

SEQ ID NO: 163901 - protein, 459 aa, unidentified
MIHKRKTMRSGHVGRPENIPILNPNAAGMDIGADEIYAAVPTDRDGPPVQCFGTFTGELYRLSEWLKHCRVDTVAMEATGVYWIPVYQILETSGFELCLVNARYFQNVPGRKTDVSDCQWLQRLHSAGLLRGSFRPAQEVCVLRSLTRHRDNLIRLASTHVLHMQKALDQMNVQLHHVLSDITGLSGLAILDAILAGERDPRVLARLRDGRVKASEDTMVQALTGDYRGEHLFTLKQSLTAYRQYQKFVRACDREIEQQLKQFDAKVDVKAVPLAPPKVRRKKLFSNEPKFDLRSHLYRVFGVDLTAVPGISVLTAHTILAEVGPDISKFRSASAFASWLGLCPHNDISGGKVLSVKTRRVNNRAALAFRMAANALLRSQSSLGDFFRRMRAKLGAPAAITATAHKLARIVFHMLATREAYDEAILRSNERGFRARAEARLRAQAKALGYSVVAMTMAP

SEQ ID NO: 163902 - protein, 339 aa, unidentified
MSKAYEGKQIVGIDLHRRRSVLVRMTEAGERLETIRISNDPEYLRQVMARAGEAPEVVLEACYGWYWAADVLAELGASVHLAHPLGVKGFAYRRVKNDERDAADLADLLRMGRLPESWIAPPASRELRELVRHRAKMVGLRSNLKCQIAAVLAGAGAAVALSDLFGVAGRELLQRVVLPSAMRAKVNSALRLIDAFDFEIDTFTQLISTRLGGDPGYLAVQTIPGVGPILAAVFVAEIGDVGRFPGPTQLTSWAGLTPRHRESDTTVHRGRITKQGSKLVRWAAIEAVQRVGAHTRIGAFRDGVAARRGRNQGKVAAARQLLECVYYGMRDHHIRRLVG

SEQ ID NO: 163903 - protein, 440 aa, unidentified
MNDLRVLDAHAAFVDVGSEQMFVSIAGGSPEVFGTVTSQLHALRDWLLTHQVRSVAMEATGVYWLPLYAVLEAAGLEVLMVNGRQMRNLPGRKTDMQDCQWGATLHAHGLLHAGFVPPAHIRRLQDYLRLRADHITSAAAHVQHMQKALERMNVKLHHVISSLTGTSGLAVVRAILRGERNPEQLLALCDTQIQRAKAQRVKESLRGTWAEEHLFALRQALASWEHYQNQIAECDRQIEALLPASADDHTPPNTAVHPRPRKRAGPNAPEIPQLREILTQMCGGQDLTRLPAHTEYSVLQIVSEVGTDLTKWATEKHFTAWTGLAPGSHQSGKRKGSVKRQRNRAGRMFCVMARALARSKDIALGGFYRRMAARRGGLIANIALARKLAVLFWRVMVKGTDYVEHGLAQYEAKVLQTKQRALRRLARQLGQQLVPSPVPT

SEQ ID NO: 163904 - protein, 393 aa, unidentified
MVYVGIDVAKDKHDCFIANSDGEVLYDVFTIQNNMDGFEDLFFKIKTASRDLSKVKVGLEATGHYSCNILGFLHNKGLTTIVINPLHTNAYRKSLSLRKTKTDKADARAIASMIMSDVSLKPYSDTVYHNEDLKSLSRYRFDKVSDRSKLKQSVSRLVNILFPELEKLVSTLHTKAVYELLSEFPGAHQVASANLKHLTALLSTASKGHFGREKANEIREAARRSISTYLPAKSLELKHTINLIRELSSEIDEIETEIKKIMDSIDSPILSIPGISYGIGSMIVSEIGDFSRFDSPDKILAYAGCSPTTYQSGQLYSSHAVMEKRGSRYLRWALINAARYVCNWEPTFAAYLEKKRSEGKHYYVALSHAAKKLVRLLYHLETTGEKYIPQTLS

SEQ ID NO: 163905 - protein, 338 aa, unidentified
MKLYCGIDLHSNNSVVVVIDEQDKLILSKKCANDISVIHGQLAPFSEDIQSVVVESTYNWYWLVDGLEDAGFQVQLANTAAIQQYSGIKHTDDKSDARFLANLIRLDILPAGHIMPREQRNIRDLLRKRSLLIKQRTMLNLNLQGMIARHTGTGLSANQMKRLNQKGIEELMAEQVVRDSAMINLMQIEAINKSVKLLEQRVSGYCTNTTENKLLQSIPGVGQILSQMIALESGSMDRFPDVRNYSSYVRCVPSKKISNGKTKGTGNRKNGNPWLAWAFMEAAHLSAIWSPEIKKYYQRKASKSHILVAKKSVANKLARAVYHMLKQNTVFDVKRAFA

SEQ ID NO: 163906 - protein, 338 aa, unidentified
MIVIGVDVHKQSLTAAAVDETGRLLAERTLAGGEDGLLAWAASLQTERLWAVEDCRHVTRALERELVAAGERLVRVPPKLTAPERRAGRQRGKSDAIDALAAARAALREPNLDRPRPGEERFRELKLLVVHRDDLVDERRRAQQRLRWHLHQLDPTLTVPPGALDRAVQLERVGRWLARREQTVQVRIARDLVGRCRSLGRAIAELERELTTLTAQTAPALLELPGCGALTAAKLLCEIGPIERFRTDAQLARHGGVAPLEASSGRTRRHRLDRGGNRQLNCALHRIAVTQARMHPPARAYLERKQTEGKSRREAIRCLKRQLARVVFNTLKTNPALT

SEQ ID NO: 163907 - protein, 418 aa, unidentified
MSEENIARTSHRYVALDIHKHYCVVAAVNREGQVVLQPIRVEHQDLESWLKKNLCESDHVVIESTTNAWHVYDLLEPLAERVLVANPIKVKQIALARVKTDIRDTLILARLLAANLVPVVWVPPQHIRQMRQLLSQRRQMVETHTQIINRMHSAAHRHHLNHERGKRFNEKTTAWQKDESLSQIEQFQLALEMENRAYIEQQIGRITEKVSKMSHQKPWAQSMTYVMQLPGFGVITAMTVLAAIGDIGRFETPSKLASYSGLTPGLEQSGTKNRGKGITKEGRRELRWALVEAAQMAVKSDPLLKRRFQELQHRMHRNQAIVTIAHHLLELVWYVLTRRESYRHFSEEKIAYKYLSWAWRMSDDARDGLTRQQFARYYLMRLGIGKDLTRIALDPKHPRRLASESELLALRPELQQIE

SEQ ID NO: 163908 - protein, 457 aa, unidentified
MPQPKRSRSRTGLSAVHPAAAAIDIGATMHVAAVGPDRDTEPVRTFQTFTDDLHRLADWFARCGVKTVAMESTGVYWIPVFEILEQRGFEVMVVNARDAKHVPGRKTDVSDAEWLQRLHEYGLLRPSFRPQAEIAGLRAYLRQRERLLDYAAAHIQHMQKALMQMNLQLHHVVSDITGVTGMNIIRAIVAGERDPNVLASHRERGCHASVETICQALVGNYREEHVFALSQAIELYDVYQTKVAACDRQIEVILKRLKKSATPPASKLLPPKHRSRQPNAPSFDARAALHAILGVDLTQIHGLGPYLALKLVGECGTNLTAWPTAKHFTSWLGLAPHNKISGGKVLSSKTRRTSNRAASLLRLAAVSVGRTDTALGAFYRRLAARAGKAKAITATARKIAVLFYNTLRHGMSYADPGATYYEERYRQRVLGNLQRRAKSLGYVLHQAERDPVQMVVS

SEQ ID NO: 163909 - protein, 343 aa, unidentified
MTMFAGLDVGNKKTAVCVVDDSGTIVWRGMLDTHPELIAASLSRFAGVLDKVGLESGSLSPWLYRSLRGLGFSMVCMDARACANAVKDRLVKSDRADAFALAEMLRTGWYRSVYVKSVASHRLKALLGARDQLVRVKRQMNGQIRGLLKPFGIRLGSHRGVKRFDAAARAAVREDDLLYVCVDSLLETLASVESQVARLGDEVRRITSQNEVCWRLMSVPGVGPITALAFYATIEDIDRFARMRDIGAYLGLTPKRYQSGDRDITLGISKRGDTMARHYLYEAANVLLTTVRARSSLKSWGLAILKRSGPKKARIAVARRLAVILGRMWKDRTHFDAMIPRAA

SEQ ID NO: 163910 - protein, 387 aa, unidentified
MNRSDLNQSYAAFDQASTIACVIDMSMKSWVLSGTVPGVQRQPLKRLLADENGLLAQIERWRAEAVKAGHVIKRIVVAFEAGRDGFWLARWLRERGIEVYVIHASSIAVSREHRRAKTDRLDTETLMRALLGWLRGEARHCRMAAIPTLAEEDARRPTREHERLVAEQTRLVNRMKALLVWLGITNFNIKLRKAAEKLATLRTPNGEPIPPHTLAELCRGLERLAVVKKQIAAIEQARLYRLKANPGAGTNPLILLIAKIRGVGIETAEMLVQEVLTRKLRDHRAVGRYAGLTGSPDESGSSRREQGLAKAGNRRVRRGMLQLAWRWLMHQKDSALTQWYRQRSADGRGVTRKTMIVALARKLLIALWRYVTTGELPAGVVLKQAAI

SEQ ID NO: 163911 - protein, 326 aa, unidentified
MTQVDDLSRSLAVLDQNTSLIVVVELSEASWLVAGLVPGVDRQPLKKLAPDPDALLRLLERWQAEAVKAGQTIGRIALAYEAGRDGFWLARWLQARSIEVHVIHSTSVAVSREHSRAKTDRLDTAMLMRVFLGWLRGERGHCGMVAIPTLEAEDAKRPSRERESLVAERTRIANRMKSTLARLGIRGFKPELRRAPQRLAALRTPEDLPMPPNTLDEIRRDMAQLAVVRGQIEEIEQARLERLEQAPDEGPNAMVRLLARIVGVGVETADMLVQEVLSRNLRDRRAVARYAGLTGAPDESGSKKREKGLAKSGRLLSGSGVLALII

SEQ ID NO: 163912 - protein, 420 aa, unidentified
MNSLNKPSFTAFVGIDWADRKHDVCLQAADSLKREFSVIPHQVEAINDWAQSLLQRFGAPIAVAVELSKGPIVYALQKFDGFVIYPINPSTLARYREAFTPSRAKDDPTDAEFAVDLLLRHPERFKPLQPQSLEMRALSSLVEQRRSLINDKIRLTNRLRSALKHYYPQALDWFDHIDTPLFCAFIRQWPTLVQVKRARKNTLETFFHHHNMRFPQVLEDRLAAIKTAMPLTLDEAIIIPYRLQAQVLIEQLSVTLEGIKQFDQAIKKIACQHPDYALFRSLPGAGPSLAPRLLVAFGEQRDRYPSAADLQKYAGVAPVTERSGKKHWVHWRWECPTFLRQTFTEWAAQTINKSFWAGQYYRQQRAKGSTYQAAVRALAFKWIRILYQCWRTGKPYDESTYLKALEQRGSPLLKHSCGIS

SEQ ID NO: 163913 - protein, 335 aa, unidentified
MGIKVIGIDIAKSVFQLHGRDEVGRVVLEKRLSRGQFLTFVGKLPRCLIGIEAGGGAHYWGSELGKLGHEVRLIAPQFVKPFVKSNKNDARDAEAICETLTRPGMRFVPVKTPRQLEQQAVHRVRTRLISARTALVNEIRGLMAEHGIVFARSPRVIRREMSATVEKMDRLSELGKGVFSQLRGELGHLDEQIEHYDGLLDGIEKAQPVCQRLRQVPGIGPITATAIVSMTDPTQFESGRQFAAWVGLVPRQHSSGGKERLLGMSKRGNPYLRTLLVHGARSVIRHASGKEDRTSQWLGQLVERRGKNRAAVALANKNARIIWAMLTRDEDYRAA

SEQ ID NO: 163914 - protein, 362 aa, unidentified
MEQFIGCDAHKKYSVFVAVNERGEPSQEVRVGHDREQYRRYLERLPGGSQIAVEASGHYYWIVDEMEAAGHHPRLTHPLEAKKRMGKTGKKTDKLDANGLGILLRNGTLPEVWIPPAGLRDQRELLRLRMFLVQQRTRLKNRIQGGLARYNIQLGARDVFSVEGRRCLGTRLAELPEHTRQSVELELVTVDFLEVQIEEVEKHLAEIMQVTAEADLLKTLPCVGRILSMVMTLEIGQVERFPSAAHLASYAGLVPRVHSSGGQTRLGQICGDVNHYLKWAFIEAGNLVVVHQKHLSGEHVVRLYRRVKRKRNYQKAVVAVARHLAEAAYWILKKQEVYRSPQAHLKAQAKGESAKALSSTHG

SEQ ID NO: 163915 - protein, 399 aa, unidentified
MRTDRPDIFLGLDVGKTDHWACALTDSGQVLWNKTLPNNEQKLTDIYTNLSAKGSVLVVVDQPATIGALAIAVAQHMGIEVAYLPGLTMRRIADLYPGEAKTDEKDAFIIADAARSLPHTLRQLTKTDQDEAGLAMLTGFDLDLSRQVNQVSNRIRGLFTQIHPELERVLGPRLEHDAILEVLATWPTPQALRKAGRARMDAKLKKHGARRHAAWTEDILTALAKQSVIVTGTEAAGLVIPHLARQLVSLHAQRANVASEVEKIVATHPLYLVLRSMPGIGLRTAAVIIAELAGKTFTSSAALASYAGLAPTTRQSGSSIKSERVSHSGNKRLKRALFLSAFAVIRTDPVSRAYYDRKRAQGKRHNQAIIALAHRRLTVLYAMLRDGTLYDVPDTALAA

SEQ ID NO: 163916 - protein, 346 aa, unidentified
MLKADTRTVIGGVDTHQDLHAAAVVDDNGTVLGSDSFSTTRSGYRAMLRWFRSYGDVVRVGVESTGSYGAGLTRHLALAGIPVLEVTGPDRSMRRAKGKDDEIDAIAAAQAARTGQRVQVAKDRSGAVEALRVLRTTRKTAIKCRRATLQQLHNTIVASPDELRDQVRNLTRMQLLRTCASWRPDTLGYRDPVVATRIALKSLAHRILDLNDEVADLDRLIDPLVEELGAKLTQLEGVGTHSAGEFIVTAGDNPDRLRSESSFAKLCGACPIPASSGKIQRHRLNRGGNRQANSALHIIVLSRMRIDPRTKKYVERRLKEGRTKREIMRCLKRYVAREIYHVLVAT

SEQ ID NO: 163917 - protein, 355 aa, unidentified
MSLPIEEREVILGVDTHLDVHVAVLIDVVGRVIATHSVPTTAIGYEQLIAWAGSLGRLSRAGVEGTGTYGAGLARRLRERGVQVLEINRPDRSRRRLRGKSDPTDAENAARAVLAGDAHAIPKAQSGVVEAMRAVNMARRSAVKAKTQAINQLRALLVTAPESIRTTLWKVKPEQCVVRCARLQSLGDTPLLKALTSTLRMLARRWMNLAKELRQLDAALDELTKRAGHRLLARFGVGPQTAATLLVTAGDNPDRLRSEAALAALCGVSPLEASSGKTTRHRLNRGGDRAANNALWTISMVRMRSDPRTRAYVARRTADGLSTKEIQRCLKRYIVRELYPLILADLADAARPNLT

SEQ ID NO: 163918 - protein, 484 aa, unidentified
MKTKSIYPASNSLRLKKIMAKYSPQEILYVPIEVAKYNHKACCINFFGDILTSAFEFPNNSHGVDFFILKVTRLVRASKIKKILIGLESTGHYHQNLTIRLRALGHDVAVINPFDSWKERLNKNAKTDKIDLGSIAKALISGKFSSSYVPRGVYYNLRRATRTRRKFISRRTSSQNVITGLLDQLFPGLWDKDNSIFSDRWGKGSLLVIERYPTPQSVLRLGENRLTRSLRKNNTKLTEKTARKIISAARCSLASNNPCEQTMDILALNSHIKVYRLYREIIASLENEMAHLLVQTPGVYLLSIPGISVVYAAEITAEIGDISRFAYAKQIISSAGTCSKKNQTGEYDPQGLPMSKKGNKFLRTSLNQAALSLNAWCPDFNAYYTRKLMEKADKKGIARTATGNKLARLAFALMKHKVLYRPRTLNSLTSGLKDYYIGLYGKTLKKLSRFSSEKILPKNNYLEQIKQKLEKQYAVDLSKLSESI

SEQ ID NO: 163919 - protein, 355 aa, unidentified
MNYIGMDVHKKSITMAAFSQDGSRLAKKKVAATPEGITGFLNLLEGGQPLTATMEATGFWYWVAEVLEDIDGVTVKLANPRKVRIIAESNLKNDDVDAAALAHLTRLNWLPESRLVPKKVRLVRDRLRCRISLVQTRSSLKNRLTSILLKRGLSHPFSDLFGKKGRAWLDSLDLPEEYRQNMDIYLRLIDATGAEIASVDKWLTKKVKTSRQGRLLTTIPGIGKFSAMLLLAEIGGIDYFKSPKKLSAYAGLAPSMWQSGEKRRLGRLRPDCNKYIRWICIEAVTKAVRVVPCWKRLYDSICCGNDSKKPVARTAVARKIICAAWRVLTSGEPFDHLAAGRRNPKDSPAMVTGLK

SEQ ID NO: 163920 - protein, 367 aa, unidentified
MSSIAHRGFVHLGMDVSKDSIAVAVLAPDRDIAQVDKIFHDADSVQRLIKRLGKPKGIWACYEAGPTGYDLQRLLTSMGVRCDVVAPSLIPKGSGDRVKTDRRDARRLAGLHRAGELTPIGIPSPAQEGVRDLCRTRGDMVQDLTRARNRLSGFLLRHSVVWRGGSKWTERHRRWLATLSFDDPAIASTYSHYLATVKLRDTELESIEADLLPWCTKDPFGDQVSRLAAYRGVTRIGALCLAAEVFDWRRFPKARPFMSFTGLVPGENSTGLTQRRGSITRAGNAHLRGQLCEAAWAYQHSPNIGVGIRERQQGVPPETVARSWAAQVRLSKRFRQLAAHKNVRSVVAAAIARELAGFLWAEMVAEV

SEQ ID NO: 163921 - protein, 383 aa, unidentified
MSLASATAAVDYDATLILAVDTSNKSWVVAAHVPGFGHIKAKQTTAPTGDALALAIEGYYRRAATSGRSIDRVIVVYEAGYGGFWLARWLTARGIEVHVMQPSSVPVERRKRRAKSDKIDADLLLRTLLAWLRGEPRVCSMVAVPDEAEEDARRQSREREELIHERIMLTNRIGAILATVGIDDYNPLRLDRRVRLEALRTALDQPLPEHAKAKIARIIDRLELALSQISVLESQRDAVFEKEAPEEAERMIKALVLLRSIGAQSATVLVREAFIRSFSSGKALGCYAGLTGTPFNSGGSEREQGISKAGNRRLRAAMGELAWLWLRYQPESALATWFKERLSGAKGRLKKVLLVALARKLLIALWRYATNGVVPQGAVLKPA

SEQ ID NO: 163922 - protein, 355 aa, unidentified
MTIVSHAHPFVIGVDTHARTHTLAIMVALTGEQLGSEQFPATPASMDRAIGWASRRTGGDLATLWVIEGIGSYGAKLAHTVAEIGYLVVEAPQMNARSRRGVAKSDPLDALAIASAARSTEVTALRRPRLEKGIRAALRILVAARDQMTTERTANINALIAVVRTVDLGIDARRPLSSVQVKEIFRWRARVEEWAVAIARAEAIRLATRVVALTQEVECNQARMTELLQDSTAAPLLEETRIGPVIAATIFTTWSHPGRVRHEAAFASLAGVNPIPASSGNTVRHRLNRIGDRRLNKAPHQATIVSMTHDPDTRAYVERRQGEGRTNREIRRCLQRYLARHLYRTLNTLYANPAP

SEQ ID NO: 163923 - protein, 345 aa, unidentified
MKYFFIGIDVSKEKLDATLIHDESKSDSEQQLAYTTVENNPKGFRSLVSWSKKNAGRGVKTDAMLFCCETTGGYDRALCDWLYGNGLNIWRESALQIKRSMGLRKGKDDKADSEMIAYYALRFRSKATLYKPLDGNMRSLRDLFLYRQSLVADRQAKLVSAKEKRHISSKSKADSFIYRDAQKAIDLLTKSIKECERRMLEIIKADEEMYRNYLHLISCKGVGLVTSVMLIIYTDNFKTWSAKKMASYCGIAPFYESSGSSVFHKANTGGYSNRRLKGILTQAARSAITHNPTLRQYYLRMKAQGKPYGVILNNVNNKLVHILFSLVLHDCDFELDHETKRAARA

SEQ ID NO: 163924 - protein, 343 aa, unidentified
MQIRSVGIDLGKTTFHLVALGDNGKVLLKKKFTQKQLIAFTANMQTCLIGMEACSGSHFLGRALREQGHDVKLIPAQFVKPFVKSNKNDFIDAEAIAEAVDRENMRFVPIKTDDQLDLQALHRVRDRLMARRTSLINQIRAFLLERGIVFAKSPIRLREALPEVLENVNENLTPRMRNLVAMLWSEWKDLELQIVQMNDEVERIASSDAACRRLRQIPGIGPLVATAIVASIGNGAAFRKGREFAAWMGLLPKQHSTGGKARLYGISKRGNSYLRKILIHGARAVVLRSKRNRIAMGPWMTSLETRAPRNVLIVATAHKLARIAWAVLSTGQDYRAVPEALTV

SEQ ID NO: 163925 - protein, 369 aa, unidentified
MADRITYVGLDVHKDSIVVAVAAGGLRGEVREYGRIANTPTALDRLLRKLGGDGMRLRFCYEAGPCGYGIQRRLSTRGHECVVVAPSLIPKRAGDRVKTDRRDAASLAKLHRAGELTAVWVPDVGHEAMRDLVRARLDAVHSLRRARQQLSGFLLRHGCHYGRPAWTKLHRRWLAGLKFEQAVHHIVLEDYIAAVEAAEARRNRLTAQIEAMLPDWTLAPVVAALQTLRGMALVNAASLIAELGDLSRFANPRQLMAYLGLVPSEHSSGASVKRGGITKAGNAAARRLLIEAAWSYRFPARLSRELLLRQERQPRLIREIAWKGQLRLCARYRRLARTGKPANIVTTAIARELAGFVWAIARQVTVTTD

SEQ ID NO: 163926 - protein, 382 aa, unidentified
MNRILKIGMDVHSTSYTLCAMEPVLDGEDRIFANIQVTSDYRNVIQFIDKLKEKLGSSDSYSIECGYEAGCLGYSLYHQLTKAGVKCTILAPTTMLTQQGKRVKTDKRDALMIAQCLSYGGYRAVHVPADKDVSVKEYLRMRDDHKVALKKIKQQINAFCLRQGYFYAGNKWTIKHLNWLKKLVLSDLYRETLNEYLTSYEEQTAKIERFDKRIEELAEDSDYQENVKKLDCLLGIKTHTALSLIVETGDFKRFRKGNTYAAFLGLAPGESSSGEKISRTGITKAGNSHLRMLLIEAARGMCRGRIGYKSKVLRSRQAGNPAEVIAYADRGNTRMRSKYYRMIRHGKKNNVAVAAVARELACFIWGLMTNNIAPKEEGTKAA

SEQ ID NO: 163927 - protein, 357 aa, unidentified
MRYFNNTIRRFRFPNEKKEWKRFAKELDGNCKVALEATGNASMIYDILAGHGAQAVVVNPMRTRAIAEARIKTDKVDAEILARLLAADFVCASWVAPKEERELRTLLQHRAALKKQVVSLKNRIHAVLSRQAIRVPVSDLFGVKGRQFLRELEELPEVEKIVLTSNLKALEAEIVAIEKELNLKAIALPGINILLGIPGIDVLAALTILAEIGDIKRFPSAKKLASLSGLVPSVHQSGKTRYTGHITKAGRSMLRWILIQIAQKAVMQPGALREFYLKRKGGHKIAIVAAARKLSIIWVMLTKNTEYCYRKENLRQKKVRRMHKKALPYKVDGGLPQKITSLAAEEQTMPETPQPAA

SEQ ID NO: 163928 - protein, 449 aa, unidentified
MREPEEVEDARHEQYLDRVCAIDVAKASGKVCTRVPHPSRPGARRTLVWDVDATTNAVLELAGHLAAERIEKVTLESTSDYWRIWFYLLEAAGLDVQLVNARDVKNAPGRPKTDKLDAVWQAKLTERGMLRPSFVPPAPVRVLRDYTRLRTDLTRERTRYWQRLEKLLEDALIKISAVASGLDTMSARDMVEALIAGERDPRVLARLARGRMKAKHAALIEALTGRFDDHHAELARMLLDQIDGLNAQIATLTSRIGDLIAAIPAAWGVDADGSTGPAAVSGPDAARADALTRLDEIPGISTAGAQIILAEIGLDMTRFPTPGHLVSWAKLCPRTIQSGASSRGGKTGKGNPYLKGVLGEIAAAASRTDTFLGERYRRIVKRRGKLKALVAVARTILVIIWHLLADPAARYHDLGSGYYASRIDTDRKTRSHVRQLEALGFEVTLTTAA

SEQ ID NO: 163929 - protein, 427 aa, unidentified
MNQNKSATNFAATLGLDWADKKHDLWIQASAGGKPEHWVIDQTPEALHEWVAQMRARFPRGRIAIALETSRGAVISALGAYDFIVLFPINPSMLCSYRESFCVSGAKDDRTDAMLLEEYLRFHMAKLRPLEPDTELTRQLAGLVENRRGLVDERTRLVNQWHSLLKTYYPLMEVLFENMTLPLAAHFLLKWPDLASVQKAGPAALRKFFYGHNCRSDKAVEERLQAIGKAQPLTQDPALIVPAVLKAQALAGMLKALHQSIEQMETMIEQTTEAHPDAALFRSFPSAGPAMTPRLLLAFGTNRDRFASAQEVQQFYGIAPVKKQSGQSKVIHMRHRCPKFARQTFHENASHAVRTPGWAKTFYDQQRARKKGHHASVRSVAFKLMRIYFRCWKDRKCYDANLYEKALEKHGSPLASQMKKEAAAKGK

SEQ ID NO: 163930 - protein, 343 aa, unidentified
MQAVTTIGLDIAKSVFQVHGVGAEGMVVFRRQLRRRQVLPFFKKLSPCLVGIEACATSHHWSRELQALGHTVRLMPPVYVKPYLKRQKNDAADAEAICEAVTRPSMRFVETKTKDQQACLMLHRTRHLFIRQQTAVINATRAHLAEFGIVAPVGRNGVEELLDVVADPDDDRVPEVARECLAGLGVQLRMLKAQILEFDRRILAWHRSNETSKRLDEIPGVGPVLATALVASVANPGAFRSGRDFSAWVGLVPKQNSSGGKEKLGSITKRGDRYLRSLFTAGALAVIRYAKIHGTKHRPWLTALLARRPTKVAAIALANKIARMAWAMMAKGERYKEPVALTA

SEQ ID NO: 163931 - protein, 363 aa, unidentified
MKEEKRRYVGIDLGKREYTMAIIGSNGKVSHYHGTTSMQGRLALYRHLGKGDKVALEAGNLAFGMAREIQEQVGNEVRVLNSAKLPYIWDAPTKTDKEDALKLAHLVEERCDEKLPIVPLPSEKEMERRKVVANYQREMESRTRLINQLHGLFVSQMITTVVKKELATAERRRGAILVLRGQEREEAEFVLKHLELYEQRIAALKKKIQVEAKADEDMQLLQKIAGVGPIVSYAFMAHVGDGSRFSAGGQVSNYLGFVPRLYYSGTIQRQGHITKRGNGYLRGLLIQAAWAMVLSRKGGALKERFIYLTKTQGKSKKRTIVSIGRRLTELMYSVLRSKTEYEVRPWKGPGNDPERLAGQAMSA

SEQ ID NO: 163932 - protein, 352 aa, unidentified
MKNVVKQVVGVDVAKDELVVCFGKMYDNFTPELLAHKAFANTAKGFESLLNFANKLFVKEVNTRFVMEATGVYHESFAYYLHEQDLNVSIVLPNKISNYARSLDVKTVTDKTASEAIAMFGLERKLDNWEPPQGIYKHLQKLTREREQIVVEKVVIKNQIHAEQSEAYPSKKSIDRANKRLALLDKQEKEIREELADLIKSDVEVKQIVLLICSIPGVGMLTAATVLGETNGFNLIRNKRQLTSYAGLDVKEKQSGTSVKGKPQISKKGNKQLRKAMHLPALSAIRHDERFKAVFIRLVSKHSIKMKAAVAVQRKLLEMIYTIYKTKKPYDKEYFTNQSEEAMELTIQKTLI

SEQ ID NO: 163933 - protein, 421 aa, unidentified
MDFEVKHLICAGLDVHKKTIVAAVCMTDPVTLEAAYKVKSFSTNNSQIAAMRDWLLSYNCHDVCMESTGKYWIPVFNILETHMHVVLTHPKYVKAIKGKKTDKRDAKWIANLFRFDIVKASFIPPADIRALRELSYMRSAEKNRFQNSMTISRIRIDCVLTDPFGKTASSIMDYLLSDVPFDETECAKLIHGRVKASNEEIFDSIRGFEILSEQRFKMSHAKQHMELLSSYMDDIETELFRLSRSYDKVIKRISGIVGFTERSALFVISETGADMGVFESAKHLCSWAGLTPANNESANKKKSTRCSKAGQYLKPLLIQCALAAVKSKKNPYYAIKYKRLAKRRGRKKAVIAIARMMLTGIYHMILNNEEWKPDDYEAIIHPSKPVKVALTLDNVIQFLGEQGADPETLKLLQQQCAVTPG

SEQ ID NO: 163934 - protein, 411 aa, unidentified
MRLFVGDDWAEDHHDVELMDAAGRVLAKSRLPEGAAGMTRLHELIGQQLGEDADDAEVVIGIETDRGPWVAALVAAGYTVYAVNPLQASRYRERHGVSGAKSDSADAHMLTDMVRTDSHQLRAVAGDSADAEGIKVLARTHKTLIWERTRQVQRLRHQLREYFPAALAAFEDLDAGDTLELLAKAPDPARAARLTRAQVSAALKRARRRGIPDKATAILAALRGEQLGQPPAVTAAYAVTVRSLIAVITVLNEQVKTLGEEVGAHFGQHPDAEIYRSQPGMGAILGARVLGEFGDDPHRYADGKARRNYAATSPITRASGKKKVVVARFVHNDRLVDALNAQAFAALNTSPGARALYDGLRARGIEHNDALRRLANRLVGILHGCLKTRTLYNEATAWSHRENLPQSSVAA

SEQ ID NO: 163935 - protein, 355 aa, unidentified
MKYYTSTTEFNCGIDLHARQMYVCVMDRQGKKLVHTNVKDNDFAYFLKLIAPYKHSLTVCCECMFGWYWLADACQAAGLSFVLAHALYVRAIHGGKNKNDRIDSEKLTHLLRSNLIPPAYVYPATLRPVRALLRQRVCYVWRRSELLARIYSHQLAYNRIPVRQSRRNRDPWKERLLAQEDHPLRRIALQNDWAMIVQYDTQISALELDLLRVTKECAGRDYALLQSVPGIGRSLGLTILYEIGSIDRFPTVKDFLSYCRLVKGTVASAGKIKGLRGAKLGNPYLRWAFGEAAVIAKRDHAIIGPLAQRLEAQMNGNKFKANTVLAIKLARAVYFMLKNKTVFDPERLVAVLAKH

SEQ ID NO: 163936 - protein, 343 aa, unidentified
MDHFAGLDVSVKETSVCIVDDTGRIAKELRVASEPDALLRVLGNPAYRFKRIGLEAGPLSQWLFGALAEAGLPVICVETRHMRAVLKAQINKTDRNDARGMAQMMRAGLYRPVHVKTLRSQKLRVLLTHRKLLQSKAIAIDNDLRGTLRNFGLKVGVVGTVKFEARIKELVESFPDLAELVEPLLIVRRTLREQIGILHRHLLAIVRNDDVCRRLMTIPGVGPVVALTYRATVDVPARFRNSKAVGAVFGLTPSRYQSGEIDRPGAISRCGDEMMRAMLYEAAHIMLVRLAKWSWLKAWAMKIARHRGMKKAIVALARRLAVIMHRIWVDGTEFRWSREVTAA

SEQ ID NO: 163937 - protein, 315 aa, unidentified
MTEATTTTAGIDTSKAWLDIVIHGAAGHRRFANDGCGWRALAAELTAAAGVGRVGIEATGGYERGIAKHLRAAGFTVLVLQPVQVRAYARVRLRRAKNDVLDAAPHAAGAATSIRRRSPPTPRLADLAGPLTFVEQTEDDIARLKVRLEHVDDRRLLAGGITRLKARRRTELRRIADKLRAHDDLARRLDLVLSIPGIGERTAIALVVRLPELGKVGRGQIAALAGLAPFDADSGAHKGQRHIAGGRARVRRSLFAAALPAAFRWNQPLIAFYARLTARGKSHTATLVACARKLLIYANTVVSRQTPWTEKPAEA

SEQ ID NO: 163938 - protein, 321 aa, unidentified
MTYVGIDVSKATFVVAYSSAKSSETKTFKNTTKGIREFIRTISPKENHCVLEATGNYSMLLVYLLSKAGVTVSMENPLKIKNFARVMLSVVKTDVIDARLIALYGERMQPAPFKLRSDSLLLLKQKRTVLRQLKKQLTANRNLEGSLKILPFIDSKCKKVLEKTIKFLEKQIEEMEEELTSLAEIEYKKQMDLLTSIKGIGATLAAALIIATGGFTYFDNAKQLTRYLGLSPTYQQSGTSVNVKGHINRNGDAYLRSQLYIGAMASLRCNTECKACFERLRSNGKPGKVAIVAVANKLIRQAFAVVTQEKIYIDGYKSVKP

SEQ ID NO: 163939 - protein, 356 aa, unidentified
MIVIGTDTHKASHTGAGVNAATGQVLADRTVRAKRRSFEDLLRWARRLGGERVWALEDCRHVSGALERFLLARGERVVRVAPKLTAGARDSARERGKSDAIDAVAIARAAIRHGIETLPLAQLAGIELDIRLLVDHRERLVGTRTRLINDLRWQLHDLWPELEIPTGGLIAVRWPERLASRLARTQQTTRVQIVRDELRRIRELTRTINALEAQLAPLVAQAAPALLAERGCGVLVAGKLIGEIAGIHRFATDSKLARVAGSAPIPASSGSTIRYRLDRGGNRQINAALHRLALCKGLHDPNTAAYLARKQAEGKTHREAMRCLKRHLARRVWHLLQPDKIGAPVELGVKFIAGAR

SEQ ID NO: 163940 - protein, 382 aa, unidentified
MKEKVRFLGLDVHAETIVVAVAERDGEVRSLGTIANRAESIRKLVKKLGPVDQLKACYEAGPTGYVLYWQLAELGVACEVIASTLVPMKAGDRVKTDRRDAERLARSHRSGDLTAVWVPDEGSEALRDLVRAREAAKADQLRARHRLSKFLLRTGRRPETKIKLWTGVHMTWVRQLRFEHPAQESTRLDYLHEVEHMAERVLRLEQAITDAIKLATPEMQEVIRGLQALRGIAEISAVTIVSELGTLSRFENARQLMGYSGAVPSENSSGKRVQRGSITKAGNAHLRRIAVEAAWSYRLRPGIGPRLHKRQENVPEEIKEIAWKAQIRLTKRYARLAAAGKDQRKIVTAVGRELLGFIWAIGIKNLSVNRDNLSPTDHGTGE

SEQ ID NO: 163941 - protein, 378 aa, unidentified
MSKLRYVGLDVHAETIAVAVAEPTGEVRSVGEIPNQADSIRRLVKKLGGPDELRACYEAGPTGYVLYWQLTALGVACEVVAPTLVPVKAGDRVKTDRRDAVKLARSYRAGDLTAVWVPEPAHEALRDLVRAREAAKQDQLRARHRLGKFLLRQGRRPPETMKAWTQAYLHWVRTAVQFPEPAQEATLLDYLQEVDHAAARLARLEQALDQAVARAPAPLRAVIAAVQALRGVAQVSAATVACEVGTFARFQTARQFMGYVGLVAREASSGTRTWRGGITKTGNAHVRRIVGEVAWAYRHRPAVGAALKRRQVGVSAAVKEIAWKAQHRLHARYRHLLGRGKRKQQAVTAVARELLGFIWAIGVTVEQELLGASERRAA

SEQ ID NO: 163942 - protein, 343 aa, unidentified
MEQYIGLDVSMKETAVSIRQDGKRIWRGKCASDPQLLAAMIRKRAPHARRVVFETGPLSVWFYHALTAEGLPVICIDARHAKAALDMAANKTDANDADGLAHLAEVGFYREVRVKGFDSMLIRTLVTARRQLLKMRLQISNQIRGLMKTFGLVVPKGAGSVFERNVRTLLQGEDKLARIVLPMLQAWRDIRLRVAELSKQLVATAGEDQRCRLLTSVPGVGTVTATAFVAAVEDPANFKNSRAVGAWVGLTTRRFQSGEVDHDGHISRRGDNQLRSLLYEAAAVILNRSTDASVLRTWALALKERLGFKRAAVALARKLAVIMHAMLKTGELFDPQAGPSTAG

SEQ ID NO: 163943 - protein, 317 aa, unidentified
MNALVNQKEVSVGVDTGKDQLDIYIRPLDIHFSVSNNKSGIAEAIKKLKPYKPTRIVIEATGRLEYAFILACSKANLPFIVANPAHVRKFAGAKGQLAKTDKLDAELIAHYGEAINPPLSTIKPAVMQLMSDLLSRRRQLMKMQTMEKNRFKAMPKNIKGLIKPILTTIKNQLEKLDLKLLKLIGSCDEYKIRNDILQSVPGIGNIVAFSLLSDMPELGYITNKEAASLVGVAPFNRESGRYKGQRRIRGGRYQVRTLMYMSMLSAIQCNPVFKSTYQRLVLAGKPKKLAIIACIRKMIIIVNTMLRHEVMWEAKAA

SEQ ID NO: 163944 - protein, 360 aa, unidentified
MSSLPATVADHYRYVIGVDTHAATHSYAIVAASGGALLDQSTFPTTPAGLRRARDWIGRRTDGDLDGVLIAAEGTGSYGAILGDVLEDAGYRVVEAPTPRRERGRGKTDALDAVLAARSTLVLPLTMLRDRRAGQARTALQVLTVAREHLNVERVRCINALTALVRSHDLGVDSRKALSTHQISTIAGWRRREEPVGTATARAEAVRLAKRTLALDQDLADNRATLTELVTAEAPELLELHGVGAITAAIVLTVWSHPGRIRSEAAFAQIAGTAPIPASSGNTVRHRLNRGGDRQLNRALNTIVLTRIRTYAETRAYLDRRLAEGKTNKEIRRCLKRYVSRQIFRTLATAQPPQTVTPAA

SEQ ID NO: 163945 - protein, 356 aa, unidentified
MNYVGIDYHKKYSHVTAIDEEGKVIRSHRLENTPESFQEFFRRLNGPSEAVLEASRTWGVMYDLLEEIEKVESVELAHSQKVRAIAEAKIKTDKIDSHILAQLLRADLIPAAYIPGKQTRSYKEMIRQRVFLVRMRTRLKNRLHVLLDRLHIPLPSVTDIFGRRGTQYLKKLTLDGVDGEILKENLKLLETFNQLIKEAEQEIASLMREDPRVQLLRTVPGLGPILAAVVALEIDRIERFHSPSKLASYTGLVPSTYASGGKVFHGRLIPMSNKWLRWALVEGAWGSLRTSPYCRVYFENHKRQKGPHTAAIALARRLSEIIWHVLKENRVYQERPFQRQCPISIRLASPAALTAT

SEQ ID NO: 163946 - protein, 325 aa, unidentified
MDILGIEISKDMFDAALLVGGRVRQATFPNTEAGFEQLLAWLAKHRPDPAVPLHACMEATGNWGLDLADFLYGSGIRVSVVNPARIKAYGESELARNKTDRLDAALIARFCRAHTPPAWSPPSAHLRELRELVRRCGALKAARVQELNRQKSGFASPAVARSIAAHLKWLDEQIEAVAEEVRQLIKADPALSKNLALLRGITGLGEISATVLLAELPNIAEFTPKALAAFVGLSPLEHCSGTSVRRPGRMSRIGTERLRSTLYMCALSAKRTNKALASFVQRMTAAGKPPKVILVAVARKLLLYAHAVIRTQKPFTSSPEAYSPA

SEQ ID NO: 163947 - protein, 338 aa, unidentified
MKVNTIGVDLAKNVLQVHGVDEQGKVVLRKQLRRNQVMNFFAQRTPCLVGMEACGSAHDWARRLIKLGYTVKLMAPQFVKPYVKTNKNDAADAEAICEAVRRPNMRFVPVKTEEHQAVLSLHRARQGFVRQRTAQANQIRGLLAEYGVVIPQGIRHIGQCLPEILEDADNALPGLFRQLLRQLGEHLKTLTRLVEEMEEQMQQWHGGNEASQKLAAMPGIGAITATALVASVGDARNFSNGRQFAAWLGLVPRQHSSGGKTTLLGISKRGDRYLRTLLIHGGRSVIAAAERRKTSPVEESLTQQRSMAARAGVAEKQECRRGRSRQQECAGDLGVVGA

SEQ ID NO: 163948 - protein, 412 aa, unidentified
MRRVIGMDIHRTFAEVVVWEDGRLRHAGRVDMTRTALEGFGKSLKATDEIVVEATGNTMALVRVLSPFVARVVIANPLQVKAIAHAHVKTDKIDAGVLASLHAAGFLPEVWTPPAETERMRRLVARRNQVVRHRTRIKNEVHAILHAHLIPCCPHADMFSQIGRAWLKRQPFPDDEMMAIERHLRELDRLGEDLELLDREVAKNALDNPAVKRLLTITGVNVTVAAGLLAAIGDIRRFPSPQKLVSYVGLNPRVRQSGLGFAQHGRISKIGRSHARAMLVEAAWAAAKAPGPLHAFFVRIRAKKGHQVAAVAVARKLAVLCWHLLTKDVDYLWARPALVAKKVRGMEIKSGQPVKKGNKPGKAHDYYVKTLRDREKTLAENAERAYEHFVRQWQPRRPEDAVRGRLKTARRE

SEQ ID NO: 163949 - protein, 483 aa, unidentified
MKPKRVESNKKASCRPTPNNWHAMNRKQRREMTRKIQSQDLSLEIVHPDAAGIDIGNESHYVAVPSARDCQPVRRFGCTTAELKAMADWLKQCEIRTVALQSTGVYWVAVYDILEDAGFEVYLVNAKETKNLPGRKSDVQESQWLMKLHTYGLLRNSFRPSQEIRTMRTYWRQRNDLVRAAGRHIQRMQKALTQMNIQLANVLSDVSGLTGQAIIKAILAGERDPYQLAALRNWRVKASEEEIARSLEGNWQEDLLFVLQQEQDGYEFCQKQMAECDQRLQQYLQRLEDRSHGAGLPEEKRKERLRKKKKGNAPQFDLRAELFRMTGTDLTQIDGIDVTTTMTILSEAGWDMSKWKTEHHFVSWLRLCPDNRISGDKIIGKGRLPTNNRVTNALRMAASTLRLNHSYLGAQFRRLRTKLGAPVAIKAMAAKLARLVYRMLRYGMPFIDRGAEFYDAQHRKLQINYLKRKAANLGFQIIEAPAA

SEQ ID NO: 163950 - protein, 412 aa, unidentified
METVVERPAALDVHKEQVTACVRVPGEGRAREQHVAEFPTTVAGLLTLSDWLEAFGVTQVVMEATGVYWKPVWAILEDGFECLLVNARHVKQVPGRKTDIKDAEWLCQLAEAGLLRASFVAPKPIRALRNLTRYRKTQIQERAREANRLHKALEDTGIKLDCVATDILGKSGRAMLDALVQGTTDPEILAELAQGRLRSKIPALKEALEGRFDHLHAVWIGAILAHLDFLDQQITSLTEAIGEQITPFEKAVELLCTIPGVQRRTAEVIIAEIGVDMSIFPTDKQLASWAGMCPGNDQSAGKRRSGKTRHGSKWLDWALEEAAMAAIRTKDVYLAAQYARLRPRRGHKKALGAVKHSILIACWHMLSTGELYVDLGGDYFRKRDPERITKRLVAQLETLGHKVILEELPQAA

SEQ ID NO: 163951 - protein, 312 aa, unidentified
MVDHCYGGIDVSKDRLDVQVLPQGRCFSVDNTAAGWKQLVDRLRGLSIAALGIEPSGGYERGVIRALLDAGLSVRRINPNKLRQFARARGVLAKNDRLDARLIAEYVAIMPTRVVHRDPAAEQLAAVVTMRRQLSDEHVTVENQTAHIEDAMLRRLNKRRLARLKADILLLDKRMAEIVASNANLARRYDLLTSMRGVGPTLAFTLLALLPELGQMSRKQIAALVGLAPYDFDSGRLKGHRCIYGGRMPVRNVLYMAALSAARYNPVLKTLHNRLAATNKKPKVVIVAVMRKMITTLNAMLRDNLAWQPKSA

SEQ ID NO: 163952 - protein, 374 aa, unidentified
MSYCPVAGIDVSKQFSDMCILSPDNKIFAQEKIYHDETSINRANALLQKAERLFFSKPVIVMESTSHYHLILFQFFSEHGYDVIVVNPLQSNSMKDFSIRKRKTDRVDAFKLAMMYRTKTLRPSQIPQTATRALRQLCRHRAELLNDVSSYKNRLTALLDQTFPGYDKVFSDVGGVTSCAVLVRFPTPTILLVEEESELVDVIAAASKAGYNFAKKNAGLLISAAQKAQTLGIHSCADETLIVCTIQMLRTLSESVLQIETAIDNLLAQIKEMRNNVSLLQSIPGVGSHSAALLLGEIGDILLFKKPKQLAAYFGLDPTERQSGSFRGTKNKLSKRGSPYARAALHMGVVNSICKRGKDSAANPVLLSYYEKEM

SEQ ID NO: 163953 - protein, 322 aa, unidentified
MSASVLGIDIAKQKFDVALLVDGKTKHKACKNSSEGFEALMLWLEKQGIQKVHACLEATGNYGEDLAIYLHEVGHMVSIVNPARIKGFGQSELIRTKTDKIDAALIARFCLAMKPGEWIPPSPEIRSLRALVRRVDSLIDMRSQEKNRISTAHESVIVLIKEHIAYLDQEIEKIRRQIVDLIDQNPSLKQKKDLLDSIPGIGKATIPTLLAELNDLDKFNHVREVVAFIGLAPKETLSGSSIKGKARLCKIGCVRLRKALYMPALVSIQCNPVMIAFYNRLKAKGKNGKVIVCAIMRKLVHVIFGVLKSGKMYDPNYQQNFA

SEQ ID NO: 163954 - protein, 373 aa, unidentified
MPKYSTAFGMDVHLRSTTVCALDADTGEAVTRRFPGNPWGEIAGWMDGFPGPSLAAYESGYLGFAPQRELAGLGVECVVAAVSKIPRSAADSASKNDRNDAARMAKAILAHDISPVWVPSPEVEGIRDLAGAYDGATARLATAKQRLLAFLAKRGFAYGGATPAGNPRKYWTYDFLRWLDKVRPEDDGGVRTLAALRNEVEAAAEARADLLSEYRAAVDASPIAAEVAALQSIKGCAFALAAAFSAEVGDFTRFRSGRQVTAYFGLAPSQRSSGDSVRLGGISGAGNALVRKLAVEGSWCYAAARHQPKLMPRDTGVPLEIRMHGRKGSERLLRRREELLARGMPAAKANAATAAELVRWLWALGMMCREGAE

SEQ ID NO: 163955 - protein, 363 aa, unidentified
MIHIGIDQHKRYSQLHAINDNGEVVFNGRVNNSLEEFTQLRNLFSDEPIQSVVEASRTWVVYDLLEKLGFNPKVANPLKVKAIAEAQIKTDTIDAQTLTKLLKADIIPEVHVADKETRRVKNILRQRTWLVKNQTAIKNRIYSIIDRNHISCDIGVANIFGVHGRCFLDTVAKELSASESQLLQENIKLLDVIGLHVKAVNKLLKEELHLTEDIKICKSLPGIGEVFGPTIALEIWDVKRFSSQDKLAGYAGLSPTTYSSGGKTYHGKLFWQCNKLLRYAFCEAAWSAIRSSVYFRSFYARLKKRVGSQKAIVATARKLCEITWHCLKEKRPYEERVYKRRDFKEVKEKHFKVCQSRCSATSL

SEQ ID NO: 163956 - protein, 342 aa, unidentified
MNHYAGIDVSLEYSAVCVVDGSGKIVREGRPLSEPEALIGWFGSLGLELTRIGLEAGPLSQWLHAAMKQEGLAVELLETRHVRDAFKAMPVKSDRNDARGIAQLMRLGWFRPVHCKSINAQEVRAVLTARKLVQTKLLDIESSLRGILRGFGLKVGKTTGRSFAGRIRELTDGHPNLAEIGEALLSVRAVLLREFDAFEKRVRAMARSDARTRLLMSTPAVGPIVALTYSSAIDDPARFKSSKQAGSHFGLTPKKYQSGETDRSGRVSKIGDASVRQALYQAAHVMLTKPAKGCSELKGWAMRIAKRAGMRKAKVALARKLAVILHRMLANGTPFNPAAAAA

SEQ ID NO: 163957 - protein, 343 aa, unidentified
MAAQITGGVDTHLDVHVVAALDELGGLVGVESFPTTPAGYRALLGWLGSHGEVVVVGVEGTGSYGAGLARYLQREGVAVVEVDRPNRQRRRRQGKSDPHDAVTAARAAQAGDALGVAKLRDGNVEAIRVLRVVRGGAKRDRTRAINQMRSLISTAPDDLRQQLRGLTIPKLVRRAAAFRPGGRSDVTAATRLALHILARHVLELDTEVAALDNVLEPLVAATAPELVAQVGVGTDTAGALLVAAGENTSRLRNERSFARLCGAAPLDASSGKQQRHRLSRAGDRQANSALWRIVISRLSHDPDTRRYLQRRLAEGKTKAEAIRCLKRYVARELYYRLPQDPLA

SEQ ID NO: 163958 - protein, 376 aa, unidentified
MERIVYIGIDVHKDTNTAHLFTRTEDAVIDYEMGTIVAGSDYMIKAIKKVLKDFNLTGYQVQAGYEAGPTGYGLCKALQKAGYNCEVMAPTTIKRAPGERTKTDRRDAKMLAMALATYSYKPVYILNDKDLSIREFTRTRNTRKNELKKAKQFLLSFLLRIGKSYPDSGSYWTQKHWAWLETLDLKDEYLNYSLKSYMQDIKDLENKIKIMDAMIEEIAFTDERYKEKVGKLMCFTGIETYTALSIVCEIGNFDRFPDAKSFSSYIGLVPGQDSSGQRQRYTNITKTGNSRVRRLLVEATKGIKHSSVFNKSRRLIERQTGQNPEIIAYADKCRQRIKHRMTNLEIRNGKNANVATTAGARELACFVWGMMTGNVA

SEQ ID NO: 163959 - protein, 311 aa, unidentified
MNSEAYVGVDVSKVSLDVKVLPTNETLQISNNNGGINELIKRLTQIDPTLIVFESTGGLEMLAVSNLIENQLPVVVVNPRQVRDFAKATGRLAKTDAIDADTIARFARDIRPEIRPIKDEHTQLLSALNARRRQIVDMLVAEKNRLSRAPKPNKKSIQKHIQWLEKSLTDINKDIDKTIKKSPIWRENDRILQSFKGVGPVVSATLLCDLPELGALNRKKIANLVGVAPLNCDSGHFRGRRRIKGGRANVRRKLYMAAVASLRHNPLMKDFYERLVEAGKPPKVALTACMRKILTILNAMMRERTYWNAIW

SEQ ID NO: 163960 - protein, 425 aa, unidentified
MNKDILSTLFVGIDVSSSSNYFCAINFEGKHILDFSTANDLPSSELAIEKICNALKENDLKFVTIVLESTNVFSFHIANLFASNNSLFNFNSKVFVINPKTSSNFRKTYSDMDKTDPQDAFVLADMARCGRINQQPYKASQLFALQRLTRQRFHLVKTISREKAYMMSNIYLKFSSLYIAKKEDEPFSDMFGNTSKSIISDFTPDDIVSMSDEDMINFVMEKGKSRFSHPEENVKLLKKIARDSYRLDKVAYDPINVAISSSFNTIKALEDNLKVIDKAIEKNVKGLCDNEFTILKSIPGIGDVYAAGIISEIGSIEFFKDNNALAKYAGLTWRKTQSGYFEAETTRMTKTGNKYLRYYLIEAVSSVKKHSKEFNEFYTRKYNEVSHGAHKRALALSARKLVRLIFGLLHHNQLYSANKLDNRSN

SEQ ID NO: 163961 - protein, 364 aa, unidentified
MKNIIKQVLGTDIAQKELVVCLGCMYDDWTPELYARHVFPNNLKGFNALLSWVKKNTDSSVAVSFVMEATGVYHESFAYFLDEHNLAVSIVLPNKISNYMRTLAINTITDKTAADAICQFGLERKLDNWQSPHPTYGSIKQLTRERDQIITERTVCKNQLHAEVSQAFPNRSSKKRLEERIKLLDKHASQINEELKVMVAADREIKNNVNLLCTIPGVGTLTACTILAETNGFELIRSKKQLTSYAGLDVREKQSGTSVKGKPRISKKGNRFLRKAMHLPALAAIRHNNRYKAIFARIVQKQGIKMKAAVAVQRKLSELSYIIFKTQKPFDPDLFLKMENTTKSQEYPETKKEIVEIQTTSFTV

SEQ ID NO: 163962 - protein, 415 aa, unidentified
MEKQRNKVCGADIHKKFLVATIISRDGIKMTKRFGMTLEDLLEFKSWVVENQCEQVAVESTGVYWIPIHTVLEDAVDLIVANAYKIKHIPGRKSDLIDSEWIAELCLNGMIEPSRIFPKEDRELRRLTRAREGYVTDMTREKNRIHHALESCGIKLSSVLADVFGKSGRYLLNSLLDGVELEEMIKGIPVKSIRKKADQIREAVRGSLETTQIILIRGGLEQIESIQRRIDELEGEIKNRIASRREDLKIAMSIPGIGFTSAVTILAEIGDFKDFAKAEQLAAWAGLVPAVYQSADKLVTGSITKHGSKHIRWILVEVAQAIARTNKSELKRFFRRVQAKKGYNVAAVALARKVLCILYHLLMNREMYQEDEVIKTKSIGIDPSSLPTKMGFEEMIQVLVKAGYEIRKKSSGTGG

SEQ ID NO: 163963 - protein, 335 aa, unidentified
MYYSGIDLHSDNCFMTTVDEQGTVVKQQRIEHVAEFVLDYFHSLGDSHTAVVESTTGWYWLNDLLEANGIELVLAHAKYLKAISYAKVKTDKVDSHTLATLLRLNLIPRAHKISHELRDLRDTMRARLRLVHKRTACSLSLHTIGVKFNHPEALPEPYQLQVSLLKEQIQMLTGHILTLEKSLHPTLIPNDDIQYLLYVPGIGKLSAFTLYLEIDGIERFSTDKHFVSYCRLVPAADNSNRRVHHRSSKDGNKYLKIAFSDIAVHAIQYYPEFRAFYQKMLRRSNPAIARTLVAKELARIVYYILKNKTPYRGFKGQPISRQKSLQWPRLSSPDF

SEQ ID NO: 163964 - protein, 428 aa, unidentified
MDESTTFLGMDVHKKQHKIAMLLPGSDEPAQWTVNNEPDAIRRMVRRAKKLAPGPVEFSYEAGVCGFALQRLIEAQGVECVVIAPSLMPIQPGRRVHTDRRDAHKLAKLHRGGLLTPVRVPSELEESVRDLCRAREAARGDRTRARHRLTKLLLRRGLVFHEGGHWTEKHMRWLRGLKFALPADQQIFDEYLGEIDHQDQRLRHLDGLLKEAASAEPYGRLVGWLRCFRGIDTVTALSVLTELHGIESGRFAHPRKLMAFLGLTPSEDSSGERVRRGGITKAGNRHVRRLLVEASWSQRGVPRVSKALQTRRQGQPAWVIRLADKAMRRLHRRYWRLVNAGKLPVKATVAVAREFSAFLWSLLYLQDKSVLAERPPRPTARQKAKSKNRSKTPAQAPAESPPRQSARAFFATASTAAAAECEDGVRTS

SEQ ID NO: 163965 - protein, 428 aa, unidentified
MKFKQTDGQNQRIERISTTHLIVGIDIAKETHVAQATNFRGIILTKRHLSFSNTIEGYMKLDRWIDEIQQKHQLKNVVIGMEPTGHYGYNLANWLADKGKDVVMVNPATTKRNKENRDNCPSKSDPKDALVIADVVSRGYYYDYTRQAGDFQRLRTMMSDREFWVTNSVRLQNRIVRWLDIYFPEYASVFKDWTCPRSIATLKAFPSPSDLRGQTIEGVISGWRTYMKRAGGNTGRQKAAELLSKARQSVGESASLREAKQDLKRLLDEFERIADILEQFERELGTVLEGIPLVSQLRSIKGLGTIYIAAILSSAGDLRQYAHGRQLLRRAGLNLAESMSGKRKGEIVISKRGDAKLRKYMYLATLTLVGTNPVFRQLHENNVQVKHMSKQQSVFKVLGKLARILVGIVQNEDSFTPEKTVHSYVQAA

SEQ ID NO: 163966 - protein, 330 aa, unidentified
MKKWDFIIGVDVSRNTLDIHCAEINEHIQIQNGTEGFRELIRWCRHFQIDLKRSVIVMEYTGGYEYKLIQFCEVKNIPFMRIPGLAIKHSLGIIRGKNDKIDSKRIAQYGSEKHQSLETSKPLDKRIMALKELLSFRKRCVRDKAGCEATIKERKHIYPDLKNDIILKELEKKIQVNKKIIEEVEAEIKKIIEAHEDFKTNYELITSIKGIGKVNAWMTIAYTENFTSFPDGRTYAVYVGVIPFDHSSGISIRGRKRVSNLANKELKSELSQAAKSAMQYDKEIREYAERKLKQKDWGKVINNVKFKLILRMFAVVKRGTKYVDNYSKAA

SEQ ID NO: 163967 - protein, 418 aa, unidentified
MSKTLYVGIDAHQKENFCCLLDQEGNKVINTFSVANNMDGAKELEERIDLVMKEHCFTELKAATEAASFLDLHIVDYLASSKILSKYSASIYQFNPKITSGFKKVYPDKDKTDTIDAFVVADRLRFGRLPEPYEDSLPYFPLKRLTRYRCHLVSNISREKNYFLTHLFLKYSSFSDVKPFSNVFGKAGIATITEFFSSDELASMNIDKLVEFLIKEGKNRFRDPEAVAQKVKQVARESYRIRPALANSVNLVLSSTIENIRALTLSLKEINEAISNEFKAFPNTLESVKGLGPVYSAGIFAEIGNIKRFSSHAKLAKFAGLTWRKTASGNFAAEETRMTKTGNEYLRYYLIEAANSLRVHNEEYRLYYQSKYKEVPKHQHKRALALTARKLVRLVFALLTKNRLYQEKVEFSKNDVNF

SEQ ID NO: 163968 - protein, 371 aa, unidentified
MTSVVYVGLDVHKESITVCSYDPINDNLGNVQKLGSDYKMIMKYVEQLRRRANDEVEVICGYEAGCTGYALYHQLNNRGIKCVILAPSTMMIINKGGKKNDRRDAGNIAKCLAFGTYSKVHVPTKEDEDVREYIRMRDSQKKALKITKQQILALLLRQGYRYTQGKNYWTQMHLLWLRSLDLGGILQETLTEYLIEYERLTSKIERMDQRIEEIAGGDRYCENVKKLTCLIGVKTHTALSMLVEVGDFKRFATPDRLASYLGLVPGEDSSGARQRNTSITKAGNSHARRLLVEAAQGYTRGAIGFKSKELKRRQSGNTPEVIAYADRANERLRRKFYRMLLKNNAHRNVAATAIARELACFMWGMLTDHIA

SEQ ID NO: 163969 - protein, 352 aa, unidentified
MSHKSAQSTAVSTIGIDLGKNSFHLVGLDQRGAIVLQLKCSRAQLERRLANIPNCLLGMEACSGAHYIGRQLAALGHDVRLIPAQYVKPFLKGHKNDYRDAEAIAEAVQRPTMHFVAIKTPEQMDLLALHRVRSRLVGQRTGVINQIRGFLIERGITVRQGVLPLRKALPDILSSNTQALSPRMVNLITELVQDWRRLDERIAAVSAEIESLAEQDEGCQRVMTVPGVGPIISSAVVAAIGNGAGFTQGRDFSAWLGLVPKQESTGDRTILGKISKRGNKYLRTLFVQAAHVVLARRPNAAMRGLWPWIEQLSRRLHRNMLAIALANKLARIVWAVLARGRSYQPRIAAHVA

SEQ ID NO: 163970 - protein, 296 aa, unidentified
MMIHFVGLDVSQKMTAICVVDNAGRRLWRGQCPTAPEQIAAMVRQHAGDDSRIGLETGAMTPWLVHELRALGLEVICLDARHARAALKMQINKTDQNDAEGLAQIVRTGWFRSVHVKSFDSHRARSLLGARAQLVGVTTRLSNHIRGVLKTFGLLPGAMRGLPFDRKVELLLQDRSDVAPIVRPMLVAWRQLRVQISAFDKAIRVLVRSNSPCRLLMSAPGIGVLSALAYVSTVEDPACFSQSRSVGAHLGLTPRQYQSGEVDRSGRVSRCGDMLARTLLYEAAVVIMTVSATSFL

SEQ ID NO: 163971 - protein, 342 aa, unidentified
MKFYCGIDLSARDCHVCVIDEQLKVVVQQKLRNELPKICQLLAPYKADLKIVVESTFNWYWLIDGLQAEGYEVVLAHTLGLYLITGAKVKTDRRDAYSLAKLLLVGAVPVAYIYPVETRPVRDLLRRRMHLVQVRAGEYGSLRRLLLRQGILSSKQQEIKTATEAELEQWFEHPLVRLHASQELRRIELYSEQIAELEKSILALAKTAPSYELLLKLPGVGQTIALTILYEVGELTRFANVKVFSSYCRVVPGIAQSGNVSRRGRASKQGNHYLKAAFSQAAVHAVRCYPKVRRYYERQLQRHRGRGRQMICYNIIAHKLAQAAFHVLKEQTEYREELLFGR

SEQ ID NO: 163972 - protein, 582 aa, unidentified
MGCKVSEVQILSPRFLIFFVFTADDSIIRGLGGYAATHVEGTGTASVFPAILPGGPWVVVTVPALVPCARLLGWSRESATTSLVTGPVLIPFGRLQVFPSLPPPRLPFICAPLPEVAMTPHKDFFLDPRPPAPTLPQSPVLSEALQVCHPHAAGVDIGEAEHWVAVPPGRDPQPVRRFGTFTADLDALADWLIDCGVTTVAMESTGVYWIPLFELLEARGVQVLLIDPRQAKRAPGRPKTDRLDCQWLQRLHAYGLLAGAFRPDDQVCVLRAYLRHRQMLLTYAAHHIQHMHKALQQMNLKLTQVVSDLTGATGMAIIKAIMAGERNPQHLAKLRNPHCHHDEDDIAKALQGTWRAEHLFALRQAVELYEFYHQQLALCDQQIKTHLETFRDKSAGQPLPPKARRHKKTNEPRFDARTPLYHMAGVDLTTIEGIEEGTALVILSEIGTDMHRWPSVKHFCSWLGLCPQHKISGGKVLSRRVRPGAHRVTVALRLAARSLHHSQSALGAFFRRMKARLGTPKAITATAHKLARLVYRLLKHGSAYVQQGLDAYEAQYHERKVKTMAKQAKALGYTLVPLVAQG

SEQ ID NO: 163973 - protein, 489 aa, unidentified
MKSIYEKANPAINKVFKSAGLPKKVMCIAFDYHKKTHTALVCNGEGMQLRGVFNIHNTLKGIEYLNKVIRGLCRKHHIKKEHVILGGEDCGSYAFNFIHALASQGYLIVGVNAKDAKIERGNALASTDKKDPIGVAGMMLKCRGRIITANISDMEIIRRLTHQRLSISKSKTASANRIHSLVKQLLPGFLDSKESSITPFSRASLWLMSEKFSAKQIHARKTSLLIDRFKAFNVKQPEVTVRKLKYLTENILPPPARMIPCLQESLSREVTVYNTLKASDDGLSTEIARQLAPTPGVFLTTMPAMGIANAAGLYAEMADPVRRRALYKMVAYAGLVGRLKQTGGPEKEARSSGRSRHHNTFLKHLLIDTVIHIGMCGTSDLKHDYIRRDECGQYHRLTMARKMLRICACLMDGNFYLPKAIRNNPTHEVLRDHYQCAWNPIMVKWRNAGAVKVAFMDNAPLEQWRCMANELYHLDLSNISPQAWQLRKK

SEQ ID NO: 163974 - protein, 345 aa, unidentified
MDIIGGLDVHRKQITFDYIEMETGEVKTGQIRPATRERLHGWLSRFEGKQAAFALEATTGWRFVVEEIERGGFEAHLAEPAETRTLRGRKKRAKTDRLDARHLRELLTQGRLPESWIPPAHIQDLRVLVRMRKNLVDERTAFLQRIHAQLFHHGHLQERNLLGQDRRARLEELELPEAARKSIDLCLRMIDHINEELLPIEEEIRSFAKRQVGCKALMSHYGIGELTSVAILAELGDTRRFSSSRHAVRYAGLDVTVESSDDKRAAGKLSRQGPPTLRWALFEAAQCAWRKGSPDHDYYLESKDRLGGNRACLSIARKLVRKAHHTLRELGEEAFRPIPEVMKAS

SEQ ID NO: 163975 - protein, 438 aa, unidentified
MSNKVIFNLDELFISVGIDVGADFSWMSIALPNQQFVGKPYKILHNSIDSLTTAVSKIKEAEELYSLESRIFLESTGIYHYPLFCYLRDKGFNCSVINPIITKNSTNINIRKVHNDRFDSKKAALVGLKPDLKVSLMPSDLALNCRNLCREYYDLMDNRSAYVNKLQGELRMAFPQYLGIFSKVTINTSLTLLETYTSPSAFLKADKQEIIDIIKSTARFGLTYAQNKYNAIIQAATDANQFGYIIDSNIKRIRLYISFIRKYDEEINSILESLHELVDANEDSDFVKQIHLIETFKGAGFLSAVSIMGEIGDFSAFSKPKQLFAYFGLDPAVKQSGKFEGTKVQMSKRGSAIARRVIHTLALQSISISRNREAKNPVLLEYYLKKCDSKPKLVAMGAVSHKVCNMIFAILRDNKPFKIIAPQEHIKQYNSAKCDIAA

SEQ ID NO: 163976 - protein, 348 aa, unidentified
MAYFVGLDVSVKETSVCVVDEAGKVILEQKVLTEPDTIIALLTSLGATYGRIGIEAGPLSQWLVNALTAAELPVICVETRHMKALLTAQQINKTDRNDARGIAQMMRVGLFKPVHVKTLVAQEQRMLLTSRKLLQRKLLDVESDLRGTLRNFGLKVGVVGGSRYEARVRELVEGFPRLAAIVEPLLSVRRVMRQQFAVLHKMLLDTVRDDPVCRRLMTAPGVGAVVALTYRATVDQPQRFAHSRAVGAHVGLTPKRYQSGEIDYDGGVSKCGDALLRTMLYEAAHSLLIQSRKWSWLKAWGVRVAQRRGMRRAIVAVARRLAVVLHRMWVDGSEFRWSKDSTAVPAVA

SEQ ID NO: 163977 - protein, 451 aa, unidentified
MPVRMIGPTGQRFTSENGWPAGPAMQNIALFPSPGRCPGLDEWPPLVCFKESIPGMLSMVALKGKLGFAGDPLGGPRRPAASSFAPGCFTHRPEAGTAAGVLVSTRTIAWAIEARIRKEGSTTMNDSKLLNADVQGFFGIDVSSQSLDLADFPASLAETFSNDPNGVARIVEHLCERPVARIVVEATGGYEVSLVATLHKAGLPVVLVNPRQVRDYARALGILAKTDRIDAGVLARFAHDIQPPVRDFPDENARKLDALVSRRRQLLELRTAELNRRHQANLPEIQRSIDSVVELLDQQLAEIDEQLAQSIQASDIWRIKDQILQSVKGVGPATSQALLAELPELGRLNRRQIASLVGVAPFNRDSGRLHKPRAIRGGRASVRSTLYMAAFNAVRCNPRLRSFYQRLRQAGKTFKVAMTACMRKLLTTLNAILRDLTPWREPAITDSQNTC

SEQ ID NO: 163978 - protein, 393 aa, unidentified
MHTHAVCVIDAAGAVLDRFEVAHDRDGLAELMRRLARWGNRLRIAIERPSGLIVDTLVEAGHAVFPIHPNAVKASRPRYRSHGAKSDASDAYLLADLLRTDGHRWRALAQQSDAIRALRSLVRSRDDLVAARVAAANQLTSTLEAFWPGAAVIFADVASPIGLAFLRRYPSPSAAKRLTEAQLQRFCKHQHYSGRRSAAALLGRLRAAASGLVGAHTEQAMAHVVRAQLAVLAPIVTQIADLTGRIEQFMHSLPDGLLMMSFPRAGQVCAAQILAELGDVRERFPNADLLAAEAGAVPVTYQSGKTRSVAFRWACNHRLRQAITCLADNSRHANAWAKSVYQAARGRGCDHTHAIRILARAWLRVIWRAWTDRKPYDPALHGSALALAAAQGG

SEQ ID NO: 163979 - protein, 311 aa, unidentified
MPPLPVYCGIDVSKLTLDAFCLGHYCHQSNDPKGWRALIAWLDRLSPSASVVAEATGGYERAPIGAFRKAGHPTHVVQPLRVRQFASSMGQLAKTDRIDAKVIADFAQASQPRTDTPKTDLQERLVSLVSYQDQIKLKIVALQNQMEICADPLIDASAKRLLKAHHSELKAVAKAIKTLLAQSDELTLKFQTLTAFQGVGETTALALLAFLPELGQTSKAKIAALAGLAPFNHDSGQSKGKRAIHGGRAHVRKSLYMAALSASTHNPILSKFYHLKRSQGKPAKVALTAVMRKLLVALNFSLKNPNFSLAS

SEQ ID NO: 163980 - protein, 461 aa, unidentified
MKKPKRRATGRVDQGSKLSVIQSDVAGIDIGSREMFVCGPADEEGRREVRVFATTTQQIQQCVRWLKQQKVRSVAMESTGVYWIPVLEIMESSALEVLLVDTRPLSRVPGRKTDVEDCQWLQTLHSHGLLRGAYRPSEQISELRTIVRQKAVLVRQQADWIRRMHKCLDQMNVRVHHAVKDTQGVTGMAMLRAIVAGEKDPRNLAKLRDPGCQKSETEMIELLTGNWRSDHVFNLKQHMAMYDSAARQIAVYEEEIQRRMQEVTPTGRKDIQAPPLANIEKRKTMKKRDQEGKRQALYRAMGVDLTTIDGIGVETVEVIMSEYGTEMSKFPTEGEFVKHVGLAPHRPVSGGKVLKNKPKRQQGTRTAEILRNAASSLKHSRSALGAYYRRMARRKDSGVAVFATARKLGGLIYRMLRYGQQYVDVGQAAYERQYEEKRVRALNNTAHQMGYNLVKQEAVSA

SEQ ID NO: 163981 - protein, 346 aa, unidentified
MRYSTTVGVDLAKNVIQVSVVSARGKELLNRSLSRRKFAEFLGKRKSSLVAFESCASAHYWARAAQRHGHAVRIIPAKAVAPFRQGHKTDSNDALAVAEAARRPNIKEAPLKTAEQQGLQAIQRSRELLIGECTALSNHLRGILLEFGVAIPQGLASLLRALPEILEDGDNELPDLYRPTLQRLHSRLLALREDIDSLTREVDGLVKQHPVCKRLTAIEGIGPIGALSLYAVLGSGKAFTRSREFSAYLGLTPRQYSSGGKTHIVGISKKVGNRRLRSILIQGARAYVYRMKEPRSPKDRWLKNLIDRAGPNRAAVALANKNVRTAWAMVTQGTEYQRRLQLEMAA

SEQ ID NO: 163982 - protein, 340 aa, unidentified
MEKAIMIGLDIAKNMFEVHGRSAAGEVVLRRSLRRGQVEKFFAKLPTAVIGLEACGSAHHWARVLGKLGHEVRLMPPAYVKPYVKRNKSDTIDAAACWEAVGRPDMRFVPIKTTEQQAALSLHRSRDLLVSQRTQLANALRALLSEFGIVAGKGRAGLAHLVEELRAGTLELPADAVVAAMALADQRAALDAAADALERRITTQAKADEKAAMLKTAPGVGPLSAHAALATLPDPSLFKSGRDFAAWLGLTPRLHGTGGKTRTGRITKQGNQPLRRRLVLGATAWLRQVRARPEKASPWLRGMLARRPSKVVAVAQAARTARILWAMLSHNQPYRAPAIG

SEQ ID NO: 163983 - protein, 314 aa, unidentified
MKMNCHESFIGIDVSKEWLDIAIGEKCFRINQDIEEIDAFINKHLRVGNVELCVLENTGGYERLMVERLIKANLKVHKAHASRVREFAKASGMLAKTDRLDAYVLSAYGKFVEREATLVEINPAHQQLKDLRGRYEQIKEMLHGEQCRYQTPVDEGVKSSIGKVMKVLKKELERIQEEIECHLKKDAFLRQRQQILCSMKGVGKVISQALVIDLPELGRLSRKKIAALVGVAPMNQQSGKRKGYASIQQGRSEVRRMLYVGALVAVRHNKVMKEFYERLLAAGKRPKIGLVAVMRKMLVTLNAMVRDGKEWEAA

SEQ ID NO: 163984 - protein, 344 aa, unidentified
MDYFAGLDVSVKETSVCIVDEAGKIVREVKVASEPEALLAVLKNPAYHFKRIGLEAGPLSQWLFSALAEAELPVVCVETRHMQAVLKAQINKTDRNDARGIAQMMRVGLYRPVHVKTLRSQKLRMLLTHRKLLQSKAIAVDNDLRGTLRNFGLKVGMVGTVKFETRIKELVENQPDLAELVEPLLVVRRVLREQFVILHRRLLAIVRDDEVCRRLITTPGVGPVVALTYRATVDVPARFRKSKSVGAVFGLTCSKHQSGEIDRNGRISRCGDEMMRAMLYEAAQSMLRSKKWSWLKAWAMQIARRRGIKKAIVALARRLAVIMHRIWVDGTEFRWTREQAPAAA

SEQ ID NO: 163985 - protein, 418 aa, unidentified
MEVIFRRCAGLDVHKKTVTVCVRILDETGRLQKQTRTFGTTTGELEIMATWFVALEITHVAMESTGVFWKPIYNILEGRFELLLCNAQHVKRVPGRKTDVKDSEWLAQLLQHGLLRGSFVPERPLRDLRDLTRHRAQLVGEQTRAANRIHKVLEDANIKLGAVASDILGVSGRAILNAIVGGENDPKRLAGMAVGQLRKKIPDLEKALRGNLTEHHRFMLSTLLGQVDYLEGLIAKLSQRIAELTPTLPLEGDVLPFDEAVRLATTSPGFAETGAQNVLAEIGTDMKRFPTAAHLASWSGICPGNHQSAGKQRNGRARKGSRWLRRALVQAAWAASRTKNTYLSVQFWRLSRRRGRKRALVAVAHSLLVILYHMLERRQPYGDLGPMHFDELHPERLTRNLVRRLEALGHKVALEKIA

SEQ ID NO: 163986 - protein, 345 aa, unidentified
MDHFAGLDVSVKDTSICIVDDTGKIVREVKVASEPEALLAVLKNPAYRFKRIGLEAGPLSQWLFSALAEAGLPVICVETRHMQAVLKAQINKTDRNDARGIAQMMRVGLYRPVHVKTLRSQKLRMLLTHRKLLQSKAIAIENDLRGTLRNFGLKVGMAGKVKFEVRIKELVENLPDLAVLVEPMLIVRRVLREQIVILHRRLLAIVRDDEVCQRLMTTPGVGPVVSLTYRATVDVPARFRKSKSVGAVFGLTCSKYQSGEVDWSGRISRCGDEMMRVMLYEAAQSMLLHSKKWSWLKAWAMQIARRRGMKKAIVALARRLAVIMHRIWVDGTEFRWTREQATAAA

SEQ ID NO: 163987 - protein, 313 aa, unidentified
MYKYIGIDVSKVTLDLYDGEKSYKVSNDTTGFKEIRKLSSKTEELCLIFEPTGIYSHALIEYSTKYVIKAIIVGSKEARDYARSIKQRSKTDKIDAKVLYRYHTQIEQEYITVPFIDTHIRKVTQRRNVYEKYQKMIAQLNNLIEASHKEDQLLITSLKKQIISLEKSSRKVLFEIEKLLLDKVEHQQAFTHLQTIPGIAKKSALVILMEFLRYPEAKSSEMVALMGLDPVLKESGMFRGKSRISKQGGKYFREKLYMSTVVAIQHNDRLKSFYERLVQNGKPKKLALIAAMRKLLRIAFAVVKNKEPYLALV

SEQ ID NO: 163988 - protein, 464 aa, unidentified
MGRTNKAQQSLKRRHEPVKMELPVELKSVNLNAAGIDIGSRHHFVAVPEGRDKVSVKQFGVFTADLEELAEWLYQCGVTTVAMESTGYYWIPVFELLEGKGFAVKLVDARQTKNVSGRKSDMLDCQWQRELHTVGLLKGAFRPPDEVCVIRGYMRQREMLVQASSMHIQHMQKALTLMNLRLGNVVSDITGVTGMKIIKAIIGGERNPQVLASNRTEQCQHSQKVIAKSLQGNYRAEHLFALQQALELYEVYQEKIKDCERELMKVIQQQPHKTEEEPPPAEQKLRRRDKVRGEVDVRSELYKQTGVDLYRVPGLGPETLLTLRGEVGLDMTPWKTEKLFSSWLGLCPGTRESGGKVLSRRSKRSRSRAAAAFRIAAASLRNSRTALGAFYRRIRARSGEAKAVTATAHKLAKIYYRLLKYGEAYVELGEKAYEERYQQQRVKALKKQAALLGFALVATALSQT

SEQ ID NO: 163989 - protein, 355 aa, unidentified
MSMVRYIGVDAHLQSGTFAVMGPSGRRLKEQVVETNGRAFKAFLLSFAGEKHICLEEGELSEWLYELFVPLAKRVVVVQPEKRKGPKSDSIDAWALAELLRTKKRATVVYKAPGAFSGLKEAVYAHRAMTQDAVRSKNRLKAVFRTRGLHGFGQQLYAPESRQPWLEKLSPTRRLRAAVYAEQLDSQLAMLKRAEAWLQQEAKACPIIKVLTTAPGIGLVRGSQVVATVITPHRFRTKRQFWAYCGLAVVDRSSSDWEPWKKGGLRRKRKRQTRGLNRNRNPLLKMVFKGAATTVTQSLPDNPLGQNYRRNVEEEKMDPAMARLTLARQIAAIVLAMWKKQEVYDPARYPRSKTA

SEQ ID NO: 163990 - protein, 400 aa, unidentified
MRAVFGIDVSKVSSEVAILVNGEKVHGYTMTNDAIGFSWLLDELRTVHKPEIIFEATGVYSRRLQTFLEDNGYAYTRLNPLEAKKQLDSLRVRKTDQIDAEKLAQSQFVLNRKPTYVQEEVYQNLRDLSRFYQNLTEDIVRAKNRLHKVLQVTFPELENILSTPSGEQYWNLVIAFPCKDFVLELSKDELSESIHQSTSKRISDKRVAYLAEKLIALANQSYCAVKKTSPMLEEVRYYTKELLRLSGQRQAVLDEMVELAQPLPEYDILLSIPGIAETTATSIIGELGDIRRFQSTNQINAFIGIDLRHYESGNFLAKEHITKRGNPYARKILFKCIHNIASASHTNPCHIADFYEKRKRQSQTTSTKPHTIASIHRLIRTMYYLIMHNKLYDYASTQNR

SEQ ID NO: 163991 - protein, 346 aa, unidentified
MDQIIRIGMDTSKNFFQLHGVDTAERAVLRRKLRRNEVLTFFAEQPPTVIGMEACGAGHYWARELGKLGHEVKLIAPQHVKAYVKRNKNDGRDAEGLCEAMSRPTMQFVAVKSEEQQAALMLIGVRQQLMTRRTQLSNAIRGYAAEFGVITVKGLVKVEPLLAQIARDESLPALAREMFALLGRDYARLQIELKAVEVRLMAWHRANADSCRLAKIPSIGLIGATALVMKAPDPRLFPSGRHFAAWIGLTPKDHSTAGKTRIGKITRAGDEMLRSVLVAGATSVIQQAKKGRGRPSPWLVALLARKPPKLAAVALANKTARIAWKLLTTGESYDGARMPVASKLAA

SEQ ID NO: 163992 - protein, 424 aa, unidentified
MNFTQNEKLNQVTADTLIVGVDIGSQTHFARAFDWRGVELGKRVFKFSNTGVGFLTFMKWLYEMQQRTAKKKIIVGCEPTGCYWLTFQSFLEKQGIKLVTVNPYSVKKSKELDDNSPEKSDLKDPKTIAGLVKDGRYSTSYIPTGVYAEIREASVCRDQIMKQHVRLSNQIQGWLQKYFPEYLECYSDFDSTSGLMLLQYAPLPHDIVKLGAGGINEIWRNAKVRAAGLKRAQTLVEAAGNSVGLDGGEAAKLEIWILVNDYIAKKQQMERLDEYLAQKVMEVPNVEKLLAIKGVGLSTVTGFIAEVGDIGRFTDPKQIQKLAGLEITKTSSGKKKGQPGISKRGRSKLRRTMYESAKALMNWNPAFADVFLYYRNRTRNPLGGMQAKIAVAYKAIRVFYTILKTGCDFDEMKFREDIIRPEAA

SEQ ID NO: 163993 - protein, 487 aa, unidentified
MASKTTAESGNGKRLTRQQRKELGRRIWSGNPGLEVVHRDAAGIDIGSRVHYAGVGPDRDPAPVRAFGCFTADLHEMAQWLQQCGVKTVVLQSTGVYWIPVYDVREQYGFAVWLVNAKDTQNLPGRKSDVQECQWLLKLHTYGLLRRSFRPTAEILALRTCWRERAEYVQQAGACIQRMQKALTEMNMQLATVLSDLSGVTGMSILRAIVAGERDGQKLAELRDPRVKASQETIALSLEGTWRPEQLALLQRQLQDWDHIQRQIRACDAKRTFRGDLEARMKEMAAEVPATEPSQSAAETNSKRKRKKNGKWSRNEPSFNLAGELQRITGVDLTRIDGVKVLTAQTVLTEAGRDMSPWPSENHFVSWIGLAPRNDVSGGKVLNRRTRKVKSRLATALRMAASTLLKSDSYLGAQYRRFRTKLGEPKAIVAMAAKLARQIYRMLRYGQEYVDRGTAEYEKKYRQQQIKLLAKKAAQHGFALVAVPNRA

SEQ ID NO: 163994 - protein, 353 aa, unidentified
MKYIIGCDAHKRFSQMAVFEEQSKTLQQKRVDHKPGAIYDFLAMYPEGTPVGLESVGNWYWIVDEIEAAGCQPLMAHAAKAKVMMGNVNKTDKLDAQGLVTLLRNGTLPTVWIAPGEIRDARELPRTRMALCKIRVALKNRIHATLAKYNLHPANKTDIFAQRGCQELEDVIQKLPSETLKCVQQELELLNMVQEQILSLEKRIREQIPENWMMQLLKTLPGVGDILSIVIACEIGSVDRFPGAEYLASYAGVVPGVKGSGDKVRYGRLPKQANHYLKWAYIEAANSVSSHCNAPNWRQKHVTLLYERVRRRKGHSVAAGAVARHLAEASYWILTKKEPYRDPVRKKVLPRQG

SEQ ID NO: 163995 - protein, 309 aa, unidentified
MNTSETALQQKHTRQARALYMAFELGEKNWKLALGDGARSPSRHTVAAGDTAELLECIAKAKRRCELAQEAKVHSCYEAGRDGFWLHRWLLERGIDNIVVDSASIEVNRRARRTKTDRLDGDKLLAMLIRYRAGERRVWSVLRVPTAQQEDERRVHRELERLVQERTAHINRIRALLVMQNLRVKYVGGRLWQRWWSAHAGELVPGVRAEIEREGERLSLVRAQMRAIEAQQHQAVVGGREPQVARLAQLGAIGVGSGWVLVKELFGWRQFRNRREVGGCLGLVPSPYASGQSQTEQGISKAGNRRVPR

SEQ ID NO: 163996 - protein, 419 aa, unidentified
MSFKILKFKCCGLDVHKTWIYACIGITDSNNRTEYKQARFSSFTKGLNELCDWLAKYNCTDVCMESTGKYWIPVFNILEQHNLWVTLSHPKYTKPMKGNKTDRKDAKWICDLYMCGMVKPSFIPPADIRELRDLVRYRYKLTCMITGEKNRAQNCLTVSNLKLDDVFSDVFGKSSRSITEQILQHPGEKFDVAPFVHGRCKTPIEEIQAAVDGAISKEQAVKLRQCLDHIDELNKHISELEQEILRLSDKYEAALNLIRTVPGFDKNPMTAVQMLSEIGGDMSVFPTAKHLVSWAGCCPRNDQSNQKIKSTRISRAGSYFKPVLVQVANALIKSKKHLEFTNRYKRIKARRGHKKAIIAICRMILTAIWHILSDLKPYTPEGFLESHPVKEGKVLSSSQALNFFKQRGYIIKDEPLSVS

SEQ ID NO: 163997 - protein, 349 aa, unidentified
MLYAGLDLSRKRLDFHLLDADGATVEVGAGPPDADGLHRLTQRLDRYRTPIRAAIESMNGARFVHDRLELAGWQVEIADAQKVKGLAPLACKTDRIDAWVLAELARRELVPAIWLPDPAVRGERERARWRLHLVRHRSSLKQRVHAVLLTHGKPCPVSDLFGVRGRQLLARLALPEPWQGTLEASVRLIDELDREIGDCERELRRLGADHRYVPLLCTVPGIGWVLAYTIAAELGDIGRFPTPRKLTGYTGLCPRVYQSGERDLRGPLAKQGPRYLRWALVEAATHACSHPAYRDRYSRRKRASANSAAPRSRKSISPAGSPKRSGTCSPAPNPSLPKAPPTPWPPDGP

SEQ ID NO: 163998 - protein, 339 aa, unidentified
MAECDGRQYVGIDLHRRRSVIVRMTPDGERIGPVVRIASDPVEFAAQVSSWGEVPEVVLEATYGWYWAADVLADAGATVHLAHPLGVKGFAYRRVKNDERDAADLADLLRMGRLPEAWIAPPQALRESVRHRAKLVALRSGLKAQVHAVLARQGVTLASSDVFGVAGRRQLDELRLDPPFQARVLSLLRLIDAYTFEIDLVGKRISAELKHHAGFTAIQALPGVGPVLGAVFVAEIGDVTRFTRPQQLCSWAGMTPRHRESDTKVHRGRITKQGNNLVRWAAVEAVQRVHHGPLAATKARLAFRRGNNIAKVAAARELLTLVFYGLRDGHIRCLATTPA

SEQ ID NO: 163999 - protein, 348 aa, unidentified
MEHFAGIDVSLEQSSVCVVDAAGKIVREAKVASEPEALVRFFRELGVAVSRIGLEAGPLSQWLHAGLAEAGFDAVLLETRHVRDAFKAMPVKTDRNDARGIAQLMRLGWFRPVHCKSLPAQEVRALLTARKLLQGKLHDIEMSLRGILRGFGLKVGETTRRRFEGRVRELTDGQPTLTAIAGALLAARAVLARELAGLEKRLRGLARLDTRARLLMSAPGVGVIVALTFVAAIDDPGRFKSSRAVGAHFGLTPRKYQSGETDVSGRISKIGDGSVRWVLYEAANIILSRPVKGSSLKRWALAVAKRGGRRKAKVALARKLAVVLHRMLADGTPFVAEAAKPAPVAAAA

SEQ ID NO: 164000 - protein, 351 aa, unidentified
METTKEKKYTWFVGIDVSRNKLDYAVMRGKQLLFHNEIENNTPFIKQFVLELKALKGFTMSKTIFCMENTGFYCNHLLEVLHKMKANIVQEPPAQIMKTMGLVRGKNDKVDAIRIAHYAYKNRETLRLWHPRRPVLNELAKLSALRTRLMNYLGGITISLKEESTFIKKKISNQSMQLCNNSIAALKVDLKAVDDLMLKLINEDEELSRLRDIIVSVDHVGPVTATQILICTNEFRDISNPKKFACYAGVAPFPRESGVAISRRRVSHIANKKMKALLHTCAVGTIRGNNDLTAYYLRKTEVEKKPKMSVLNALRYKIILRIFTCVKQNRKYEKTYVNNWMKPAEEEGNDI

SEQ ID NO: 164001 - protein, 341 aa, unidentified
MAEVVTIGLDIAKSVFQVHGIDAAGAVVLRRQVRRAHLLLFFAKQPKCLIGIEACASAHYWGRELSKLGHQVRLMPPSYVKPYVKRQKNDAADAEAICEAVTRPTMRFAEIKSPEQQSVMVLHRVRMMLMRQRTQLSNAIRAHMAEFGLVAPIGREGLQNLIKLVETSDARVPEEASACLQLLATQLKLLNSQILATDRRIRTSARATETGRRLMGIPGVGPLLASALVATVPDPKAFKSGRNLAAWVGLVPKQNSSGGKERMGGITKQGDRYLRQLLVVGALAVVRYAQRHGARRPWLVQLLSRRATKVATVALANKTARIAWAIMTSGESYREPMVQAA

SEQ ID NO: 164002 - protein, 343 aa, unidentified
MELYVGMDVSLKETSICVVDGSGRIVSEGSVISEPAAIAAFIEANAGGALRIGLETGPTTTWLWHELRALGLPVICIDARHAKAALSMQINKSDRNDAVGLARIMQCGWYKEVQVKSVSCHELRAVLNARAQLVKIKRDLENQIRGLLKNLGLVIGKAGGTVFTRRVEELLGRQGLLWEAVRPLLEVREKVRREVAGLYRRLLDLARNDIDTRRSMTVPGIGPITALAFHSAVDDPSRFRRSRSVGAYFGLTPRRYASGEVDWTGRISKCGDRMLRTYLFEAAGVLLTRVAHWCTLKAWGHRLWKRIGFKKAKVAVARKLAVILHRMWRDGTDFIWSSKEAAA

SEQ ID NO: 164003 - protein, 374 aa, unidentified
MIYIGVDLHKDSMTIVCCDEQGNWISQEKIACKCTGKIEKFFAQPQLHPCTVVVEAIGFYHWLFDLLENKVETLILANPVETRKYSWDQPKTDCRDAKKLALLLSGGEFQRNKSLACFVPDTSLRTFRELTRHRHNLVRQHTSLINSAHRILLKNNLAGPKNITGSSLELFLTRFGKKFPIYHNNFLMQISENLFYNERQIKQTEQEIESFLHLERFKPLYEILTSIPGIGNTVCACLISEIGDFSRFDHPDKLASYAGLCPRVFASDKTVRYGKITKKGSVFIRKALINAAWVAIREDDKPRRIFNRVCKRAGRKKAIVAIARKLLVWIWYLMAENEKWKAISTRPDSLTSNKSGVTLIRLLKHTPSGANSQA

SEQ ID NO: 164004 - protein, 320 aa, unidentified
MNSIIVGIDVSKETFDAAVLINNKVQTRKFNNNSEGFNKLVTWLKSRGTGHVCMEATGIYWKNLAKYLYDYGYKVSVVNPARIKGFAMSKLSRTKTDKADSVLIADFCKAMKPEAWYPQPLYIQELQQLVNRLNVLIKHKTQETNRLEGASKAIANNIQMHIEFLETQIKEIEQLINDHIKNNKDLHNKAMLLESIPGIGAKTQAVVLAFLADIEKFSSAKQVVAFVGLNPKHRQSGSSVRGASIISRTGNSDLRKSFYMPAMSALRHNCIIKQFSQRLSDTGKPKMLILIAAMRKLLHIIYGVLKHNSPFNPNVLINQK

SEQ ID NO: 164005 - protein, 335 aa, unidentified
MTQVTTLGVDLAKSVFTVHGVDVAGRVVLRKTVRREKLMELIVGLSPCLIGIEACSGAHEWARRFAAHGHRVGIMMARFVAAYRKNSKNDGNDAEAICEALGRPNMRFVPVKSAEQQAILSLHRLRQGFIEERTATINRIRGLLGEFGVVLPQRAEEVRRAAVVAAEALPVLAREAIAELRSHLTYLDERIKRYERQLLALAKEHEPARRVQGVPGVGPLTASALTASIACGHEFANGRQFAAWLGLVPRQYSTGGKARLGRITKRGDAYLRTLLMLGARAVLQSAARKTDRLSRWAMAVRTRRGYHRAVIAVAAKNARIVWALLAKNREFAVAN

SEQ ID NO: 164006 - protein, 434 aa, unidentified
MEKGTTYVGLDVHKKTVVACRMRVTADKRIEWEMKTFETMTADLLRLHDWLSEWEVKQVALESTADYWKPVFNILEDGFEVILVNAQHVKKVPGRKTDATDAEWLAELMLHGLLRASFIPAKPQRVLRELTRYRTTVVRERGRVVNRVEKLLESTNIKLSSVVTDVMGVSAKAMLRELAAGVTEPQALAELAKGRLRNKLQALEAALTGTVDEHHRFLLAQQLGHIDFLDEQIEVLNQQISQHLEQMTRPPADDDGSGASENETGEPLSWSAAVELLDTIPGIDRRTAEVILAEIGLDMSQFPTADDLASWAGFAPGNHQSGGKRYSGRTTKGNRPIGAALNQAAWAASRTKGSFLKARYHRLATRRGKKRAIVAIGRSILVSIWYMLSRQESYQDLGADYYDQRRKETKISYLTTQLSKLGFVVTLDPVPAAA

SEQ ID NO: 164007 - protein, 325 aa, unidentified
MKKIFIGIDISSKTLDLCVKIEGKIEYFDIQNEPKSIRTFFKKHVRETAIVAMENTGRYNWNLFEVLSKMNLQVYVLSPLHLKKSLGLSRGKNDKVDALRICNYIEKNQKESIAWKPSSAAVCKLKILLAERNSRVRMKAGLAKQQHDYKLMKSLGLDKDLLKLNQKLIEAVEVQIKKIEEAIEKNIKEDSELNRKAILIRSVPGVGKIVCWTMIAKTEGFTTITDPRKMACYSGVAPFDHQSGTSLRFRPKVSIFADKGIKSLLHLAAMSAIRLNNELRVYYQRKVEQGKNKMSVLNAVRNKIIHRIFAVIKNQTMYKNDLVLS

SEQ ID NO: 164008 - protein, 338 aa, unidentified
MFTERTSVGLDVHARSVVAAVFDGDTGEVFKKRLTPGNDDVIAWVRSLPGPSAVVYEAGPTGFGLARAFDTAGIMCEVAAPSKIQRPPGDRVKTDARDAMLLARLLRLDDIVPVTVPTVEREAARVLVRAREDVRGDLMRSRHRVSKLLLRQGIVYYGGTAWTGTHLRWLRSQHFDTPGLRLAFDAEHEAVLAAEARRDRLDAAIEAMAADSEYTPVVHRLGCLRGVATSTGFGLAVEVGDWERLTGSSIGAYLGLVPTESSSGQSRSQGSITKTGNTHARRLLVEAAWQHLKPYRTPGATMRHGGSWHRRPPGPVDTPATGGCTSGGSTSMTARRTP

SEQ ID NO: 164009 - protein, 475 aa, unidentified
MRTIGIDLALNATHKAVVADEKGTVITPVIRFRTESEALQDLMKRAREGKADDEPLRVVMEPTGLAWLPLASYFIQRGVTVHMVSTQQSADLRKFYSKHAKSDRISARVLVRFPWVLPQDLQPLQLANAHYVDGQRWCKQREQLAELITAIKNRVQAWERAFWPGLEETIDDLFSPWMRRWREAFYDPWKLQEMDLCSLEMFLVEAGAGVDKAGSVAKGLQAVARRSVALFGNPNGGNSPYANYASLQDQVLRELRLLVVYEHEHRSLQRQVRELYKCMHPTRNLETIKGVGEGGASVYLFFIGKVLRFARQKHFRGWSGMVPESDQSGDINKKGLRMTKAGPDLVKKYAYINAEVARQWDPQIAAIYHDQMVNKGKHHVQAVCHCATHLLDRVRAVLRDDRPYELRDVDGNPVSWQEARSIIAERYQVPEEVRKRSSAREKRRRRDQRREQNQRRREATQDHKRLMFVHHLNEE

SEQ ID NO: 164010 - protein, 312 aa, unidentified
MKNDTIGVDVSKDHLDAHRLADGATRRFANDKRGHKALIKWLAQTPADHVVFEPTGPYHRAVERALGASGVPFVKVNPRQARRFAEATGKLAKTDRLDAAMLARMGAVLELEARPARSETLLELRELHIAREALVKDRTAAKNREKVLTLLLLKRQNAQRLEQIDRQIATVEAAILETIEADAGLSDRFAILTSIPGVSSITAFALLIEMPELGALEAGQAACLVGLAPIARQSGRWTGHAFIRGGRASLRQALYMPALVAARFNPDLKAKYAQLVGAGKPAKVALTAIMRKLVVLANALLKANRKWAPKTA

SEQ ID NO: 164011 - protein, 343 aa, unidentified
MRSPKIKVSALGIDLAKAVFQVHGVDEQEQVVARKRLSRNKWLKFIAQLEPCLIGLEACSSAHYWAREMSKFGHDVRLISPQFVKPYVKSNKHDAADAEAICEAVSRPNMRFVPVKGIEQQDIQSLHRARELLVKQRTALSNQIRGLLGEYGLVVAKGVRRIRRSLPELLEDAENGLSFQSREIFYELYQQLIWLDERISVFDKKIEQVFRGNEACQRLGQMEGIGPLIATALYAALHHAKEFKNGRQMSAWLGLVPRQHSTGGKPLLLGISKRGDRYLRTLLIHGARAVIFRIKGKETRKAHWLRQLIARRGVNRATVALANKMARMAWVILNKGARYQPSV

SEQ ID NO: 164012 - protein, 355 aa, unidentified
MKDYTQKDVYIGIDVHKKTYAVTAICNGEIVKRDTLSAYPKQLAGYIKKYFKGAKVHTVYEAGFSGFHLHRYLVAAKIESIVVHPASIKVSARDRVKTDKRDSLKMAKQLSTGDIKGITVPSEERERFRAITRTRDSILEARKRAGNQLKSLLFLHGLILPEDDMKVCKTLIKKVLQFEVAEDIKYCINMYAQLWLDLEVKLQEILQRLTQQAEADKKVDIMYRAVPGIGALSARILSNELEDMRQFSNEKSLFSYTGLTPSEYSSGEHKRQGNISRQGKPILRKILVQVAWRAIKQDARLAEVFERISKKAGRKRAIVAIARKLIGWIRACFITGEVWCAKADKDSLTTLTEAC

SEQ ID NO: 164013 - protein, 445 aa, unidentified
MITQSDGTVEQQTRTFSTMTSDLLALDDWLRAHRVQIVAMEATGIYWRPVFNILEEGRQVLLVNAQHMKAVPGRKTDVKDSQWIADLLRHGLLSASFIPPAPIRQLRDLTRYRKMLVQERAQEINRLQKVLETANIKLAAVATDVLGKSGRDMLDALIKGGKNPDALAELARGRLRAKLPDLRLALEGRVEPHHQFLLQQILAHTDFLEQSIDAVQQEIDKRVIPYQEAVTLIQSLPFQLQAGAATVIAEIGVDMSRFPSDAHLASWAGVCPGNCESAGKRKSGKTTDGNPYLRGVLCEMAWIVSRMKDNYLSAFYHRIARRRGKKRAIIAVAHKILVIIYHMLKSNKPYEDLGGDYFDQLDAARIERRAVQRLEQLGYAVTLTALELPDKTEESPPDKATKELPDKTTRMPADKTEKSSPNKTEKSPANKTTKKKKEVTSLQNV

SEQ ID NO: 164014 - protein, 421 aa, unidentified
MTDDIEWYVGFDWASETHCACLMDRAGRVVGKREVAHAGADLAELCDWLIRKTGAEPGRIGVAIETPHGPVVETFLERGFAVFAINPKQLDRFRDRFTVAGTKDDSRDAQVLGDSLRTDSRAFRRLVIDDPVRIELREWSRIEDELKRERTRLANRVRDQLWRYYPQMLQLSEDLAEDWLLALWRRVPTPAKAAKASEATIQRILKAHRIRRIEAPEVVRILRQTPLKVAAGASEAASAHIRSLAERIGLINQQLKTAERKLEQLLTRLEQAAQDQAGQDQAGQMSEQRDVTILRSMPGIGRTNLATLLAEGSEPLGRRDYHVLRTLSGVAPVTRRSGKAWMVLRRLACNRRLRNALYHWARVATQHDPVSRQRYAALRGRGHSHGRALRSVGDRLLYVACTLLRRQVLFDPDHNSLEAAA

SEQ ID NO: 164015 - protein, 353 aa, unidentified
MFSVGIDAHDRSYAMCILDDHGKVFKQHTLSGSVPEVAAWLGKLKKPFRVCYEASLGYGLLFDALKPIAKDVQVAHPAHVRSIFKSKKKNDRIDARKLAKCLYMDEVPRVHVPTLDVREWRVLIEHRRRLVDKRTATKNGLRALLRSQGIESPKGKRMWASAGITWTKTCEFKSSLTALRRDQLLLELEHFDRAIELAEKTLDQIGAQHPGVALLRTIPGVGPRTAEAVVAYVDDPHRFSSTRKAASYFGLVPSLDESGGTSRYGHITKEGPATVRKLLVESSWRVMSCSPTMREYFLRIKNEQKDRAGKAIVATARYMVQVMVAMLKSGEEWRERITPKAEEERHHPGKDMK

SEQ ID NO: 164016 - protein, 360 aa, unidentified
MQTKGSKKLFDGQSIYVGLDVHSKSWKVAMYGEHYEHKVMSQNPDPDLLARYLKKKFPGGEYHAVYEAGFSGFTSARRLQELGVNCIVIHPADVPTSQKERLQKTDKIDSRKLARALRNKELVGIHIPKKQLEADRSLIRQRFKIVKDIGRNKNRVKSLLYQFGIKIPERFTMAQTRHWSKVYIEWLKQLSIKEETFRQTIDNYIRIVETQRKELLTINRQLKALSQSERYKINYNLLISVPGIGIMTAMTFLTEIGDIRRFKRFDELCSFVGLIPRMYGSGEKMETGKMTKRGRKALKIMLIEASWDAIRLDPVLMAKFNELSKKMQKNKAIIRIARKLLNRIRFVLIHQQRYVTGVIE

SEQ ID NO: 164017 - protein, 349 aa, unidentified
MSNQQCTAVTYGIDLGKTWFHVVGLDHTGNPIKRAKLNRASIIRFFINIPAALVGMEACPGSQWLARKLQALGHQVRIVPAQFVKPYVKSNKNDTIDAAVIAEAITRPTMRFVQIKQCDQVDLQALHHSRDLLVSTRTRLINQMRAFCLEYGVAMRNGVGAFKVALPPVLSDESNDLTPGMRELLVDLAQELSTLEDRIAQFTRKINAQADASDIARRLATIPGVGQLTATALVAAVGDARHFKTARDLSAWLGLTPAQYSTGGKTHLTGISKRGNSYVRKLLIHGARSCSMHLDRTKDRLGLWIEALEGRLHHNKMVVALANKLARIAWVVLTKPGALYERRVPQLVT

SEQ ID NO: 164018 - protein, 321 aa, unidentified
MEQIYTGIDVAKDSFVVATKLEGKITTTLHQNNRKGIVGFLKSLPSQSWCIMEATGVYSLQLAIALYEKGMKVSVVNPLQLKRFAQTKLKRTKTDLVDAVLIAEYGERMQPKLYEPPAPFMRQLQQQRMSLKLLVKTKRSFLNQLHALTQLEEADKEALKACKTVLKSIKKQIDRLEEQMQKLAEQHCQDLFILLQTVPGISKKSALELIIVSGEFKNFTSAKQFSSFIGICPCINESGTSIRGYRGISRIGDKNIRATRYMCSLAAKVYNKACQELYERMVAAGKAKKVALVAVMNKLLKQVFGIVNSGEAYTSTLSVKC

SEQ ID NO: 164019 - protein, 314 aa, unidentified
MASSPERFVGVDVHKDTLEVCVDSREEHWECSNDASGIEELLAILGALSPTLIVVEASGGYERRLVAQGYEAGLPVVVVNPTRVRRLAEALGIIAKTDAIDGYVIARFAEIVRPPVREPQSAEQQQLNALVTRRRQLLGIRTAEKNRLSTCPDLMRTDIEEHLTWLDSRVEQLEDEIDDMLTNNPSWRELTALISSVPGIGQVTAATLVAELPELGTLNRQKIAALAGLAPYNRDSGPRKKKRRIFGGRAPVRCVLYMAALSATRHNPVIKRFYNQLLERGKIKKVALTACMRKLLVIVNAMVRKQEVWSYIPA

SEQ ID NO: 164020 - protein, 355 aa, unidentified
MTYSRKDLILGVDTHKDFHHAAVINHVGKSIADRKFDATSAGYSDLIAWATGVGRIGRAGIEGTGSYGAGLTRELTRRGIPVIDVIAPDKQLRRLRGKTDQIDAYNAARAVLNELATAVPKTQDGFVEALRVLRTSRRLLVKQRTESMNQLQCLIVSAPADLRVSLAKLKAKNLALRCSKIPVRKADDLVMTETKNVLRSLGKRYLELLTEADRLMKRLGAIVKEHAPELLAVHGVGPDVAATMLIVAGENVDRLNNESAFAHLIGTAPIQASSGKTNRHRLNRGGHRQGNSAAYRIVMVRMKSHEKTRDYVVKALARGKTKREAMRLLKRYVAREIFQILITIRERHQQAAISA

SEQ ID NO: 164021 - protein, 335 aa, unidentified
MTLYCGIDLHSNNHVICVIDDKDERLFEQKLGNHSELTIAALKKYKKRLKAIAIESTFNWYWLVDALMAAGFKVELVNTAKVVQYSGLKRTNDRYDAFHLAHIMRLGILPTGYIYPKADRGLRDLLRKRIQLVQDRSSHIIRYKSQIQMHTGKTIRADFIKAKKYQSPIIGDDNVQLALQSHIAMIKALSTQITLLEKSILAQVEPNPAFTYLKTTPGIGDILAETILLETGDITRFKGPGNFASYCRCVDSRRESNGKKKGENNRKNGNKYLAWAFIEAANFAIRRSEKASRFYEKKKQATNMIVARKALAHKLARASYWVIRNQQDFNEDLVF

SEQ ID NO: 164022 - protein, 381 aa, unidentified
MVFEVINLKRGKGKSVEQITRAAAAGQIVRVGADLAKRVIQVHAVDAAGRVVCRRALARDKFIVWCARLPAGCIVAMEISSGAHHWARRLAELGLVARLMSAQLVEPYRSQGATGKNDANDAAAICEAASRPSMRFVPVKSVEQQSMLCVHRLREGLKAERTACINRIRGLLAEFGLAFAQGPEALRRVLSDVLEDASNEMNTLARLVIQRAHSQWRELDAHIAWCDERIAQHARDNPAVKTASQLMGIGILGASAAVATVDDFAQFNSGAQFGAWCGIVPRQHSSGGKTLLGRITRRGDTYLRSLLVQGAKSAVLTAHKRSDPISRWALALRERSGWQIAAVALANKNARILWAVLSKGEHFDAHHVSVKPGAAPVAAAA

SEQ ID NO: 164023 - protein, 381 aa, unidentified
MYVGMDVHKDMCHIVQVNDSGEVTESYKIKNSIQRLDQILRKIPRNAKIALEAGTSSRPVYRRLQKLGFEIHMANPSKMGHVSSNKKTDEQDAIRIAKLLRMGELPECYVPSIETEAMRTLVRHRVSLGVKTAAVKNQIHALLALNGVKPNLSASDLFGKRGMNFLNHLELPSEEQRILKSYLRELGFLREEIETADTKLASIAEDDKRAKLLMTIPGVDYYSALAIISEIGDIKRFPDAKKLTSYTGLVPRVYESSKRKYMGHITKSGPEVLRWILISDAHSAIRKDGKLKRFYTRLTRRVGANKAIVATARKLLVIIYHMLTDLKPYEERDDDLTYRKLSRMAMKARRNKMKKNIKRMSELEIRGREMLISLGGDISQG

SEQ ID NO: 164024 - protein, 450 aa, unidentified
MNASFVLGIDPGKSFFAATLMHSTGERIWKARQFDMSRDGFEALSSSLPDGDLTVGIEASGRIDDNLLAWFGRWKSCFRNRKIKVIRVNPGQSARFGGPKPRRDQTDGSDSDHVGEFTRVYANRLEAFEHDPQAQAMTRLINERQHRVDELAATKNRIHEQLLVCFPEFTQMFVDPFGKLARAVLRQAPTARHAAKRRPLSLARVKAGHKERSLGTEQAQNLIQLAKRSIGSAGEENDAAAMIFLLDQLDLLEKRLADIEETLAAYAAQAKHEVGPVGAHGVSAARQIELLDSIPGIATVAASTLVLGTRGLARFDSGSALAAQWASCPERTQTGTSLDKTRLTARGDHKRRAMLYLATQIACMYDPAFAFHKWRMVQRGLCPQQAVCAAMNRMARVAWALVAKNQAYDVNLLIGQIQIHHAELWKTFVRLHQNNGTLWKKVELKYKKIA

SEQ ID NO: 164025 - protein, 420 aa, unidentified
MAEIQEVIHARCCGLDVHKETVVACVRVAGQRAKQDVRTYATTTRGLLELGDWLAEQNVTAIAMESSGVYWKPVWNLLEGRVNQQGQVMELMLVNARHIKNVPGRKTDVKDCQWIAQLLAAGLLSPSFVPPLPQRQLRDLTRQRTQLISDKTRVANRLQKVLEDANIKLASVASDVLGVSGRAMLHALIEGKMTPQQMADLSRMKMRSKIPQLTEALRGGVNDHHRFMLKSVLDQVEYLEKQIGWFDERIEAMMSPLELTAVKRLDEIPGFDKRAAQNVLAEIGTEMNRFATAEHLCSWAGICPGNNQSAGKRKSGRMTEGNKWLKQTLNQTAWAASNTKASYFRAQHKRLSHRRGAKRATMAVAHSQLETIYHMLSRDTCFQDLGADYFDRQNTEQLKRQLINRLQRLGCKVSVENNAA

SEQ ID NO: 164026 - protein, 375 aa, unidentified
MKEKLRFLGMDVHAETIAAAIAEPDGEVRSLGTIPNRMESVRKLIKKLGPVEKLRVCYEAGPTGYVLYWQLAELGVQCEVIAPSLVPMKAGDRVKTDRRDAERLARSHRSGDLTAVWVPDEGSEALRDLVRAREAAKQDELRARHRLGKFLLRSGHRPPTGVRSWTHLHLIWVSQIRCTQMAQESTRLDYLHEVEHMRERVLRLEQAIAEAVQLASPALQEVITDLQALRGIAHISAVTIAAELGQVSRFAGARELMGYCGTVPSENSSGKRIRRGSITKTGNAHLRRIVVEAAWSYQRPPAIWAGLRKRQQSASEEAKEIAWKAQHRLHKRYARLAATGKDKRKIVTAVGRELLGFIWAIGTKAEATVIQRMAA

SEQ ID NO: 164027 - protein, 430 aa, unidentified
MSEYAALVAIDWADQQHAVCLLDPSTGEREQAIVKHTPAALQEWALSLRQRFAGQPIAVCLEQSRGPLIYALLQYESRGPLIYALLQYDFFVLYPINPATLAKYRQAFSTARGKDDPSDADYLLDLIEHHRNRLRPWHPDDEKTRTLRLLVEQRRRLINDRTRVSNRLTALVKGYFPQVLDWFDDIRTQLVCDFLERWPQLSLLQQARPTTVDKFLRSHHSTSKPTNLRRLSEIKTALPLTTDAAVMTSSVINVKVLVAQMKTVIAAIAEYDRHLEALCLTHQDYELFASLPGAGPVHAARLTAALGSDRSRWQSADELVTFSGIAPIIERSGKQFRIRWRYFCPKFFRQTFHEFAAQSIQDSFWARAYYSSQRAKGKDHHAAVRALAFKWIRIIWKCWQTRTPYNEVTYLESLRKKGSSLLKFAADFQQ

SEQ ID NO: 164028 - protein, 364 aa, unidentified
MEPITHVGMDVHKRSIVIAMLRPDGAKPVEMQVPNDTIGTRRLIQVFKREGEVPCCYEAGPCGFGLQRKLEAAGIRCRVIAPSLIPGRPGDRIKTDRRDARKLGELLRAGLLTEVHSPTPEEEAVRDITRCVEDAKQDLMRARHRLSKLLLRRGHDFTEGRAWTAPHRRWLKNLSLELQGPVQITFDSYLLTIEQTEEGARALEKRVSEIAQTESYREAVGWLRCFRGIDTLSAMILLAEIHGFDRFVSPSQFAAYIGLVPSEHSSSDRIRRGAITRAGNSHARRILVEGAWHYRHTPGGGIGLKKRREGQPLWAIAIAQKAERRLHARFWKLTLAKKPYGKVVTALARELATFVWAMHRSGQL

SEQ ID NO: 164029 - protein, 343 aa, unidentified
MYIGLDVHKKLSYYSMVDGEGTEVKKGRFPTTCEGLDEFANELPEGAKVAIEASTSGIFAYEYLDEGGIEVHLAHPVYVKPFAKKHVKTDKVDARVLAQLLRMDYLPESYVPGKEIRDQRVMIRHHASLVRLRTSIKNRVHALLAIEGIQTSEFSDLFGKRGMEFLRRVKLRQVRREALDNYLEVLKALEERIEEMEAILKERAKITDEAKWLMSIPGIGYHNALLILSELGEIERFSNPRSMVSYSGLAPKVEQSGDYTRYGHINKHSNGFLRWAFIQSARAAVRSSKPNRFQRIYNKIKARRGEKVAIVATARHLAESVYWVLTRKEYYNGNRAIRASYFS

SEQ ID NO: 164030 - protein, 347 aa, unidentified
MLAGIDTHKDTLAVAVIDDAGRPVIVTEVANTEAGFDSLEQLLTAHAVTRVGIEGSGNYGRGAAVHLVLTGSAEVVEVPPSLTSRERSGRPGAGKTDPVDAVAIARITAREPTLPPVRLAVGQAADLRALADYRAQLVAERTALANRAHSELHGLLPGYQAQIPRLTAPTFIAKAKDLLAGQTSVRALLTRRRLTRLAELTVEIREVADLITAAVAQVDTGLTEPYDLGPVGAATILGEVADVRRYRSRHAFAAANGTAPIPASSGRTTRHRLNRSGNRTLNRVLYTMAITQIRADTEGRAYYLRKRAEGKTGREALRCLKRRLSDVVYKTLHEDLAAGRAPTAIGR

SEQ ID NO: 164031 - protein, 398 aa, unidentified
MWTLGIDVAKKKHYATLLDHQGELVFTNLAFTNNDAGLEKLLRRISASGKEPDEITIGMEATGHYWILLFQHLTEQGFEVLLLNPMVTRARQNITIRGSKTDPIDSRLIARILQEPEVKTSAIPDNEVAELRSLTRLRFELMQEAVSLKQKLLCLLDLVFPEYKDCFSDVFGQASRQLLGQFPSAAAIAKADIRRLTNLMSKASRGRFGRQQAESLKRAAKRSFALKQSNRNLVFQIRILLEELNLILQHIAELDQETVAYMKQQQALLKSLPGIGPVWAPTILAEAMPFFNPERKDGGRALVAAAGLDPKLNDSGGKNGKARMSKRGSKYLRTALLEAAEVAVNISKDPLFLPIFEKQKAKNKPYWVALSHVANKMCHVIFAVLRDEIPYRPHLEPK

SEQ ID NO: 164032 - protein, 378 aa, unidentified
MNRIIKIGMDVHTSNYTLCIFEPSFEHDGTVHCITQVKPEVKNIIHVIETFKKKHENEELNIVCGYEAGCLGYSLYHELKEKGIECVILAPTTMKTEKGGRKLKNDYRDAKMIAECLAYGGYSAVHVPTELDNSVKEFIRMRDDIKENLKSIKQQIIAFLTRNGKQFEGKSFWTRKHIDWINTVSFSEPLLQDTLKEYMIEYNHLCDRVETLDKQIEEISLKEEYVEKVQQLQCLIGIKTHTALSLIVETSDFNRFKKGNMYSAYLGLIPGDDSSGGQENKLGITKAGNNHLRRLLVEAAQGYTRGRVGFKSKDLKSRQEKCSSEVVAYADRANERLRRKYYRMILRGKRFNVAKTAIARELACFVWGIMTDHIDLCS

SEQ ID NO: 164033 - protein, 323 aa, unidentified
MTRTICGVDISSVSLEACIGPDGAFASFPNNPAGIAALAAFCQAHQVELVAMEATGGYEQRALALLSEQGLPVAILNPRAVRRFADSMGQLEKTDRLDAGVIAWYAQTRRSQPVCLSSASQQQLRALVTRLRQLTEVRTAQLNQSRMVTDPAVVALIDELLALVARQIRELETSIAQLVAQDPLWHQLDQVFRSIKGVADRTVARLMAEMPEIGTLSNKTISKLAGVAPLARDSGKHQGKRAVRGGRASVREILFIVASVVGRYEPDFIAFQQRLSAAGKPRKVIRIALAHKLLVRLNAKARQVRQQHAHAHSTTSVPGFVEG

SEQ ID NO: 164034 - protein, 310 aa, unidentified
MDIIAVGIDVSKDRLDVAVYPCGEAFAVERNGAGLEQLITRLKQLMPTIVALEATGGFETVAAAAVGGAGLPVVVVNPAQVRAFAKALGQRAKTDPIDAAVIAHFAAATRAEPRPLPDEATRLLSDLVTRRRQILEMIGAERQREKRAISRHLKKSIARLIKALEKELVSVDTEIDDAVRASPAWRETEDLLASVPGVGPIIARTLMAELPELGRLNRKQIAALAGLAPYTRQSGKWRGKSFIGGGRPAVRSVLFMGAMTARRHNPVLKAFFVRLVASGKPKLVALIAVARKLLTILNAMLRAKTPWQSA

SEQ ID NO: 164035 - protein, 410 aa, unidentified
MIKENYIYVGIDLHKETHTAVMIDCYNQKLGEITFPNRPADFPKLVTKVKKCNTDAKEVVYGLENAYGYGRPLAVWLIDKGDFVKDVNTAISHRQAKHRGAMYRKSDSDDAEAIALATLNMLDKLPDACPNDAYWSLGQLVHRRDNIMKQRTRLVNQLHEQLCIAYPSYKQFFNDISRPTALYFWEHYPSRKYLKGKSVEDLRTELVPVSHNRCSTKNCEKILDAVASDKVKNNAYQDARDMVTLSIVSDLQHYDSQLAEVDKMLEQMYKMLGCTLTTIPGVNVITAVKILAEIGDIKRFSNANKLAQFAGIAPLHLSSSGKGKDVATKQGNRRLQATIYFLAIQMVQVSSKGTPRNSVVRAYYEKRKAEGKTSQQALICISRRLISIIYGMLKHGTEYRMPVVESAGEK

SEQ ID NO: 164036 - protein, 367 aa, unidentified
MKQQTSATTETSIKGRTTIDYTGKKICVGIDMHEKDYQVAKVINGLCLGNHRMKASPQELIEHLRGHYPGATFKCVYESCAWGFTLQRRLQQADIECIVVHAADVSTTDKEKRRKTDKVDALKLARDLESNHLKAIHVPAEDLQKERNLIRFRKKLKGDLNRSKNRLKSLLKYQGINIPAQFGKACWSHKFMNWVEEEAKKDVLLQDTLLLMLEEVKRLRELLLTTEKKLQELMKCKYEQKAKLVMSTPGIGRTLAMLFLLEVGDINRFQGFDPLNDLIGFCPDTDSTGDTKRDRGITTRRHKQLRSGLLQAAWRAIRIDPALLEAYQQLTRRMKPHQAIIRIARKLLRRMRAVLISGIPYQKGVIA

SEQ ID NO: 164037 - protein, 344 aa, unidentified
MIIIGCDFHPSWQQIAWVNTETGEAEERKLVHAAGEAEQFYRGLVGPVRVGLESSGNSNWFTDLLGEMGHEVWVGDAAQIRAKQVRKQKTDRRDAAHILDLLVKDDFPRIWTPSREERDQRQLLIHRYKLVTLRARVKNELQHLALNKGLQKGQRLWSKAGQKQLLELPLDYWAGVRRQNLLGLLKGMDQQITVLDQAVKKAAEENEKARLLMTQPGVGPITSLAYVLTMGDVTRFQRGKQVASYLGLIPTEYSSGGKQRFGSISKQGNRFMRMLLVEAATVVVRYDPQFRSEYLHRCHQKPKAVAKVAAARKLAIRLFWMLRTHTPYPEVVRIESSPRVPLAG

SEQ ID NO: 164038 - protein, 358 aa, unidentified
MIVIGVDTHKRSHTMVALDAATGATRGQLTIAASDEGTLDALRFAGELDNERVWALEDCRHVSGRLERGLLASGDRVVRVAPGLTETSRRAVREPGKSDPIDATAIARAALREGIDTLPVAFLDEQAHEIRILTDYRDQLVHERVRQINRLRWHLVQIAPQLEAQIRPAGLEGPRIRARLARQLGQLPRSPQLRVAKAILKRICEICREEQALLTELKTLIEAHCPQLLAERGCGPVTAAIIIGHTAGAKRFPTDACFARHAGTAPIPANSGNTKRHRLHRGGDRQLNRRVAHHRALPRPHRPHYPRLPRPPTRRRQNQEGSDPLPQAPPRPPHLAPALHDHHRVASSRRDGQHHKAG

SEQ ID NO: 164039 - protein, 432 aa, unidentified
MTTHRLQVGIDFSQKKADFCLLFPDGRPLEQHRSFDNSLPGYSLAKALMIDALETYQFDGLDVSGEATGFLWLPFFNQLAADPDLEAFDLKLFLLNPRWVKWFKKCFPQDDKTDQKDSFYIADRTRTRRPDVTWSPQLDTLPLRFYTRLRFHLVQNLAREKCYFSAFLFLKASSYRRLKAFSNVFGVTSRQVLTQYATLDELAAIPVERLTLILHEMSGHHLRDPFDNAHKLHKVATESFPLPDALVLPVHRILDLTLEHIRFLEGQIDQVEGWITAEVQSHPTIRKLATIPGVGPVFSSGNGAEIGDTQRFLQGQKWDKKRKRYRPRNLRDAEDAVAKLAGLWWPRVASGDFEAEDRRMAKTGNRYLRYYLIQAANLMRQYIPEYAQFYHRKHREASKHHHKRALVLTARKSVGLVVGLLHRNEAYRPREV

SEQ ID NO: 164040 - protein, 340 aa, unidentified
MNATTYGLDVAKQVFQMYWVDVQTGEIANRRFHRDELISFLARRPAGRVALEACGSAHWWARKITALGHQVVLLHPKFIRPFVLTNKTDAADARAIWTAVQQPGMRTVATKTEDQQAMLGLHRMRSLLIKFRTMQVNQLRGLLYEFGASFRVGRAAGLTEIRARMTELEDALPATMLSSLQDQLRRIDGIEQDIDRLEKQISIWHKREAECQAIAAVPGIGRLTATALVATIGDAKTFKSGREFASFLGLVPRQSGTGGKVWLGGISKRGDPYLRTLLIHGARSVMYHSKAPSAWQKAIQERRPANIVAIALANKMARTAWAILAHGCPYEKDHVSLRSA

SEQ ID NO: 164041 - protein, 403 aa, unidentified
MNNVAGIDVSKGKSMVSVLRPFGEVVAKPFSIGHTGSELKELADYLKSLDGETRVVMEHTGRYYEPVARFLHEEGVFVSAVNPKLIKDYGNNTLRKVKTDKADSRKIARYGLDNWAELRQHTPMDTIRMQLKTLNRQQSLYSKTKTMMKNNLIALLDQTYPGVNALFDSPVREDGSQKWVDFATAFWHVDCVRSMSLTAFAERYRKWCKRHGYNFSQSKAVEVHTRAQDLIAMLPRDALTKTMVRQAIDALNAISTSLERLKAEMQALAAQLPEYPVVMAMHGVGDSLGPQLMAELGDVTRFTHRNAITAFAGVDPGADQSGTHEAKSTRVSKSGPPELRRALFLVMDCLLKTQPQDDPVYRFMDKKRAEGKPYLVYMTAGANKFLRIYYGRVKEYLASLEGN

SEQ ID NO: 164042 - protein, 422 aa, unidentified
MNYKQNEKINQVKESTLVVGIDIGSTTQYARAFDWRGIELGKVFTFSNSREGFEAFKAWMQHLQDKYRKSDVIVGIEPTGHYWFDLGAYLEDEGILLVMVNPYAVKQTKELDDNSQSKNDRKDPKVIAKLVTEGRYSAPYTPDGVYADLRIMVANRKRLIREMTQIKNRFARWFAIYFPEYTDVFGDYEAQSSMLLLKKVCTPEAIVELGAEKINQIWRDAKLRAVGMKRATTLCETAKRSIGLKKGSSAARYEMKLLLEDYEYKKAQLDAVMEEIEKLCRKIPESEQMLAIKGIGVITVAGFLAEVGDVRRFESPRQIQKLAGLSLRENSSGKHKGQTTISKRGRSKLRAVLFNAAIPLIAKNPEFKSLHEYYTTRANNPLKKKQSVIAISCKLIRVFYAILANGVTYDPQKMLSDIHRQP

SEQ ID NO: 164043 - protein, 389 aa, unidentified
MKIFVGIDIAKLNHFAAAISSDGEILLEPFKFTNDADGFQLLVSKLESFDKNSIIIGLESTAHYGDNLVRYLVAEFYQVCVLNPIKTCQMRKNNVRKTKTDKVDTFVIAKTLMMQDDLRFITFFDLDMMDLKALGRFRQKTIKQRTRLKIQLTTYVDQVFPEIQYFFKSGLHQHAVYALLKEAPSPKEIASMHMTHLANLLKVNSHGHFTKELAKELRVLAQKSVGANDSAISIQITQTIQQIELLDSQLEKIEAEMTDIMRFNDSVIMTIPGIGYINGGMILGEIGDIHRFSNPNKLLAFAGLDPSVYQSGNFQAKTTRMSKRGSRVLRYALVNAAWNVVRNNATFKAYYDAKRAEGRSHYNALGHCAGKLVRVIWKMLTDEVEFNLE

SEQ ID NO: 164044 - protein, 353 aa, unidentified
MIPVGLDVSKKTLDLHYSRETAARFRLRVANGSDGFKQLDDWLMTFGAARQQLHVCLEATATYSDGVARFLHAQGYRVSLINPKRLAAFRESEGRLCKTDRADAKLLARYCADKEPLAWTPPSATHQQIQVLVRRLDDLEKMQRQERNRQENQRLTAPIRQEIDEHIHWLSQRITQLKREMAALIKADSTMKETFQLLCSITGIGEKTAWLLISELGDIRRFASARQVAAFVGVTPQQHESGTSVHKRGKMERMGSSQLRKTLYMCAMSACRHDPAMAAWAEQLQARGKAPKQILVAIMRKLLHIVTGVLTSHLPYDRGRAFPLWQGLVAASTAPSKKKAALRRSQMSAKGCA

SEQ ID NO: 164045 - protein, 412 aa, unidentified
MRLFAGDDWAEDHHDVEVMDQAGKVLARRRLPEGAAGMAQLHALIGQFVPDDDMGGAEVVIGIETDRGPWVAALIAAGYTVFPVNPLQASRYRERHGVSGAKSDAGDAHMLADMVRTDSHQLRAASGDSPAAAGIKVLARTHKTLIWERTRATQRLRHQLREYFPAALEAFEDLDAADALELLGKAPEPARAARLTRAQVSAALKRARRRNIPDKATAILAALRSEQLGQPEALTAAYAATVRSLIALIIVLNEQVKVLQGQVGEHFGRHPDAEIYLSQPGMGKILGARVLGEFGDDPARYRDGKARRNYAATSPLTRASGKKKVVAARFIHNSRLVDALNAQAFAALTASPGARALYDELRARGIEHNDALRRLANRLVGILHGCLKTRTLYDEATAWGHRQNLPQSSAAA

SEQ ID NO: 164046 - protein, 356 aa, unidentified
MCGLKHQKEKRSMTYFAGLDVSVKETSVCIVDDAGKIVQEARVASEPEALLQVLTNTICRFKRVGLEAGPLSQWLYSVLAEAGLPVICVETRHMRAMLKAQINKTDRNDARGIAQMMRVGLYRPPVHVKTLRSQKLRMLLTHRKLLQSKAIAIENDLRATLRNFGLKVGMVGTVKFEARIKELVENLPDLAVLVEPLLIVRQVVREQLGILHRRLLAIVQDDDVCRRLMTIPGVGPVVALTYRVTVDVPARFRNSKAVGAVFGLTPSKYQSGQNERSGGISRCGDEMMRMMLYEAAQSMLLRSAKWSWLKAWAMKIARHRGIKKAIVALARRLAVIMHRMWVDGTEFRWTREVAVA

SEQ ID NO: 164047 - protein, 431 aa, unidentified
MTQSSNPLNQPRPTPVAFVGIDWADQQHAVCLSPADSLTPEQFTLPHTPEAIAEFVARLRTRFGGQPVAIALEQARGALLYALMGHEFIVLYPINPATSKRYRDAFAPSGAKDDPVDAHLIWQLLVKHRDQLRPWQPEDATSRQLALLCEHRRDLVSQRTRLVQQLRAALKTYFPQALDWTGEDLASVMAADLLVRWPSLEQLQRAHPNTVRAFYYAHRCRRPDLVQQRLHQIKTAQPLTTDVAVIAAHSLRVQCLASQLRPLLGSIATYDRQIEALFASHPDAALFVSFPGAGDCLAPRLAAAFGTHRDRFPEADSMARWSGVAPVTRRSGKFQAVHRRHACAKFLLQTFHEFARCSIKCCDWARCYYELQRAKGKGHHASVRALAFKWIRILWRCWRDRRPYDDALYTAALRRSGSPLAKLLPSSCERS

SEQ ID NO: 164048 - protein, 338 aa, unidentified
MPLYGGIDLHANNSVVVLLNEQDQVLYQRRLANHLPTILEPLAPHQADIMGVVVESTYNWYWLVDGLMEAGYRVHLANPAAMQQYNGLKYTNDHSDARWLAHLLRLGVLPEGYIYPKAERAVRDLLRKRAHLVRQHTAQVLSVQNLMARNTGSRFSAKRLVDLTPADLQGMLPEAAHVLAVTSSLAVVHCLGQQIKTLEKTVNTCLKPTPAYAQLQTVDGIGTTLAQTIVLETGEIGRFPTVGHYASYCRCVGSTKISNGKRKGQGNIKNGHPYLEWAYMEAAQFAIRFSPTVQRFYQRKPAKSHLMIARKAVAHKLARACYDILRDLVPFDVHKAFG

SEQ ID NO: 164049 - protein, 434 aa, unidentified
MQVTRGMRRQSMKLARRRERLPADSLIAGVDLAKKESVVVFVRASDRARIGRLRVTTDRAGTERLVARGRELVAEHATGPLVIAMEPTSHFWKPIARAAEAAGVGYVLVQGMLVAKGREFDDLTRDKTDARDAVLIADLAAELRFTETRLPEGPWAELDLLVDARGARRVERAAALQEMRALLELTWPGLLVACPELTGSHLQALLRLGLTPGQASALPLRRFTSLLRRHHHGRFLPWMAGRLHAAARAVPELPETPAASMRWRMAAERVVLADTAIDDLDRRLVELLDATGYGWLRGQIRGLGDPTLAALLALTGDPARFDDARCLVKLAGSNPTERSSGERRASGGIHRRGRPGLRYVAYQAAVNLVRHEPEFRARYLELTDRQRSNRLEPKQALVAIANKLLRTLWSMAVRGQGYQPAIARGEVRPMPLAA

SEQ ID NO: 164050 - protein, 396 aa, unidentified
MQDTQQRDAVDVFVGVDVGKGHHHAVALDRNGKRLYNKALPNDEAKLRALIAELKTHGRLLFVVDQPSTIGALPVAVARAEGVLVAYLPGLAMRRIADLHAGEAKTDARDAAIIAEAARSMPHTLRSLRLADEQLAELTMLCGFDDDLAAQVTQTSNRIRGLLTQIHPALERVLGPRLDHPAVLDLLERYPSPAALAGTSEKTLANRLTKLAPRMGKGLAAEIVQALSEQAVIVPGTQAATIVMPRLAQQLAALRKQRDEIAAEVERLVLAHPLWPVLTSMPGVGVRTAARLLTEVAHKAFASAAHLAAYAGLAPVTRRSGSSIRGEHPSRRGNKVLKRALFLSAFAALRDPVSRAYYSRKIQQGKRHNQALIALARRRSVRHAARRHHLPTQVSP

SEQ ID NO: 164051 - protein, 362 aa, unidentified
MEVAGNAVGLDLGKRTYEMCLVTKDNEIIRTGGKTDFSGLDKLCTKLNKADVVAMEACNLAFRIERILREKVGCRVIILNPGRLAIIFMSTRKTDKEDSMKLAKYIRSHEEDEMPVVTPPSDEEWERRKLLSEYRSLKSLRTREINRLHAIFEHAGFTQFTRKDMCVPKNREEILPLLKGYEKEESERLVERLLILEKQIELLYKKINDETEKDVKVQKLMTVPGIGPITALSYVAYIGDVNRFENAHQVSNFIGFVPKVDRSCTINRLGHITKQGNSLLRSLLVQAAWSCVRSKDGAALRDKYNYMAVTRGIGKGKSIVTIARKMGELLYTLLKNNQIYEPKKFILPDGRISKIAEEALGA

SEQ ID NO: 164052 - protein, 383 aa, unidentified
MYDSTTTVTVGLDVHASSVRLAAVRADELLEERTLPYDHEAVEQVLRCWPMVRCCYEAGPTGFGLQRHLVERGIDCQVVAPGLVPQRPGDRVKTDSRDARKLARLLAGGLLEPIHVPSRELEAARDLVRAREDARLDRMRDRHRLSKFCLRHGRRLPTSSWTIVRRKWLSEQRFEFAAQQITFDTYVHAVDLVDARIEALERAIRETAEEPWRALVARLRCLRGIDTLTALALVTEIGDFDRFKTAEQLMAFVGLVPSEHSSGEQRRQGSITKVGNAHVRRLLVESAWHARRRPKVGYELARRQRGQDAAVIERAWRCQQRLRAPVTRDLRQRQLPTVSSHAVPTGECQSDPPSLLRTLRCSRSRGSPSTQTGPLDLLLHVRP

SEQ ID NO: 164053 - protein, 369 aa, unidentified
MSIVYIGMDVHKDSYSLCAYMPEFDAFLGETKCASEPKNVEKFIDNLREHLEDDVEFVTGYEAGVLGYSLHNTLEKMGITCKILAPSTMSKSSKDLVVKNDRRDAKMIAKNLANKTYKAVYVPDDEDVEMKEFVRLRKNACKARGVIKKQINAFVLRHGFNYQRSKWTVAHIKWLKQLELSAILRETLNEMLLQYYDLNDRIERFDARIEAFSQQERYVKPVQQMRCLKGVDTITAMTIQVETSDFSRFPNAKAYAAYLGLIPSDHSSGPHVRLGAITKQGNGTIRTTLIEAANALVRSNIGYKSKKLKARQKGMDANVIAYVDKAADRLGRKYRRMIRMGKPHNVAVTAIARELACYIWGIETGNIAV

SEQ ID NO: 164054 - protein, 358 aa, unidentified
MQSVTRVGIDLAKMFIQVHAVDAVGKLVSNKQLSRDKFIAWCNQLPAGCLVAMEACSGSHAWARKLIALGLDAKIIAANHVAPYRLEGKGGKNDANDAAAICEAASRPSMRFVPVKTLSQQGMLCVHRYREGVKEERTANINRIRGLLAEFGIIAPQSPNKLRERLAEIIEDADNDLCGIARLVIQEAFSHWDEIDKQLGWCTQRISAHVKENQQAQTAVQLMGVGPVTASAAVVTVGDFKQFKNGAQFGAWLGLTPRQNSSGGKTKLGRITKRGDVYLRMLLIQAAKAAVMTAHKRDDPISRWLLQLREKSGWQKAAVAMANKNARILWAVMTKGCDFDPRYVSVKPSGGGSIAVAI

SEQ ID NO: 164055 - protein, 346 aa, unidentified
MVVGVDVHKRSHAAALLDGNGVVLAALTIPNSVAGVERLLGWLTEHDARDAVIGIENAAGYGRLLCAALAAAGCEILNVPAWRTHRDRHEQGRGKSDPGDAVAIAHVVLRKREQLGPALEPELIRALALLEGLRRQSVYNRTQAIQRLRAIWTQVDPEGEARVIHCQRQRELRKLTRIAFGAGIAEQAAARCIRELAREIERLNARIATLEHELEQLLRECGNPFADLAGAGATVAVALIAHSGDVRRFKDKGAYARFCGVAPIRCGSGQTADHHRFDRGGNRQLNAALHRIAVVQARVDPRAQAFLTRKRAEGKTTREARRALKRHLANVVYRRLHAWAENALPA

SEQ ID NO: 164056 - protein, 410 aa, unidentified
MTVITIAQNTPVLVAVDIAKARHEVLISVPGKKRHRRLTVLNELADFTRLIAALKDYGHPVRAAFEATGNYHRALAYHLATAGFEVKLVSSVALARTREALHNSWDKNDPKDAQVILHMMEIGNEQFYHDPLVRGTNDIQELSKTHDIVSKSKTELWHRILTHYLPLYFPEADRFHRSSRSDWFFAFLERYPSPHFISAMSKDAFIADAWDVVGRKVAKERLLADIYETSKVSVGLPVGLDSDAISMFRLVLGEGRSLIAQRNQIEDRAVALLKDLPDYQLLTSIPGIGPINALTILAEAGDLRRFGHHRQFLKFCGMDLATIQSGTFRGQTKLSKYGNARLRRTLWMAGQVAILQRANSFRDKFERYIAKDRHNTHLRRKAYTAIAAKMARTVHGIIKNGKPYRPFFEG

SEQ ID NO: 164057 - protein, 353 aa, unidentified
MKRAGRQLTIGIDVSDRSSCYCYLNQAGEVCGEGKLRSTPEAFRQHFGGMARAVIALEAGTHSRWMSALPRECGHEVIVANPGRLRLLTTSNNKNDPRDARTLAEIAWAKPALLQPVRHRSAEAQRDLNLVRARDLLVEARTKLINGVRCLVKGLGARVPKCASGQFCQQAHEHLPEEARPATGPLLEVIDELSVRIGEYDEMLEHVAQTRYPQTTLLKQVSGVGTLSALAFVLTIEDPHRFARSRDVGSYLGLRPKQQDSGDRSPQLRITKAGDSYLRRMLVSCAHYILGPFGPDTDLRRWGLKLCERGGKNAKKRAVVAVARKLAVLLHRLWVTGEVYEPLRNQAEADVAA

SEQ ID NO: 164058 - protein, 319 aa, unidentified
MMMTREDCWVGVDVSKATLDVYLSHPEQALRLAYDPTGITTLITTLREANPTLVVLEATGGLERVLVAELLVAQLPVAVVNPRQVRRFAEAIGYLAKTDRLDARVLAHFAAAIQPPARPLPDVETRALADQLTRRRQLVDMLTMEKNRLQQAQNAAVRHDIQAHIDWLQQRVKTTERGLRQAVEASPAWQAKADLLRAVQGLGEVSILTLLASLPELGTLNRKQIAALVGVAPLNRDSGTLRGRRCVWGGRAEVRQTLYMATLSAVRYNPILKAFYTRLRDVGKTAKVALVACLRKLLTIINAMLRDQTHWDDHHGKTA

SEQ ID NO: 164059 - protein, 346 aa, unidentified
MEIHTLGIDLGKTIFHLVGLNAGGEVVLRKKCSRKQLLQFTANLQVHLIGMEACCGSHFLGRALREQGHEVRLMAARYVKPYVKTNKNDYIDAEAIAEAVGRPRMRFVPIKTDDQLDMQSLHRVRESWVGRRTSLINQIRGLLLERGITIRKGRHYAEAALPEILEDADTNLSGRLRLLLAQLQQELKQLQSQIDEIDLGIVQAAGEHEACQRLMAIPGIGPVTATAIVSAIGNGSEFKRGRGFAAWLGLVPGQYSTGGQQKLLGISKRGNYYLRRLLVNGARAVLQCKEKQSSGLHDWLNKLASRAHSNVVAVALANKLARMAWALLTKGELYRPPLLAAEAVPA

SEQ ID NO: 164060 - protein, 429 aa, unidentified
MNSTRNKKIEQVKETTMIVGIDIGSEKHYFRAFNWRGIELTRKPVAFSNSMEGFNSFYNTIVELMQKRELEEALVGIEPTGHYWFDLGQFMGEKNIKFVMVNPHHVHKTKELDDNSPSKNDRKDPRVIAGLVRDGRYFYSYMPTGVYAELRNASNRRFVLVEEQTRAKNRLQKWIAVYFPEYKGIYTHIDAKGGLLVLKQAPTPEEIVRLGVEGIIKIWKDAKLRGNGHKKAMLILNAAMKSIGLKSGLTEARMEIQDLIEDYELQTKRLERVNDLIKELCQQIRYADKLLEIKGIGITTVAGFIAEVGDITRFDSTKELQKLAGLELVSDSSGKHNGKTKISKRGRKRLRYLLFEAAISVVGKNEEFKEIHSYYTTREKNPLKKMQSLIAVACKLIRVFHVILTKGISYDASKMLKDIRHQGEQLKAA

SEQ ID NO: 164061 - protein, 321 aa, unidentified
MQVWYLGIDVAKAKLDCALRQPDGKHKHKVFDNNRSGFETLRRWLLDCGVTELRVCMEATGVYWESVAEFLADQGHVVSVVNPLQIKAFGASRLVRTKTDKVDAKLIAEFCKENQPAAWKAPSAQEQALRAMVLRLDALQEMRLQESNRLAVAREVVREEITSHIQWLDNEIKNLVKKIRDRIDDDPDLKQRKALLESIPGVGERTISTLLAFSLTPERFKNARQVTAYAGLDPRQHESGSSVRGRPHISRFGHSIIRKLMYMPAMYTLYRTTWGRHFLERLTRNGKTPMTMIVAMMRKLLHVAFGVLKTGEKFNPTLHGA

SEQ ID NO: 164062 - protein, 339 aa, unidentified
MTEITRVGLDLAKNVFEVHAVNAQEQVVVRRSLRRSQVLTWFAKQPPCLIGIEACGTANHWARELTTLGHTVRLIPPAYAKQYVRRNKNDAADAAAICEAVSRPSMRFVPIKTVEQQADSVTHKARQILIKQRTMAMNSLRSLMAEFGIVVPPGPQHIGKLLAILADPEDTTVAAVARTALNTMSELLSTLEMQIGILDKDIRARARTDVTARRLDTIPGFGPILSSAIAAIVTDPRHFDSGRDFAASLGLVPRQDGTGGKVKLGPISKRGNGYLRRLLVNGATAVLNGKNARNDPWRAKMLDGKPRKLAAVALANKMARIAWAVMTRQQDFRPRAVPA

SEQ ID NO: 164063 - protein, 373 aa, unidentified
MDSNATTYVGLDAHKRTVAVAMLLPGQSEPVEWQEAHDATVARRLARRLVREAPGPVECCYEAGPTGYVLQRRLRAEQVMCRVIAPSLIPVRPGSHIKTDRRDARKLAGLLRAGLLTEVHPPSEEQEALRDLCRCREDVQRDLLRARHRLSKFLLRRHCIYTQTKHHWGTRHLAWLSTLRFEDPVSQATFDSYFLAIQQLDERREQLEAQIAEFGTQEPYREPVGWLRCFRGIDTVTAVSLVAELHDFRRFSSPRQLMSYLGLVPREQSSGERERRGPITKAGNGHARRLLVEAAWHNRSRPALGLPLRQRRQGQPARVIAIADRAQERLHRRFVRMTFKGKPSQKVVVAMARELVGYLWSVLYWQPEALSAS

SEQ ID NO: 164064 - protein, 356 aa, unidentified
MEQLTTVGIDLAKDVIAACVLDVHGAVIERRVLRRDAFERWAAQLPSCKVAMEACGSAHHWGRWFAARGHSARLIAAEFVVPFRKGGKNDTADAEAIAVAARQPTMRFVPIKTVEQQAILAWHSVREGWKEERTALLNRVRGLLAEYGVVIGRSADRLLTALPELSEDSRLPDPVRAMLLEAREQFAALHARLARCDAQIAAHARNSPVAQRAGELLGVGPVTASALAATVPDAKVFKSGRQFGAWLGLTPRQHSSGGRTRLGRISLRGNVYLRTLLIQGARSTLQSAINAEPSRASRLQRWIIELYGRKGYHKTLIAIANKHARILWAMLAKDERYDAAAWQRHPMHELLLAGNA

SEQ ID NO: 164065 - protein, 357 aa, unidentified
MKVTTIGIDLAKDVFGLHGVDGEGRVAFKKRLVRRRLLEFMSQLPPCLVGLEACSSAHYWARKIERLGHRVKLMSPRFVKPYRKSDKNDANDAEAICEAVTRASMRFVPIKSEAQHEVQALHRVREQLLKSRTALVNQVRGLLAEHGIVAPLGIARARRLLLEILADPERHGLSGLFRETLQEMAERLRFFDERVGAYDDRIERVFKEDERCRRLAKIEGVGPLVATAVVAAVGNASEFKSGRELSAWLGLVPRQHSSGNRSQLLGISKRGDRYLRTILIHGARAALRRADHKRDQRSRWAMRIKLARGYNKAAVALANKNARIIWALLTRGENYRPPAISVASPTADRISLTQVQA

SEQ ID NO: 164066 - protein, 402 aa, unidentified
MNCVGIDVSKGKSMIAVMRPFGEVVVSPFEVRHTANELSELAGLLKSLDGETRVVMESTGNYHAPVAWLLHDAGLYVSVVNAMLVHDYGNNSLRRAKTDKKDAVKLANYGLDHWLTLPRYIPEEDTRLMLKICYRQYQQYSKVQTMLKNNLISLLDTAFPDANRLFTSPPRADGSEKWVDFVATFWHCECVCGRSEKAFTTQYQKWCRKHGYNFSEDKALDIYASSCGHFGVMPKTKTAKLLVEQAISQLRATSAALAALKQEMQSLAASLPEYPVVMEMFGVGPALGPQLMAEIGDVRRFHSKKALVAFAGIDAPPYQSGQIDVRSRSISKRGSASLRRTLFLVMGVILQHAPMNEPVYQFMNKKRSEGKPYRVYMMASANKFLRIYYASVKAYLESLEHD

SEQ ID NO: 164067 - protein, 321 aa, unidentified
MNKYKEIYGIDISKDVFDVYGSETGHNQFKNDEQGFKSFLKHLPEGSIVVMEATGYYHYRLAQFLYKSGVSVSVVNPLSVKRFIQMKLAKVKTDKSDAKAICEYGMMNEVPLYTALTDVQSECLQLFRLLDNYLKKRTQTKNKKHGEEVLGIPSKYVYKSLQRDLKHLDKEIKGIEARLLELVKQDQQAQLTLLKSIPGMGVKTALFLIVVTDGFKKFETASQLCSYVGITPTIRESGSSVRGRSRISKVGNKKLRNLLFLCSFSACKHNKACREIYERIVAKGKSKKLALIAVSNKLLKQAFAIAKSGRPYDENFVSRLA

SEQ ID NO: 164068 - protein, 416 aa, unidentified
MKKGQNTRGYQRYMALDIHREYLLVGAQNEEKEWVLTPRRVSIEKFPEWAKKNIRAGDIVVLETTTNVWTIYDIVAPLASRVLVANAAEVGEIANARVKTDKEDVKRLLKLLIGGIVPEVWVPPMPVRELRAFTSYRGRLVKTSTMIRNRLQSLLHKHNLNLSEAGLLDQTWWEAQKNISTLEKMQIRQELVLLQEVEKLKVAVDEELQRQSTSSTWGKPALQLLQLPGVGFIVAMTVLAAIGDISRFENAKQLVGYAGIGAGVHDSGKTHKEKKITKKGRRELRWAMVEAAWRAIRLSPFWKAEYEKHLKRMRKPNQAIVVIARKLLIAIWHVLSKEETDLHASEEDLAYKMLLWSWSLSEDVRMGLTYKQFAKYALMKLGVETDITRFVRKDVPRRLAPREEVLAKMAELGLTA

SEQ ID NO: 164069 - protein, 426 aa, unidentified
MNCTQNYKIDQVTEQTLVVGIDIAKRTHYACFVDDRGRVLRKSFPIFQSKEGFRQLYEAIQEAMQAFGKSEVIVAVEPTGHYWLNLAYFLEEHGIPLVMVNPAHVCRSKELDDNLPTKHDAKDALVIARLAKDGRFLVPRLLHEIEADLRVGSTLKEKLRKEQTAVKNAIVRWTDRYFPEFWTVFRDLGKTALSVLEWTPLPADMAGRTAEELIEVYRQSEGLKCPQKAKIQALINAAKDSIGVTEGTTMARFEIAALVRRYRQLETEIAALDAELKALVQTTMEYQWLKTVDGLGDATIIDLLAEIGSFAHYRDPRQLVKLAGLTLKEHSSGQRKGQKHISKRGRKRLRSVLFRAMIPLIRHNEAFRELHEYYTTRSVNPLTGKQSIVALCRKLLNVLFAICTKKQAFDAERMKQDVLSQVQRAA

SEQ ID NO: 164070 - protein, 286 aa, unidentified
MEHFAGLDVSVKETSVCIVDEAGRITREVKVASTPEALMQVLRAPAYHLKRVGLEAGPLSQWLFGALAEANVPVICVETRHMRAVLKAQINKTDRNDARGIAQMMRAGLYRPVHVKTLRSQKLRMLLTHRKLLQSKAIAIENDLRATLRNFGLKVGVVGTAKFEARIKELVGDDSDLVLMVEPMLIVRRVLREQLAILHRHLLALARDDGVCRRLMTVPGVGPVVALTFRATVDVPARFQNSRAVGAVFGLTPCKHQSGESDYTGGISKCGDEMMRMMLYEAAQIC

SEQ ID NO: 164071 - protein, 318 aa, unidentified
MKPTHRTIKGLDRVLGLDVAKANVVLFDPVSGRTWTVVNTPDALFRALKPFADYDLMVCEVTGGYERAALDAALILGLPAYRADALRVKRYIASLGGSAKTDPIDARWLARYGQERGEALGRWQPRDLDRDALASLVRHRQDLVAARTEAKNRRSAPGSEAISAFLDAQIAFLKDQIAKLDQAIADLLAKTGNLADKEARLRQIKGVGPVVARSLLALLPELGRLNRRQAASLAGLAPHPNDSGQRCGYRRVRGGRPSLRSILFMAALAAMRANPQMKHFADRLICAGKPKRLVLIAVARKIVVLANALLRPYETQIN

SEQ ID NO: 164072 - protein, 434 aa, unidentified
MPPALTFGNEAHYVAVPPTRDSEPVRRFGCTTAELKSMADWLKQCRIRTVAMQSTGVYWIAVFDILEEAGFEVYLVNARETKNLPGRKSDVQESQWLMKLHTYGLLRNSFRPSQEIRTMRTYWRQRNDLVQAAARHIHRIQKALTQMNVQLANVLTDVSGLTGQAIIKAILAGERDPHKLAAFRDPRVKATEEEIARSLEGNWQEDLVFVLKQEQDAYEFCQKQMAECDRRLQDYLKQRKDRSAGADLPEEKRKTRLKNKKGNKPQFDLRRELFRMTGADLTRIDGIDVMTAMTIISEAGWDMSKWKTEGHFVSWLRLCPDNKISGDKLIGKGRLPSNNRVTIALKMAASSLRTSHSYLGAQFRRLKTRLGAPVAIKAMAAKLARLVYRMLSHGMQFIDRGADFYEAQHRHRQIHALKWKAARLGFQIIEAPAA

SEQ ID NO: 164073 - protein, 442 aa, unidentified
MKKATKIEFQLVHPNAAGIDIASDVHYVSVPADRDEMPVRNFGSFTENLHEIARWLKQCRIDTVAMESTGIYWVQLYLILEDLGFDVFLVNARHIKNVTGRKSDVLDCQWIQQLHSFGLLNKSFQPKNQIRELRAYMRHRKSLTEAYATQIQLMQKAFEQMNIKLHNVLTDISGKSGQLIIKAILSGERDPEVMAELADKQVKASKEEIKKSLTGNWRDEHVFELKQAYETYLFFKDKISECDVQIENVLSKMKPDKPKESQNEKISRKVYTKNRFNFNATDYLTNILGVDVTKVFGISEVLALEIISEAGIDMTKWPTKKHFASWLNLAPNNRVSGGKLLKPKRIKKKNKAGQAFLMAAYALQRSDHWLGSFLRRIKSKHGPTVAIKATARKLALIFYDMVKFGKEFNPINNELYEKNFNQKRIKYIKNQAAKYGYELVQT

SEQ ID NO: 164074 - protein, 350 aa, unidentified
MDAALDHRHDWSVGIDLHKDTMTVCIYCAGCGEVGFKRLACKSRFHVQEFFQNLPRPHTVAIEAVGFYRWLWDLLEPIVQRLLLADATAARALAGRRLKTDREDAFNIAELLAAGRLPTAYAPPGEVQILRDWTRRRNRLSRSHAQVLHWVKSLMNINNRPGPARLDSQGLIRYIKAQGPKLPPRHVKLLWHCVDQLTLIERQIDEIERIIVSLLDSPTFRDTRDILVSFPGVGLVTASTVLAEIGDFTRFTYRKAIARYAGLNPTVYASSRSNRTGHIAKAGPPDARWVMQQAAWTAIRIDPEIKRMWLKISRSAGRKAAAVAIARKMLMWMWYAVCQGQAYNRRADAA

SEQ ID NO: 164075 - protein, 355 aa, unidentified
MNSEKYIGLDVHQATIVIAVTDSTGKLIMESILETEAATILQFFAGLRGTLYVTFEEGTWSAWLYDLLHPHVDKLVVCNPRKNALLKDGNKSDRIDARKLAELLRGNQLKPVYHGETGVRMLRELSRSYLTIVKDLSRVMNRLKAVYRSWAIPCAGRDVYYTRNRAQWLAKIPEAGVRRRAERLYEQLDMLRHLRQQARRELLVESRKHAITAKLRQIPYLGPIRSALAVALIQTPHRFRTKRQLWAYSGLALETHISAEYRFVEGQVRRSKKVLSIRGLNKDHNHDLKGLFKGAATMASVRPGPFQDFYQTALAKGIKPTMARLTLARKIAAITLTLWKKGESFDAEKLKSQAA

SEQ ID NO: 164076 - protein, 350 aa, unidentified
MTTNTVQAQPDREIVAGIDTHENSHHVAVLDSTGRLLGDEAFPATSTGFIELLSWVSVLGTLVRVAVEGTSSYGAALTRYLLAENVDVIEVPPGDKAQRRRRGKTDAFDAEAAARRALAETSPRIPKDTTSSVEALRLLSNTRNLLVKQQKEIAGQIDQFLITAPDTLRELSREGTRKTRMRRLAELPETATADIVTDTLTRLLRQHATRWLTLDADATAIEKQLRTLIEIRAPKLLEVYCVAAVTAAQLLVAVGENGHRIHSEAALAKLFGAAPQPVSSGKTNRHRLSRGGNRQANCALHQISIARLCHEQRTRDYRDTHLADGKTKKDILRLLKRALCRELFPLLCRP

SEQ ID NO: 164077 - protein, 360 aa, unidentified
MEQISRVGMDTSKRFFQLHGVNAAEEVVLRKKLRRKEMVEFFQALAPTVIGIEACGSSHHWARLLRSFGHEVKLIAPQLVKPYVKRGKNDGADAEALCEAMSRPTMRFVPVKTAEQQAALMLIGLRERLIGNCTQLSNAIRGYAAEFGFTAAKGMTHLDPLLERIQADESLPLAARELFAVQSKEYAQLRGQINEVEAKLKAWHKSDECSQRLIKIPGVGPIGAVLLKMKTPAPEQFRTGRQFAAWIGLTPQDHSTAGKVRHGGITRAGDEALRAVLVAGATAVIQQAVRYGGRASPWLDALLKRKPPKLAAVALANKMARVAWKLMVTGDSYSTKSAPAARKPGLEISQTRGATQLQPC

SEQ ID NO: 164078 - protein, 354 aa, unidentified
MYKSLYLGLDAHTRICVLAAMSPSGHIVSTKTFSTSEAALIRHVIELPARFKYLGLEESSLAGWIASALRPYVTRLIVCDPRHNTLISRGNKNDRRDAADLCRLLRLGELVEVFHPDQEHRTDFKITVQQYLRFTRDRTSLKSQIKSKYHQAGVTYVAGTQVFTKKHRTSYLDQLPTNARRAIMENLYEQLDATDALWNKARTSMVELGKRYPEIIQFQRMPGIGVVGAHVFSAFIQTPHRFATKHKLWRYCGLGIRQRSSAGKSLAYKRLDRSGAGVLKALSYQCWLSSLRTAQPNEVSLFYDASLRRTGNTVRARLNTQSRVSECKTTGPILPFVGGFLLAGDGRSAGCRRS

SEQ ID NO: 164079 - protein, 365 aa, unidentified
MNAIHYIGFDVHKKSISFCVKTAAGQIVEEGTLVAERTALRSWAAARKRGWHGAMEATLFSAWIYDTLKPYAKQLSMGHPAKMKAVSAGKNKSDRIDARMIADLLRCNLLPASYVLPPQLRDLRRLLRYRNLVVQQSVRMQNKMAGLLMESGTAFNKQKLHQKKYFADLMKSLEEVPESVKDLLRMSRGSMEMFQSTQKQLVERLLSEPALQQRVERLMSIRSVGPITALTWALEIADPHRFASIADAVSYCGLSAAFRSSAGKQQRGPISKQRNAWLQPVLIEAAKLAPRWNPQLKELHAHALQRGHPNRATLQVARKLVAYLLAVDKSGQPFQVHTPPPPASTKTKSKTTRKNKKAVALTPAA

SEQ ID NO: 164080 - protein, 352 aa, unidentified
MYYVGLDLHKKYITGCVLDSQGAVVAEQRRLPPVLETLLGWLAPLGQPVAVALEATLYWAWLHDRLTAAGYQVAVAHPQQVKLICHARCKTDPVDARKLADLLRTDLLPAIWIPDAATRARRTLLRGRAWVVRTRTRVKARIQAYLAAENERVPVSDLFSRGGRAWLATVALPPEVRQQVDRLVALVAHLDAQIAEQDRGVRELAQATPEAALLQTIPGIGPFGALLLLAEIGTIARFGSSHELAAYAGLVPSTRSSGGKTAHGSVGPAGSAWLKWLFVEAVQTLKRQPGPVRSQYERLLRAKGKPKATVAAARKLCCYVYWMMKEGRSYDDWLRQRQQREVRPIQAVASVA

SEQ ID NO: 164081 - protein, 352 aa, unidentified
MEIIGLDLHKRETQLCRQQPDGHIVDERIPTSRVRFTQTFGGVAPARILLEASTESEWVATHLEQLGHTVIVADPNFAPMYATRSRRIKTDKRDARALMQACALGAYRPAYRLSAPRVHARAALAVRDTLVRTRARMITLIKTLVRRDGLRVPTGTSRTVVQRVATLELATTAPALGAELAPLLAMLPVLNGQIAMLDATLAAVAADDPVVARLATAPGVGVVTAVAVVATLDDITRFHSAHAVEAYLGLVPSEDSSADRRHLGHITKAGNARTRWLLVEAGWRILRSKQPETAALRAWGRAIAARRGARIAAVAVARRLAGVLYAMWRDAVPYDAAKLQRRPRRSGAPQTT

SEQ ID NO: 164082 - protein, 288 aa, unidentified
MTVTIVETRVQACAITGGVDTHADVHVAAALDSIGGLVGVEEFPATPAGYAQLLAWLGGFGTVCLVGVEGTGSYGAGLARHLAAAGIRVVEVDRADRQDRRRQGKSDPLDAVSAARAALSGRARGAPKGRDGQVEAIRALMVAKRSARAGRTQTINQARALIVTGPEDIRTRFARYATADLVAGLASLRPRPGSMVRYHTLLSLRELGRRAQFLDGQLERLDELIVALVTARAPGLLSLYGVGPDTAARLLITAGDHPERLRSEAAWAHLCAAAPIPASSGKVIPTRT

SEQ ID NO: 164083 - protein, 607 aa, unidentified
MSTIASLDRIGVGIDTARYGHRVSFLRPDRKPAAKPLTVMENRAGYQALQDRLNQLHEQHPTAHFHVRIDAAGQYAVNLELFLRGLKLPMTISVGEPKRNKDYQKAHFPKRTTDDTESQAMARFAVIELPNATPAPSTPMILLREVAGRLQSKVKQTTQAINRLHNLLARVFPELATLTEDISVGWVLKLLDKYPTAERIAQAQIASLEKIPYLSVEQAHAVHQAAKQSVASLRGELAEALVRDLVNQLRLCQKAEQHLHQLLLEAFADLPASPHVQVLTITGIGEATAAALVAKIVDINRFATPNHLVSYFGVFPEESSSGVDKHGKPLPPGTLIMSPKGNDLVRFYLWNAARNAIQHNPAIRALYRRLRAKGKRGDVAFGHCMRKLLHLVYAVWKTDRPFDKEHFPWEGSSDTQPSATTPPSADAGTTPSANEEAVGHKRDLPAEEVVTTADSTLEPASPAVKPASQSAAPRPKVDFACVREHVTMEQVLQHLGYFASLRGRGRQRRGPCPVHSQPTAPERTFSVHLGKNAFQCFHAECAVKGNVLDLWAAIHRLPLYEAALDLAETFQVPRNREEEPVKGTSSPRTATAKTSAPAAATATDGAK

SEQ ID NO: 164084 - protein, 338 aa, unidentified
MELIAGIDLHSDNGYYGIVNMEGERVFRKRLPNHLPTVLLALRPFQADLKGIVVESTYNWYWLVDGLMENGYRVHLANPAGIEQYDGLKHADDRTDAFFLAELLRLKILPEGYIYPKEERPVRDLLRRRIMLVQQRTSHILSFQGLMSRQTGAGMSSNLIKKLREEEIKEFLDEEHLILTGETNIAIVRFLTEKIRALEKAALKRAKIKPEYEKLMTVQGIGIILTLTIMLETGDIGRFPSAGNYASYCRSVKAKRTSNSKNKGKGNQKNGNKYLSWAYVEAANYARRYCPKANRFYQKKMAKTNQVVATKALACKLAKACYYIMRDQVAFDTEKIFG

SEQ ID NO: 164085 - protein, 390 aa, unidentified
MERPMQKLNDFSRSLIALEPDGTLIAVIEMSLSSWLVAGIVPGVERQPLKKLAVDESALLKLLHRWREEAEKAGRRIERIAVAFEAGRDGFWLARWLKARSIEAHVIHAASVAVSREHRRAKTDRLDTELLKRAFLGWLRGERDHCKMVDIPTIKDEDAKRPNRERENLVSEQSRIINRMKAALIRLGIRGFNPKLKRATARLDGLRTPEDEPIPPNTLAELRRDMERRRLVRDQIRQIEEARLERLDHAPGDGPHAMVRLLARVIGVGIETADMLVHEVLSRNMRDRRAVARYAGLTGSPDESGRKRREKGLARSGNARVRRGMIQLAWRFLLHQKDSALTRWFRARTENARGTRKPMIVAMARKLLIALWRLVREGVVPDGVVLRPAQ

SEQ ID NO: 164086 - protein, 336 aa, unidentified
MNKFKTFTGIDISKKTFDAALLFPETGVVQHKCFCQTEEGFLSFAKWLQSHQVTIQDTLICMEHTGLYTNGIIEFLAGLKANLWVEMAIKIKRSMGLQRGTDDKASAITIAEYCMRFTDRARLWKPVDTRLSKLKNMIVQRDRIVNALKQLLVPIEEMKSCNAAKEAIELERLQLPAIKGLDKAKEKIEASIQSYISSEETINKSIELMCSIKGVGLQTAASLYVYTKGFTMFENAKQLACYCGVVPFSKSSGTSVRFKPGVSPFANRKLKSLLHLCAMSALRWDKDIKAYYERKVLEGKNKMSVINAIRNKLLLRIFAVLRDQRPYVENYQIAGA

SEQ ID NO: 164087 - protein, 322 aa, unidentified
MDARTDAQNTEALHVGIDVAKDSFDVASEPPGIKLSLPNDVHGRRELLGVLKKHTVAMVVMEATGGYERDLVAELMAAEHEVVVANPRQVRDFARGFGKLAKTDSIDAGILALFAKIVQPRRRPVSSEQTTTLAELVTRRRQLSDLMTQETNRRKMARDRRVRASVEKVVKLLESQISHLDKLLRDNIESDDGLRRKDEVVQSVDGIGPVTSAMLLGHLPELGILNRQRISALVGVAPFDFKSGKWAGRSQIWGGRKEVRCVLYMAAMSAIRSNEVIRVFYNRLRAKGKIFKVAITACIRKLLIILNTMVRKDCLWSPNLIK

SEQ ID NO: 164088 - protein, 438 aa, unidentified
MSNKVIFNLDELFISVGIDVGADFSWMSIALPNQQFVGKPYKILHNSIDSLTTAVSKIKEAEELYSLESRIFLESTGIYHYPLFCYLRDKGFNCSVINPIITKNSTNINIRKVHNDRFDSKKAALIGLKPDLKVSLMPSDLALNCRNLCREYYDLMDNRSAYVNKLQGELRMAFPQYLGIFSKVTINTSLTLLGTYTSPSAFLEADKQEIIDIIRSTARFGLTYAQNKYNAIIQAATDANQFGYIINSNIKRIRLYISFIRKYDEEINSILESLHELVDANEDADFVKQIHLIETFKGAGFLSAVSIMGEIGDFSAFSKPKQLFAYFGLDPAVKQSGKFEGTKVQMSKRGSAIARRVIHTLTIQSISISRNGEAKNPVLREYYLKKCDSKPKLVAMGAVSHKVCNMIFAILRDNKPFKIIAPQEHIKQYNAAKCDMAA

SEQ ID NO: 164089 - protein, 322 aa, unidentified
MNKYKETFGVDISKDVFDVHGSKAGHHQYKNDEPGFKKFLKRLPDDCLVAMEATGYYHYRLAQFLYKNAIVVSVINPLSIKRFIQMKLAKVKTDKSDSKAICEYALINEVPIYSALTDLQSECLQLFRLLDVYIKQRTAIKNKMHGEETLGIPSNFVYRSLKRHRKWLDKEIKSIEEKLLSLVKEDQQQQLSLLKSVPGIGPKTALFLIVITDGFSKFETASQLCSYAGITPTTRESGSSVRGRPRISKVGNKKLRNLLFLCSFNACKHNKACRELYERIVNKGKSKKLALIAVANKLLKQCFAIAKSGRPYDESYVSVLPK

SEQ ID NO: 164090 - protein, 346 aa, unidentified
MKINRVGVDLAKNVFQLHGADHRGKAVWKRRLSRGKWLAVLCDTVEPGTEIGMEACAGAHHWARQLMQRGYPVKVIPPQFVKPFIKSNKNDANDAQAICEAMGRPNMHPVKVKTVEQQDLQAMHRIREEIKSHRIAKANQIRGLVTEYGLVAPLQLHALRRAIPEWLEDADNGLTFLFRQLLQGLWGDLYALDQRMTELDKQIAVVAQEDPTARRLQQLRGVGPLIATALVATVGDARQYRKGRDMAAALGLTPRQHSSGGKERLLGISKRGDAYLRCLLVHGARSAVRTAKDKEDRLSRWVINLQSRRHTNVVAIAMANKMARMAWAMMTKGVDYDPDFNPVSVS

SEQ ID NO: 164091 - protein, 326 aa, unidentified
MTYQLGIDISKAKLDVALLNADGKYRSKVFPNDATGFKSLLQWLHTHVPSGKAEVHVCMEATGSYHEALALFLSDQGVAVSVVNPLLVKRFIEVDRVRNKTDDGDAKCLARFCQMTQPELWEAPSVAVRTLQALVLRLDTLQEMRQGELNRLEVAHASVQQSMRDVIAGLEHSIQSVRERIRQTIDDDPDLKQRQGLLASIPGLGDKTIPQLLAYIGRPERFKSVKALIAYAALAPLIRQSGTSLNHHKGTHPQGHRELKSALYYPAMVAGKYNPLIAAFWQRLKAQNKPGKVIVVACMHKLLAIAYGVLKSRKPFNADHLKPIVT

SEQ ID NO: 164092 - protein, 319 aa, unidentified
MNTIGLDISQKTIDATLHKTDGSTYHTKVGNNREGFKSLKDWIKANKVRKCVIGMEATGIYYEDAAENLSEIHTVYVINPLKIKDYGKSQFNRTKTDKADSNLIAEYTKRHADKIIPYSKPKNRYLQKLINLKQQLKDYQKQIKNRLHSSDDEMIQAIHQDLIQTYQEKIDQTQTAIDAQIEQAENDGHYRNLQTIAGIGKDTAAILYAQLTDKTFQTANQFVSYAGLSPQTEQSGTSVHKKGRLSRYGHRRVKRSLYMPALVAYRMGAFPQLVRNLTNAGKPKMVIIVAIMRKLAMLAYYIVKTGKPYDSTRHKAVKA

SEQ ID NO: 164093 - protein, 356 aa, unidentified
MKNQATQYLALDVHQATIVATLRSADGSVRMRATVPTEAGAVVNLVRGAGPHVCVALEEGTQAQWLHDVIAPVADDVVVCSTRGRSEIENKNDRIDADRLSELLRIGAVKRVFHSALDTLSLKELVRNYLTLVEDATKTKLRIKSMFRARGILTPGRQVFIPERREEWLDQLPSPGARLRAEHLLTALDTLTALRRRAKTAMVVEAQKRTAWKILRSIPVLGPVRISCLMAIVVTPHRFRTKRQLWPYCGLAVVTRSSGEHEFTDGVLRRRRKHAPATRGLNRNYNRTMKNVFKGAAAAALIKAGPLKDFYEHCVERGVRPELAKLSLARKIAAVTLRLWKKGELWDPKKLTMQTT

SEQ ID NO: 164094 - protein, 407 aa, unidentified
MEVVYPQCAGLDVHQHTVVACARVGAGSAVTRDVRTFGTTTQELLALSDWLTAHGCTHVAMESTGVYWKPVWHVLEESVELILANAMHIRHIPGRKSDVNDATWIADLLAHGLIRGSFVPPAPIQELRDLTRTRKQLVREITQHTLRIQKTLETANLKLTGVLTDILGVSGRAILQALVAGETNPDRLAELARGRLKASRADLAAALHGRVTAHHRFLLQLHLAQIDALDGAVRAVEARLGDALAPFRAAVDRLITMPGVSETVARVLVAEIGVDMTRFPTAGHLVSWAGLCPRLDESAGKRHSTRTRPSNPWLKTTLVQAAWAAARKHDSYLRAQFLRLKSRRGPKKAIIAVAASMLTAAYYMLRDGVDYRDLGAAHFDRRDKAKLAKRLLARLHDLGFNVELRAA

SEQ ID NO: 164095 - protein, 321 aa, unidentified
MQSQNPVVYAGVDVAKATLQLHLQGQQSEFSNTPKGLLQLLAQLQTVPSVQVVCEATGGYERAMVKALQQEQIPVSVTNPARVRAAAQAQGQRAKTDRIDAQGLTDYGQRYQPEPTPPTSATQDQLVALTQWLKQLIHGRALAKTQAEHHQDAFVRRQHAKLMTHLQSQIEAVEKQIEALLEQDAALQQRVNCLDEIQGVGPRTAWMVLAHMPELGLLNRQEVAALAGLAPWTRESGTMKGMRCIGGGRPEVRLALYMAALSAARCNPVLRTLYKRLRAKGKLPKVALTAVMRRLLTYMNHCIKALPSETAGARTQELKAA

SEQ ID NO: 164096 - protein, 345 aa, unidentified
METMHYIGLDVHKRTISYCVKDGSGKIHAEGAIPSTRFDLDRWMKTLPRPWTAAMEATLFTGWIYDHLKPHAAAVKIAHPLMLRAIAAAKKKNDRIDAHKICDCLRCDFLPECYMAPTETRERRRTLRYRNLLVRQAVQIKNKIAVLLMEAGVSYNKQKLHKVGYFRELLATNQDIDEGLRSLLRLCRETVVRLGKTESALVRSLQRDLVLVERVERLMTIPAVGPITALTWALEVGEVSRFSSIKKAIRYCGLCGAEKSSGNTIQRTPLSKQRNKHLQTTLIEAAKMALRNSPDLAIIYDREKQKGNANRATLAVARKLVAYLVAVDRRKKDFLTVEKENRTAA

SEQ ID NO: 164097 - protein, 344 aa, unidentified
MEAHVSVVGLDIAKSVFQVHGADAAGKAVIRRRLKREEVEAFFRRLPPALVALEACPGSHFWARLLRDIGHDVRLLPAQYVRPYVKTNKSDAADAEAICEAVTRPTMRFVPIKEEMQQEVLVLHRVREMLIRQRTQLINSIRGHLAEFGIIAPNRAHNIGLLTKLIEDEEFDELPAVARHALRYLVEQLREAKTKLFRIDQDLMRIVKGSDACRRLMTIPGVGVVTATALVSSMREPSDFKSGRHFAAWLGLVPRQHSTGGKENLGGISKRGDGYLRRLLIHGSRSIMRWRSRSWLWLSKLRERRPANVAAVAIANKTARVVWALLMFGGTYGHPGKGATMRAA

SEQ ID NO: 164098 - protein, 330 aa, unidentified
MTTNPPQIVFNHILAFEVSKEQLLVHTLPADEQCAIDNKPQAVRRLIKAEIKRNRNKQLGQMLVVCEATGGYERHVLDAAVEMGLSVHRAHGTRVRHFGGYCGLLAKTDPIDARLLAQYGLKTENIRLYSPPPPETATLRALHARRTEIQQMLIAETGRLDHAQHKNVLKSLKDHIASLKAALAAIEADIAQLVEKCEVLRKKVALMQTVIGIGPISAMVVLAYLPDIGRLTRGQAARLAGLAPINNDSGKKRGARHVEAGRTAIRRALYMAAGVAMRTNPVVKAFADRLRGKGYPFKYVVTAVMRKLVVILNAVLRDGQSWRGAQVALV

SEQ ID NO: 164099 - protein, 352 aa, unidentified
MANGIVVGIDISKNTLDVAIGRDGAATVFSNDQEGHQALVAVLRRQPISLVVMEATGRYQFACACALQAAGFRVAVVNPRQARDFAKAMGRLAKTDRVDALMLAELAEVIDKRPDRDRFTRPMADETQQRLHALVTRRRQLVRLQVSERQRKYASHSDVQPGIIELMNILKRQVQDIDASIAAHLAKYQASLTKLLQGVKGVGPATTAVLISELPELGQLKAKQISSLVGVAPMNRDSGQSRGKRMICGGRATVRSALYMAAIVAMRHNPLIRACYERLVAAGKPKKVAIVACMRKLLIILNAMVRTGRPWKEKAATARTMRRLTSCHHAAGGLSRSSPVRDPALESEGIRI

SEQ ID NO: 164100 - protein, 425 aa, unidentified
MKQEAQKQEEFGAYIGLDWADRTHVISLRRNGSNKVERYVLAHTPEALAEWVSGLQQRFPGERIAVALEQSRGAVVYALMGYDFLVLYPVNPKTLAKYREAFSPSGAKDDPTDADLLSELVTLHRDKLRAWLPDDEQTRTLTALVEYRRDLVDSQTRLTNQLTSLLKLYYPQALAWAGELTTVQACDFLQRWPTLAKVQQATPAKLRQFYVQHGCRKADVIERRLQEIKLAQPLTRDGAVITASLAMVQASISQLRPVMEAIAQMEKQIAALFSQHADHDLFSSFPGAGPVLAPRLLAAFGTDRGRFATATEVQQLSGIAPVMERSGKTCWVHRRWACPKFMRQSFHEFAGQSILRSAWARAFYDQQRQQGKGHHAALRSLAYRWIRIIHRCWQMRVPYCEETYCRALERRQSPLARVLAAQTPN

SEQ ID NO: 164101 - protein, 400 aa, unidentified
MISVGIDVSKEKSTVCILKPYGEIVSKPFEVYHVEQELSELATMLLRLNDEVRIIMEATGIYHLPVLSYFKEKGFFVAVINPFEMKEYRCQGLRRVKTDKQDAITISHYGIDHWYRLKEYEAQENIYTELKLLGRQYCHYMRMRVESVLELTHLLDYTMPGIKTLLQGWNERNGKDKLGDFAEEYWHYDNITKKSEKQFIDSYLKWAKKKGYHQNQDKAIKIYALAKEGIPTVSSNTPSTKMLVQEAVRVLREVDHTLMTILTQMRSLAKSLPEYPIVRAMGGVGDVLAPKLIAEIGDVRRFHSGKALIAYAGIDAPPYQSGRLVGTERKISKRGSSNLRKIGYEVMRSLKAHKVPEDAAVYEFILKKEREGKSKRAAKIAGLNKFLRIYYARVMEVYRK

SEQ ID NO: 164102 - protein, 373 aa, unidentified
MNYSTVYVGMDVHKESFSLCCYTNEKEEAEYPQKVDGHYSKVINYLEAMRFHYGDDATFICGYEAGCLGFTLYHQLIDHGIKCVILAPTTMPKPKGKKKIKTDKRDAALIARCLAHRDYSAVHIPTDKDEQTKEYIRMRSDHKSDLKKTKQRLLAFCIRHNLRYEDGTNYWTQKHLKWLRSLKPDGLYKEILEEYLLTFDNLTDKIERLDKRIEKLASDEEYQEKVHNLTCFLGIKTQTALSVVTETGDFKRFASAQHYASYLGLVPGEDSSGEGQTRLSITKAGNSHLRTLLIEAAQSFSRGQIGYKSKALKARQHGCAPAVIAYADKANERLRRRYYKLTLSNGKKMNVAKTAIARELACYIWGMMTENIA

SEQ ID NO: 164103 - protein, 394 aa, unidentified
MEGFSIFVGVDWGSEAHQVCVLDVARKVLLEKSFPHSGKGLSSLVAALLKLADDKAERVAVAIEKPNGAIVETLLERGISVFAINPKQLDRFRDRHTVAGAKDDRRDALVLADSLRTDRQAFRQARLGDPLLVQLRELSRMQEGLRAERVSLGNQLREQLHRYFPQILELGSVYDAHWLWELLKVAPTPELARRLSLAKLGSLLKKHRIRNVSAEQAREILRAEPLRVAPGVTEASRKHVAMILPRLRLVDEQKAEVERDIATLLEQLSAPVEGKTEHRDALLLQSLPGLGKLVCATMLAEASEPLERRDYTTLRSLCGVAPVTKRSGKQLAVSRRTSSNSRLQLAQCRAVRLALEVPLCQCPRFRSLPRPSPPWHRRSLARRPDRHAQNQFSV

SEQ ID NO: 164104 - protein, 349 aa, unidentified
MHFNIFNLFLKYKFMKKYNLIIGIDVSKRKLDVCFLFDPIVKQLSTHIVSNDPRGIRKMLCSVKKLTINLKGTLFCFENTGVYSMSLAYYLDQAGADYWEVPALEIKRAKGISRGKSDKKDAQDIAFYAHTHLHKLKLSKMPEKVIMKLRLFFSQREKLVKSIKVFESTNEIKGCIDKDIVKDVLTINKKTVKQLRKLLHETEQKMQELIKLNPELNRQNKLIQTVPGVGPQTAAYLIISTKGFTSFSNWRKLACYAGVAPFEYTSGSSVRGRTKVHSLADKKLKTLLTMCALNAKKADKEIDLYYQKKVKEGKNPMLVINSVRCKILSRVFATVNRGTPFVKTCNFAA

SEQ ID NO: 164105 - protein, 386 aa, unidentified
MQASNASTPITGNISTIFIAIELSQKSWLVTMHCPDKDKISRRKLDGGDHAGLLALIDRMRDRAARALAAMPAVVSCYEAGYDGFWLHRLLLAAGVTNYVFDPASIAVDQRARRVKTDRIDGEKMLRTLMAYLRGEPRVVRIVRVPTPEQEDARRDAREHDRLTKEQTAHTNRIKALLRLQGIAVGNPRRRDWLSWLATQRDWQDQPVPPRILAEIEHEHARLMLVSNQLDALAQPPVPAKLTPAAAEMAQRSDLLLRLKSLGPAFATTLTHEVFYKDFHNRREVASYFGLTPSPWQSGGIDRDQGISKAGNPRARCAAVELSWLWLRHQSESALSRWYRQRTLNASKRIKRIAIVALARKLMVALWRYLTTGLVPEGAVLKAMNA

SEQ ID NO: 164106 - protein, 313 aa, unidentified
MSQHNLNILYAGLDVAKSSLQLHLAGRFHVVTNDAKGHAQLLKRLRVYPIAHIVCEATGGYEQPVVRVLHTARIPVSIVEAGRVRYFARAQGQRAKTDPIDAAVLSEYGATFQPAATAPASPQQEQLAGLTQRRRQLIQMLAMERNHAEHYTDAFRLRQTRQLRKTLEKQIDQCDAAIATIIAQDTELARKAKRLEAIPGVGPVVAATMLAEMPELGKLTTQTAAALAGVAPYNRDSGGQNGIRRINGGRGAVRCALYMATLSAVRHDRILKEFYLRLRAAGKKPLVAMTACMRKLVILMNRLLKNNDFQLAN

SEQ ID NO: 164107 - protein, 355 aa, unidentified
MNSIKYIGMDLHSATISTAVVNEAGKLNMEATIATEAAAVLDFIAGVQGTLHVTFEEGIHAAWLYELLLPHVAEVVVCDPRQLPRHRGENKNDKIDALQLAQWLRLGVLKPVYHRPTGLRTLRELVRSYRTLVSDATRVMNRLKAIYRARAIAAKGARVYSPRYREGWLKQLREPGVHHRAELLYRELDLLLSPRQEAKKAMLAESRKHAAQKILLSIPTLGAVRVAVLMAVIQTPHRFRRNRKLWTYTGLGLVTRSSANYRLVEGQLTRARKPALILGLNLNHNHVLKEIFKDAAATAVSRQGPFREFYARQLATGKDPEIARVIVARKLATIVLTLWKKGERFNAEHLKPQAA

SEQ ID NO: 164108 - protein, 327 aa, unidentified
MSLPTLGIDLAKTKFDVALFQDEQFHHHVFPNTPLGITALLAWLPAHGGAQVHACLEATGTYGDAVARQLHDAGHVVSIVNPAVLKAFRQSTLTRTKNDRTDAQLLARYAALHHPKAWVPPSPELRELQALARRLESLLQLRQQESNRLASAERSPLVAESIQIMLTALDQEIARVEQLLKDHIQQHPDLKAQHDLLRSIPGIGDKTATTLLAECGDVAGFTDARALAAFAGLTPKQHQSGTSVHAKPRLSKVGSDRLRKALYFPAINACRFNPVVKAFADRLLARGKPKMAVIGAAMRKLLHLAYGVLKSGKPFDPNHGQLAPIAP

SEQ ID NO: 164109 - protein, 411 aa, unidentified
MSDSIFIGIDVSTKSNKVCILDQQGNRLAKLSVDNNSDGSGRIVKRAIEALNKTNCSNMSFGLEATSVYGDGLIFFLKQEPSLKPYNTKVFLLNPKQVHNFKKAYSDLPKTDDVDAWVIADCMRFGRINLREVYFDEQHKALQRLTRARYFVAQNIVREKNRYLTNLFLKFSGMCQEKLFSNNLGATAIELAGSEFSLDEIVHMPLDELATFINTTGKGKFADPEALAAEIQKAARSSYRLPKTVEDSVNRVLAVSVISIQSYLQQLKTLDKSISILMEAIPNTLTSIKGIGPVYSAGILSEIGSINRFKDQASLAKYAGLSWSRYQSGNFDADNTHLINSGNRYLRYYLIEAANLVRRHDPELKSFYELKYRETPKTPHKRALALTARKFVRLVYALLRDQRLYSPPRVR

SEQ ID NO: 164110 - protein, 332 aa, unidentified
MMAQSEVVVVGIDVAKDKVDACIRSLSQRQTFSSTAEGQRALIRWLRKHRVGKAAMEASGGYEQDWAKALREARIEVRIVDPKRVRSFARSAGRLAKNDPIDAEMIAWFAETFTEAPGQAYDAARERLVKIVNARQGLLDLQTSLKNSGEHSVPDVVQKMQARLLKKIAVEVVKLETAIAAQVKATPHFAELAEIIESVPGLGKITSAGLIATMPELGQVNDNIVAALLGVAPYDDDSGQRRGNRHIKGGRRKARNLFYMPCMGAATQHNPVLKAFYDRLIAKGKEPKVALTACMRKLIVILNTMIARRQKWDANRYKVSDSARLPPSACPA

SEQ ID NO: 164111 - protein, 306 aa, unidentified
MCRKRGGDGALRPSGERSRVRDDAQGIATILPQLRRVCPTVIVVEATGGLERSLLRARVDAALPVIVVNPRQVRDFAKATGPWAKTDTLDAQGLARFAEVIQPSLRVIPDAQTQELAALLARRRPVLAMQGAEQNRLDRAPDRVRKRSEAPLRWLRDELARLDEDLDDLIQQSPVWRAREKLLQRVPGIGPVMSRTGWAELPELGRLNRKQMAALVGVAPFNRDSGRLRGHRTLGGGRAPVRRALYMAAVVATRGNPVIHLFSQRLRAAGKAPKVALVAAMRKLLTILKAMVHAGTPWQPVVAREA

SEQ ID NO: 164112 - protein, 419 aa, unidentified
MSKSMFCGCDVSLENNTAWLMLDDGSQPTKLFNADNNQLGAEALVERIYSIAKEHCVSDILIGTEATSMYDWHLLEYLAESKLALEFNLKLYRFNAKWIKNFKKSLAPRGKTDPIDSFAIAERLRMGRLPKEYIPDTKYQPLRKLTRFRFHLMQQIAREKNFFLANLFLKASAYSRVSPFGSTFSATSLSVINDFFSVDELAAMPVEELTEFILEKGKSHFSKPAEIVDNLKRVARESYRLKPELAPTVNLILASTFNNIRCYKEQVKLVDEAIAENLKAFRHTLDSISGIGPVYAAGILAEIGDVHRFLNDSSLAQFTGLTWPKHQSGRFQAEETRMSHAGNQYLRYYLVEAANSVKRCDATYKAFYEKKYAEATKHHHKRALVLTARKLVRLVWTLLTRQTLYQPGYCSFEDLSKIG

SEQ ID NO: 164113 - protein, 412 aa, unidentified
MKRIRDRVAGLDVHRDTVVACCRIVDPSGEVEVSKQSFATTRKGLGELAAFLSGAAVSTVAMEATGVYWKPVYYALEGLFDELWLCNAQHVKNVPGRKSDLSDAEWLADVAAHGMVRPSFVPPPEIRELREITRYRKTQSDARAREIQRLEKVLQDAGIKLTSVASAVWSVSSREMIEALISGIREPSVLAQMAKGTMRKKIDRLEEALSGHFGEHHAIVCRQIIDHIDFLDASIGALTAEVTTRLAPFESAVAIVTSLPGISRRTAEVIVAETGADMSRFPSPGQLCAWAGVAPASYESAGKRRPAGTRHGSQWLRRALVEAARSAARTKNSYYSAQYARIARRRGANKAAVAVANSMLFTIWHLLSTGQLFEDPGADYFERRHDPAVEAKRLARRIEALGFDVNLIEKAA

SEQ ID NO: 164114 - protein, 342 aa, unidentified
MKFYCGIDLSARDCHLCVIDEQMKVVRQQKLRNDLKQICALIGPYKANLKIVVESTFNWYWLIDGLQAAGFEVVLAHTLGLYLITGAKVKTDRRDAYALAKLLLVGAIPAAYIYPVATRPVRDLLRRRLRLVQVRAGEYGSLRRLLLRQGVLSHKQQEIKTATEAELEQWLDHPLVRLHASQELRRIDLYSQQIAELENSILEIAETNESYELLRQLPGVGQTIALTILYEVGELTRFANVKVFSSYCRLVPGVAQSGQVTRRGRGSKQGNHYLKAAFSQAAVHAVRCYPQVRRCYERQLKRHQGPGRKLVCYNIIAHKLAQAAFHILKEQTEYRAELLFGR

SEQ ID NO: 164115 - protein, 345 aa, unidentified
MIMGCDFHPSWQQIAWLDTETGETGERKLVHVAGDAKAFYQQLAAPALIGMEATGNSQWFVELVEDLGHEIWIGDAAQIRASYVRKQKTDKRDAAHILKLVVEGRFPRLWSPDREQRDLRQLVLHRHKLVEIRSRVKNELQHLSLNKGMQRKARLWSQAGQKLLRELPLKRWAACRREDLLGLLGMLNEQVGKLDEAVQRAADEHPQARLLMTQPGVGPNTALAYVLTLGDVRRFPRGKQVASYLGLIPREESSGGRQKLGAISKQGNRLVRSLLVEAAQIAVRFDPGMKKQYWHRCHQKPKGVAKVAAARKLAVRLYWMLRTEKPYPEIVRIESSPRVPLVGAS

SEQ ID NO: 164116 - protein, 362 aa, unidentified
MTALSMPHEAAAKQPPLGSDEVILGIDTHKDLHVAAVVSVLGALLGSRAFPATAAGYRDLLVWACSFGTVQRAGVEGTGSYGAALSRSLTAEGVQVVEVNRPDRAARRRAGKSDAVDAEAAARAVLGGKATATPKRKDGPVEDLRVLKTVKDSAVRARTQAINQLKAILVSADPGLREPFAQLSNPALFTACARLDPDTGAVHQALHILAGRIQQLSAEVTALTRRITALIKGHNPQLLQLRGVGPDSAAALLTAAGDNHDRLAAEASFAALCGVSPVEHSSGKSRHRRLNRGGNRQANAALYRIVLTRLRWDERTRTYLERRTAEGKTKREVIRCLKRYVAREIHRCISAIPLPEPAPSTA

SEQ ID NO: 164117 - protein, 354 aa, unidentified
MKRTTKYVALDVHQATTVASVREESGRVIARSVLPTEGDALTEFFWGMRGTIHVACEEGTQAQWVHDLLVPLVDRVVVCDRRGEARSGNKADQVDADQLSEQLRRGNLRAVYHASAARATLKELTRSYTNLVEDTTRVMLRLKALFRARGLQTRGQRVYHPRERAAWLAQLADRGAQVRAEVLYAELDVLCRLRPRAKAVMVAEARRDPAWAVLGTIPFFGPVRVALLLATMQTPWRFRTKRNLWAYAGLAVVTRSSAEYAIVAGRPVRRRRAPLTRGLNRNHNRVLKDVFKGAATAATARPGPLQDWYQERLAGGMRAELARVTLTWKLAALTLRLWKKGERFDPAQLTRQAR

SEQ ID NO: 164118 - protein, 324 aa, unidentified
MYAQVGIDVSKDKLDVCYLTDSKSVKFTRIVVDNTEKGHKQLLRWLKKETNKSFNHIQVTLEATGVYHLNLAYFLQVKQLRVCVTHPLHSKHYAISLSMRAKTDRLDSIMLSRYGAERNPPEWQPAPKELVELKALNVRLTAVEKDIRREQNRLESAEIANHSKAVIRLNKQSIRQLQKQAEKLLELIDELIESHEQLRTNRRLLETIKGIGEVTSRHLVAEIYSGRFRNAGQCAAYMGLVPVPQQSGKFESVHLSRAGNKSLKAKLYMAAISAKQHNPVLKAHYDKLVARGKCKMSALCAVMRRLVQISFGVIKHQKEFCLPT

SEQ ID NO: 164119 - protein, 328 aa, unidentified
MSNITAVVGVDIAKHVFQLHEISKETGEIISAQLKRKTFLAHFANRSTCLIGMEACGGAQHWARKLISLGHVVRLLPAQQVKAFVCGNKNDFADARAIWMAVQQPGIKTAAIKTEAQQAVLAMHRIRQQLVKFCTAQINALRGLLTEYGEAMPQGRSGIARRLPGIFANLIDRLPTVLIDTLREQFARIGRLDEEVVEIERRLRDWYRQDDACRRLAEVPGVGLLTATAVVAAVGDAKTFKSGREFAAWLGLVPRQTGTGGRVKLLGISKRGDTYLRTLLIHGARSVLTHSKSPPEWITKLVRRRPINVGDRGDSKQDCAHAVGASGP

SEQ ID NO: 164120 - protein, 476 aa, unidentified
MYAYYLGGDVSKGYSDFQFIDEKKQKVGASFQLDDAHTGHAILYAYLERFLKEHPDAQLYIALESTGGYERNWYASLVKFQNSLPIHVAILNPAKVKSNNDVGHKVTTDAISAFGVAAYMVAHPEKINFESQDYFTSPKRHWKFLNMLTRQKTRLFNLLESELYLVFPDILAFCKDGYPQWVRTLLKLYPTAKRLSRARVSKVAQIPYVSEQRAIELIQAAKESVACIADELAEELVRSLVVQIQQLEQQINTHTELLKRKLDMPKVELFKTFIGIGDYSAIGLMIEIQNIHRFKRSQNLASYFGVHPVFRQSGDSKSGCKMSKRGRKEPRRLLFMIAFSASTSNPVIRQHYQMHLAKGMSRMAALGACMHKITRIIFGMLKNNTSFDPAIDQMNRQRNKAGEKKQLSAAQIARLKDYDTTAPISRRQNKKRKEQERLSQKANGIMNGIGCSAPGEINENSNKIANASTGNVQCDE

SEQ ID NO: 164121 - protein, 345 aa, unidentified
MVIIGCDFHPRFQQIAFLDEETGEYGERRLAHVEEAERFYRGLAGKQVRVGIEATGSFRWFRRLLKELGQEFVLGDAAAIRASYVRKQKTDKRDARHIFSLLMQGRFPEVWQPSGENEDLRQLLLHRCRLVRMRTQIRNQLDAMAKNEGMMSRRVWTLKRRAEIEGLALTGWYHKRRSDLLELMEVLDRRIKPLDDAVDKAAEQNKDAALLRTHPGVGPVVSLAYVLTIGDWQRFARGRQVASYLGLVPAEESSGDRRRLGHISKQGNGMVRWLLVEAAVHAQRHDPSWHRQYVRLSMTRHHGVAKLAIAHKLAVRMYWMLRSTQNYEQVRERGSHAGQSVERRG

SEQ ID NO: 164122 - protein, 433 aa, unidentified
MLVTVGEEEARVLEETYDSEEIVERVAALDIGKAQLVCCIRVPGEGKRGKRLQEVKAYPTMTRSLLVLADRLGELGVTRVVMEATSDYWKSSFYLLEAHGFEVWLVNARDVKHLPGRPKTDRLDAVWLCKVAERQMLRPSFVPPPAIRRLRDVARYRVDLVGVRTAEKQRVEKLLEDAQIKLSVVASDIFGVSGRAMLAALIAGERNPKVLAQLARGRLRAKLSVLEEAFTGFFTDHHAFLLAKMLARVDMLDSDIAELDRKLEELIVPFAAAVERLDEITGVGRTAAQLILAEIGTDMARFPTPGHLASWAKFTPGVKESAGKKKGKSSTGHGNRYLARVLGEAAVAAGRTDTFLGERYRRIARRRGTKRAIVAVGRSILIIIWHLLADPTARYHDLGPGFYDTRINAERAKRNHIRQLEALGYKVTLQPAA

SEQ ID NO: 164123 - protein, 401 aa, unidentified
MADVWAGIDAGKREHHCVAIDETGTVLLSKRIENDEDTLLALMSEVSDLAAGGSLTWATDLNAGGAALLLTLLTDHKQQVLYIPGRIIHHAAATYRGDAKTDEKDATIIADQARMRRDLTPIRPNEQLSQDLRLMISHRTDLVHDRVRTINRLRAVLLEYFPALEAAFDYSKSKAALILLQGYQTPKALRTLGEARLTKWLHARGARNSAAIATRAITAAKAQTAVTPAQSYGQKRVVSLAQNLTRIDTELAALERGITQTFMSHNDAQTLLSVPGFGPILAADFIANTGGDMTAFQTADMLASVAGLAPAPRDSGRISGNLHRPKRYNRRLLRTCYLAALSSLKNSPASRVFYDRKRREGKTHTQALIALARRRMNVIWALLRDHTIYQEPLPLGRAQAT

SEQ ID NO: 164124 - protein, 344 aa, unidentified
MHIATIGLDLAKNVFQIHGIDADGDAVVRRRLRRSQVFEFFAGLEPCLIGMEACGTAHFWARVLMSLGHEVKIIPPSYVKAYVRRGKNDAVDAAAICEAVTRPNMRFVPIKSEEQQAALMLHKSRALLVRQQTMLVNAMRAHMAELGMIAPQGRARIKELIAVIEDDAEDSIPALAKAALKPLVLQLRAGEAAISALDDEIKAWHLSDEASQRLASIPGVGILTATAISATMGDPAYFKSGREFAAWLGLVPRQNSSGGKDRLGRISRQGNRYIRRLLVIGATSMLRRAKDRSAPGGEWVNSLLERRPARLVTVAMANKTARIAWALLAHGETYRAPSAPAMAR

SEQ ID NO: 164125 - protein, 332 aa, unidentified
MSIVSTVGIDLAKKVFSVHAVDSQGLVVVRRSLSRARLSVLIAQLPLCLIGMEACSGAHEWARRFVVFGHVVKLMAPKFVAPYRKSGKNDGNDAEAICEAVARPSMRFVPVKTTEQQSDLTLHRVRQGFVEKRSATLNRLRGLLAEFGHVLPLRPTELHRRVPQLLEKLPARVATCAQDLLGHARGLQEKVLRYEREIKQHIHSNELACRAQTRLGIGPITASALVATVGNGRDFKNGRQFAAWLGLVPRQYSTGGRTRLGHITKRGDPYLRTLLVMGARAVLQRAVSLTDPLSRWALAVRERRGYHRACIAIAAKNARVAWALLAKEAVAA

SEQ ID NO: 164126 - protein, 328 aa, unidentified
MTKRTIICAGIDTGKRKLDVALEGNRERLEVENTSEGHAVLSAWLRGHRVKRVGIEASGGYEQPVVAELRRKRYVVVVFQPAQVRAYAKFHLQRAKNDKIDAALIASCTAAVRKIHAAPDPRLLPFAEQLTMIDQISEDIARLKNRIESCRNTRIKKLWSEDIARLMQREKVELKALVASIRKHPDLARRLELINSVAGIGLPTAVAILVRLPEIGQITREQAVALAGLAPYDDDSGERVGVRHIDGGRKRLRRAVYTASLAAAFRWNPQLIQIYQRLRAAGKEHKQALVACARKMLIFANTVVARGTSWGDEPPVRIASTAVPLSVS

SEQ ID NO: 164127 - protein, 347 aa, unidentified
MQMIGCDLHARQQTLAILDTETGVLEERVLEHTGNNVRDFYRSLPRPARVGIEATGSMHWFLEMMEELGIECRVGHPAKIRACEPRKQKHDRRDALLLLTLLSEDRFPSIWMPSLDQRDVRALLTYRHQWVRIRVRVQNALQSIALSHGLRRGRAMWSKAGLAAIRSLPLPPYSTERRDALVDLYLQLQEEIDELDKTVAECAAERERARLLMTHPGVGPITALATESILGDPARFADGKAVASYVGLIPSEFSSGGRRQILGRLTKQGSPMLRFLWCEAVGHAVRKDEQLKRFYRRKLAQKGFAKAKCAAGRKLGIRLWIMLRDNISYQEFCRRARQQTDVPCGDA

SEQ ID NO: 164128 - protein, 371 aa, unidentified
MKFKAQDKQNQLIENITSAHLVVGVDIAQETHVARAVSYRGIALGSPIDFGNHDEGFRLFGRWIQDLLGSYKLSKVIVGMEPTGHYWLSLARWLKGKGIEAVLVNPHLVKKNKENRDNTPSKSDRKDALVIADMIKNGYYSPVRFHSEAYEELRILMANRDTVTKRLNSAINQIHRWVDIVFPELRQVFKILTCTSAIATLRLFPLPMEISRLSTTQILSGWKQYVKRHAGVKRAEQLITLAKCSVGATQAPHSYKLHLGHLLEEYDLAQRQLKQVEHELHLILERIPYAKKLLKIRGVSATSLAGVLGEAGDLSGYTHGNALLRHAGLNLAEASSGKWRGRMVLSKRGRPRLRHFLYLLDDVHGNDQPGC

SEQ ID NO: 164129 - protein, 375 aa, unidentified
MQEKLRFLGMDVHAETIAAAIAEPDGEVRSLGTIPNRMESVRKLIRKLGPAEKLRVCYEAGPTGYVLYWQLAELGVECEVIAPSLVPVKAGDRVKTDRRDAEKLARSYRSGDLTAVWVPDEGSEALRDLVRAREAAKQDQLRARHRLGKFLLRSGQRPPSGVRAWTHLHLIWVSQIRFAQVAQESTRLDYLHEVEHMRERVLRLEQAIAKAVKLASPALQEVITDLQALRGIAHISAVTIAVELGQVSRFPGARELMGYCGAVPSENSSGKRTRRGGITKTGNAHLRRIVVEAAWSYHRPPAIWAGLRKRQQSASEEAKEIAWKAQHRLHKRYARLAATGKDKRKIVTAVGRELLGFIWAIGTKAEATVSQRIGA

SEQ ID NO: 164130 - protein, 349 aa, unidentified
MEHYAGIDVSLELSSACVVDAKGKIVKEAKISSDPVALVTFFRGLGIAIERIGLEAGPLSQWLHARLTQAGFEVVLLETRHVKAALSAMTVKTDRKDARGIAQLIRMGWFRSVHCKSVGSQEVRALLVGRKLLLGKLLDVEFSIRGILRGFGLKMGVVTRRNFEARVRELCAGHSMLEQICAAMLAARSALQTEYTKLHKAMLTIVRKDEVCRRLMTTPGVGPLVAITFKTGIDDPSRIGKSKAVGALFGLTPKKYQSGETDVTGGITRVGDEMVRTALYEAANILLSRVTRFSALKRWGMDIARRRGTKRAKVALARKIGVILHRMWVDSTNFRWTKEAPNAPRLIQA

SEQ ID NO: 164131 - protein, 427 aa, unidentified
MKYNQNFKIMQITDSTLVIGVDIAKKKHFARAFDWRGIELDKTIQFKSNWTGFNSFFDWVNYVANKTEKDKIVIGIEPTGHYWFTFAQKVFEAGHMLVQVNPYHVKKAKELDDNTPSKSDRKDPKTIAMLVKDGRYQIPYMPKGLYAELRKANNLREEWLKKIWSVKNKVQRWLDIYFPEFMSAFSSWEGKCAVMTLERLSLPAEIMKLTANEILSIWREEVSRGVGIKKAQKLLEAAKESVGIREGLEMASYEMKLLMREYKEIREILDDLEAKLESLVLTIPRATNLLEIKGIGVKTVAGFFAEVGDIKRFSHPQQIIKLAGLNVRENSSGEHKGQTTISKRGRSRLRALLFRAILPMTAKNAEFNALHKYNITEKENPLKKMQSLIALCGKLIRVIFTLVTKNVKYDGEKLLGDIHRENVVIAA

SEQ ID NO: 164132 - protein, 420 aa, unidentified
MPDDRCRLGSDDVVIGLDLASAEHQVVVLTTDGRRLTRFRIPHSRVGLEELLRRTMPAALGRARGARVFAFEATGHVWEAVAYILRARNERYVVVNPLTTFRVREARQLSREKTDLTDAEQIAELCRAGLVTRTQLEARPYLALRRAWGEYRRLREERARLKVLIAHQLYGLFPEFLRVWANLLQPGALAVLRTGLTPAAMAALSLSEFVARVGEHRAGRRVWRVKLAQVHRYAEQTIACPDGIDLLAREVQRAVARLDALTAQMSVVVTEIDALLADLEEAPYLRTIPGLGWASVAGLLAHVGAITKYRHGRQLIKLAGTNPSRRDSGQSVGRGQTMSRRGRAGLREVIYLATISCLQHNRRIRAHYDRLIQRAHRPLTKMQAVGACMNKLLLYAFAVMSRREAFQLDHDWQRTMPRIA

SEQ ID NO: 164133 - protein, 406 aa, unidentified
MDFPNADVWVGLDIGKAEHFADVLDDDGERLFATSVINDEASLRGLLKRATRHGTAAVAIDQPGSIAQLVLAVCTTQGIPVAYVPGLVMRRAADLYPGESKTDRRDAYVIADTARTRRRQVTWLDTSSDELLDELRVLNGYDTDLAVDATRTASRLRDILCSVSPALERVFGDQLAHPAARAILASHPTPTALRAAGPSAILSLALAHAPRVGARLATDIGAALDAQTVILPAETAKGRVIADLARELERLHQRRDDLATEIEAVFNAHPFGPLLSSIPGIGARTGATILAEVGDGSGFANGSKLAAYAGLAPVTRQSGTSLNSETKSRRGNHRLKNALFLSAFCSLRSPDSRAYYDRKRAEGKRHNAAVMCLARRRCDVILAIISTRTAYQTRLPATLEPARKAA

SEQ ID NO: 164134 - protein, 341 aa, unidentified
MKKFIRTAVDLGKNYFQFHGLTSECDVSVSRKLKRSKVLEFYAQIEPCRVGMEACGSAHHWARELVAMGHEVVLIPPAYIKPYVKRGKNDAVDAAAICEAMARPDMRFVPIKSADDQAVLMLHKSRELLIKQRTMSVNALRGHLAEFGLVVAKGIGRVDELLTLAQSDVRLPQIAKATVTELARHLEGLDQSIEAIDDDIAKAHKQNQKSCLIDEVPGIGTLIASVVVASVPDPSVFKSGRDFAAWLGLTPRQNSSGGKEKLGSITKQGNRYIRKMLVVGATSVLRVVGKRKGALADWINALRARKPERLAAVALANKLARICWALLTTGESFRTATYVKA

SEQ ID NO: 164135 - protein, 358 aa, unidentified
MQKQDTKIDFNGQNIYVGIDTHLKSWKVALYHDEIALKTFSQDPETKLLVNHLRKNYPNANYQCAYEAGFSGFWLQKALTKQGIKCIVVNPADVPTTDKEKKFKTDKIDCHKIARSLRNKELDAIYVPSDEGLEERSVVRLYKDMVRNRTRHKNKIKSILNFYGITYPEQFKDSNRHWTISFCKWLKSLRLNTDAGTWMLDFYILEYAHSNELVKKAWKQLQILSKQKKYALKIKWLRSIPGIGLVNALTILTEIEDINRFKTLDELCSYIGLVPNTSSSGDTDLIGDMTNRGNPFLKTTIIEAAWVAVRHDPALLLSFQKLKSKMKANKAIIRIAKKLVNRIRFVLKNETEYVKNVL

SEQ ID NO: 164136 - protein, 360 aa, unidentified
MNTSTLKTIGVDLHKASLTATVLDSTGVILERKDIPTKCRNQIADYFASHGPAVQVAVESVGFYHWFWDTVRPKVQTLRLADPAGVRACAGRQTKTDRNDSLLLARLLHEDRLPMAYVPDEPVRALRELCRHRHRLARQLALARRHLRWVALKNNLPGPTTFISDRAQKWLLSQDAKLNATHRLAARQLLDQIITLERQLADTELALKAAVATHPELAPTLALIQSVPGVGFISAVTILCECGDIRRFDSIDELSSYAGLCPRVTQSGETAHHGHISKQGPPILRWVLQQAAWVAIRCDPNARRIYARIAKRAGNKKAATALARKLLSYAWSVCRQGHPFVWPTDRKSGPGPVPVWSYDI

SEQ ID NO: 164137 - protein, 338 aa, unidentified
MGYFVGIDLHGDNNYIGILDEEDRRVFKRKNRNDIKEITRVLEPYQEEIEGIVVESTFNWYWIVDGLMEAGYRVHLANTAAMQQYEGLKYIDDTRDSFWLAHMLRLEILPEGYIYPKEKRAVRDLLRKRMMLVQQRTAHILSMQTMVNRNKGIPISSDTIKKMSDEEVEGLFSDEHLVMSAQCDHEVIGVLSEQIDKIEKAVFKEVKLKKPYKKLLTVPGIGEILAMTIMLETGDIGRFREVGKYSSYCRCVSAKKVSNGKNKGKGNRKNGNKYLAWAYVEAAHFHVRYCEEARKWHQRKASKSNAILATKALSNKLARACYYIIKEQANYDKKKMFG

SEQ ID NO: 164138 - protein, 384 aa, unidentified
MKTVPFEQVILRGCGIDVHKDMVVATISGEGLKTETRSYKTFSSSLTELKEWLLSSGITHVAMESTGVYWKPVYKILECPDMKVWIVNARHIKYVPGHKTDKKDSAWICKQLLAGLLKPSYIPEREQRELRDLTRYRNKLIQHVSSEKNRIVRILEDCNIKLSSVVCSLDGVVANKLIDMLIDKGHVTMDDITCIYHKKLEASPELLYQACEGFIEPHHIYMLQTIRKDMEQTKAIIADLTCRIKEVLSPYENVMELLQKIPGLSRKTVEDLIAEIGVDMEAFPTEKHLAAWAATRTKNTFYSARYHRLAARRGKKRALVAVGHSILKSVWHVLKEACEYKELGAEYLNQRMEQKRKNYLKKELEALGYKVKISRDDGPIPEVG

SEQ ID NO: 164139 - protein, 381 aa, unidentified
MDQKQATMEKEVITRFPVLYVAFELGNSTWKMACSDGRKVRQVTVTARDLEQVQRALLRTQNHFRMGEGCSVVSCYEAGRDAFWLHRYLQSRGIDNVVVDSASLEVDRRLRRAKTDRIDAGKLLRMLIRYHGGEKQLWRVVRVPSREDEDARHLHRELEGLKRERTRQRNRIHGILMQQGLGIPNPSKKRFIKDLETLRTWDGQKLPVGMKARLVRAYQQLRLVEDQISSLATEKRDQLQQVDNAKMRQVAQLLKLPGIGPVSSWAFVMEFFGWRQFRNRREVAALAGLTPTPYDSGRKLREQGISKAGNRRIRTLAIEIAWAWLRYQPHSRLSQWFSERFAGGGTRMRRVGIVALARRLLVDLWRFLEYGVVPEGALLTT

SEQ ID NO: 164140 - protein, 324 aa, unidentified
MMNADLIYVGVDVSKASLDICVGVAGTPCTVGNDSAGHQAACQMLHGQRIGLIVLEATGGYEFACAAALQAQGLPVAVINPRQARDFAKAMGRLAKTDRIDAAGLAHLAQVLADRADAARFIKPLPDAQQQKLGALVSRRRQLVQMRVMETHHLTVAHPSAHKSIQAVIKALATQLRHIEAELALHLKQYNADLSALLGDVKGLGPATVATLIGELPELGKLNRRQISALVGVAPYNHDSGRLKGQRCISGGRPTLRTALYMATLVATRHNPVIRAFYQRLLTAGKLKKVALVASTRKFLTILNAMAKSSEPWNDSFHLGAKNA

SEQ ID NO: 164141 - protein, 326 aa, unidentified
MQGKESSEQKAKVKSSAGIDVCKSWLDAHVLPEGCSLRVVNDARGHRRLIAWLSQYAVSLIAIEATGKWHRQVHRMLHARGFQVAVVNPRRARLFAEAIGLLAKTDRLDARMLALLAVDLSPPARAPAPEAIEALQELVAGRDSAVAEQTALENQLATATTTFFTRQLKARIVRIAKDIASLQTEIERRIGCDEALARRYAILISIPGVGPVTAATLIANMAELGTCSTKQIAMLAGLAPVADQSGSREGRRAIRAGRAAVRRVLYLCALAAKRCNPAMTALYTRLMAAGRPHKVALVAVARKLIVLANTLIVQNRLWQSQPPIQA

SEQ ID NO: 164142 - protein, 341 aa, unidentified
MNAIMIGLDLAKNVFQVHGVDAAGQVVLRRQLRRAQVERFFATLAPCRIGMEACGGAHHWGRVLLRLGHEVRLMPASYVRPYVKRNKTDGRDAEAICEAMQRPSMRFVPVKSVEQQAVLVVHRTRALMVRQRTMAANGLRAACAEFGVVAAQGRQGLHRLMQELAANDGPLPAEARWALSLLAGQWQALDAAIGTLEARIVRLARSDEAARRLMEIPGVGPLGASLITATVADARVFRSGRNFAAWLGLTPRQHASAGKQRSGSISKQGDRTIRSLLILGATARLRQERMRGVKDAWLAELLARRPAKVVAVALAAKAARIIWALLANNQHYRAPVLTRAR

SEQ ID NO: 164143 - protein, 367 aa, unidentified
MAVTIVDAARPVTGGVDARLDLNVASRLVTGGVDTHLDLNVAAALDPVGGLLGVAEFPTTAAGHRELLGWLSGFGPVARVGVEGTGSYGAGLARFLRASGVEIVEVDRPNRQARRRSGKSDPLDAVEAARAALSGRASGAAKSRDGNVEAIRALVVAKRSARSAKIQALNQIRHLSFTAPEQLRQRLAGVSRHHLAARAAGLRPATGAGADPVIAATKTALRILGRRVLALDEEKARIDALLTGLVTQTAPQLLAVFGVGVDTAAALLVTAGDNPGRLRSEAAWAHLCGTAPIPASSGKVTRYRLNRGGDRQANCALWGIVITRLGNDPRTRAYMTRRLAEGRSKPEVIRVLKRYVAREVYHRLPRT

SEQ ID NO: 164144 - protein, 393 aa, unidentified
MKEKLRFLGMDVHAETIAAAIAEPDGEVRSLGTIPNRMESVRKLIKKLGPVEKLRVCYEAGPTGYVLYWQLAELGVQCEVIAPSLVPMKAGDRVKTDRRDAERLARSHRSGDLTAVWVPDEGSEALRDLVRAREAAKQDELRARHRLGKFLLRSGHRPPTGVRSWTHLHLIWVSQIRCTQMAQESTRLDYLHEVEHMRERVLRLEQAIAEAVQLASPALQEVITDLQALRGIAHISAVTIAAELGQVSRFAGARELMGYCGTVPSENSSGKRIRRGSITKTGNAHLRRIVVEAAWSYQRPPAIWAGLRKRQQSASEEAKEIAWKAQHRLHKRYARLAATGKDKRKIVTAVGRELLGFIWAIGTKAEATVYPANGSLRKSKKLPDKEKAKRTHS

SEQ ID NO: 164145 - protein, 313 aa, unidentified
MYYIAVDVSKKVLSVYDGKKDMTFLNTEGLSSLKKYLRKHYRDFNQLIFLLEATGSYSDYLIELCAKYRIKAVIINPKASHHFAKSPGIRNKTDKIDARMIYQYQRLINYQMITVPRINKEAKTLSAYLVSYQLAMKQRIALENHLEHVRDKDLFQLLRKDLKRAYQLEEQILKRITAYILKHPRLKADYQRLLTIPGIGEKSAPALLYLFITYQGTNRNQITALCGLDPIQRQSGTSVSAKPKISKHGSRLIRKVLYMPMLSAIQVNPRICAFYQRLLRNHKVKKLAVIAAMRKMILIAHAIYQNKTEYVPV

SEQ ID NO: 164146 - protein, 345 aa, unidentified
MNRTTIAVDLAKSVFQVAVADGDWRVVSRRRLSRGQLLRFFAEQHPCLVVLEACGTAHFWGRWLSSLGFTVRLLPPQYVRAFVRRNKTDRSDADALLEAARSTDLTTVPVKSEQQQALLSLHRLRSAWLASRTARTNTVRGILREFGVNVPRGARRVTAAVETLLGEAASPVPVVLHPLLHQACAEVRDLQARMEQAEGELERLARDLPIVALLRSVPGIGPLTSTALVASIGDVLRFPSGRHLASWLGLTPREHSSGERRRLGGISKRGDRYLRTLLIHGGRSLLAAANRRGGRDHLRAWGLEVERLRGHNRAAVAVANKLARICWAVWRHGERYQGRPIPKAA

SEQ ID NO: 164147 - protein, 368 aa, unidentified
MVKYSNIALLLHCATSKSVIFDEWKSEVAKNCALIDQHKNQLTVNIRNEQGDVIQKGQVSTNHTDIDEFFTAFVKKARKHRGYMAIVEVCGFNDWLLEKLKKTQCSEIVVIQPDNSAVNKTDKRDANALCELLWNNRNRLRGGQRPNGIRRIFPADSADAQVRQLANFRQHLIKQRTRVINKIKGIINKHNMAQDAASEDCSTKKFRQWVVVVQLPVIDRLEIDMNIQSWELYDKQIVEVEAELVKRSETRMKDVLRLKAIPGISAMGAITLLSRIGDIKRFNNPDSLANYFGLTPGCHNTAGKQRVGGITKRGNAVARQVLNFAVIHVVRKDPAMKEWHKRIKNRRGAKTARVAVMRRMATIIDTVS

SEQ ID NO: 164148 - protein, 320 aa, unidentified
MTILTSPTVIGIDVAKVEIIAYREDEKTTETVNNDRETLGRWLKALPAQSSIALEATSIYHLDTVELAHEMGHRVYVVDAYRLSHYRESIGQRAKTDPCDARLLARYLSSEQERLRLWSPPPQAYKVLKSLLHRRAELINVRVGITLSWSSEPLLKDELARQLKSFKQAEQAIQKLLHKVSKEAGITENIKRCKAIEGIGELTATGLATAFMRGHFANGDAFIAFLGMDLRAKDSGKKNGPRHLSKKGDTEVRRLAHNAAMAACRSPAWKPFYESYLDRGLAKTQALVILARKLCRVAFALMKNQSEYQPNLRLQGSPAT

SEQ ID NO: 164149 - protein, 414 aa, unidentified
MSELTNKFSAFVGLDWANNKHDVCVQLGHDGKRTFEIISHTPEALDEWLTKLHHQAKGNIAVAVELTKGPIVYALQKYSFITVYPVHALTLARYRQAFNPSGAKDDPTDAELALDLMLKYPNKVKPLKPSSDDVRVLAQFVEQRRLLVEDKRRYVNRLINALKQYYPQPLAWFSHRDSGLFFNFISKWPSLQSLKRARENTIRKFFLSHGGNAVSLTEQRIEAIKNAVPLTEDKAVILPYSLFVETLIEQLKTVIVSIKTYDEKIYTLFTDMPDAELFKSLPGTGPCLAPRLLAALGDDRARFASAQEIQNYAGLSPVTERSGQKCWVHWRWQCSKFIRQSFIEWSAKSVGVSYWAGLYYNQQRAKGKSHQSAVRALAFKWVRIVFRCWKTKTPYDESKYLKALKERNSPLLAA

SEQ ID NO: 164150 - protein, 312 aa, unidentified
MAMQTHGEIGIDTAKDELVIHSRAFEQNLTITNNRKAILQWLSTLPPGCDIGIEATSTYHMALTELAHAKGHHVYVIDGYRLKNYREGVGGRAKTDLTDAQLLARYLSKEKDELRRWTPPPKAYRTLQSLLRRRAVLVKVRTTARQSLSGEPMLKASLGSLIRRIDQIDLLIQKRLRDTVKAAGLQAQVQRCKKINGVGEITAIALVMAFLRGEFQSADAFVAFLGLDVRVRDSGKLRGKRKLTKQGDTEVRRLLYCSAMSGSRHPTWRTYYQGYLDRGLKRTQALVILARKLARVAFSLMRREDNYCIEKL

SEQ ID NO: 164151 - protein, 412 aa, unidentified
MEILYPICCGLDVHKDTVTACLRRLEAPGHVRKELRTFGTTTGALLTLLDWLVAAGCTHVAMESTGVYWKPVFNILEGSFAQVLVVNARDVKALPGRKTDMLDAEWIAQLLQHGLLRGSFIPPAPIRALREATRYRKQLIRTRADEANRIQKLLEAANLKLGSVATDILGVSGRAMLAALVKGETDASALAGLAKGRLRQKRDRLVAALTGQITPVQRALLGQQLAHVEYLDRAIAELDSLIGTLMAPYQAEADRLRTTTGIEQRTAEALIAELGVDMGVFPSDRHCASWAGMCPGNNESAGKRKSGKTRKGSKWLRAALVEAAWATSRTQTYLGAQYHRIARRRGKKKAIVAVAHSILVIAYHLLKEGTTYRDLGHDYFDKRETARLQQRLIARLESLGLRVTVEPLPQAA

SEQ ID NO: 164152 - protein, 428 aa, unidentified
MKNRNVEKLEAITLSTLVVGVDIAKETQWARFVDYRGLEIGKALRFHNDKHGFDSILASIRFICNNKRFNDVIVGMEPTGHYWKPLTNYLIKHGIKVVMVNPYHTKRAKELDDNSQTKNDKKDALTIAKLVRDGRYYEVYMPQDIFAELRVLTNSRISLKKRYNALKNTITAVMDEYFPEIVTVFKNPLKGKASMQILKSCPFPALILELGIDGVLAEMKKAVTKTVGRKKAEQLVETAKTSIGVGYGIVSAKLKIGLMIEELELLTKQLAQIETAMALALTDTGYGEIILGIPGIGIVTAASFLGEIGDPIRFDNPRQISKMAGYNLIEDSSGKSKSGTAISKRGRKNLRSILYQMAMIMVAVNAEMKELYEYLKTRPNNPLKKKQALVVISKKIITVIYNLVRKQTEYKAELVLGEFRKNQIKQAA

SEQ ID NO: 164153 - protein, 341 aa, unidentified
MNYYVGIDVSLEASSLCVVDANGKVVREGKVASEPDALIAWLKELKLELTRIGLEAGPLSQWLFAAIRQAGFAVELLETRHVCAALKTMPVKSDRNDARGIAQLMRLGWFRPVHCKSMAAQETRALLTARKLLQTKLHDLELSLRGILRGFGLKVGPTTPARFEERIRELVAGHPRLEVIVKSLLAARVALRREFDHFEKQVRDAARCDTRVRLLTSIPGVGAIVSLSFTAAIDDPARFKSSKRVGAYLGLTPTKYQSGETDIDGRISKIGDASVRAALYESAHIILTKPLKGCTALKSWAMKIAKRSGMKKAKVALARKLAVIMHRMLADGTSFRNAAAV

SEQ ID NO: 164154 - protein, 353 aa, unidentified
MVYLGVDLHRKLSHVVALDEGGRVVLERRFDHSPDAFRRVFGELEPEPFSVVFEATYGWGWFADLLADAGIEAHMAHPLATKAISSGRVKNDAVDARTLAHLLRTNLLPEAWIAPPEVRDARRLVRMRVSLVRIRSRLKSQVHAICADAGVPVGVTDLFGRSGREQLAALALRPVVASRLAANLRLIDEVGREIVAADRELQALFRGDDRVRRLMPIPGIGFLTAVTIIAEVAEIGRFPSADRLASWTGLTPTERSSADHTRRGRVSKQGSRWLRWTMVEAAARIGRAPSLHRFADPIEARRGNKIARVALARRLLTLAFYALRDPDGCRAYPPLRRSSRSLPARSTRVMASS

SEQ ID NO: 164155 - protein, 357 aa, unidentified
MVCVGIDVAKDKHDCCILDSDGMVRADCFTIPNNMDGFKQLLQTIRNCTKKSDKIKVGLEATGHYSYNILGFLLDNDLAVHVMNPLHTNLYRKSLSLRKTKTDRVDARTIATMLLSDVDLKSYTDTAYHNEELKSLTRYRFDKVRERAKLKQSVSRLVTILFPELEKLVPSLHIASVYSLISEYPGAKQVSEVHLTKLTNLLTTASKGRYGKDKAIQIRDAAKTSIGSVMPAKSLELKHTIKLIKELTSEIDEIEDSIQQIMDELHPPILSIPGVGIQSAAMILAEIGDFSNFESPDKILAYAGCSPSTYQSGKLTNCYAHMEKRGSRYLRCALYNATKYVCHWNPVFAEYLAKKTC

SEQ ID NO: 164156 - protein, 390 aa, unidentified
MAGTPRIDVRGLGVRVVLAPTPQLWEVPTMSESMALVGLDVHQAQTVAAVLDPSTGELSVQRLRGEPARVVPVFLEELDRPVAAVYEAGPTGFALIRVAQERGLDVRVVAPGSIPRAPGDRVKTDRRDASRLVRLFASGELSYAFVPSEVDERFRDLVRCIEDARKDLMRSRHRLSKFLLRRGHRFPSKAWTQPHERWLGKLSFEDAVSHATFVDYLCAVQTLVQRRRVLIDALEQAVPASSHAGTVARLRCFRGIDTLTAAGLCAEVGDFTRFAKPALLSGFLGVVPSEYTSDEKRTQGQITKAGPPHARRLLVEAAHHYRHQPAVREGLAARQAGQDPRVVQIAWRCQRRLHERWKHLGGTRGKRTGTVAIACARELAAFCWEAATLD

SEQ ID NO: 164157 - protein, 373 aa, unidentified
MSVAVGIDIGSESHAVAVCREGAQEAERKGLKITANRGGFDDLDAWLRRQPEPVARVVMESSGHYWFNLASHLRRQGYPVAVVNPLEAKYFGKRRLQRSKSDPADARTLATFAMVDQPPTREPLVGAELREASRFAMRLVREQGQVCQRILRLVDIGFPELAEVWDDPTCMSALAVLRRAPTARTVARMRVETLAQLRRPGSGARAIGPAKAAELKRRATTSVAAPELEVQVGFEMRLLIGQYDLLEQQIEAADRRVAALLDGEVAQRLLSIPGVGPSIAGTLMAEIGDIWRFTDVDQLLAYAGVHPQERSSGKKGANPETSWVMAKTGNAFLREAAYRMAIVGIQHNPVIRAHYARKRAAGKSRMNAVGNCM

SEQ ID NO: 164158 - protein, 352 aa, unidentified
MSRKSLPCGITTIGIDVGKNTFHLIGLDGRGAIALQLKVSRAQLEGQLGNVPACLIGMEACSGAHHIGRQLEALGHDVRLMPAQYVKPFLKSHKNDYRDAEAIAEAVQRPTMRFVRIKTPEQMDLLALHRVRSRLVGQRTAVTNQIRGFLIERGITVRQGLMPLRKALPEILSANSGALSPRMVALITDLAADWRRLDERIATVSADIEALAEQDGSCQRLMTVPGIGPIISSAVVAAIGNGAGFKQGRDFGAWLGLVPRQESTGDRTILGKISKRGNKYLRTLFVQAAHVVLVRRPGAARRGLWPWIARASKRLHRNMLAIALANKLARIAWAVLARGDAYQPRIAVDAAS

SEQ ID NO: 164159 - protein, 343 aa, unidentified
MDQYIGLDVSLKETAISIRQDGKRIWRGKCASDPKLVAEMIRKHAPHAKRVVFETGPLSTWFYHGLIKEGVPAICIEARHAQKILNETLNKTDSNDADGLAHLAEAGFYKAVRVKAFDSMLTRTLVAARNQLLSISTQLSNQIRGLMKTFGLIVPKGTGRVFDGNVRQLLDGNDGLAKIILPLLEAWHGIRMRAANLDRQLVTAARESQATKRLMTIPGIGAVTAISYVAAIEDPDNFKTSRSVGAWLGLTTRRYQSGEVDYDGHISRRGDPYLRGLLYEAATVILTRTSARNESSLKSWGLKLRERLGFKRAAVAVARKLAVIMHSMLKTGDVFDRSAGAAA

SEQ ID NO: 164160 - protein, 351 aa, unidentified
MTTMTPARPLVTGGVDTHRDEHVCAGLDHNGGLLGTASFPTTAAGYAALLAWLLGLGDLVAVGVEGTGSYGAALARHLTSRGVKVLEVSRPNRQVRRRYGKSDVVDAIAAGRAVLSGEATATPKAHDGPVEALRALKSLQRSANKARTQALNQLQAVLVTAPEDLRARLRELPRRELLATCAAFRIRADDDSLAAITRLTLRELAARIAFLDAQLKSTVARLRRITTELAPDMVVKVGVGPDTASTLLLTAGDNPDRLHSERAFASLLGSSPVAANSGQTQNRYRLNRGGDRQANAALWRIAMVRLRHDQATRDYMAKRQAEGKTKSEAIRCLKRYIAREIYNSLPKSALT

SEQ ID NO: 164161 - protein, 403 aa, unidentified
MNSVGIDISKGRSTIAVMRPFGEVVISPFEVRHTDSELSELAKQLKSLNGETRVVMEATGNYHAPVAKLLHDAELYVSVVNAKLVHSYGNNDLRRVKTDKKDAVKLANYGLDRWLTLPRYVPEEDTRLLLKNCYRQYRQYSKVQTVLKNNLISLLDTVFPNVNRLFSSPIRGDGSEKWVDFVAEFWHCRCVSEKSEKVFTNKYQRWCRKHGYNFSEEKAHTIHAEASGYIGVMPKSETTKLLVEQAVAQLRATSAALTALKHEMLALAAQLPEYPVVMGMFGVGPTLGPQLIAEIGDVRRFYSKKALVAYAGLDAPPNDSGDVTGKHKSMSKIGASSLRRTLFLVMSVYLQNAPLDEPVYQFMDKKRAEGKPYRVYMMASANKFLRIYYATVKAYLESLEHTA

SEQ ID NO: 164162 - protein, 412 aa, unidentified
MNSWENGIIKSNPIVRINLLTVPKSVYSFNNDSEGFQSAKEWAVQIAAEHNKSQIVLGLEPTGHYWFCLAAWMISNGISVVQVNPYAVKQTKEVEDNSQMKDDRKDPKLIANLVKDGNFGMPYLPEKLYAELRRLSMFRDQLNEDRIRTINRMHREMKIYFPEYKDALGKVDGAFSLELLRQAPFPDDLISLGEDGIRKIWHDARLRGRGYSRAGEILQYAKVSVGIKDGAIAGKAAVKWFVQKILELDAELAVIENQINQKCQEIPHAGNILEISGIGENILSGILAEMGDISRFDDVKEIQKLSGLGLVACSSGKHKGETRISHRGRKRLRYWLFQAAKSAVAHAEEFKELHIYYTTRADNPLKKMQSLIVIACKLLRIIYTILKKGIVYDPKKMLMDIRRVEKKEAIVA

SEQ ID NO: 164163 - protein, 330 aa, unidentified
MKNYKEVVGIDVSKKTIDAYCYQSEVHKAFTNDLVGYKSLVKWVFKETKNVDVFYCFENTGYYSLKLALYLESQQLVYVEESPLKIKRSSGIVKEKTDRLDSRLIARYAWLYRDELRPSSVKSTDHLELGRLLALRDQLVRNNAGLKGTLKEMKVLLTSSTTDACCISLKRSIDYISKQVNSIEKRIQELITEDVSMHKNYELLSSLKGIGFVVACQLIYHTGNFTRFDSWRSFSSYCGTAPFAHESGTSIKRRKQCHYLGDRKMKSLLSMASISAIQHDSELRIYYKRKLAEGKDKMLAINNVRNKLIARAFAVIKRGTPYVVLQNHVA

SEQ ID NO: 164164 - protein, 343 aa, unidentified
MQIVRVGLDLAKYVFEVHGVDGRGKVVLRKTLRRDAVSSFFANLPSCLIGMEASNGAHYWARVLSGLGHEVRLISPQFVTPYVKSNKNDRNDAEAICEAVGRPTMRFVPAKSVDQLAVQAVHRIRSRLVSGRTRLANQIRGVLAEHGVIVARNIAKLRQNLADIVGNRGNGLSDLVRALVGELQQELADLDRRITTYDRRIRELYRGSEVCQRLGQIEGIGPLSATALVAAVGDRQGFKNGRQFAAWLGLVPKQRSSGGRDRLFGISKRGDRYLRTLLIHGARAALGRAGGKQDPRSRWLGKLRQRRHPNIAAVALANKNARIAWALLSNGEAYDPGQTVGSA

SEQ ID NO: 164165 - protein, 307 aa, unidentified
MTAVGIDVGKANLDLAVDGQTGVRRFANTRPGIIKLVRYLQGLEVPQVVVEATGGYEEPVLEACCDAGVWIARVNPRQARNFARATGELAKTDAIDARLLALMARLFADRLRPHVAPPPWQRELRDWLRRRGQVVALLQAQKQQAAMAPQEVRKLVAKTIAALARELAAVDRQMQALIKQHATPALRSSKGLGPVFQATMLALLPELGHLRRQQIAKLVGVAPMNRDSGQGQGKRRIHGGRAPVRVALYMATLSAVRWDPRMKAHYQQLRERGKLAKVALVACMRKLLGIVNARRREELLAGGLFAA

SEQ ID NO: 164166 - protein, 351 aa, unidentified
MPHKLNSAIAVIGIDIGKNSFHVVGHDKRGAIMLRQKWSRGQVEARLANLPPCLIGMEACVGAHYLSRKLQMLGHDARLMPAKYVRPYSKGQKNDFRDAEAITEAVQRPTMKFVATKTAEQLDLQALHRVRERLVSQRTGIINQIRAFLLERGVAVRQGLRFLRNELPHILAAPCDGLSPRMLRVIEDLAGDWRRLDERIEGLSSEIEALARQDKGCERLMTVPGIGPIISSAMVAAIGTGDAFSKGRDFGAWLGLVPKQISTGDRTILGSISKRGNRYLRALFVQAAWVVLVKVGPKHWARYGLKSWIEAAKKRLHHNVLAVALANKLARIAWSVLAHGRTFETSKIQAA

SEQ ID NO: 164167 - protein, 355 aa, unidentified
MKQLCAGVDVSAASLEVAWRGKDGRIVRRTVRNDVTGHRALIKELRRAGSGAPVRVAMEATGIYGLDLAVALDGAEGVEVMVANPRVIANFGKALLQRSKTDVLDAETILMFVERMPFIAWHSPSAAALQLRAIARRIAALTKMASGEKTRRRHAAASEVIGTLLERSARQTAALLEREIAKLRKAALALIAADTQLARRMSLLTSIKGIGEVSAVQILAELMLLTADMTDRQWVAHAGLDPRLFESGSSVRARTRISKAGNHYLRASLYLPALVASRYEPNVKAFREHLSARGKRPKSIIVAVMRKLLHAIHAMFRNDALFDGTKFYRSTPARVQATSGIPPSAIFEVSSALSS

SEQ ID NO: 164168 - protein, 420 aa, unidentified
MLKIVHPICCGMDVHKTFVVAAIAITDKQNVTTYVKRRFSTFNSDLRGLEKWLLSHNCTEVCMESTGKYWIPIFNVLENSCHVVVANPKYVRAIRGKKTDDKDATWIADLFKFGLVPQSFIPPKEIRMLRELFRYRFKLTGHKASEKNRLQNALTVSNIALASVVSDAFGKSASAIVDYILTCDTFDPEHCKSLLHKKLKDKADEVVQSIIGYELRTDQSVKMKVCRKHHDFIDQCIADLDQTISNMAKPYKELIDLTATLPGITDKSATYIISEIGTDMSVFRSSKRLCSWAGLTPQNNESAGKKKSTSVSRAGVYLKPLLVQCANAAIKDKKNPYFRLKYDRIKKRRGHKRAIIAIARMMLTCIYHMLLKKEAFNPKDTNYSEMPDQLYQKHKAEYIKNAIKLLEKEGCVIIPPSVPA

SEQ ID NO: 164169 - protein, 369 aa, unidentified
MNKLDAYIGLDVHKESIAVAIAESGREGEVRFYGNIPNSPAEIIKLVNKLSKKYVETEYTYEAGPCGYVIFRKLQALGQRCSVVAPSKIFSNLNNRKKNDHRDAIALARLARANELTQVWVPDEIHESIRDLVRARHAANKDTKIAKQRIKSFLLKYDINYVGKSWTYRHKLWLANLQFKNEAQQVAFQNYINALNQANNRKEQLEQQILDIYPSWSLAPLVTALQALRGVALIIAVSVVAEVGDISRFDTPKQLMAFLGLIPGEHSSGNSVRPRGITKTGNKSLRFLLFEAAWSYRQRAKVGAYKLQHMPANIPQNIKDIAWKAQLRLRKRYIKLMTAGKKSTVAITAVARELLGFMWAIANELNLAR

SEQ ID NO: 164170 - protein, 315 aa, unidentified
MTNQVVGIDVGKAQLDVGLANEKKVQVWANDARGRAELSDWVVAQKAALVVVEASGGYEAALVSELVSRGVAVALVNPTRVRAFARAEGILAKTDKIDAQVIARFGATMKPQARVRREKSQVELNELVSRRRQLVEMLTAEKNRLQTASPDMQAHVARHLAWLQGEIEALEQQISQAIEANPIWAEMAKRVDSAPGIGPITAATLVADLPELGQLNRQKIAALVGVAPFNHDSGKHRGKRRIFGGRTSVRSVLYMATLSAVKHNVVIKDFYHRLLAMGKLKKVALTACMRKLLVILNTMVKTGQDWKSPLSSPAI

SEQ ID NO: 164171 - protein, 401 aa, unidentified
MLDTRDVAVFLGLDVGKGEHHATGLTPDGKKVVDKPLPNSEPKMRAMLDKLTAKYGKVLVVVDQPASIGALPLAVARDAGCEVAYLPGLTMRRIADLYPGEGETDARDAAIIADAARTMPHTLRSIELDDETIAELHMIVGFDDDLAGEVTRVANRLRGLLTQIHPHLERVLGPRIQHPAVLTLLEQFGSPEAIRKAGRRRLVTLLRPKAPRMAERLVEDIFTALDEQTVVVTGTDAAAVIVPKLAKNLAALLDQRKQLAADIEELLKSHPLSELLTSMPGTGVRTGARILIDVGDATAFPTAGHLAAYAGLAPVTRRSGSSIRGESPSRRGNKHLKRAFFLAAFASLSDPASRAYYERKKAEGKRHKQALMCLARRRVDVLFAMLRDGTFFEPQAVPQAA

SEQ ID NO: 164172 - protein, 369 aa, unidentified
MIVIGADVHKSTHALAAVDASTGQLLGEREIPAREQGHLEALRWAHDLDTEIVWAIEDCRDLSHHLENALLSAGERVIRVAPKLMGASRRGEREPGKSDQIDARAIARAVLREGIERFPAAFLDEDAVEIRLLCDHREVLVNERTRLINRLRINLVILDPELEATIPARKLDYPGQLQRVTRRLRAMPQTARVRIAREQAKRIGVLTRDAEQLKRNLRDLIRVHRPEMLAETGCGPLTAAILIGQTAGAQRFKSDAHFARLAGVAPIPVSSGRSDRHRLDRGGNRQINRALHIIAITRGRLDPGTRAYLQRKEAEGKTRIEAMRCLKRHLARHYHRMLVRLPATAPTRPAQTARGGQRPGIAVYGKIGM

SEQ ID NO: 164173 - protein, 392 aa, unidentified
MKSLIYIGMDVHSKTFSLCAYNPKTRIYSNRIEIENNMKLVKKYAYNLLSEAEDLDTELIFGYEAGCLGFTLADDIKKMGFECRVMAPSTIRIASTDRIRKTDRRDAKSLAEALANDAYSQVHIPDQEDREVQAYIRMREDVQDMVKQTKQRINAFLLKQGKQYDQGKSKWTICHRKWLKEVELTSLYREVLDEYLITLEELEIKVDRYDTRIVEISNQERYQEFVDKLSCFKGFTRPIAMRIVSEIGDFSRFQTAGQFASYLGLTPSEHSSSESENKGTITKMGNSHVRKTLIEAAQSMVRGIPGRKSKILKKRQEGNSSKVIHYADKGNMRIQSKFKRMMNSGKNRNTAITACAREMACFIWGMATGHIEERVDTPIPVINPETGEILVG

SEQ ID NO: 164174 - protein, 361 aa, unidentified
MPMQKYELNFNGENVYVGIDVHLKQWHVCVRTAHVSKKPFSQPPSALALKQYLENNFPGGTYYSAYEAGFCGFSVHYELESAGIRNIVFNPADINDSQKERSRKTDAVDCIKICRNLMKDELKAIYVPSREELGLRGYLGARDTAVKKQRVAKQRIKSLLNRNGVKIPEELFPTNRTHWSRCFNGWLEKVAADLGSGEGYRLIDLLADLHHAHAQVLAAGRRLNDAISTHHLDTNELLLSIPGIGRLTAARICLEVPNVGNFVNSDHLAAYIGFVPDVHGSDDNVYARGITYRRRALLRSAFVESAWRAIGKDPAMGLAYSNYIKRGLKPNNAIIRIARKLVNRVFFVMRERKRYEIAKVR

SEQ ID NO: 164175 - protein, 341 aa, unidentified
MQITTIGLDIAKNMFQVHGIDAAEKVVVRKQLRRGQVIKFFEAVPPCLVGMEACATAHYWARELTKLGHQVRLMPAKDVKAYVKRNKNDAADAEGICEAVGRPTMRFVGVKSAEQQGRLMQHRTRDLLMRQRTQAINALRAHMAELGIVAAQGREGLKELLAIIADERDERLPIDARASLIVLAAQLQALHTMIGSIEKRLIVQHRANEASKRLESIHGIGIIGASAIAATVTDPKAFRSGRDFAAWIGLVPREASTGGKQKLGPISKQGDRYLRRILVVGAHSVLRRAKQSPQKYPWLTQLLARRPFKVVAIALANKMARIAWALLASGGIYRAPRLAAA

SEQ ID NO: 164176 - protein, 430 aa, unidentified
MNNPEQQAGSWLEQRGFGGLDWATEHHSVVVVDPQGRVLEDFEIEHSALGWKKFRERMQPYGSIPFAIETSQGAAVEQLLEAGMQVYPLNPKSAQSYRQRKAPSGVKDDRLDAWSFADACRVDGQGWKALRPEDPLIKELRLLCRDEVALIEQRTAFINQLRHALAEYYPTALEAFEDWGALSAWMFVQRFPTPQALKEAGKRQWEKFLHSRHLWRTESGPRRLELFAHATDLCGSVPMAHAKSQLALSLVSILFALEKQLGIYRQRIEELFGRHPDHDLFGSLPGAGPKIGPRLLSEIGDDRGRFGEEPQPLQCLAGTAPVTRRTGKARTNPPRWPCHQRWACDKHLRHAMHLFAEQTLTRCTWAEIYYHHHRQKGHSHADSLRRLGQRWLKIIFRMWMDRKPYDAMLHNQNQLKHGSWVLQLNPVQDT

SEQ ID NO: 164177 - protein, 384 aa, unidentified
MRKDTRFVGLDVHAETIAVAVAEPGGEVRSLGVIPNRAESLRKLMKRLGPATGLRVCYEAGPTGYTVYWELTKLGIHCDVIAPTLVPVKAGDRVKTDRRDAEKLARCYRAGDLTPVWVPDPAHEALRDLVRAREAAKADQLRARHRLQKFLLRRGVRAPAGIRAWTERYLAWVRKEVRFAALAQQAVLSDYLAEVDHARERIRRLEQAIDEAVGAAPPAMREVIAALQALRGIAKVSAVTIVAEVGQLSRFARPGQLMGYSGTVSREDSSGDRVRRGPITKTGNAHLRRIIVEAAWAYRHRPAVTGALQVRQRGLDAEVREIAWKAQHRLHDRYRRLVGKGKNKQRVVTAIARELLGFIWAIGVHVEGQAQPTHTSVVKTRRVA

SEQ ID NO: 164178 - protein, 443 aa, unidentified
MPDRPVTTPEPVWAAFVALDWGSQKHAWILQPANGGEPEQGFVDHTPEAVAVWAAGLNRRFSGRPVAVALEQKRGSVVNLLLGYAHLVLFPVPASMSASYRKTFVPSGAKDDAGDAGWILDLLLRHRDRLRRLEPDDANTRLLLLMVEDRRQLVDDKTRLTLRLQDCLKQYFPQLLQWFGTVDTPLVADLLKRWPDLQHLRRCHDGTLHTFFLQHHCHDEELFRQRLDAIRTAVPATHDPAVLEACSTKARHLTESIATLRDQIARLERRRDELVADHPDHAIFASFPGAGRATVPRLIAAFGTRRERYESAFEVECDSGVAPVHIASGKTDRVSVRRACQKFTRQTFHEFAGQTIPRCTWAKAYYQAHCHKPEQHHAAVRALAFKWIRILFRCWKDRKPYDEQLYLTSLRRRSGLLGPVLASATCVGWKTVAGFSKLSEKNS

SEQ ID NO: 164179 - protein, 337 aa, unidentified
MSVYVGIDVHRKRSQVAVVTEDGTVQLNKNTVNGTEPLLRLIGDLPAGTPVAFEAAFGWGWLLRLLEDYGFKAHLVHPLRCKAIASARLKNDKVDAATLAQLLRADLLPEAWIAPAEVRQLRALLRHRAGLVRLGTQQRNRIHAVVADFGYDRSGSYLSGPGRGWLAGLDLPATSREVVADCLAVIDGLAPAIDRIDGELRAHAKADPRVKTLTTLPGVGQFTALVMVAEIGDISRFPSARKLASWAGLTPTVRGSDRTVRHGHISKQGSAWLRWVLNQAAQTAKRSPEFAATYAAIAKRRGKKIATIAIARKLLTRAWHLLNEMQATDASMPLRRP

SEQ ID NO: 164180 - protein, 319 aa, unidentified
MAQNDSVVVGIDVAKDKVDACVRSLSLRLTCPSSTQGRRKLTGWLRKHQVNKAIMEASGGYERDWAKLLREAGIEVRIVDPKRVRSFAQSAGRLAKNDKIDAEMIGWFAETFSAAPGQMHDAMQDELAALVKARIGLVELKTRLQSQNEHAAPRPVQKAQARILKSLAAEIAKLEVAISATIEATPQFAERAEIIESVPGFAKTTSANLIAGMPELGLVSDGIAAALMGLAPYDDDSGKRRGERHIKGGRRWVRNAIYMPCLGAATQNNPVLKAFYQRLIAKGKAPKVALTACMRKLITILNTMIARRQKWDPTLYAVA

SEQ ID NO: 164181 - protein, 435 aa, unidentified
MSLGTTVPHAGRSHLKPHTSEACAAFVGLDWADAKHDICLQASGSAHREFLHLDHRPEAIDAWVQSLRTRFHGQPLAVCLELNKGPIVSALRQYEFLVLFPVNPLTVAKYREAFTPSRAKDDPTDAELQVEILLKHRDKLTPLVPQSPTMRALAQLVEHRRRLGGDTVRLTNRLTSALKNYFPHVLQWFQDKDTAIFCDFLSRWPTLKAVQLARRATLERFFRAHHVHAADVITTRIEAIKNAVALTTDAGGIAPHTLLVQALVAQLRVTLQALADFDTAMAQRAQAHPDFPLFDALPGAGAVFAPRLLVAFGEQRERFTSAEELQQYAGIAPVTERSGKKSWVHWRWQCPTFLRQTFVEWAAESLRHSFWAQVYYQQQRDKGKSHQAAVRALAFKWIRSLFRCWQDRTPDDESTSLQALHRRGSSLIQHLAKAS

SEQ ID NO: 164182 - protein, 354 aa, unidentified
MLAELVDHVIGVDPDRDWITVAALDAQTSGVIANDRFPATRDGYRDAVLWADAHSDPAERAWVIEGASSYGRGLAMVLQRNNEFVVEFDHPTRKATKDGAKSDALDAIRAAREALGRDKLNEPRAHDGIREAIRVHTVARAAAVRARTAAINELKAFVVTADEQLRSELRGLRRPKLVVRCARFRDSTNRPIDQRCTRNAMRALARRIQHLTDETAEHDRVLKELIDQAAPQLIAERGIGYVTAAAFYLAWSHPGRCRSEAAFARLAGTAPIEATSGQNQTRHRLCRSGDRHLNRALYLVAVTRQRSCPETRDYMQRRTAHGKTKREATRCLKRFIARRVWRLLEHPKSHLDNT

SEQ ID NO: 164183 - protein, 363 aa, unidentified
MEQFIVCDAHKKYWVFVAVNERGEASPAIRVGHDREQYRQFLERLPAGSQIALEAGGHYYWMVDEMEAAGHQPRFVHPLEAKKRMGKTGKKTDKVDANGLGILLRNGTLPEVWIPTAGLRDQRESLRLRMFLVQQRTRLKNRIQGALARYNIQIAGVSDMFGVEGRLRLGQRLGELPEHTRQSVEQELVTLDFLEVQLADIEKRLEALMKVTAEADLLKTLPYVGRILSMVMRLEIGKVERFATAAHLASYAGLVPRVHASGGHTRLGQICGDVNQYLKWAFIEAGNLVVIHQQHLAGQHVVRLYQRVKRKKNHQKAVVAVARHLAEAAYWILKKQEVYRDPQPKPKAPAQAQAAPALSSTHG

SEQ ID NO: 164184 - protein, 418 aa, unidentified
MERVLCVSLDIHKYFHVVMIHNALGEIVTPTFEIDIFQTGFDQLCQAVDEATVRTKAQVVLTGLEPTSHYFENLARHLRQRPQPVTLINSYAVKKNRDQQMMHHEKDDEIDTAAIGDLLRRGEGTPFKPASGVYLQLQHLDRVRLSKVKIRTMLQNQVLGHLDRIFPGLVIIAKEAKARYTPLFATNFWKCQTMQHLIRVCPDPRQLAVMSPQDLIDAFHVHHYAMGPVTAAKIIAYAQKVLLPDAELIAIRCELLAHDLALLEEVEGHIAQLEDRLRTLLAETPYQIWVKLKGISDIQVASLAAAIGDPANYSYAAQVFRRSGLVSGRNDSGIRQRKGKGKRVVKVGDVYLRRALMNALATLILHQPVLRQYYNKLKKSKPAGVARVATARRATGILWATLRDQQAKTLILKKDAAM

SEQ ID NO: 164185 - protein, 461 aa, unidentified
MLRRQDSERAQKRTPLQGLPVIRRYVAGIDIGSEQHWVCAPTVDGNEREIASFGATTPELIRMAEWLKARQVESVAMESTGVYWIAPHEVLEGQGLQMLLVNARQLAQVPGRDKKSDPTDCEWIQRLHSCGLLRGSFRPAEEVCMLRTLVRDKANLVAERGDWVRRMQKSLDQMNVRVHRAVSDIDGVTGMAILRAIVNGERDAQKLAKLRDPRCSKTEQEIAEQLSGHWREDHLFSLQQALKMYEAVEERIAAYEKEIVRKLGEMEQEQKRGQTPPPLNNPNKAKMIKQRGQEAKRAALFRMSGVDITQIDALGVETVEVVLSEYGADLSRFPTEKQFVSHVTLAPRVAKSGGKPLPKKKRNSASTRVATALRMAALSLRNSQTALGAYYRRIARRIGGDVAVFATARKLATLIYRLLRWGQPYVDEGVAAFEARYQHQRLGRLTATAKELGYQLVPANA

SEQ ID NO: 164186 - protein, 352 aa, unidentified
MKPLYTQTFTAYVGIDWADTKHDVSLQAVGSDQREFACIPHQMHRIDEWAKLLHQRFGGTIAVALELAKGPIVYALQKYDFIVLFPINPLTLAKYRQAFKPSRAKDDPTDAELALDLLLRHPERFAPIQPQSVAMRSLISLTEHRRELVGDKTRLTNRLTNTLKQYYPQALDWFEQRDTVLFFDFLTRWPTPEQAKRARIDSLKAFFNAHNSRRANVIDARLKSIKSALPLTEDLGVITPCRLHALMLVKQLRVTLQAIEQFDHEISELAPTLPDYSLFQRLPGAGEHFAPRLLAAFGEDRQRFQHADELQKYSGVAPVTERSGKKSWVHWRWQCPTFLRQTFIEWAGQTIK

SEQ ID NO: 164187 - protein, 354 aa, unidentified
MQNDRQSSETVILGVDTHLDIHVGAVISQAGKLLGTHIIQTNQAGYLELLDWARSFGSLERAGIEGTGTYGAALTRYLIKNSIYVVEVNRPDRSKRRLEGKSDPLDAENAARTVLSGSSKAIPKMQSGACEALRIISVARRSAVKACTQAINQLRALLVSAPQDVRDKLWKSKPHECVTACINSEVSEHSPLRIALCSTLRSLAKRWMALTEELNELDESLDKLTRKYASNLRSQFGVGPQTAATLLAVAGDNPERLKNEAALASLCGVNPLPASSGKTVRHRLNRGGSREANNALWTIALVRMRSDPRTRIYVDRRTGEGLSTKEILRCLKRYIVRELYPLILSDLAYANRHS

SEQ ID NO: 164188 - protein, 428 aa, unidentified
MEAVVASERTQAVWEAVIERCCGLDVHQKTVTACLLAGALDQQPGESLRTFSTTTRGLLELRDWLEEHGCSHVAIESTGIYWRPVFHILEDTVTVLLVNACHMKQVPGRKTDLKDAQWIARLLRWGLLKPSLIPPRPIRDLRDLCRYRKKLTEQASAEKNRIQKVLEDANIKLASVVSTVFGVSGRAMLEALIQGVMSPAETADLAKRKLRSKIPQLVEALEGRVNEHHRFLMRMQMEHLEYLEKAIAQLHERIDEKIKPYQHEVDLICTTPGIDTVGAQHIFAEIGGDIGVFPSEGHLASWIGICPGNNESAGKRKSGRTTRGNRWLKALLVQCAHGASQTKGTYLKAFYHRVAARRGKKRAAIAVAHKQTAIIYHELSEGKPYQELGENFFDRINQKALEQRLVRRLRGLGYRVDLHPEPVTPQCS

SEQ ID NO: 164189 - protein, 448 aa, unidentified
MAKHSVSQTPAPVAPSQLERRWQREFRQRWQAVAPAQWRCIGIDVGKYEHVAVAYDGLGQLLAQPLRFGIRTADYQAFFAWVAAVTPEPAVPPLFAVEPTGHYYEQLVYELAHRYGPKQVYIVQTTDVARRRADWNQGTFKNDEVDAAVISELLRQGHGRPYHPDEGAYLSLEQLERYRWAREQASTRLKNQIVGHVDRLYPGLVISDKTAAERYLPLFRNLWANDTPRRLLLLYPAPAELRNSGTETLYQRFRTAGYWMTRPYAAKILAAVQALPVPDAELAARRSVFLQQDLASLAYVEGQLAEVASEMVDLLDLTWGVWLRPTGIDPLRLACLVATIGDMRHYHAARQLFGRSGLHSGCHDSGTHQQRGQGERMVKPGDRHLRRQLLRFTLRMIAHYPALQTYHTRLLQRGKSKITANIAVARKLCGMLYALASQERPFDPTRLT

SEQ ID NO: 164190 - protein, 456 aa, unidentified
MSRKRRSSKKTGTPVLHSLNPNAAGVDIGATEIYIAVPADRDPQPIRHFSTFTEDLHAAADWLKSCNIETVAMESTGVYWIPFFQILEARGLQVFLVNAHHVKNVPGRKSDVSDCQWLQYLHSVGLLRGSFRPEQEVCTVRSILRHRDGLVQMASSHVQHLQKALDQMNLQLHHVISDITGMTGLAIIEAILAGERNPQTLANLCDRRSKATESTIAKSLVGDYRREHLFTLNQSLAAYRHYQELIGACDKEIEQYLETFESKADPPEDPKWKSQDGQKTRGGRPAFDLQSHLYRIFGVDLTEIPGVHTLTTQTLLGEIGPDLSRFANAAAFTSWLGLCPDNRISGGKILSVKTRKVKNRAATALRMAAQSLYRSQSYLGHYFRRMRAKLGAPKAITAAAHKLARVIYHMLTTRQPYDETICGQNELQNRQRLEARLRKQARDLGLEIVAARTGAV

SEQ ID NO: 164191 - protein, 390 aa, unidentified
MIYVGIDVAKDKHDCCILGSDGEILFSPFTIQNTLQGFDELYEKIWSLASDMSEIKVGLEATGHYHINLLRSLLDNGLPSFVINPLHTNLYRKGQSLRKTKTDKVDAASIAMMLLTDRTLKPYSDTSYHNEELKSLTRYRFDKVQERARLKTSVARLVSILFPELEKLVPTLHMASVYALLSEFPGASFIAAAHLTRLKHLLNEASKGRYGRDMALVIREAAATSIATAMPAKSLELKHTIHLIKVLSVEIDEIESAINTIMDTLNSPITSIPGIKNRMGAMILAEIGDFSRFDNPDQILAYAGLSPTTYQSGQMTSSYAHMEKRGSRYLRYALFNAAQYVCIWDPTFKSYLAKKRAEGKHYYVAISHACKKLVRVIYRMQLTGEAYRTA

SEQ ID NO: 164192 - protein, 320 aa, unidentified
MNPIKKSSSEHDFCANQLVSVEHASSPFCIGMDLHSDNVVVVIRQTQVGNIHLKGETVFSRAFKINSPSNRLELYKALEPFCALSTTRAVVESTYNWYWLADEFEKRNWNLRIADPSTVSQAKKKYSDDWTDAEFLAEMVRINSIKSYEYLSKHKRAIRDLCRMRQEFVNLRAQPKITIANLYVNQLGDRVKTNALVKVAYEALAENKPIDSDAVISHFDDENIRMRVAMYLKMIIFYDQQIAELDERIESLMKPNAYSKLLQSIKGCGRILSSVIASELGENLDRFPSAKHFVSYSRLAPTSKLSNGKSKGESLSLIHI

SEQ ID NO: 164193 - protein, 342 aa, unidentified
MEQVSVVGLDLAKSVFQVHGVNAQGEAVLRRRLTRGQLLKLFEKLPPCLVGMEACASAHHWARELTALGHEVKLMPPQYVKPYVKRGKNDAADAEAICEAVTRPTMRFVGAKSPDQQATMMLHRVRKILTRQRTQISNALRAHMAEFGITAAIGRGGLERLITVIADQDDARLPDEARACLGVLSTQLEMVKEQILDNDRRILADARKTEAGRRLMKIPGIGPLLASAIVACVPDPATFGGGRSLSAWIGLTPRQNSSGGKERLGSITKAGNTYLRELLVVGAMAVVRRAKQGSTKRPWVTQLLARKKPKVAAVALANKNARIIWAMLATGEPYREPELAAA

SEQ ID NO: 164194 - protein, 331 aa, unidentified
MSTICGVGIDVSARELTVSVASKTAKSFENNAKGHRAISRLVAGCAKGEVQVCVEATGSYSLDLCFHLQGCGLRVMVANPRAVANFAKAMMSRSKTDPMDAGVLREFAERMPFVEWVPPSQAALELRAASRRLDSLSNMLTREKNRLHAARATKTTISIVSDDLKSSIKHFEGRIERLIKKIESFIKTEPLLHAPYVRLQTVRGIAARSAIRLLGELATMPTDMSPKQCVAHAGLDPRQHQSGSSIDRPARISKRGNRYLRSALYMPAVVASQHDPIIKAFYERLLEKGKKPLQALVAIMRKLLHGIIGMFKTGTDFNAQLLFPNIRVEGV

SEQ ID NO: 164195 - protein, 331 aa, unidentified
MFSWLQGVFTMNFFLGFDTAKTKYDVSLVNEQGIEQWADVVGNTVSAVTVFLLTVTGHYSDAVICVVESTGTYHHPLLEAATTLGVPCKVYNPIITKQQIKASVRGKKTDRTDATMIARLGLRGEGRLHTPEPYMTTKYYARGQQRLSDFAGSIKRYESHLNGILETELSQAAKDILASVQLQLKAAQAQFVKDTAAQAPAGLMQRLRTIPGIGPYIAASIIGEIQDIQRFKTAKAITAYAGLDPKIRQSGKTLNSTGRLTKRGSSYLRRSLFIAAGVARQYDPYFKALYDKKRAEGKTYTVAICAVARKLLTITRAVWLSDKDYDVSFWQ

SEQ ID NO: 164196 - protein, 359 aa, unidentified
MKIVGCDFHPSWQQVAVFDAETGEITEHKLMNGDGEAERFYGALEAPALVGIEACGNSQWFIDLLERLGHEVWVGDAAQIRASYVRKQKTDKRDAGHILKLLMEGRFPRLWTPTAEQRDLRQLLMHRHKLVEIRTRVKNGLQHLALNRGVQKKGRLWSVRGRAELEKLPLEGWTARRREDLLQLLAELDRHLNELDEAVSRAAEQHPQARLLMTQPGVGPITSLAFVLTIGDVNRFQHSGQVASYVGLIPREHSSGGRQRLGAISKQGNRFLRQLLVEAAQSVTRLDEGFRRQYQARCHHKPKGVAKVAAARKLTVRLYWMLKQNVGYPEIVHIESSSRVPRTGRGQVATLNERSRIQQ

SEQ ID NO: 164197 - protein, 349 aa, unidentified
MDLFIALDVSLASTALCALNAHGKVVKEAKVDSEPEALIAALRALPGDVVAMGLEAGPLSQWLHRHMTEAGFPVVLLETRQVKGALKAMPIKTDRRDAEGIARLLQMGWFRPVHCKSVSAQEMRAVLSTRKSLQQTLINLELSLRGVLRNFGLKMGAVTKIRFEARVRELVDGNPMLERAAAPVLRAREELRKELAGVEKLLRDLAKTDPDCRLMMTMPGVGAVVALTMRTAVDDPERFRSSKDIGPWAGLTPRRTQSGERDVIGQITRAGDAALRTALYQAANAVLCRSAPSWLKAWALRVAARRGKKRATVALARRIGVVLHRMWRDGTEFRFTRDEAMAAMTRHTC

SEQ ID NO: 164198 - protein, 351 aa, unidentified
MMIIGVDYHPSFQTIAFLIEETGEYGEQELNHSDGEAEKFYRELKQRGTSVRVGLEATGYSRWFERLLAELGFEVWIGDAAEIKTKRVRKKKTDREDARLMLKLLLENRFPRIWVPSPENRDLRQLLWHRHRLVQMRTRIMNQLQAVAMNEGYRWKKKLFSAQGRALLEKLSLAPWASRRRKELLELLDQLDPKIVELTAAVEHEAKKRPEVVQLMTHPGVGPITGLAYVLVIGTPERFPSGKQIGSYVGLIPCENSSAGRQRLGHISKQGNTLLRFLLVEAAQAAARCNPDWRRRYVHLMMRREKRIAKVAMARKLAVRLYWMWRNGWDHSQLVEFGSNAGKLVISHGVK

SEQ ID NO: 164199 - protein, 385 aa, unidentified
MAPTRMPEAVIGLDVGKSSHWACVATRDGEVLLSAPVANREGDLDSLFGRFPDALVVVDQSRNIGALALARARVAGMSAAYLPGLAAHGAARLFAGDAKTDERDAMVIAKTALGIPDALLPVGDPGPTIAAARALAAQRNFLTCENTRNKNRLRSILLESCPAFEALVDLSDGPQLRLMASLGGAWSVADAGPRRAAALTRGAARGKIEALVRSTASSTRPDAAAVAAEDRAVKLLARRISENSAEIEAITAEISNLLEGDDTYRCLLTVPGIGPKTASELAISIDIEDFPSHDRLASYCGLAPRNRQSGTSISSVTASRQGNKRLKNLLIFSCSCLTRTEGRWGDYYTRCRERGMSHGKALKALARKRLKVIYAVMRDRVPYAA

SEQ ID NO: 164200 - protein, 340 aa, unidentified
MEHVAIDLGGRESYVCVRSSTGEIVGERRVITAALPDFLAGRAASKVVVETCAEAFSVADAALAAGHSVSVVPSILVRALGVGAHGVKTDQRDAQNLSAASVRMNLPSVHIPSAQSRERKSLCGMRDALVASRTQLLNTVSGWLRREARRPRSGKTETFVVRVRAMLGDSIPSFVERQLRTITMLDKEILEADKDLLLIAKNDSDCRRLMTVPGVGPVTAIRFCATVDDAKRFATSAELQSYLGLTPGESSSSSKLRKTGITKAGPTALRATLIQAAWAATHSRSVHPMLEWHREVEKRRGKRTAIVALARKMGAILFAILRDGTFYDAKHKAPRELASR

SEQ ID NO: 164201 - protein, 366 aa, unidentified
MKISPVAIERIQIFKESQRTIGMDLGDRSSQYCILNEAGEVIWESKLPTTPKGIEEVFSRIPRSRMALETGTHSPWVSRQLTELGHEVIVAHARNVRLIGESSRKDDRLDARTLARLARIDPGLLSPVRHRSAKAQIHLTVIRARATLVSARTALVNAARGLTKSYGARLPKCGSEQMNREIAPGLSQELREALDPLLAEIESLNECIAEYDRRIEKVAKEAYPEAALLRQVKGVGPLIALTYVLTLDDPHRFRRSRDAGCFLGLRPGRRNSGMSEPQMHISKEGDRYLRTLLVQGAHYILGPFGQDSDLRRWGLKLAKRGGKNAKKRAVVAVARKLAVLLHKLWISGEDYEPLRNNNHKVVAAVA

SEQ ID NO: 164202 - protein, 456 aa, unidentified
MASRKQKAAQVSPALPPQLATANLHAAGIDSGAEAHFVAVPPSDDPQPVRSCGAYTADLEALADWLATCGITTVALASTGVYWIPLLELLETRGFAVLLVDPQQVQKIRGRPKSDVYDCQWIQRLHTFGLLARAFRPADQVCGLRSYRRHRAMLLTYAGQHIQHMQKALTQMHIKLQHVVSDLTGVTGMAIIRAILAGERDPVTLARLRDYRCQHSEETLAKALYGQWREEPLFALAQAGALYEVYHQQMLEGDRQIEAHLSTCAEHSPDQAPPSPPTRKRNQPTFDVRGSLQRVTGVDLTTIEGIDDTTALIVISEVGLDMSRWPTVKHFTSWLGLCPHQQVSGGKVLSRRTKSSANRVATALRLGAACLHHRHSALGAFFHRMKARLGTPKAITATSHKLARLIYTMLKHGTTYVQRGMDDYEQQYRERAVQSLTRRAKAFGYTLVQTPVGTHS

SEQ ID NO: 164203 - protein, 355 aa, unidentified
MVKVSKNGGEKMEKPSYFIGVDMSSETFTASVGTYPWRVVGSPESFENSAEGFGNLLEWLQKHGYKPDESIVCMEATGVYGQPLAYYLVAHNYFVAVEPPLKVKRAFPTHGHKNDITDSENLAEYAYRFFDELHLWQPPDNVLKQVKTLLKTREQLTRNLTAYKNTLKVLKREVVRTPTAEKMYEGLIGELKSLIGKIDEEIRSLMGKHPFFNPMLNLLLSIPGVGLQLASYVIVITQGGKREPKSRELAAYIGICPYEHSSGKSVYRRPHSKKNGSGSIRKLLYLSSLSLRTHEYYFKEYFLRKALQGKPKRLLINNISNKLLRIICAVMRSGRPYIPGYMSLNPVALRVKKCA

SEQ ID NO: 164204 - protein, 338 aa, unidentified
MELYAGIDLHSNNSVVSVLDEQDRVGFAKRLPNELAAIIVALRSCPSTPVGVEVESTYNWYWLVDGLQDAGFVVHLVNTAAVKQYEGLKHSGDFSDARHLAHLMRLGILPTGYIYPREQRAVRDLLRKRSQLVRQRSTQILSMGNLVARNLGTHAGGNEIKRWTSEHIDAMPLLDEQKQALKANLAVMRCLDDQVDALERSILAKAKLREDYQALKTVSGIGQVLALTIALETGDVGRFDSPGNFASYARTVDSRRESNGKKKGEGNAKCGNKHLAWAFIEAAHFAVRYDAAIKRWYQKKCSSSLSVVAIKAVAHKLARACYHVMKDGKPFDVSRAFG

SEQ ID NO: 164205 - protein, 417 aa, unidentified
MKKHSNSAKKCEPSIKCAQPRVSVRQDSREVMTELVAQLSKQLDGERLPVVELEDEGRSALCPNLNGLTVGVDLGDQWSNYCILGLSGETLSEGQIATRREEIAEFFQGMAISRVVIEVGTHSAWVREVIAGLGHEVLVANPRMMESSKRRRRKNDRIDARKLARLGRVDPKSLYPMQHRSSQVRADLLVLRARDALVASRTELINTVRALVKTMGGRLSSCSSVAFWKKAEMEIPTELRETLQPLLRMIATLNEEIKSYDQKIEKLASEKYRHTQLLRQVTGVGPITALAYVLTLETPLRFARSRDVGPYLGLVPKQEDSGDSQPQLGISKAGDQMLRKLLVGSAHYILGPFGPDTDLRRFGMKLCERGGKNAKKRAVVAVARKLAVLLHRLWVSGEIYVPLGYTSTASTAQPAAA

SEQ ID NO: 164206 - protein, 345 aa, unidentified
MQTVTTIGLDIAKSVFQVHGVDAQGKMIVRRQLKRRCVLAFFQKLPPCLIGIEACASSHYWSRELQALGHTVRLMPPAYVKPYVKRQKNDCADAEAICEAVTRASMRFVATKTVEQQSCLMLHRTRHLLIRQQTAVINAIRAHFAEFGIVAPVGRTGVEELLKVASDGNDKRLPDVARVCIAALGAQLQMLKARILEFDRLIMAWHRSNQVSKRLDEVPGVGPALATALVGSIADPKAFRSGRDFSAWIGLVPKQHSSGGRERLGGISKQGDRYLRSLFVAGALAVIRYAKKRGSKHRPWLAALLARKPTKVAAIALANKIARMAWAMMAKGERYKQPVALAAAW

SEQ ID NO: 164207 - protein, 364 aa, unidentified
MSSVSHRSLTHLGMDVHKDSISVAILRPNDSIDVERLFHDEDSVRRFIARMGDPRQLTACYEAGPTGYELSRQLEHLGVRCRVVAPSLIPKAPGDRVKTDRRDCRRLARLDRAGELVAIRVPSPAEEAVRDLCRARGDMVIDLDRARRRLGALLLRHDRIWRGGSNWSLKHEQWLLAQRFDDPALAATFSQYRSVVEERRLRLVAVESDLLAYCDQDPYAEAVHRLCCYRGVDWLGALTLVSEVCDWRRFAKASSFMSFVGLVVSERSSGEHVHRGHITKAGNEHLRTQLIESAWAYQRGPYVGARIAKAQERCGPKTRERAWKAQVRLCGRFRRLAARKNVKSVVATAIARELAGFLWGEMTA

SEQ ID NO: 164208 - protein, 413 aa, unidentified
MEDLLTCCMGLDIHKDTIVACLLVGESNTKPEKEIRTFTTLIPGMQELRKWVEETKCRHIAMESTGIYWQPIYETLEDCFNSEIRLLVVNARHMKNVPGKKTDMRDSEWIATLLRAGLLNGSFIPDKEIRELRHLTRYRKSIVRDVTSQKNRIEKFLQSSGFRLSSFITDIFGVSGKNIMRHLMTHGSMTIEALDICLKTQTRKNIKAIMIAVNGTLSLHQREFFKMMFIHLEQLEKHRKEVENSINAFIKQFSEALSLLCSILGIDVTAASAIIAEIGVDMSRFPTSEHICSWAGLAPGNNESAGKRKAVAVNKGNPYIKSMLCEVAWVIAGKRKTYLSGWYWKIKQQRGAKRGIIALARKLLVIIYTIIKSKNPFDEFAFEQRRLKCQQKRTSKLIHELTRLGYQVERTAV

SEQ ID NO: 164209 - protein, 342 aa, unidentified
MSAAFIGLDLAKSVFQVHGVDAQGKVIVTKRLRRDAVLAFFANLAPCVVGMEACAGSHFWAREIARFGHTVRLMAPQYVKPYVKRQKNDRADAEAICEAVQRPSMRFVAVKSEDQQSTLAIHRVRETLVGQKTQLINALRAHLAEFGIVAPQGAGKISQLTAVVADLEDSRVPALARSALQGLVDQLRDTERRVEDLDARLAEQARENKVCQRLTTIPGIGPITATALVATIGDAAVFESGRHLAAWLGLVPRQHSSGGKERLGGISKAGDGYLRRLLVHGARAVMRWQGKTSPWLAGLLKRRPFNVAVVALANKLARIAWAVMTRGEDYRKPAVTTEPATM

SEQ ID NO: 164210 - protein, 411 aa, unidentified
MQVVHERCCGLDVHKKTVVACILITLANGEVQRHIRTFSTMTAGLLALSDWLESLAVTVIAMESTGIYWRPVFNLLEEGRSVILVNAQHMKAIPGRKTDIKDSEWLADLLRHGLLKASFIPPAPIRELRDLTRYRKNLVQERAREVNRVQKVLETANIKLSSVATDVLGKSGRDMLSALIEGTTDAEILAELARGKLRKQLPQLQQALDGRVQAHHRLLLKHILAHIIFLEETLEQLQQEIEQHLCPFEETMTLLMSIPGIAALAAAAILAEIGDDMTRFPSAKHLASWAGVCPGNKQSGGKRLSGKTTQGNATLRAILAEVVWVISHMKDNYLSAQYHRLARRLGKKKAVVAVSHSLLVIIYHVLSTKQPYRDLGADYFEQRDSTRLTQRSVRQLEALGYTVTLVPKEVA

SEQ ID NO: 164211 - protein, 347 aa, unidentified
MKFYNKQHKFYCGIDLHARKMYLCIMDQAGEVRLHQNIKTDREVFLKLIKPFREDVVVAVECMFTWYWLADLCSEHGIPFVLGHALYMKAIHGGKAKNDKIDSHKIAVLLRGGMIPMAYTYPAKMRATRDLLRRRNHLMRKRAELFAHIQNTRSQYNLPESLGCIAKPQNRHGIVERFKDPSVQKMIDTDLGVIKAYDPIIAKMERDIIKMANNHDPVAYALLKSIHGIGRILGLVILYEIENINRFPTVQNFASYARLVKCAKESNGKRHGTSGKKIGNAHLKWAFSEAAVLFLKGNEPGKKYLNRLTNKHGKGKALSILAHKLGRAVYYMLKNKKPFDQNKFLGL

SEQ ID NO: 164212 - protein, 420 aa, unidentified
MEMVKYDKVIGLDVHQGVIVCCAIWTEKNALRVEKNSFKTFRNDLRQMASWCASHSPDLVLMESTGIYWKSPYAHLEKAGIKAAVVNARQVKQMEGKKTDIGDAEWLAHVGRLAVFNRSFIPSKQYQDLRVPSRYLLKLRNQLSSEKNRLAKVLADAGFRLNLVFSRLGGVNAQRVIDGLMTGKRPEEIMASLDVKRLKASEKDLRSALDGELSDEHLFTLKEITAHIHYLECESERLQRHLTEKVIGLHEHALMLLQTIPGIDEQSAVQIIIELGGDNLSSFRTASHLASWVGVCPGNNESAGKRKHGHIRKGNCYLRRILCECANAAVRSKGTTLQSKYQSLRIRKGTKRSLIAIVHKIVRLIYIVFEKKEGYRDPKIDYDEQNVLKNGKRWMQKLIACGKWQINAIDRETGECFQSA

SEQ ID NO: 164213 - protein, 340 aa, unidentified
MHKWSEEVFLGCGIDVSAAQLVVALEGEGSRGLQRSFPNRASGHQALILWLQNRGTRIRVCLEATGLYSLDLALALHRATGIEVAVLNPKKVNRFAATLCRNKTDPADAQVLAEYARRMPFQSWHPPQAAALELRAITRHIAALTQQHTQQSNRLHALSASSASSRCVQQDLKRSLRDLERRTEKMRRAALALIAQDTELRPRFALLLSMPGIAEVSSLNLLGELALLAPTLSVRQWVAHSGLDPAHHDSGTSVHKRARISRAGNRYLRRALYMPALVAARHDPHLRAFYQTLLARHKAKLQALMAVARKMLHAIFGMFRGLTEYDGARLFPVLELAVPA

SEQ ID NO: 164214 - protein, 400 aa, unidentified
MLSIGIDVSKGKSTVCGMKPGGEIVYTPFEVQHTREGMSELVSLLRSSGEEVRAVLESTGSYHCPVVTALLENGIFVSVVNSLRMKRFCSQSIRKVKTDRIDAMQIALYGLAYWQELQPTRLPEDTYRELQLLARQYYQMTSILIKAKVDFNAICDQVLPGMQELMNDHAGRHKLSDFVLQYCHTTHILEMGETRFRKDYCKWAEKKGYRNCERMAALIFATAQNGIPVLPNAPSTQIVITEAIRVLHTVEASRDAILTQMQALAKTLPEYSLVREMPCIGDTLAPRLIAEIGDVRRFHSKRALIAYAGIDAPPYQSGKFCANNRHISKRGNRYLRKTGYEVMQSYVMHKPANDPIFTFIEKKRGEGKSGKLAMVAGLNKFLRVYYGKVTELYRSLPAIE

SEQ ID NO: 164215 - protein, 341 aa, unidentified
MNQNYSISYAFFVGIDMSKEKFDVGILNSNGEKIAHKVFKNNYLGFEDCLIWIKSLVGDEQTIFVMEHTGLFSRLLWFFLQDNSCSLWMESGFEVKRGMGLAKGKNDKKDSYRIAEHALNRRHKIKITPNYDEDLVLLHDLLSNRNRLVTDLNRLETPLAEMKKHGNKRSYEALVKVNASAIKGLKISIKEIEEAINELISTQEEWQKNIELASSVKGIGKWTCLWILVYTRNFSKEFNSRNFASMAGVAPFESSSGSSVRNGSHNSHFSHKFLKGILHTAAMAAIRFNPAMKEYKERKKKEGKKGFLVMNNIKNKILHQVFAVVRSGEMFKLDYKHPMAA

SEQ ID NO: 164216 - protein, 351 aa, unidentified
MPIVIGVDAHKRTHTAVAVDRATGQQVDVITVPARVKGFERLLAWARRLDTDRVFAIEDCRHVSGSLERYLIPAGERSVRVPTKLMAESRRVGRERGKSDPIDALAAARAAVREPDLPTARLDGPERDLRLLVDHRETLVWQRSEAQSKLRWLLHELDPELEIPLRTLDRFVTLDRVAARLDEMLLDVRVEICRELLATIRALTTRVNALETRIKTMTEKLAPGLLELPGCGPLTAAKIIGETAGVGRFASEAKFAMHAGIAPLPVWSGAKTRFRLNRSGNRQLNAALHRIAVTQIRMHQPAKDFMARKISEGKTKTEALRSLKRHIAPKVYDTITRHQLTTPAGLQSAAA

SEQ ID NO: 164217 - protein, 333 aa, unidentified
MEHWIGIDVSSATLDFALLDGKGTHLESVQIENDRKAVMKLMGQWSKRHGVEVGKSLICLEATGHYTLMMLNLIVGQQWHAWLAHPNDIQQSMGIKRVKNDKVDALRIAQYARTFHEKARLFTAQNRKLDRLKHLITRRNHLVRSRARHRTHITDLNRYMDRQLRTEFDRIDKRQIKLEDQLVAHVDALILAEIRTDPQTERQYDLLRTIPGVGPQLAAYLVACTDGFARFNTPRQLSCHAGVAPFERSSGSSVRGRTQVSHQADKSLKTLLHMSALVSVREPGELRQYFERKRAEGKKPILVVNAVRNKLVHRVCAVIRNNRPYERRPITTT

SEQ ID NO: 164218 - protein, 337 aa, unidentified
MRRSDVMEQGVVIGVDVSKHELVMAVHPTGDTWTSETTAIAIEAVIARLQTYQPRLIVMEATGGYELPLAAACAAVKLPIAIVNPRQVRAFAHAIGRTAKTDAIDASVLALFGARVEPTPRAVADADTQALAGLITRRRQLLEMVGAERRRLEQAPPTGPITRDLRNHIRWLERRVADVDEEIGTAIQQSAVWRVSDDLLRTVPGIGPTTARTLLAELPELGRLDRRAIAALVGVAPFNCDSGQFRGRRRIWGGRASVRASLYMAALVASRHNVVLAAFYRRLRDAGKPPKVALVAVMRKLLTILNAMMKHHCRWNPKAASTPASTSRPARGVAVLA

SEQ ID NO: 164219 - protein, 326 aa, unidentified
MNKDIKYFGIDISHLVFDVTDSNGNYYQFKNNGSGFKKFVKLLDFASHCVMEATGYYHYQLAYHLLESGIKVSVENPLAVKPVKRYIQMRLSKIKTDKSDSKLISEYAQQVELKLWKGNTKVELECLQITRALVIYTKQSTMLKNKLHGEAVLGEPSKAVVRSLKRLLKQLGNEVKALEDRLLMLVKQAHQDVLTRLQTIPGIGPKTAIMLVVLTGGFERFNSAGQLCSYAGLTPVIRQSGSSVKGRARISKIGNEKLRSLLFMCSFNACKVNRACRDLYERIVAKGKSKKLALIAVCNKLLKQAFAIAKSGLVYDDTYRSTLVKN

SEQ ID NO: 164220 - protein, 412 aa, unidentified
MKVAGIDVHKKVLMAVVVDASAPEEKPLRRRFVTMPSELHRLLMWLREQGVEEVVMESTAQYWRSVWLELEPHMRLHLAQAFSNRAPRGRKHDFKDAERLVRRLIANELILSYVPNGEQRIWRSMTRMKLQLTRDRVRLQNQIECLLEEMRIKLSIIVSNLLGASGLRILHALAKGETDPKKLAQLGDERLQCTEEQLVDALTGRVQPVHGQMLGLQLQRLQLIDEQMARLNSMIAEAMKPHQDAVIRLAEVPGLGVDSAQQIIAEVGAQARTFQSAAELTSWVGTCPGKEESAEQNRSSRSAKGNKYLRRVLNQAAHAAVAKKGSHFQVVFRRLLPRLGYQSAIWAVAHRICRVAWKILHEGVRFIEQGCEPDPRTKKKRAQMLARALRKLGYEVTITPINQLAVRPAVQS

SEQ ID NO: 164221 - protein, 381 aa, unidentified
MLDQTAHNSVPTVYAAIELSKKSWVVAIVQPAKGQPSIYRIKGGAFSDLVMRLRTATPGGERLLVCYEAGYDGFWLARSLQTEKIDCRVLDPASLQVNRRARRVKTDRIDVLMLVRALIAVERGDRHVCSIVRVPTVEEEDARRSHRERQRLIRERTAHINRIKGLLFGQGIRGVEPRLRRSRIDFSDLRTGEGLPLPARLRAELKREYARLDLVETQLRVTEAERDTADAQDPSIEYKRNMLIQLRGVGPASAAILTREIFGRRFANRRQLGSYLGLTPSAYDSGSTTRCQGISKAGNSFARRVMIEVAWLWRKYQPNSALAKWYEERAAGQSPRIRRIMLVALARKLIVALWRYVEIGLVPAGAVSCANIGAALDAAAA

SEQ ID NO: 164222 - protein, 347 aa, unidentified
MEKSVLKVSVGIDMAKDTFYCAIIYLMFDQITKCKGTRKFSNTVKGFDEFMKWVDRKVKVDNTISYTMESTGVYYENLACFLYHKDLTVNVVLPNKAKKFAESLDNKSKTDKLDALSLGRMGAVLILRSWNPGSKIYVKLKKYTRERETIQNDRTRLKNMIHAENHSAFGESVCIKRFESRLKMLDRHLKAVDKDIRRLLNSDTEVQIKVNKIKTIPGISTTTIAVVIAETYGFAAFTNMKQVASFAGYDIVFKESGQYSGKTRISKKGNSHIRRALYMPTLSAIRYNETYNEFYNRLNERKNNGLISGTAVQRKLICLMYTLWKNDTEFVPNYKKLKSCVSNVNAA

SEQ ID NO: 164223 - protein, 422 aa, unidentified
MSSGSRRCIGLDVHREFAQVAVWQNGTVTQAGTFATTPEGVREFAAGLGRADEVALEATGNTWAIATLLASRAGRVVVSNPAKTRAIAEAKVKTDKVDAAILAQLLAADFLPPVWMPDAATSALHRQVLRRAHIVRQCTRLKNQVHAILHRNLVPRCPAADLFGIKGRKWLAAQDLPPDEQAAASALLRQLDFHAQELVLIDRDLGQAALARPEVLRLMTIPGVDATVALSIVAAVGDFTRFRTPERLVAYFGLNPRVRQSGGQPASHGRITKAGRAHARGMLVEAAWSASKAPGPLRAFYQRVRARRGMQVAAVATARKLAVLCWHLTIKGEDYAFALPSLIAHKQRKLELRAGAAPARGHKGQAARYALAAVRAAERDLAAQSEAAYRTMVAAWQPARPQRKNATGAAASKRTRLIKPAG

SEQ ID NO: 164224 - protein, 366 aa, unidentified
MNKGTTFVALDDSKRKLVVGILRPGATEPELREIANEPKLVRRLFERLQREGPVAACYEAGVSGYDLYRQITGLGVACQVIAPALTPRRPGQRIKTDKRDARKLVRLFRAGELTAIHVPGEAEEGVRDFLRCREDVRRDVGRWRHRVVKFLDRHGRRYLAGRNWTQRHWTWLRSQRFELPALQRTLEVSLFTLEQALTRLAELDREIDALAQTEPYRERVGWLRCFRGIDTRSAMILLAEIGDFQRFQRPRELMAYLGLVPSEHSSGDRERRGGLTKAGNTHARRVLVEAAWHYRHRPGLGRSLTARSHGQPAPCLTHAWRAQQRLHRRYRHLVGHGKRPPVAVAAVARELVGFIWAAMTQRPMVA

SEQ ID NO: 164225 - protein, 414 aa, unidentified
MNLFVGLDVSSETLEACFLGDQIDQVFLRTRFTNDTVGANQIKNEIIKLNDENHFKKIMIGMESTSLYSFHPAIFFQNDQELKALNVKTVIEDPRRVRKYAESYDTDKTDYNDAFIIADYLRIGRGTTSPMREEKFMALQRLTRSRYQLIQQLTETKQHFLENLCYKVNTLSRELDSVQVFSATTIELMTEELSVDDLANMPLEDLAELVQKKGHGRFKDPEVFAKTIQKACRNSYRLDKAMADSIDTILGILAREMRGLTKSIKDLNKAIEDLVSTTPEYKCLTSIPGVGSVYAAGILAEIGQIERFPDQAQLAKYAGLTWKRKQSGNFESENTKLSQTGNRYFRYYLVEAANSVKNRVPEYKTFYQRKYAETPKHKHKRALVLTARKLVRLVDTLLRNHQLYMPPKEAKETE

SEQ ID NO: 164226 - protein, 391 aa, unidentified
MICVGIDVAKDKHDCCILDSEGTTLADCFTIPNNMDGFKQLLQTIRNCTKKSDKIKVGLEATGHYSCNILGFLLDNDLPVYVMNPLHTNLYRKSLSLRKTKTDRVDAKTIATMLLSDVDLKSYTDTAYHNEELKSLTRYRFDKVQERAKLKQSVSRLVTILFPELEQLVSSIHGTSIYALLSEYPGAKQISEAHLTRLANILVTTSRGHYRKDRATHIRDAARTSIGSVMPAKSLELKHTIKLIQELTSEINEIEDAIRKIMDELKPPILSIPGMGFYSAAMILAEVGDFSNFNSPDKVLAYAGCSPSTYQSGKLTNCYAHMEKRGSRYLRYALYTATKYVCYWNPVFTEYLTKKQAEGKHYNVALSHATKKLVRLIYALQKSGKAYLAIT

SEQ ID NO: 164227 - protein, 393 aa, unidentified
MICVGVDVAKDKHDCFILSSEGEILADVFTIQNNAEGFDTLLQTIRRCTCPADKIKVGLEATGHYSYNILGFLIDKGLDTYVINPLHTNLYRKSLSLRKTKTDRVDARTIAAMLMSDVNLKSYTDTAYHNEELKSLTRYRFDKVRERAKLKTSISRLVCILFPELEKLVPSLHSASAYALLSELPGAKQVAGAHMTHLKAILCNASKGRYGRDMAEAIRNAARCSVGSVMPAKSLELQHTIRLIRELDSEIQDIEAAIQTMMEEIASPITTIPGIGVRMGAMILAEIGDFSRFDSPDKILAYAGMSPSTYQSGQMSLTGAYSHMEKRGSRYLRYALYNATKYVCLWDPIFSAYLAKKRAEGKHYNVALSHAAKKLVRLIFAMERSRQPYSSAA

SEQ ID NO: 164228 - protein, 328 aa, unidentified
MSAIHIGIDVSKRSLVVAVHPSGDRWTSDTTAAAVAALVTRLAGLAPRVVVIEATGGYERALVAALAAGEVPVAVMNPRQIRAFAQALGRTAKTDAIDAGLLAEFGARLDIAPQPPADPATQALAALVARRRQLLEMIGMERGRLEHAPPTGPLTRDLRRHIRWLERRVIDVDDEIGTSIAAHPTWRIHDELLQSVPGIGPATARTLLAEVPELGHLDRRAIAALVGVAPINCDSGQHRGQRHIWGGRRSVRTALYMAALVASRYNPTLRAFYHRLCAAGKPKKLALVATMRKLLTIVNAMLRQQTPWTAQVASTPVSPAGPARAATV

SEQ ID NO: 164229 - protein, 336 aa, unidentified
MYYCGIDLASKTSALCVMDGTGRIAMERTCPTDADGFRQALRGYPGLRCVIEACPLSEWVAALLESLGHEVVVVDPRKAKAVIRTKKKTDKLDARNLARMVATGWYTAVHRKSAQARLLRSQLVARKGLVVAQLQQSNRIRGLLRAHGVRLGPVASGEFERRVIESAQRHCAGLLPALHALLEVWATTRAALAQLTKHIKGLIRQDAVCGLLMTTPGVGPLVSCAYVATIDDPRRFRRGDQVAAYVGLVPSVHQSGDTEYRGRITKEGDGLVRYLLVEAAHVLLTRAHSDSALKRWGKRIEKRKGAAKAKVAVARKLAIILHRMWLTGQAFDAQMA

SEQ ID NO: 164230 - protein, 427 aa, unidentified
MQYALIQVLPGVPAGGVFAGIDWAAVDHVACVVDMAGRVKDRFSAAHDRAGITAMITRLRRNKAAEVAIERGGGALVDALLAAGLTVVVITSRQVKNLRSRYGASGAKDDRFDAFVLAHTLRTDRARLRPLVPDTAVTIAVRAAVRARRDLVAHRVAACNQLRAHLAGAFPAAVGLFYELDSPISLAFLARFGSCDAAAGVGEQQMAAWLETVPARGNTAPASVLCARLRAAAPGATGAAGTAHAGVTAALTATLSALSAQVKALETQIAAQLAAHPDGHVFTSLPRAGTLRAARLLAEIGDCRSRFPDPQSLAGLAGVAPVTRRSGKHASIEFRWAVNRQLRDAVCDFAAGSRHASPWAAAIYDAARDRGKDHPHAVRVLARAWIYVIWRCWHDGAAYHPAKHDALQHLLDRQHAEGAGPVPQEDR

SEQ ID NO: 164231 - protein, 350 aa, unidentified
MKFYTNSHKHYCGIDLHTKKMYVCILDSNSNILIHKNIPTSEKAFLKLIQPYREGIVVGVECTFSWYWLANLCLQENLAFILGHALYMKYMKCIHGGKAKNDKIDSEKIARIIYGKNFPLAYVYPPEMRAVRDLMRRRSYLVRIKSEIQAHIKITNYQYNLPTIDKNLVHKSNRLGLEEHFKDPTVRLNVETDIAVMDALHDDINRLNNYILKHARGIKSRALYKLKTVRGIGDVLALTIIYEIHDISRFPTVQQFCSYSRLVKCSKESAGKKLGSSGSKIGNPHLKWAFSEAAVLFLRDSDRAKAYVEKLAKKHGKAKALSILAHKLGRAIYFMLKRDDAFDENYFFRS

SEQ ID NO: 164232 - protein, 388 aa, unidentified
MIYIGIDVAKDKHDCFITNSDSEVLFKAFTIFNNLDGFNDLYQKIESVMDDVTKVKVGLEATGHYSYNLLGYLIDKGLPTYVINPLHTNLYRKSLSLRQTKTDKVDARTIASMLMSDVNLKSYSDTSYHNEELKSLTRYRFDKVKERAKLKTRLVCILFPELEKLVPTLHMASVYALLSEFPSAKHVATAHLTRLTNLLSESSKGRYGKDTAITFRDSARASIGSNMPAKSLELKHTIKLIQELDSEIDEIENEIKIIMDEINSPILSIPGINYRMGSMIIAEIGDFNRFDSPDKILAYAGFSPSTYQSGQLDGAYAHMEKRGSRYLRYALYNATKYVCHWDPTFAAYLAKKRAEGKHYNVAISHAVKKLVRVIYHLEKTNQQYIKAV

SEQ ID NO: 164233 - protein, 326 aa, unidentified
MEHELHYIGIDTAKEKLDVDVLRPDGRHRTKKFANTTKGHDELVSWLKGHKIDHAHICIEATGTYMEPVAECLYDAGYIVSVINPALGKAFAQSEGLRNKTDTVDARMLAEFCRQKRPAAWEAPHPLERALRALVVRHQALTDMHTQELNRTETAREVQRPSIDAHLLWLEAELKRLEKQIKDLTDDDPDMKHRRKLLESIPGIGEKTSAVLLAYIGLKDRFAHARQFAAFAGLTPRRYESGSSVRGASRLSKAGHVSLRRALYMPAMVATSKTEWGRVFRDRLAANGKKGKVILGAMMRKLAQVAYGVLKSGVPFDASRHNPVAA

SEQ ID NO: 164234 - protein, 369 aa, unidentified
MADDILFVGLDVHKKTIAVATVLEKPGESCRYYGSVPNTPDALRRLCRKLQADDASLYFCYEAGPCGYGVQRLLTCLGHRCDVVAPTLIPRKAGDRVKNDRRDAMSLAQNLRAGHLTEVWVPDEAHEAMRELVRLQALAKRDIRRARQQLLSFLLRHGVHYPGRHWSKAHRRWLSDLSFEYPAQHLVLEELVQRVERAEVLGERFEQSMVELLPRWALAPVVEAVQALRGISILNAITLIAEIGSFSRFDNPRQLMAYLGLVPSEHSSGSTVRRGPITKTGNSLARTCLVEAAWTYRFPARVSRIILKRTEHLPEPIRAVGWKAQVRLCRRYRHLMATGKAAPKVVTAIARELVGFIWAIARMVEPVRT

SEQ ID NO: 164235 - protein, 414 aa, unidentified
MTLFVGIDWGSKVHAVCVLDDQGKKLLEQEVQHHGDDVHAFIAKLRDLAGNDMSNVSAAMEAPRGVMVEALLETGANVYSLNPKQLDRFRDRYSVSGAKDDDLDAFVLAASLRTDGKLYRPISIPDAELMKLSAWCRSYEVATQQVLSLANQLGEQLRRYYPQLLALGDWHDEPWLWLLFKAAPTPERAAKLTLSKVDNILKAKRIRRVAAKQVRQQLQQTPLPVAAGVADAAALQVSMILPMLEAAHEQRSECSRQMKKLLESFSKENDSPENMHRDAALLLSLPGIGVHNGAVMLTEARVTLQARDYQALRRLAGVAPVSQRTGGKAKHPKVQRRQACNHRLREAFYHCGRTALQRDPRTQQHYRELRARGQTHGRAVRGVLDRLLKVLVAVLRDDRPYDPAKRPTRRPIAA

SEQ ID NO: 164236 - protein, 386 aa, unidentified
MQKLNDLSRCLTPLEPDSTLIAVVEMSLSSWLVAGIVPGVERQPLKKLAVDESVLLKLLHRWREEAEKAGYMIKRIAVAFEAGRDGFWLARWLRARDIEVHVIHTSSVAVSREHRRAKTDRLDSELLKRAFLGWLRGERDHCKMVAIPTIIDEDGKRPNRERESLVGEQSRIINRIKATLVRLGIRGFNPKLKKAAERLEGLRTPEGELIPPNTLSELYRDMERRRLVRDQIRQIESARLDRLEHAPGEGAHAMVRLLARVMGIGIETADMLVQEVLSRNLRDRRAVARYAGLTGSPDESGKKRREKGLARSGNARVRRGMIQLAWRFLLFQKDSALAQWFRARTENARGTRKTMIVALARKLLIALWRLVREDVMPDGVILRPAQ

SEQ ID NO: 164237 - protein, 410 aa, unidentified
MEVLHAHCAGLDLHKDSVVACVRHMVDGKVTTEVRTFRTTTQELMSLSDWLSAEGLTHIAMEATGVYWKPVWHILSDGEFELVLANAAHVKNVPGRKTDVNDATWLADLMAHGLIRSSFVPDEPTQQMRDLLRTRKQLVRERTGHTQRIQKTLEDANIKLDSVISNIVGLSGRRMVEALIDGQTDPEALAALADGRLKATPAELQASLRGRITAHHRFLLRLHLDQCDALDAAIARIDKEVDDNVEPFRVAIEMLATIPGVSSLSAEVIVSEIGIDMSRFPTEGHLISWAGLCSKNDESAGKRRSTRMKKGAPWLKTTLIQCAWAATRTKGTYLHAQYLRLRSRRGPKRAIGAVAASILTAAYHMLKNGTLYQDLGANHFDNRAKGKQVLQLLNRLRNLGFAVQITPVAA

SEQ ID NO: 164238 - protein, 415 aa, unidentified
MALKIVYQICCGIDVHKTFVVACIASTNKQGVTTYKRHRFSTFTQGLKELLQWLLDNHCKDVCMESTGKYWIPIYNVLEKDCNIVLAHPKYVKAIRGKKTDKKDAKWIADLFKHDLVAGSFMPPADIRQLRDLMRYRFKLTCFMSSEKNRLQNCLTVSNIQLASVVSDTFGKSSQRILDKILENPDDTSFDIEPLIHGSMKKKLPELELAIDGFITPEQAGKLKVIKKHFEDLESRKAELEKLILALASPYQQELDLILTAPSFKNRFTAIGIISEIGVNMEAFPSAKHLCSWAGLTPTNNESAGKKKSVRVSKAGCYIKPLLVQCANSVVKSEKHPEIRNRYLRLRKRRGHKKAIIAIARMLLTALYNMLKNKEPYNAELYRKSDVLPVNREITIEQAILMAQFQGYKIKSAAE

SEQ ID NO: 164239 - protein, 296 aa, unidentified
MLRSDVMEHPVVIGIDVSKAEFVIAVHPSGEIWTSATTPAAIEALVARLRAFGAPLIVMEATAGYELPLAAACAGAALAVAVVNPRQVRAFAQAMGHTAKTDVIDAGVLALFGARMQPVPRAIPDAETQALAGLVTRRRQLLEMLGAERRRLAQAPPTGPVTRDLRTHIRWLERRVRDVDDEIGTAVQQSPVWRVHEDLLRSVPGIGPTVARTLLAELPELGRLDRRAIAALVGVAPFNRDSGQWRGRRMIWGAAPRSERRSTWARSSRPAITRPCACFINGCVPRASRPRSHSWR

SEQ ID NO: 164240 - protein, 386 aa, unidentified
MHHATTLPAPERTCSRGDCATLFVSLELSRSTWVATALAPGSSKMSKHTLVGGDGRKLLDLLARLKTKAEQRIDAPVKVVAIHEVGLDGFWIHRLLEANGVESHVVDPASIAVPRRHRRAKTDAIDGETLLRTLMAWQRGEPRVCAMTVPPNPSEEDRRRITRERAKLLQERIRHTNRIRGLLFGQGITNYNPLHKNRRQGLEELRTGDGRSVPAHLKSEILREIDRLELVLRQIGEVEAERDEMLRLAPASSPAALLMRLKGIGPEFATVLYLEGLFRQFENRRQLAAYAGLAPSPWKSGSIDQEQGISKAGNPRLRTTMVELAWMWVRYQPASALSCWFRQRVGSERGRIRRISIVALARKLLIVLSRYVSHGEIPAGAVMKAG

SEQ ID NO: 164241 - protein, 321 aa, unidentified
MVYIGIDISKSSFVAAYPSVNGYRTQTYPNTVAGARKFIATLSVAEHHCVMEATGNYGFLLLYLLHQSGIAVSLVNPKQIKHFTRMMMTVTKTDEKDACMIAMYGEKMNPPIYKMPSQAILLLKQKKTVIRQLRKQLVASKNLRESLVVLPYRDKACLRTLDKTIDFLTKQIEQLEAELAEIASSEFDKQLKALTSIKGIGITLATALILTTGGFTYFDNAKQLSRFIGICPTYQQSGTSVNIKGHINRNGDEHLRSLLYVTSWTALRYNAACRECYLRLKANGKPSKVALIAVANKLVRQAFAIATTDSTYIDGFVSAKK

SEQ ID NO: 164242 - protein, 419 aa, unidentified
MNYVGFDWASRAHDVTVLDEAGGVLDRWAFPHSETGWVTTLDRLARHGSAAEVPVIIERTCGLIVDRLLAAGHPVVPVHPTAFYAARPRWGASGAKSDPGDSYKLADYLRTDGHRLRRLTPTDPGLHELQALVRLRDDQVRARTAATNQLTAILDTYWPGPKQLFMSLASQIALAFLTDYPTPTSAAHLGEARMAAFCRRHAYRGGKSPAELLSRLRAAPVAPVGLPPATLAAMVTAQVTVLKTLQTVISDVERLIAVRVVAHPRSNLFENLPGVGMINLAQLLAEVGPILDRVDSAEQAATECGAAPVTRSSGQTRGVYFRWAANTRARKAITSFAHNARMQDDWAAALYADARARGKRNPHATRIVARAWLRVIWACWTSGQPYNPDRHHSSRFLHRCHPAGAQARSRWSPPPEERS

SEQ ID NO: 164243 - protein, 336 aa, unidentified
MEQIIGIDLAKRVFQVNIVSAQGEKKANKMITREKLTAFIVQQPPSRIVMEACGSANYWSRQFRQYGHEVKQISPQYVAPFRMGSKNDKNDAAAIVEADSRPGMRYVPEKSIEQQDIQCLHRVRQRLMKNKTALINQIRGLGLEYGIAIPEGAHKIMAHLPEHLEDAENELTTLSRELFHEMLQELQDNQQRIKTLDLRLALISQQNEDTLRLKSIPGIGPLGASALTVALGDSADFQNGRHFASYLGLVPKEHSSGGKVRLLGITKRGDGYLRGLLIHGARSVVYRVINLPEERCGGLQRIIARSGVNKAVVALANKNARIAWALINQKTEYIVK

SEQ ID NO: 164244 - protein, 431 aa, unidentified
MNQIKRATNFDTNFAATLGLDWADKKHDLWIQAGEGGKPEHRVINQTPEALHEWAAQMRARFPQGRIGIAVETSRGAVISALGAYDFMVLFPINPAMLCSYRAAFCVSGAKDDRTDAMLLEEYLRLHMAKLRPLEPDTQLTRKLAGLVENRRGLVDERTRLVNQWHSLLKTYYPLMEVLFEDMTQPLAAHFLLKWPDLASLQKAGAAALRKFFYGHNCRSNKAVAERLEAIVKAQPLTQDPALIVPAVLKAQALAGMLQVLHESIEEMETLIEQTTDAHPDAAIFRSFPSAGPTMTPRLLVAFGTNRSRFASAQEAQQFYGIAPVKKQSGQSKVIHMRHRCPKFARQTFHENASHAVRTAGWAKTCYEQQRARKKGHHASVRSVAFKLMRIYFRCWQNRTCYDANLYEKALEKHGSPLASLMKKEAAAKGE

SEQ ID NO: 164245 - protein, 426 aa, unidentified
MWDAKRRVLKIKSLKHGIIQDKRGNVMRAVFGIDVSKTSSEVAILVNGEKVHGYSILNDAIGFNRLLGDLKTIHNPEIIFEATGVYSRRLQAFLEECGYAYTRLNPLEAKKQLDSLRVRKTDKIDAEKLAKSQLVHNRKPTYVQEEVYQHLRDLSRFYQNMTEDLVRAKNRLHKVLQVTFPELENLLSTPTGEQYWNLVMAFPCKEFVLSLSQSDLYEIIRQSTSKRISEKRIAYLTDKLIKLAKQSFCAVKKTSPMLEEVRYYAQELLRLSERRQVVLNDMVALAQPLPEYDILRSIPGIAETTATSIIGKLGDIRRFHSANQINAFIGIDLRHYESGNFLAKEHITKRGNPYARKILFKCIHNIASASHTNPCHIADFYEKRKRQSTIASTKPHTIASIHRLIRTMYYLITHNKLFDYSLTQNR

SEQ ID NO: 164246 - protein, 342 aa, unidentified
MKQYVGLDVSQKETSICVVDEVGQVLFEGKAKSDPGALSALLRKRAPQAERIGFETGAMASWLWHELRRVDLPVVCIDARHAHAALSVRMNKSDQNDARGLAELVRVGWYREVKVKSEESQKIRAIIVARSRLVAIRRDIENQVRSLIKEYGLLLPRAIGLQFRKKVCELLGKDHQLLGVIAPLLSIHEQICKQQSKFDNEVRQLAKADETTRRLMTVPGVGVVTALTFRHTIDDPSRFRSASSVGAYLGLTPRRNQSGETDINGKISRWGDRLLRTYLFEAATVLLYRTKKWSSLKAWGMKLAKRIGMRKAKIAIARKIAIVLHCIWVDGTSFDWGHAKEA

SEQ ID NO: 164247 - protein, 311 aa, unidentified
MICACWTRTAASWPPAESPMGWPGVGELHALVATHVVDPAQVTVGIETDRGLLVGALVAAGYQVYAVNPQVVGRYRGRHQVSRAKSDRGDAKVLADLVRTDRHNHRQVAGDSPLAEAVKVLARAHQSLIWARQRHVNALRCALREFYPGALAALGAQLAEPEALAVLQLAPTPEQGRRLTRAAVRRALVGAGRRRNLQARVVAVHDALSASQLAAPAPIEGAYREVVGALVAVLCCLNDQVAALEQQVAARFADHRDAAIIRSQPGLGAVLGARVLGEFGDDPDRYQTAKGRKAFAGTAPVTRSPGGQWCR

SEQ ID NO: 164248 - protein, 429 aa, unidentified
MDCMADVYQPIAGIDVHKKILVVVVRLMEEGKVIYQKRKFGATRQEIDHVAAWLQHWKATVVVMESTAQYWRPLWYGLERYTEGPFQLHLCNPLKVKAPRGKKRDYRDAQRLADRWAAGDLEDSFVPGQEQREWRSMTRARVHMKRKIGINRCQVEGLLEHGTIKLSSVVSDLFGATGWAILKLIASGVTDVEVLVKQARGSLRSKESKLREALAGKLDRTHRLLLKQHMEQVELLRKQVEELNQALAVAMKEHVPALTRLCQIPGVDLYSAQELLAEIGPKAAAFPSADQFAGWVGICPGSKESGGVNYSSRSPKGNRYLRRLLCQVAWGAVHNKESFFAALFGRLKPRIQGRGAAWAVAHRIGKVIWLILHEEVEYKEMGPGKVGIQTLNRKFRRLMKEFARHGVDPRTILAEILPVPSPLLETVNE

SEQ ID NO: 164249 - protein, 388 aa, unidentified
MAQTSAFHSPSATPDFDQTLVMAIELSSTKWVLAAQVPGLPRLKAKRTIEPTAEALLAAIESYRERAKRAGHTVQRVIATYEVSWSGFWLARWLARQDVETHVLQPSSVPVDRRARRAKSDGIDAEVLLRTLLAWLRGEPRVCSMVPVPSEADEDARRCTRERTELVAERVELVNRIGAVLATLGVCDYDPLRRDRRERLATLRTALGAPLPPHASAKITRILDRLDLVRAQIADLEQQRDAVLEDAAPDKAGEMIQQLARLRGIGVQSATVLVREAFVREFANGKALGSYAGLAATPHSSGGVERELGISKAGNRRVRTVMVELAWLWQRYQPGAAQVRWFRERAGGTGGRMRKVMIVALARRLLIALWRFATQGVLPEGAVMKPSI

SEQ ID NO: 164250 - protein, 354 aa, unidentified
MIVIGSDPHKRNFTFAAVEHATGELLGRREAAAQAEQFDRVLRWARELDEQRVWAIEDCRHVSGRLERFLLARGERIVRVSPKLMAGARKSTRQPGKSDAIDALAVARAVLREGVESLPCARLDERALEIRLLLDHHDDLVAARTKDQGRLRWHLHDLDCPIEVPAGGLDRRLWLQRLSRWLARQPQTARVRVARRLLSAIRAATRQITGLVGELGGLVAAYQPELLEQPGCGPLTAAKLIAEIAGAERFKTDAQLARTAGVAPIPASSGRKDRHRLDRGGNRQLNLALHRLAVNAGRHDAPTAAYLARKQAQGKTRMEALRCLKRHLARRIFHLMTTNTPTPGKTPTPALALT

SEQ ID NO: 164251 - protein, 343 aa, unidentified
MQVSTIGVDLAKNVFQVHGVDSSGKVVITRQLRRKQVIEFFSKIPPCLVGMEACGTAHHWAREVSKLGHTVRLMPPSYVKGYVKRSKNDAADAAAICEAVTRPSMRFVPIKSADQQALLMLHRTRDLLIRQRTQLINALRAHLAEFGLVAETGREGLAQLAAIITDESNREALPSAMKQALQAIVDQLAALELQIGTLDRAIHAHHRANDMSCRLETVPGIGVIGATAIASTVTDPSDFKSGRDFEAWIGLVPRQHSTGGKERLGGISKQGDRYLRRLLVIGATAVVRHARQHPQKHPWIMRLLAKKPAKLVAVAVANKMARIAWAIMAKGGYYRAPELAAAA

SEQ ID NO: 164252 - protein, 430 aa, unidentified
MKSNTQNAKIEAITEKTLVLGIDVGSETHYARAFDYRGIEYSKKPFKFSNTEVGFATFKEWILDLKERHEKDKVVPGMEPTGHYWFNLGKFLQDNEMKPVLVNPHHVKKSKELDDNNPTKNDRKDPKVIAGLVREGRYMIPYLPDGVYADLRTASNIRFQLQAELTRIQNRISRWFNIYFPEYKTVYGKPDAKSGMLILKAAPLPEDILTLGIDGVNQIWRDAKLRAVGKARAKTLIEAAEHSIGSKEGTMSARMEIRMLLEDYESKNMRLQEVMVLIEELVKEIPMAEKLLEIKGVGIRTVSGFLAEVGDISRFNNPKELQKLAGLALVENSSGKHKGKTTISRRGRKRLRYLLFEVAMSLVAKNPEFRELHNYYTTRRLNPLKKMQSLMAIAAKLIRVFYAMLTKGVDYDPKKMISDIKRPTVYLQAA

SEQ ID NO: 164253 - protein, 366 aa, unidentified
MEHIAIDLGARESQVCVRSEAGEIVEERRIATRPQTLRRYLEGRAKSRVIVETGAEAFWVAEIARECGHEVRVVPSMLAPSLGVGRRGQKSDQRDARVLSETSCRVEMPTVHIPSTETRRLQSRLGMREALVRSRTKLVNVTKAYLRTIGERAPIRSPGKLVVQLREKLAHAAQHLEPLLETIEGLNRSIEQFDEELEKLAASNELAQRLQTVPGVGVVTSLRYIATLDVASRFRNGAAVGSYVGLVPSEHSSGQSQRKGGITKAGSPSMRGVLVQAAWAAIRSRRHYNDPMMCWARGVAQRRGKKIAVVALARKLAGILFAMWRDGTQYNALRAAAPSAELPAPPRRLAPSRGPRRPLRLEPATV

SEQ ID NO: 164254 - protein, 402 aa, unidentified
MNCVGIDVSKGKSMIAVMRPFGEVVVSPFEVRHTASELSELARLLKNLDGETRVVMESTGNYHAPVAWLLHGAGFYVSVVNAMLVHDYGNNSLRRGKTDKKDAVKLANYGLDHWLTLPRYVPEEDTRLMLKTCYRQYQQYSKVQTMLKNNLISLLDTAFPDANRLFTSPPRADGSEKWVDFVATFWHCECVCGLSKKAFTAKYQKWCRKHGYNFSQDKALDIYASGCGRFGVMPKTNTAKLLVEQAISQLQTTSAALAALKQEMQSLAASLPEYPVVMEMFGVGPTLGPQLIAEIGDVRRFHSKKALVAFAGIDAPPYQSGQIDVRSRSISKRGSASLRRTLFLVMGVLLQCAPMDEPVYQFMNKKRSEGKPYRVYMMASANKFLRIYYASVKAYLDSLEHD

SEQ ID NO: 164255 - protein, 341 aa, unidentified
MKNKSFIGIDISKKVIDASIFCEGTPIKDFPHAVFNNFCKGFGEMCTWLKKNHVVLSNCLFGMEFTGSYSMELEKFLNARKYQFCMLSTHVVKHYPMGPKDKSDKIDSAKIADFLYRYNGTECVKPYKMPDKTMQRLKALMNERKFLVEQRTCFMNRRQLCTTKEDTQLYDGYIKKLSHDIENIELEEQKLLATDDSLLSTYKNLLTIPGIGFVNAINVIVITRNFTAFETARQYASYVGVAPHSHTSGTSVRWRPRPSARCDGQAKADLSMAATVVVQYDAELQSFYNRKLGGKQDSDTKRKALNAVKFKLVLRMFAIGKQNRKWEPLDSKSSNEKLAIS

SEQ ID NO: 164256 - protein, 394 aa, unidentified
MQTIGIDVGKRQHIAAICHEGEREARKAVLRFASDRAGFTELERWLERHGPVERAVLESSGHYHLNLAAALQRRGVPVAVINPLESKYFGKRRLQRTKSDPADARTLALLAMVDQPEVRDVLAGAELREAARFAMALVDEQGRICQKITRLVELGFPELERAYDDPTCTSALAVLRQAPTAPAAARKRTATLAAAARPGGGRRIGVTKAGQIHELALDTIAAPELAPQIAFQMRLLIAQYDLLESQIKEAEAHLGTLLDGELVRRLRTIPGVGPAIVATLIAEIADIRRFSEFDKLVAYVGVHPAEKSSGAKGVNPETSWRMSKAGNAYLRTALYRMAIVGITHNPIIRAHYARKRAQGKSKMNAVGHCMKKALAIVWGVWRSGEDFAAPPSTP

SEQ ID NO: 164257 - protein, 425 aa, unidentified
MFNHPKMKYVYLGVDSHKDTHCIVAINCFYEKLGTVTVRNSPKELENLLAEVKKFKLKGTSLAFGLEDVSEYGRSLAVFLKEKKFIVKHVNSYLVAHERESLNIVHKTDEFDAECAARVLLNRFDTLPNADSQDKYWILKTLVTHREAIVKNNIALKNRIHSLIASHYPSYSKFFCNIDTLGALAFYEKYPSPAKLKGVTVEELDELLFKVSGKSNPKDKGKKILEYVEADGYNEIAYQDIRDMAVKSTITLLKTNIKELAEIDNKLKELLQHFDYNLTSIRGVSTVLAATIISEIGNISKFSSPAKLARYSGVAPTTYASGKSELQFANRRGNKSLHHAFHTLAVGLIATPGNMIRNKYFYNYFHRKVSEGKTKRQALNCVQRRLVSIVWAMMTHKTEYKNPDLISIDEFNAENAETPIETATP

SEQ ID NO: 164258 - protein, 403 aa, unidentified
MNMNAVGIDVSKGKSMVAILRPYGEIVSSPFEIKHTSSNIQSLIERIKSIEGNSRIVMEHTGRYYEPLARQLSLAGLFVTAVNPKLIKDFGNNSLRKVKSDKADAVKIARYTLDNWIDLKQYSLMDELRNQLKTMNRQFGFYMKHKTAMKNNLIGILDQTYPGVNTFFDSPAREDGSQKWVDFATTYWHVDCVRKLSLNAFVGHYQKWCKRRMYNFSKDKAEEIYGAAKELVPVLPKDDLTKLIVKQAIEQLNTASKTVEELRTLMNETASKLPEYPVVMEMKGVGPSLGPQLMAEIGDVTRFTHKGAITAFAGVAPGVNESGTYEQKSVPISKRGSSSLRKTLFQVMDCLVKTKPQDDPVYAFIDKKRAQGKPYYVYMTAGANKFLRIYYGRVKEYLMYLPE

SEQ ID NO: 164259 - protein, 412 aa, unidentified
MEILYQSCCGLDVHKKMIVACLRRTDEGGKVGKQVRTFGTTTSELLSLSDWLVGADCTHVAMEATGVYWKPVYNILEGQIELLVVNAQHIKAVPGRKTDVKDAEWIAELLQHGLLKASFIPPQSQRDLRDLTRYRTTLVRERARIVNRLQKVLEDANLKLAGVATDVMGVSGRAMLEALLAGQTDTEQLAELAKGRLRKKIPQLKEALTGRVREHHRFMLSEQLSHIDYLDEAIERLVAEIGERLRPFEEEIRLLDTIPGINRQTAEELIAEIGADMSRFPDGHHLASWAGMCPGHNESGGKRKSGKTRKGNRWLRSTLVEAAHGAAHTKDTYLASQYHRLVGRRGKKRALVAVGHSLLIISHCVLKRQQAYYDLGSNYFEELHRQRMERNLVKRLENLGYKVTLEALSPAA

SEQ ID NO: 164260 - protein, 321 aa, unidentified
MTTPATYIGIDVAKSSLDVGQRPEGTTFQASNDEAGIADLVERLRRVRPTLVVLEATGGIETPLVGALLAAELPTVVVNPRQVREFARATGRLAKTDAIDASVLAQFGEAVRPEPRPLPDEAGRELHALVMRRRQLVEMLTAEKQRLRTATRLVRRKLEKHISWLQQAIDELDRELDDFIKGSPAWRERDDLFRSTPGVGPVLSAVLVSDLPELGRLNRRQIAALVGVAPLNRDSGQFRGRRHVWGGRSRVRTALYMGTLVATRHNPTIHSFYERLVAAGKPKKVALTACMRKLLTMLNAMARTSNHWQIMPSNPARQDSC

SEQ ID NO: 164261 - protein, 399 aa, unidentified
MKYVLILDVAKSMFMLSSNVGEVLLEPTEYIHNKKNFELIDSNINKLNIKDNLTVVMEATSIYHKAPERFFKENNYHVIVFNPLIGKEITNTIRKTKTDKQDCIKLTNLFWKGSIPDRNYTEDEIYTKLNELSRQYYHLDEGLTRHKNRYKELLHLCFPEFELCFKDGKIYDLTALNLIKEFPHAYIIKEKRVDALAYNMANTNNRHLNYYKRKANTIKEYAQNSYPGVNENSKDVDNLKQLANIIIDITEQKDDVKNQMIELAKQTKHFNNIASIFGIADLSASLIIAELKDITRFNNIKQINASCGLDPTIVQSGKSINYHGPISKRGNRYARKILFNCSRNIVTLSAKCDKENPIYVYYQKKKQEGKHYYACLTACSTKLIRIIYALCMNNSTSQN

SEQ ID NO: 164262 - protein, 356 aa, unidentified
MVSAELEGAAVKVIGIDSRKATLAGCAVDELGTPVDERTLDNDRAGHAALADRARSLAVERIGTEGSGRYGAAAARRLAAAGFDVRDVPPRLSHRERLRTHRPGKSDPTDALAIARVAAREQTLPPVRLADRSEDLGLLVTARDELVAEATQPRNRVHADLVVLLPGYGERVPNLVARRRRRGVALELATLSGVRAELTRSRLGRLEETDAATRLLERRLAALLVGHPLLALPGVRALLAARILAETGDVRRFRPADAFAMFSGAAPIPASSGKTERMRPNRGGDRQLNRALHAMALIQGRRHDRAKACLARKRAEGRTQRGAIRCLARKLARVVFEVLRRSTLATAGASPPEWGT

SEQ ID NO: 164263 - protein, 363 aa, unidentified
MVELSENFNPIRQEGLMERAKVSTEYCCGVDLHARTMYVTVVNRAGEVLVRQNMPNHFGQFVRVLRPFLPSVSVGVESTYNWYWLADGCHQADISFYLGHALYMKAIHSGKKKNDRIDSQTIADLLRCGFFPVAYPYPREMRATRDLLRRRHRYVSLRAEAYTHIQGTFSQHAMLGITGTDTKRKTTRRELPGEFEEPSLSMSVTCDLDMVDTLDAIITQIEQQIRALAKHHDNRALSILMSVPGVGEMIALTILYEMHTPARFPSAQKLSSYARLVKVDHTSNGKWAGEGNPKIGNPHLKWAFTEIVQHGPRQSERLSRYYDKLKSRHRPGKARIVFAHKFAVAIYHMLKNGQAFDEKRFLS

SEQ ID NO: 164264 - protein, 484 aa, unidentified
MAILPPFQNSSHPRPRYIGLDLHSEEIQAHVTLPDGSSLRPVRFATSAANVNQLRLELSPQDAVAMEATTNAFTVARLLKPSGARVLVSDQRKTRIIAEAKIKTDKIDARVLSELLRVDYLPEVWLPDEQTEELRHLMSDRQSNVDRKTEVKNRIHAILHRRLLKGVNLFDSKEGDALLETLESEDSSLTVVERSRLKLSRQELHHLEQLVAENDRSIARFIVADPALHHRLNRLLTIPGVSLVVGAGLLAAIGDVTRFKKAKLLPSYFGLVPSTYQSGSSEGYHGRITKQGRKQARWLLLEAAEHTVKAPGPLHAFYLRLKKKRNHNVAKTAVARKMAEIIWHLLSKDEDYPYQIPRLTQEKQARVVFLATGQKAKSGPKKGAPQSPLYGTGLKGRQVSKIVAREAASRAEQRYEAIVSERAAGHKTHSPEGPCLVKQEQTSLDPLRPQAADWEAEIARINARILSQAPKKEIKRRQTKAAAK

SEQ ID NO: 164265 - protein, 362 aa, unidentified
MKKHPVAAAVQAALDAEHRVERDNPPAALAEEPRSGQNPATAAVQPPLDGECWVGIDVAKAHLDVATWPAQERLRVSRDEAGLAELTGWLHARSPRLIVLEATGGLETSVAAALVEAHLLTAVINPRQARDFAKALGCLAKTDALDALVLARFGHAIQPTPRPWKDEETQALAALLQRRRQVVEMLTAEKNRLASAHPRVQTDIQTTIDWLEARLKALDGDLQGRLHASPIWREQDDLLRGVPGIGPVTAVTLLAALPELGTLDRRQISALVGVCPFNRDSGQCRGRRMIFGGRAGVRAVLYMATVSASRCNPVIKAFYERLRAAGKPAKVALTACMRKLLTILNAMLKAKTPWQPPEECRP

SEQ ID NO: 164266 - protein, 458 aa, unidentified
MSKKKPAGKRKGSASEKVDWKALEVVHPEAAGIDVGGSEHWVAISPDRDPEPVRRFGCFTVDLREMARWLMDKGVRSVAMQSTGVYWMPVFEVLEEHGLKVYLVNARHTKNLPGRKSDVQECQWLLKLHAFGLLNNSFQPTNEIRIARTLWRHRGNLVAEAGSAIQRMQKALIEMNIQLANVLSDLSGVSGMKIIGAILKGERDAWELAALVRPEVKATPEDIAKSLEGNWREELLFILEQEVELYRFYQKKIVDCDLQLRQHLESFGSTVDVQAQPLGPKPKGKKGSRNAPQFDLRTELYRITGIDWAQINGIDVLTAQTVIAEAGADLSAFPNEKQFASWLGLCPTNEQSGGKILTRRTRKVVNRATVAFRNAAATLLRSQSYLGAQYRRLRTRLGAPKAITAMARKLACLFYRLLKYGQQYVDKGTEYYEARYREQQIRSLAKRAQKLGLQLVIP

SEQ ID NO: 164267 - protein, 320 aa, unidentified
MTGFVGIDVSKGHLDVAVRPGNATWQVTNDAEGVAGLAERLQGIAPELIVLESTGGYELAAVTGLLVAGLPVVVANPRQVRDFAKAVGKLAKTDAIDARVLAHYAEAVQPPLRALPDEAARELAALVARRRQLVEMHVAEQNRLRGLPRRLQTQVRDHLAALERYIAELDRDLEDFVRSSPIWAAKDELLQSTKGVGPVLSMTLLAELPELGALDRKAIAALVGVAPLNRDSGTLRGKRTCWGGRADVRSTLYMATLSATRHNPAIRTFYQRLGAAGKTKKVALTACAHKLLLILNALIKNQTPWDPNFAPLPLTPQHSC

SEQ ID NO: 164268 - protein, 401 aa, unidentified
MKRLSGGIDVGSESHHIIILDEEDNFLYNQKVAHKLNEFTENIKLFKQIEKKEGGKISFALEGKNGYSNPLDRILLDQGFTLYNVDNLKLKRFREAFAGEWRDDERDSLMLSKMLKLKDYIDSKREKVFIKIEKPSPLTESLKLLSRHQQTLIDEKVRLVNRLGKKLLEVCPQILRLGKLKNKKIIAILAKYPDFSKYKRITLKSLLKIKGIGKKGAFFLLKRLNNIEYMPGLTDIYKTIILSYAQRILELQKEIEDIDKKLDEIGEKSKEVIHLKTIPGVATKLASRLIGEIGDINRFPSEKQLAIYCGIACVDNNSGKVTKAKAVYKANKICKQTLITMAGCSIRSIHQCKAYYLKKRTEGKSHNHTLRCLARQLIKVIYRMLTEDREYIVRKELKKVA

SEQ ID NO: 164269 - protein, 344 aa, unidentified
MKKVLIGIDFSKEKFDVAIIVKSTSTQEHALFDNKVSGYRKMIKWVNSVVEDVPCSSWLFCGETTGGYSRMMSDWLYAQGYDVWIENALVIKRTFPLKRLKNDTVDAFMIAEYALRFEDRVQLYEPMSQALTELREIFLYRHHLVRHRCSFEVRRIEKRFTQQKSANKNVISQSARHIITEINKEIAKCDEKIKEYIESDDQLSSIFAIVTSMPGVGTINAVSLMVYTNNFTKFAYNPRKIACYYGIAPFGRDSGTSVHTDPRVGFIANKMLKSLLTQAALASVRTCPQIAKYYQRLIERGKKPMVALNNVKNKMIAIITAMVRTGCMYQPDNICLATKSVNVK

SEQ ID NO: 164270 - protein, 315 aa, unidentified
MSIVYVGLDLGSSNFQQVVMNGAGVSRINRDFTTSEANLIKAFTDLRGEIQVHLEAGELAPWAAAVIAPLVTRVVCSHPQSNAWIAKDADKCDRIDAYKLADLLRLNRFKEVHYAREQSRREFKTLVQHYDELTAQQARLKTKLKARLRMQGVIVRGEEVFSARGRQAVLEQVKSPAVRAAIKQLYAVLDQSIASQTEAQMLMLRAAQAFPEIRIFRTAPGIGPIGACRFRAYIHIPNRFSSTRKLWKYCRLSVSHRSSNGKPLRRPRLDRMGCDRLKDVSRKLSRPRCAGVTIMGLSGLIIARSRPPMTRRMRG

SEQ ID NO: 164271 - protein, 318 aa, unidentified
MQRCQMTWIGIDVAKDSLDVAWMSAEGSQHHSLANANPGFRSLVEKLPPAHEARLVVEATGGYERAAVTALIEAGYRVAVVNPRQVRDFAKAMGILAKTDRIDALVLARFGEQVQPRLLEEDPTQRAELMQLVSRRRQLIDLRTMESNRSEQTTARAAQKSIRHVLRLLEKEVAQLEAEIARMLQSDDDWRGKIELLSTVPGVAKVTSATLVAEVPELGRLNRHAIAALVGLAPFNDDSGRHRGTRRITGGRAAVRQVLYMAALSARRCNPVIHAFAKRLAAQGKKPKVVITACMRKLLVILNRMLNTNSTWKPSHAQ

SEQ ID NO: 164272 - protein, 374 aa, unidentified
MPQTIYSMPQTKAARRRTALKANLTSLTVGLDLGDQWGQLCWLDPDGEVVDEGRVKMTAAALSARFASISKVRVALETGAHSLWVSQLLTSFGHEVIVANSRDLAAISQSDQKSDRNDAEKLARYGRVDPSILHPITHRTSEQQADLTVLRARAALVRTRTLLVNAARGLVKPFGTHLPKCDPDQFAARCRGSLPEAVDTALTSLLEEIAHLTNRITEFDGRIEVIAKTKHPEATILRTVPGVGPLTSLCFVLTLGDKARFADSRDAACYLGLQPKKSQSGEHDPQLGITRAGNRYARSLLVECAHKILHVFTPDSALKQWGLKLAARGGKNAKKRAIVAVARKLAVVLHRMWVKQERFEPFREARLQSATAGS

SEQ ID NO: 164273 - protein, 401 aa, unidentified
MESPIVSIDVSNGNSHYMCFIKNNKRFGKVKKIDHDIEGFKRLLEDIQKLEAETNEKVCAVFEATGVYTKPLERFLSKNSIKTYIINPLESARKRKEEIHNKKTDKLDPISISKVYYDKEEMMELKKKDETHNWLRKKNRLYEDQLNHLRKYKVTFQNQLSICFPGYLDLFKDGYSDIPMTILKKYPHPDLLKNKKAETVARYLEKNTCHTHKVSLEYALKIIEFAKKTYPGCEKDDVEVEIFKILLDKVIETQRECEKTLNEMITVASTLEEYRYILSIDGIGTNLAARIIAEIGDIEEFKSREALVAYAGLDPHIYQSGDQDGKHLKISKKGNKYLRCLLFLAVGCSIRGAKDNPVNRFYQKKKQQSNPLNSKAAKTACTAKLLKIIYGICKNKTTYER

SEQ ID NO: 164274 - protein, 463 aa, unidentified
MARNNKGKKNKKHVRSLKAIQPDAAGIDLGSREHWVAGPPLEDNTPNVQRFGTTTPELLRLADWLKEQKVKTVAMESTGVYWIPLFETLDSRGFEVILANARQVSHVPGRKTDMLDCQWLQLLHACGLLRGSFRPSDDICRLRALFRERNTMIDQRSDWVRRMQKSLDQMNVCVHHAVSDITGVTGMAIIRAIVDGERDPRTLAQMRDRRCQKSEEQIAEELTGNWRPEHLFNLRQALKMYDQFCQIVTEYDTEIFAYIKTLQPGVDDDQTAPPPASKSKARNIAKKGQEPMRQALYQLTGFDMTIINGIGVDTASVVLSELGFDYSAFPDEGHFVSFLRLAPNLSISAGKKVPSKLKGTTTSRVATALRMAALALRNSKTALGAFYRRISRRKGASVAVFATARKLAQIIYRFVCHGQAYIDIGAKAYEAQFNNRQLKYYTKALKDMGYKVKPLAAATVLAA

SEQ ID NO: 164275 - protein, 315 aa, unidentified
MSASPVYVGIDVSKAKLDVCLLPAKQFYSFENSPTGIEQLIELLRGQGQVARCLLEATGRYERRCAAELMDAGFPVVVINPRQARDFARSVGKLAKTDVIDAQTLAEFAMLPHLRLSEKKPENQLILEDLVARRRQLVQMLIAEKTRLDGLRHKLAANSVKKVIHLLERQRETIDCEIAKLIEADDDWRNRRDLLASVPGVGETTAHQLVVELPELGKLNRQQIAALVGVAPLNHDSGFMRGKRTIFGGRVTVRCSMYMATLSAMHFNPAIQRFAERLKAAGKPFKVVITACMRKLLTILNVMLKNNEPWRVPAL

SEQ ID NO: 164276 - protein, 327 aa, unidentified
MILPILGIDIAKLKFNVCLLDTGGKLKHKVFPNTAAGFQQLAAWLVKQGTQRVHACMEATGAYGEALALHLHTAGHTVSVVNPAAIKAFAGSRLSRTKTDKVDAELIARFCVAQQPAAWTPPAPEVRQLQALVRRLESLVEMRTMESNRLEAIITIDVVKSSVEAHIAYLDHQIKQTEALIRTHINNHPRLKRQSALLDSIPGIGETTAATLLAEITDITQYESARQVAAFAGLVPRERQSGSSVRGRTRLSKIGNARLRKALYFPAITALRCSAFFKQWAEGLRQRGKCKMSVIGAAMRKLIHLAYGVLKTGQPFDPEWGRKEKTA

SEQ ID NO: 164277 - protein, 477 aa, unidentified
MKERRLVGIDLGIASAHTVRVLDGNGTTVAKRKAWPTVQSLSELESAALLNAPQKIRLEVVVEPTGPAWLPIAVFFSSRGHTVYRVSSAKAADLRRFLSRHAKSNGIDADTLARLPLVDPMGLRPLELPCAERAALDRRVRATDRLTQLSSLHKRRIKDLVRQLMPMTPLSGDLSLSDLAVLERYADPNQLIKAGKTRLTTLISRTSRNQLGTERAEQWLASARASIELYGEHPAMSSTDLAAEVASEVRLLRATQQELATHAAQREQCYRWVDPLGLARSLPGLGEIGGPALVACMGEPGRFAKGKQFRSFTGLVPKASETGESDRKGLPISKAGSSLLRSTLFRAADTARKQDPQLARIYYLQMVERGKDHLGALCVVAANLAERAWVVMERGMPYVVCDIDGTAVTPEQAKAVIAEHFAVTEEVRRRRRSKKRAGKAPQKVLVGHSMSAQGTKRGDLPHGQSLGEQDRAVKMPA

SEQ ID NO: 164278 - protein, 529 aa, unidentified
MKLLVRLRRLAVAFQPGEKSEKKIAGKPMPSRHKRRTTMSTTGKQSRKKKDPTLNAKASKRNASTSPCQQGKGGQRRSKLTMANPHAAAVDVGSQVHYAAVPEGRAEQSVGSFGAYTAQLDALVQWFKDCQIKTVAMESTGVYWIALYQKLEEAGFEVLLVDARQVRHVPGRKSDVQDCQWLQQLHSYGLLRAAFRPEDSICRLRTLQRHRKNLVECGAMWIQHIQKALTEMNLHLHHVLTDISGQSGRAILDAILAGERDPKKLASLVDHRVKKSQAQIEAALTGDYRPELLFVISQTLHAYRQMQQQIVQCDQHIEKQLATIAARTEPKHSPKQTPPPPQGAALKAGPRKRKPKDALEATLAAHLKRILGVDLTTIPGLNVLAVLSLISEIGTNMAKWRSAKAFVSWMGLSPSNKVSGERVLSSRTRQVKNRAATTLRLAAMLLGRTDTPLGSFYRRKRAQLGAPKAITATARKLGCLIYRLIKDGQAYQELDLHSYELKYKNQILRSLRKRANGFGFDLIELPKAA

SEQ ID NO: 164279 - protein, 331 aa, unidentified
MNHCAIDVGGKKSQICVRDSGGTIQFEGAWETPALGDHLRQVPHCRVILETAAESFRIADQARAAGHEVRVVPATLVRTLGVGARRTKTDKRDARALSEVSTRIDLPSVHIPSARSREWKTMAGVHDALVSCRTKLINNVRGWLRGQARKPRSGVAETFAERVRRLGELPVYITSELKMIDALSEEIAASAKRFASVTNSDPVCKRLMTVPGVGPSTALRFVAALDVVTRFASAHKVEAYLGLSPGEKSSSERQLRLGITKAGSASVRWVLIQAAWILKTCCRAPAARKLQLWAAEVEKRRGKGVATVALARKLAGILFALWRDGTEFESR

SEQ ID NO: 164280 - protein, 392 aa, unidentified
MVVSVGIDVSKDKHDCFIVSSEGEVLADAFIIPNTMDGFHYLLQRIRHCTAPQDKIKVGLEATGHYSYNLLGFLLDNGLTTYVLNPLRTNLYRKSLSLRKTKTDRVDARTIASMLLSDAGLKPYTDTAYHNEELKSLTRYRFDKVKERAKLKSSIARLVCILFPELEKLVPSLHIASVYALLEEFPGAKQVANTHLTRLKALLETASNGHYKRDMALEIRNAAKNSIGSQMPAKSLELQHTIRLIRELNREIDEIEEQIQSIMDELHSPITTIPGLGFRMAAMILAEVGDFTRFDSPDKLLAYAGMSPSTYQSGQLKNCYPHMEKRGSRYLRYALYNATKYVCHWDPAFADYLAKKRAEGKHYNIAISHAAKKLVRLIFAMEKSRQPYCSAA

SEQ ID NO: 164281 - protein, 318 aa, unidentified
MNTNTLQNINVGVDTGKSQLDIFIRPLDIYFTVTNDEKGIKEAIKKIKKHAPQRIVIEATGRLEMPFVLECAEAKLPIVRANPVHIKRFAGAIGRRAKNDKLDAELIAHFAESIKPEITIIKAENIRLMSDLVVRRNQLLSMQTMEKNRIQILPKSLHSTIKPMLIAMKNQIKKIEDKLTKLIENCPEYQAKNILLQSVPGIGNIAAASIISNMPELGYISNKQAASLIGVAPITKESGRYKGKRTIQGGRSQVRTVLYMAMMSAMQCNPIFKATYQRLVEAGKPKKVAIIACVRKMVVILNSMIRDGSMWDENFAKN

SEQ ID NO: 164282 - protein, 403 aa, unidentified
MSNTDCCGPTAIRVDLGAIFISLELSRKTWLVTSLSPGAGEKMSRRQVEGGDTAALSALLEELKRQALARTGRDYGIICIQEAGYDGFWLHRQLQAWGIESYVVDPASVAVDRRKRRAKTDRIDGAALLRTLMAFLRGEPRVCSMARPPTPEQEDRRRPCRERQVLLRERIEHSNRIKGLLFSQGISDYNPMLKSRRKRLEALTTGDGRPLPPHMKRQILRELERLEQVLEQMAQVEADRDALLAPSPEVETGVAPAGPDQPNPQPRAAPGASLTRLKGIAEERAAVLGAECLWRTFDNRRQVGAYAGLTGSPFKSGQVDQEQGLSKAGNKRLRHTLVELAWTWLQHQPKSELSLWFQRRLGPTPDRRRKKVLIAALARKLLIALWRFDTQGVVPEGAVFKTA

SEQ ID NO: 164283 - protein, 417 aa, unidentified
MKKHNNSKKKSEPTSKVKTRGPMRRDTKEVLADLVGKLKEKLDPKKPAARSAGEKHKRGELRPNLDRLTIGVDLGDQWSHYCILGLEGETLAEGQQRTTQADIAEFFQALNAARVVFEVGTHSPWVQELIDSCGHEVLVANPRLMEGPKRRKRKNDRIDANKLARLGRVDPQSLHPMQHRSREVRQDLVLLRARDALVAARTELINATRGLVKSMGARLPKCSSESFAQKVEEAIPGEICEALLPLVRMAAALSDSIQGYDEKIEKLGREKYGHTSLLRQVKGVGPITALGYVLTLENPDRFVKSRDVGPYLGLVPKQEDSGESQPQLGISKAGDTMMRRLLVGSAHYILGPFGPDTDLRRYGLRLCERGGKNAMKRAAVAVARKLAVLLHRLWVSGEVYEPLRQGTSATIAPAVAA

SEQ ID NO: 164284 - protein, 372 aa, unidentified
MNERITFVGMDVHKNSIHVAMLLPGSDEPVGWSQGTDADAIGKLMVRLVKKAPGPVRCCYEAGPTGYALQRTLTRQGIDCMIVAPSLISIRPGSRVKTDRRDAAKLAELFRAGLLSEVHPPDEMDEALRDLFRCRDDARGNLVQARHRMGKFLLRRNIIYRETKHHWGTRHMAWLRALSFEDRPSQAVFESYLLSIDQLSERLARLDAELAEAAQQERYRESVAHLRCFRGIDTLTAAGIVAELHDFRRFDSPRRLMGYLGLVPSERSTGERERKGPITRSGNRHVRRLLVEASWHHRFKPRVTGPLLKRREGQPAHILALADRAQERLYARYLRMSSRGKEHNKTVTAMARELAGYIWAALHPDAAPMRNG

SEQ ID NO: 164285 - protein, 358 aa, unidentified
MTGHVMVGCDPHKLSVTLAAIDPVGVDVGAATFANDAAGLAEAASWVEAVGVVERVGIEGSAGHGRHLADLLVAAGHDVREVPARRTAQRRRDRRRPKTDRDDALAIAREVAADPSLGPCRAARGSSPTLEELAVVEAWRADLVERRKRVLNVAESLLGALPLSLLDEVGRTGKTLARLRRASRCVAGIHGPTRARLDQLNDLLAAHDDLSDQIRRADQRLGPLVDATNTTLREETGISTASAARLLVEIGDPSRFRTEAGFARWCGTAAVAASSGEGDRAPTRHRLDLGGNRRVNAVIHLMSVVQGRCSPDARAYLDRKRSEGKTSKEARRAHKRHLANRIIRRMWHDATRQQPAPA

SEQ ID NO: 164286 - protein, 418 aa, unidentified
MEVLHERCAGLDVHKKTVVACVRLARGGGVEKEVRTFQTTTADLLALGEWLDGHDVGHVVMEATGVYWKPVWHILDDGERELVLANAAHVKNLPGHKSDVSDCDWLSDLEAHGLIRGSFVPSRPIQELRGLLRTRKTKVRERSSNTLRPQKTLEEANIKLDSVISNVIGVSGRRMIEAMIGGETDPVALAGLADRRIKAPPEVLCEALRGRVTRHHRFLLALQLEHIDALDGMIDKIDQQIDASVEPFRASAALLTTITGVNELAGRAIVSEIGIDMSRFETAGHLRSWAGFCPRNDESAGKRRSTRIRKGAPWLKDILVQCAWAATRTKATYLHAQFVRIRARRGPKKAIIAVAASILTAAYHMLKNGVPYRDLGPQHFDSRNKQAQAKRLLTRLRSLGYTADFDSLKPIPDAVVSY

SEQ ID NO: 164287 - protein, 346 aa, unidentified
MNYIGMDCHIKTLDFAVVNEAGHLVKASSVATSVNGFIEFVKTVPLPRAVYMEECTLAAWALETCVRFREKLVITDAKQNHWIGSSGQKDDSIDALKLAQLARGGYIKEVHHPVGQRRRFRELMEAYHDTVKSTTRIKNKIKAKFRQNGIQCTGSTVYSQTYREEWRRKLPQETTPLLILEGLWRQLEESEQAEKALLSAARAQAKHYPEIKCFEAVPGIGFISAATISAILETPHRFADKRKLWMYAGLGLMKRSSGGKIYSERLSTDYNRLLKYTMKQATESAIQAADNPFRCKYLDMTALHGIAPHRAKLTMARGMLATMWAMWRKGEKYDPEIREKAACKQI

SEQ ID NO: 164288 - protein, 391 aa, unidentified
MQDEEDFNMSLQNAPNINVDGKMDVSNIHFINENAGGAFMAKYNIGVDYHKKFSYLVVKEEKGRVLRSGQITNSKKAVADFLKPFKDDSTAVLESCRNWCVMHDWLEDIVDDVILANPYKVKAIAEAKIKTDKIDATVLADLLRADLVPQAYIAKRPVRDMRNLLRERIYFVRLRTMTKNRITTIFDRYPEEVRKEKAKTDLFGKKGRAQLENIELRPADRALINRELNFIDFINVFIKEVEEVIAENFQISKNAKYLKTIPGIGQFFSMLIDAEVGDINRFRNEKKFAAYIGLVPSTYSSGGNTVNGRIIKRGNKLLRRAFIEAVIPAIAHDEYMRWEYDKLRERMNYNKAKTAMARKLSSIAFKCLKEQRNYKKFNKIELEYKKLGRAS

SEQ ID NO: 164289 - protein, 430 aa, unidentified
MNESVSEQPLSPKVAAFVGIDWADQKHDVVLRSAGDPAKAEHQVIKSEINALNDWIAQIQERFGTKGKVLVCLEQSRGALIYQLMAYELFELYPINPSQLANYRKTFFSSGAKDDRPDADLLSELVMCHRDRLKAWKPDDQLTRELASLNEGRRNAVNRRTELANEIKSQLKLYFPVALQILENDITTALAADLLVQWQTLAELQKVSPGKLRKFFYGHNSRQEKKILERLALIKEAKPLTTDVAIIRPNALRVKLLAQQLKSLLPFIAEYERRIAELFGSHPDRFLFDNLPGAGPALAPRLLTAFGTDRDRFEVAGDLLNLSGIAPVRIASGKKTGKSASVHCRRACPKFLRQSFHEFGECSIRYCPWAQACYQAQRGRGKGHHAAVRAVTFKWIRILFACWKQRTPYDPQRYFQALQTRGSDYAQTTA

SEQ ID NO: 164290 - protein, 310 aa, unidentified
MKILPEKPQSVYAGLDIAKATLQLHLQGRQYALANTAPGHAQLLKLLGGVAGVHVVCEATGGYERAAVAALQAAGVLVSVVNPARVRHFAQAQGRRAKNDPIDAAVLTAFGQALAPAPTPVPDAALAELRDLVRWRQHLQEQLVATGHRTEHATTKFVARQQAQLVRQLEKQVAAVEAELAAALARSPHWQAQIAKLDALDGVGMITAVGTLSQMPELGRLSRREAAALAGLAPWTRQSGPWEGQRHIGGGRAEIRRGLYMAAVAVARMKHTVLGQFYARLRAAGKPAKVALTAVMRKLLLQMNQVLKPA

SEQ ID NO: 164291 - protein, 369 aa, unidentified
MKKVSSMAAATTAVGIDVGDRISHWCALNKAGEVVGRGRTRTTAEAVSEQARTWRGARVAIENGTHSGWMSRALTQAGCQTTVANPSRWRGTAHMSKNDRNDAEALARVVRLDPQLLFPIEHRSEQHQQDLAVIRARAQLVKARTQLVNTVRGLVKSLGGRLPRADAAYFTQKTWSDVPTSLHPALAPLYRILAALNQEISILDREIEQLSQKRYPQTARLRSVPGVGPVTALTYVLTLGDPHRFPRSRDAGAYLGLRPRQRQSGDRDPQLGIAKNGDCYLRSLLVECAHHLLSRGPDSALKQWGLALAAGGKGVKRRALVAVARKLAVLLHRLWVSGQRFRPFPEAVPEETVDAEVRAHRSLGTATAA

SEQ ID NO: 164292 - protein, 393 aa, unidentified
MRVCVGIDVAKTVHWACAVDEAGQVILDRAVDNSPDQVASFIVDLRALGGEPVIGLDVVGSFAHFLEASLLAESFRLVHAPGIAVNRAGQGFAGGERKSDPRDARTIAELVRTRDLRPILPDDATVTAIRLKVGRRRDLTQEQTRRLARLRALLCSVHPGLERELDVTCKGPLTLLARYVTPAEIRQAGRRRIVAHLIKTPHLRAVERLVDRALTAAQAQSLAVTGEAAIAELVRELAVEALESKVKIARIEHDLAALLAAHPDSALIQSLPGMGAVLAAEFIACVGDIRRFRSVDALAAAAGLAPVIRQSGKKAGWRRAFGGDKALKRVFFQGAFCAVCTKDPLSKAFYDRKRREGKHHTQALIALARRRVTVLWTMIHSRQTFDPLIKKVA

SEQ ID NO: 164293 - protein, 322 aa, unidentified
MKMVDTSIITAGIDTSKEKLDIAIHGQAERLRVENTTAGWKQLAAWLKRAGVSRVGIEATGGYERGVMRYLQKLELTVVLLQPLQVKAFAKLTLRRAKSDTLDAQLIAQCTHMTDAYNKMAPDPRFDPLADQLTFIEQMEDDLVRFKTRLEHVSEARLRRIVKDDIKRLVRRRLDEIKSLRAAICQHGDLARRYMLVSSIPTVGVRTALTIIVRMPELGQVSREEAAALAGLAPFVHESGKHKGQTHIGGGRAQLRRSLYLAALPGASFWNPALKAHYQGMIARGKSPKCALVACARKLLIFANAVVARGTPWEATRPATAA

SEQ ID NO: 164294 - protein, 370 aa, unidentified
MLYVAIDQHAKQITVVVRNDQGEDVLKRQVSTRREKIDEFFARVMAMDSEFMAILESCGFNDWLLDELRRHGCQEIVLIHPEKPSKRKTDRRDAKKLCDLLWLNRERLAEGKPVHGLRRIYIATQQEKEDRQITSLRQSLGQRRTRVVNKIQRILRRYNLMWDYPTKSFQTKTGKKWLETVSLPQIDRFELNLLLEEWTSIADQIKQVDEKIIERASRSESDKLFNSAQILMTAPGVSHYSGLGLASRIGPVERFPRPRSLANYFGLTPSSRNSGESKDRLGSITKEGSKFARFLLGQLVLHFLKHDSRMRDWYRRIKLRRGSKIARVAVMRRITTIFWHMLTYHEPYSIGGPPPRLREQQASNQRGIAA

SEQ ID NO: 164295 - protein, 338 aa, unidentified
MRLYGAIDLHSNNNVTVLIDEQDKVVYEKRLPNDLGLIAQQLVAYQSSLEGIVVESTYNWYWLVDGLMDKGHHMHLANTAAIQQYEGLKHTDDTSDARWLAHILRLGVLPEGYIYPKEERAVRDLLRKRGQLVRQRTANLLSIQNLITRNTGSSMSSNRIKTLQPQQVDELLADGDLVLAVKANVAMVQCANGQIEILERTVRDRIKPRPEFCFLKTVPGIGQTLALTIMLETGDIARFAGVGNYASYCRCVGSQKLSNGKKKGKGNTKNGNKYLSWAFVEAANFAIRFSSRINSFYQRKKAKSHGVVAIKAVAHKLCRACYYIMKNRVAFDVTKAFA

SEQ ID NO: 164296 - protein, 311 aa, unidentified
MSEKYELEVGVDVAKRELCVCIKTKIKSYPNTSSGIKALFIAISKAGGNARVTCEATGSYQDLLVRSCLKKGIPVSQCDAGQIKHYIKSFGQRAKTDPIDARYIAEFAKDRTPEILGKEWIKQLDMRELKRRLEFLIKQRAQCKTSLEGYQDSSIKAEVRREIKSKTKLISKYELKLHELVESDSMLKKKREVMLSVVGVGERTSLSLLLLLPELGTTNRTKIASLAGLAPMHRKSGMKDGSRTVKGGGRTAVRTCLYMASVSAIRHNAHIRSFYLGLKKRGKKGKSIVIAIARKLLIYLNGLLAKDFEAA

SEQ ID NO: 164297 - protein, 436 aa, unidentified
MRGCRCSMIMGFTKPIEHSNLITKEGDFMNPLYVGIDVSSKSNVVYLMLPDGNKHSNFSVANSQDGSTQLVKRILSVMSSQSLDTVLIGLESTSVYGDNLVYFLREDASLASFHRKIHVLNPKQVKKFKDAYNDLPKNDYVDSFVIADCLRFGRINKEVYIGDYHYKALQNLTRARYFTVCNLTQEKQRFMNVLFKKYSTMTQEKVFSDTFSTTALAVYDEFESAEALAYMDLQELTAFIMEKGKNRFPDPDAVAKAIQKAARSSYRLPKTVNHSVNQVLSISITSIRALEAQIKEFDKAISAQMELLPNVLISISGIGPVYSAGIMAEIGDIKRFNNQAQLAKYAGLAWTQYQSGNFEAENTRLIKSGNRFLKYYLCEAAFSLVRCDKEYKAFYHQKYKEVNRYQHKRALALTARKFVRLVFTLLKDNRLYRPAE

SEQ ID NO: 164298 - protein, 410 aa, unidentified
MEVLYPHCAGLDVHKESVVACVRHMVDGKVATTVKRFKTTTQELMTLSNWLWAEGVTHIAMEATGVYWKPVWHILSDGEFELVLANAAHVKNVPGRKTDVNDAVWLADLMAHGLIKASFVPGEPTQQMRDLLRTRKQFVRERSSHLQRIQKTLEDANIKLDSVISDISGLSGRRMIEALIAGKTEPEALAALAHGRIRASAAELEAALRGRVTAHHRFMLRLHLNHLDAVDVAISSIDKEVDLNVEPFRVAIEMLTTIPGIGSLAAEVIVAEIGIDMSRFETEGNLISWAGLCPRNDESAGKRRSTRMKKGAPWLKTTLVQCAWAATRVKGSYLQAQYLRIRSRRGPKKAIGAVAASMLTAAYHMLKDGTFYQDLGSNHFDNRDKGKQALRLVNRLQSLGFAVQITSLAA

SEQ ID NO: 164299 - protein, 392 aa, unidentified
MNPCALGWDNHRKFSKVSLMEQTPEGEIRAVERARLDHHDKQAMRVWLSRLDPEIPVALEASFGWPWVADLLEELGHPVHLAHPPVVRALAKHEAKTDRCDSDRLGKFQLRGILPHSYLAPPEVRQRRERTRYRMALSALRTAVKNRAQAILHNHGILHDFSDLFGKAGRRFLDDLPLPDGSRQALKGCLRLLDKVLVLMREVEEWMIDNLEEDDIVRLLMTIPGVGLILAHVIRAEIGEIERFPTFRHLASYAGLAPMSDDTAGREGPRHCSAACNRVLRWAFIEAVHGVQHTKGPHGFRLRQRYARLCGQGRPKGCKSSAKVAVAHELAKLVHVMWTKRVPYTDTPPPRPGSRARQPELKESLAAQTALRSDQPCHPMVRRRETVGQTRS

SEQ ID NO: 164300 - protein, 452 aa, unidentified
MAKRREKGRGKFAVLDPDAAGIDIGAEEIYVAVPPDRGEESVRRFSSFSCDLRNLADWLAHCRVRTVAMESTGVYWIPLFELLEERGFAVYLVNAHDLKSVPGRKSDISDCQWIQYLHSVGLLKASFRPPDEICAVRALWRHRGSLLQMASEHTLHMQKALNQMNIQIHHVLSDITGASGQAILDAILRGEPDTSVLAQLCNPRIKSPQEKVAQALDGNYRPEHLFTLKQSLDSYRYYRKLIAELDQEIVRAMQRLPSAQNTPPIPARTKHTAYQRQVNDPVFDLRSELYRIVGVDLTDIPGISAATAQVIVTEIGPDVSWFRNASAFASWLGLCPERKISGGKVLSCKTRKVKNRAAIALRMGANSLCRAKGYFGEFFRRMRAKLGAAQAITATAHKIARVLYHVLLNKEPHAETVFHQYDQQAHERAEMRIRKQAAALGFQLIPNSAAVV

SEQ ID NO: 164301 - protein, 405 aa, unidentified
MAQTARTDVTTSPPALHPPAPTLYVALELSKDTWKLGFTTSRTKKARIRDVKARDLPGFLAEVLAAKKRLELPDDAPVRSCYEAGRDGFWIHRFLEANRISNLVVDPASIEVNRRSRQAKTDRLDAQKLAQLLARHSEGEGVLRVVRVPPPKAEDERLLPRQLKTLKRKRTQATNQIRAALFQHGVDLDPRKGDFKKREFLRELRSARQWDGSRLPAELLRVVRMHWDQYALLVRQIKQLEQRQRQALREARRGSPKATIAQRKAACLSQLRGVGDTGSYVLATEFFGWREFRNRQEVGALAGLTGTPHQSGGSAREQGISKAGNPRVRTLMVELAWLWLRWQPESRTTRWFHEHVGKAGSRGKRKAIVAVARKLLVEFWHFVEHGVVPEGAQLKADGAQARSAA

SEQ ID NO: 164302 - protein, 371 aa, unidentified
MYIVGIDIGKNHHEASIVSPEGKQIGRSLRFATTHKGADSLMSFIFKNIGNSPCVFGMEATGHYWYPIYSFLKAKGYTIYVINPIQSDSLRKMYIRQTKNDSIDSFLIAKVIRFGQFGTTSMADENILAMRQLCRYRDSVISSRTEIKLRIGTIMEQIFPEYEKQFSSLWVSTSMGILEKYLTPENIENAPIDELFEIIKDKSHNRLTRAKAISIKEAAADTFGIKIAQDAFSFQLKQLIDRMNFLDKQIEALDCQILEYYKNFDCYLHTIPGTGMIAAATILAEIGDINRFKSSSALVAFAGIDPTVRQSGEFSSTHNHMSKRGSPYLRHAIFLAATARSFHNSPLNAYYKKKRDQGKHHLTATGAVARL

SEQ ID NO: 164303 - protein, 364 aa, unidentified
MNATTKSTRTAASAVMLAIDLAKDVYELAFADAAGQIVERKRLKRGPFAKCLENRTALRIVMEACGSAHAWARRFARLGHDVTLLPAQHVRPYVRRNKTDRADAAGLLEAARCGDIRPVPIKTPEQQSTQGLHRIREHHKAQRTAAINTVRGLLREFGIAIPAGADKVRPATLAALEDGDNDIPMALRHALAGLLDQITACQEAMAAIEKQLADIAKLDTRCQRLMAASGVGLITATALSAGIGDFARFPSGRHFASALGLTPREYSSGGTRKLGRITKQGDVYLRTLLIHGARSALVVAATAKKRDQPLDRTQQWALALAERKGHNKAAVALANKVARRLWAAEHHGTSFDPEHVSRREACAA

SEQ ID NO: 164304 - protein, 349 aa, unidentified
MSIYIGMDLHKKTTSFCVMTKEGEVLRECKILTVPEEVEKFIKSFGKKENLKIVLEPVSQSGFYADLLESLGTEVHLAHPKRVKVIAFAKVKTDKIDAKVLADLLRANLLPESYHAPREVRLLKEKARSRMSLVEIRTQLKNKVHGILFRNAIVYPKTTLFTKQGRAWLEKLELSLEYRNHLNSNLKIIDSINQELAVMEKDIKQTVLEAEPLSLLKTIPGVGDITALTILSEIGDINRFPDPRHLHSYAGLVPRVFASGENSKYGRITKEGSKFLRYVMIETAHHQLLLKRKYVGLKWYYQRLANRKNNQTAAVATARKLLTVVFKVLKEKRPYEERLPKTMNIISSI

SEQ ID NO: 164305 - protein, 347 aa, unidentified
MRFYTQQHKHYCGIDLHARAMYVCILDQHGAKLVHKNLPTTPEAFLRVVAPYRDDLVVGVECIFTWYWLADLCQQEGITFVLGHALYMKAIHGGKAKNDKIDAHKIAVLLRGGMLPQAYVYPAEMRATRDLLRRRCHLVRKRAELLAHIQNTNSQYNLPEIGKKLAYKANREGVEDHFPDPSVRKTIEVDVSLIDHYDKLLGEVELYITRTAKAHDVQTFARLQSVPGIGQILALVLLYEIQDIARFPRVQDFVSYCRLVKCAKESNHKRLGTSGKKIGNVHLRWAFAEAAVLFLRQNQPGKAYFAKLEHKHGKAKALTVLGHKLARAVYYMLTREQPFDLQRFVAA

SEQ ID NO: 164306 - protein, 364 aa, unidentified
MNKCHLNTELSSLEGTRSEFNRSKAIIKLGIDVHQDYYVVVKQEDGTNPKPAQRFQKEAFLHWAAKLKSQGAEVHTVYEACGFGFGLQRQLSALGIRCYVVCPQKLDERNKRVKTDGLDAKALCLKLDRFVQGNGDALALVRVPTEEEEQKRAIHRQREQLVKTRKVLEAQGRSLMVNHGMEPLSNWWKRRTFAVLRVPPWMKELLSNSQTILIALEEKIRALTAQLQGAAAAKQPRGLGLLSSVVIDREVGNWDRFKNRGRVGSYTGLCPGEYSSGNTRLQSCVTKHGNPRLRAALVEAAWRLVRFQPEYRAVKKWRHLLAKGALATGAARKKAIVAVARQLAVDLWRIRTGRLSAEKLGLIN

SEQ ID NO: 164307 - protein, 369 aa, unidentified
MAKSITYIGLDVHKDTIAVALAEASLRGEVRERGKIPNSPAALKTLAVKLASTGRDLRFCYEAGPCGYGIQRQLAGMGHDCAVVAPSLIPRKPGERIKTDRRDAINLAKLHRAGELTAVWVPDQAHEAIRDLVRARQAAVRTLRQARQQLSGFLLRHGHHYHRPAWTQLHRRWLATLKFEQPGHHIVLEDCIATVEAATARRDRLETHIEAALPAWSLASVVQALQALRGVGLVAAATLVAELGDITRFTNPRQLMAYLGLVPSEHSSGGTRRQGGITKAGNGAARRMLIEAAWSYRFPARISREQLLRQERLAKPIRDIAWKAQERLCRRYRKLARAGKLPTVITAAVARELAGFIWAIAKQAQPTAP

SEQ ID NO: 164308 - protein, 396 aa, unidentified
MESLFVGVDVSKDYFCVSGLDIQGQVRFSLTATADQTGFTEMLNTITSHCASLDEVMVAMESSGCYHLNLFSVLTANHIRTVVVNPLLIANYGKLSLRKTKTDKKDALVIAHYLWSHRETILQYSVSQDYQDIRDVAREREFTGKMIAGIKNDIKRMLQSTFPELEKLVNVFSDTMLHFLKTFPSARLIASTGEKELRQAFIHPDKRMRLVVKPEKIREAALTSVASTGLAKEMLLPGKIETLIHLQQRLGELTTLMVRLCKATLEEELKIITSIDGINTKTAAPFLAELGDLSNYKSYKKVIAFAGVDPSIHQSGKFQGNSKISKRGNRHLRRVIYLMTFCAIRMEGPFKQYFQKRKNEGLPFRKALFATAHKLIRVIFTMLQKRTYFMVNQTAL

SEQ ID NO: 164309 - protein, 364 aa, unidentified
MKRKVYVGMDVHKETIRIAYLTSNSKEILKEQQIKHNEVQIKKFIKKLKTEWNEIHCCYEAGVTGYPLYRYLKSLGVNCILVAPGKIPRQNTGKIKTDKRDAIKLARLMRSGELESIHVPSEEDEAVRDYLRSRDSLRLDLGRNRQRLMKFLLRKDIKYSTTKYWTVSHYKWLNNLHFNNEILQETFNDYYSRVRVQEENLKAMDKKIQEIAESEPYREKVGILRCFRGVDYLTAMFLLCEVNDFKRFKTAGSFMSFLGLVPGEYSSGSKRKQTGITKTGSPRLRRILTEAAWQHRFPGTGSKIVTARRSGQPALVVALAEKASLRLHKKFRNLQLRGKTPQVMITAVSRELSGFLWAAMNLVA

SEQ ID NO: 164310 - protein, 416 aa, unidentified
MEMEREVVCGADIHKQFLLATILTKDGQKFQERFDSNFEGLLNFRQWLLDHDCQRLAVESTANYWQPIYFVVGKDVEFVLANAYQIKHIPGRKTDVLDSEWIAELCLKDLISPSRIFSEDDRDLRSMTRTRENYVKMRSQIKNRIHQELESACIKLSSVLSDIFGKSGIHIIRGILNGLSIDDILDRIPSKKLKAKRGEIQDAIQANISPVQIDLISLLLDSVDFLNREIESIDKQIQSLISTRQEDLKIAMSIPGMGFTSASTILAEIGNLKDFNNGEKLAAYCGLVPSVYQSAGKLITGHITKHGSPHVRRMLIEVAHAISRTKADSKLKRFYFRIKSRHGAKVAVVALARKVLCILHHLIVNREMFEDGISSKSKREKTGRSSSSTEMIIEDAIQILVRAGYLVQKRSEKEGG

SEQ ID NO: 164311 - protein, 369 aa, unidentified
MGEYSEAFVAFDVSKMKHAVAIADGGRGGEVRFLGDISSSPEAVERLIRKLAGRYGKLHFCYEAGPTGYGLYRQIRALGQACLVIAPALIPKRPGERVKTNRRDAVTLARLHRAGELTGVWVPDAVHEAVRDLVRAREAAADDLRRKRQQLLSFLLRHGRIYSAGGHWTLAHRRWLAKQAFEHAAQQIVFQEAIDAIADAAQRLRRLEHQLALIVPSWSMAPVVEAYQAMRGASFLVAVIFAAEIGDVRRFETPRQLMSFLGLVPAESSTGDTVRRKGLTLAGNRRARRALVEAAWTYRYPARVSETLRVRLDGLPKAVRDIAWKAQVRLCARYRRLSATGKKLPVVVAAIAREMAAFLWAIGREVAPV

SEQ ID NO: 164312 - protein, 345 aa, unidentified
MKKVMAGIDLHSNNLVVGIVDQDGKRVGQKKLPCDLKEVVKFLGPFKRRLEQVAVESTYNWYWLVDGLKALGYPVVLANPAAMEQYSGIKSAGDTHDAFFLAEQLRLKILPTGHIYDAELRPVRDLLRRRLLLVHQRTALMLSFKSLYTRTTGQEMTLSGLKELEIKEAQELYDHPANQMIAGMQIKHIDHLSESIEKIEKAVLASARELPFYSKLTSLPGVGRILGMTITMEVGDIKRFADAGNFASYCRTVAAQRTSNSKKKGENNSKCGNKYLAWAFVEAANFARRYDAQCRQWSDRKAAKTSKVIATKALACKLAKAAWHVMSQGSDYDAERMFGQPATAK

SEQ ID NO: 164313 - protein, 321 aa, unidentified
MQDILTNACGLDIHKETVVACIIKNKPILESCADESKVTVTTEIRTFSTLHDDLQKLCLWLESEECLDVAMESTGIYWHPVYDVLETAFDGNINLLVVNARHMKNVPGKKTDVKDAEWIASLLRVGLLRGSFIPPVEIRQLRQLTRYRKTIVEDICTQKNRIEKFLQSSGYKLSSFLTDVFGTSGRSLMKILVSKGKITSKDVERELRGAARKKIKDMRHALNGVMNEHQRHFLSLQLEHLDSLISHQKKVEGDIEAKSAPFSDEIELLTTIPGIGPTAAEAIIAEIGADMSCFPTANHFTKWAGMSPGDNESAGKKKVHA

SEQ ID NO: 164314 - protein, 415 aa, unidentified
MNRLIERCAMLDVHKSQVTACVRVPDGDGGRRQEIREFRTTTAGLITLADWLRSWSVTVVGMESTGVYWRAIYYLLEDEFECQLFNARHLRHVPGRKSDVQDAEWGCQLIEHGLVRTSFVPPRPLRELRDLVRYRKAKIQERGREVQRVEKTLQDAGIKLSSVASEVLGVSARKMLDALISGTHDPEVLAELAKGALRKKIPALREALEGRFTGHHALLIGQMLAQIDFLDETIATLSARVEELTRPFSREIELLDTIPGVDKRAAEMLLAEIGPDMSRFPTEHHLASWGGMCPGQRESGGKKHSAATRKGSKWLRGTLTECSKAVVRTKGTYLSARYHRIKSRRGHAKATVATGHKILTAAYHVLNQGVPYNDLGEEFFYRRDTENTERRRRRLVKQLERLGHQVTLEPLPEAA

SEQ ID NO: 164315 - protein, 341 aa, unidentified
MKLYGGIDLHSSNNVIALLDEEDQSIYRKRLPNNLEYILGQLSPYREAIEGLVVESTYNWYWLVDGLMEAGYRLHLANTAEIVQYEGLKYSDDDTDACWLAKLLRLGLLPEGYIYPKAQRPIRDLLRKRSQLVRQHTANLLSVQNLMARNRGASISANAVKRLDFDQVGRLLENEPLVLAAAGTLVVMRSQQEMIALVEKVARRHVKHSPAYGAFKRLRTVNGIGEVLGLTILLETGDIGRFERVGNYVSYCRCVDSKRISNGKKKGKGNRKNGNKYLAWAFVEAANFAVRFEPRIRRYYQRKRARSNAIVAIKTVAHKLARACYFILRDGKSFDVERAFG

SEQ ID NO: 164316 - protein, 354 aa, unidentified
MIIIGCDYHPGFQQIAFVDTDTGEFQERRLQHREEAEKFYRDLAAQGMQVRVGMEASGQARWFERLLSELHFELWIGDAAEIRTKRVRKQKTDRQDAQLILRLMLEDRFPKIWVPSWENRDLRQLLWHRHRMVQARTRIMNQLQAVALNEGLRCKKRLWREAGREQLESFVLAPWASRRRRDLLELLDQLTPTIAELTQAIEQEAGKCPAAQRLQTHPGVGALTGLAFVLIIGRAERFQCGKQIASYLGLVPLEDSSGQRRRLGHITKQGNSLLRFLLVEAAQVTVRSDPEWRRKYFHLALRRGRKIAKVAMARKLAVRLYWMWRKGWNYEQLKKFGSHAGQPGNRDGVQSITE

SEQ ID NO: 164317 - protein, 320 aa, unidentified
MDAVLGIDIAKAKFAAALLRPDGKVRHKSCANTPTGFADLAAWLLRQQVTHVHATLEATGTYGEALALWLHDAGHLVSVVNPSVIHAYARTQLTRSKTDRIDAELIARFTASHQPAPWTPPAPEIRQLQALVRRLDALQGMRTQELNRLASGVTVAEVRASIETVIASLDAQIAHVHQLIRDHLDRHPGLRAQRELLITIPGIGEATAAVLIAELFDKRYTSARQAAAFAGLVPRLVESGTLRGRTRLSKIGPGRLRKALYMPAMTALRWNPTIRAVRARLHAAGKPPMVIIGAAMRKLIHLAYGVLKSGRAYEPTCAHP

SEQ ID NO: 164318 - protein, 372 aa, unidentified
MNYNTIFVGMDVHKEKFSLCCYSIEKDEFSHPHTTAADHKHVLAYIASLREVFGEDTPFLCGYEAGCLGFTLYHQLTEHHVNCVILAPTTMPAVKGKKKIKTDKRDARNIAKCMAYHDYSPVHIPTEQDEQVKEYIRMRADHKTALKKVKQQISAFCLRHNLRYEGKSHWTASHIKWLKSLKPDGLYDEILKEYLLTLENLTDKIERFDQRIAVLAAKEEYSGNVKKLSCFLGIQTQTALASIVEVGDFKRFPTAEKFAAYLGLVPGEDSSGDSRKRLGITKAGNTHVRRLLVEAAQGYGRGQAGHKSKALKARQQGNPPEVIAYADKANERLRRKYYRMVLSHGKKANVAKTAVARELACFMWGMMTGDIA

SEQ ID NO: 164319 - protein, 325 aa, unidentified
MTHSSLSDSSYFVGIDVAKAKLDLARTDDAKILTVNNDPNGIRQIVDALRRTPPSLIVIESTGGLERPMLDVLLDADLPVALVNPRNVRQFAMGIGILAKSDPIDARVLSVFAKLANPRLAEKRSANQVELDALITCRRQLTQLRAIQANQRQSTVSKAALKTIDAILRSLGKEIGKLDGKIRALVESDDDFHSTDQLLQTVPGVGPVVSATLLAELKELGSTDRRRVSALVGVAPYNHDSGTMKGQRSIQGGRASVRSVLYMATVTAIRFNPVIKAFAQTLDQRGKPKKVQIVACMRKLLGFLNAMIRDGLTWNQLSVVKALAF

SEQ ID NO: 164320 - protein, 361 aa, unidentified
MNRGQSNKLDFKGQNIYVGIDAHLKSWSVAVLSQHSVLKKFRQDPSPESLHKFLTTHYPGADYHSVYEAGFCGFWIHENLTGLGINNIVVNPADVPTMSKEKLRKTDAVDCGKLARELRSGTLKGIYVPDVATLEMRSLIRLRNRIVKDTTREKNRIKSFLRFHGIDIPEEFTRHSVGNWSKRFLAWLREVSLSTEYGRQALNIHIEQFVRLRGMLLEQTRILRALSRSEVLKEPIRLLASVPGIGITTAMSLAVEIDDIHRFSSADALASYIGLIPMCHSSGESQGDGNITVRKHAMLRCYIIEAAWIAIRKDPAMTLAYEGYRKRMNAQKAIVKVARKLVNRIFFVLKHGQEYVPCVVN

SEQ ID NO: 164321 - protein, 433 aa, unidentified
MKVLYERVAGIDVHKDMVKVAIRSPGEKPWTRETEILEFRTFYGVLQAMARELRRRGVTHVVMEASGVYTEPVYYALCEQDFTEVAVINPAHAKALKGHKTDARDCARLAELFECGLLRGSYIPPAELKEVRDLTRYRMKTVQARTSEIQRLAKALESAGIKLGSVASDITGVSATAMIESLIDGERRGAVLADLARGRMRTAGKLADLSMALTGRFTEHHALLCRLHRDRVTVLDEAVAGLDGRIAGKVTPWQREAGLLTSVPGFGDVVAQAWLGEIGPAPHRHFATCEKLASWVTLCPGNNISARKRKYGRTGDAGTYIKPMLVQAAWAAIRVRGRLQARYNRLVRRFGGDKNPAAKKKAITAIAHTLLKIAYQVLKSGMPYQELGADYCTRRESPEQKQAWLERQLQKLHPGCTVTITISPPEAALPPGA

SEQ ID NO: 164322 - protein, 373 aa, unidentified
MKKRNTSELSPKRASKAPEQEGPFTIGMDLGDKTSQCCTLDKHGEVVRECGVATTKKAMLRTFGAMKHCRIAIEVGTHSPWVSRLLKSLGYEVIVANARQVKLISESSRKDDRLDAQTLARLARVDPQLLRPIQHRSEKAQGHLMLIRVRAALVETRSSLVNTARGLAKATGERLVQCDTDQLRVARMEGLPAELREALEPLLQQVESLTEEIHESDRKIEQIARTEYPETTLLQQVSGVGTLIALTFVLTVEDRERFQKSRDVGCYVGLRPKRSDSGQRQPQLRITKEGDIYLRKMLVQGAHYILGHRGPDTDLKRWGLKLAERGGRNAKKRAIVAVARKLAILLHRLWVRGEVYEPLRNQAAKQSRSQVAA

SEQ ID NO: 164323 - protein, 349 aa, unidentified
MVIIGVDPHKDVLVAVAVDGNGRQLALRDAPARPRGYKTLLSWVNEFEQRVWAVEDVRHVAGGFVRFLLAAGESVVWVPTQMSADYRKKVRASGKSDPIDALACARAALAEDLPAAVPDTEARNVKLLLDHREDLVGEMVRMCSRLRWHLHDIDPDFAATIPKHKLHRPKWNKSVQEFLARQAGSIAVAICVELIGRIQELAQRAAQLEREIAALVVIHVPQLLALEGCGPLSAARILAETGDVRRFTSAAAYAMHTGTAPIPASSGNTHRFRLNRGGNRRLNAAIHRIAITQKRMHEPARTYLDGRRAKGNSNTEAIRALKRHLARRVYALLKNGPEHEQADSTAQAA

SEQ ID NO: 164324 - protein, 383 aa, unidentified
MPDVSSTAPAQVRLWVALDVHKHSIVAATLPPTGGAPEVQRIESSERAIRRLIDRLGGPSGLAVAYEAGPCGYDLFRLFGRLGVACDVIAPSLVPVRAGDRVKTDRRDAKKLVRLYRAGELSFVAAPTPEQEGLRDLVRCFDDLRCARTAARHRVAKQLLRHGRIFREGKKSWTKQHVAWVRRQRLEQPNAQRALEHMLAHLNGLDAQLGALEHELAALATSDPWRDPVAWLCRFRGIGLRTALGLLAEIGDFRRFGSARELMSFLGLTVSEYSSGDRQHRGHLTKTGNRHARRLLIEAAWHYQHPPRRPLRTGALAEPVPSAVDARAWQAQIRLHHRYRHLTDHRKRSTVAVAAVARELAGFIWAAMTHQPVRTDHQLTATA

SEQ ID NO: 164325 - protein, 339 aa, unidentified
MKYYAGLDISMEATSICIVDADGTVVREGTVDSTPETIIAFLKNGEVTLDRIGLEACPLSEWIFDGLAEQGCPVVCLETRHLKALLKSGINKTDRDDARGIAQVVRVNLFKPVHVKTRIARRYRALLSARRLVVAEVCRMENHLRGTLKAFGLKVGSTTRRTFDGRVRGLVIGEPGLELVADVLLDVRRWLLARLDDLDRRVLRIVRNDPVCRRLMTAPGIGPVTALTYRTAMDAPARFMKSRTVGAYFGLTPRRYQSGEIDHSGRISKVGDGTVRAALYEAATVLLRRNTRPSALKSWGLAIYKRRGRRKSVVAVVRKLAVILHRLWTGNETFRWSAA

SEQ ID NO: 164326 - protein, 310 aa, unidentified
MDSITVGIDVSKDRLDVALRPSGEAFAVERNAAGLERLAARLSELSPYIVALEATGGFEAVAAAALAAAGLPVVVVNPAQIRAFAKAIGQRAKTDPIDAAVIAHFAEATKPELRPLPDEATRLLADLVARRRQIIEMIGAERQREKRTTAARPKKSIARLLKALEKELASLDADLDDTVRGSPAWREKEDLLASVPGVGPTIARTLIADLPELGRLNRKEIAALAGLAPFTRQSGQWHGRSFIGGGRTAVRTALFMGAMVAKQHNPVLKAFFDRLVAAGKPKMVALIAVARKLLTILNAILRDNRPWQIA

SEQ ID NO: 164327 - protein, 347 aa, unidentified
MNFYTQQHKYYCGIDLHAKSMYLCILNQEGNLVLQRNIRTHPEVFLKTIERYREDIVVAVECIFTWYWIADLCAQENIPFVLGHALYMKAIHGGKAKNDKIDAHKIAVLLRGGMIPMAYVYPQEMRSTRDLLRRRMHLTQKRAELLGHIQNTNYQYNLPDIEKKVAYKANREGVAEHFPDESVRKSIELDLKLLDYYDQLLPRLEHEISLIAKIHDPDSYFRLRSVPGIGRILGLVILYEIHDIRRFPTVQDFVSYCRLVKSAKESAGKRLGTSGKKIGNAHLKWAFSEAAVLFLRRNPEARKYRDKLQKKHGKAKSMTILAHKLARATYYILKRKEVFHMNTFFER

SEQ ID NO: 164328 - protein, 342 aa, unidentified
MTFVGCDLHTRMQQVAVLDTGTGEVSEHRLPHEGAAVEEFYAALPRPVTVGIESTGYAVWFHAVMQRLGHTLLVGDAAKIRAMVVRKTKTDRRDARHILDLLRHDRFPAIWVPDPATRDLRALLTHRMRLVRIRTMVKNGLQAIALNARLTCGSKLLRQAGLVQLQALALPPHTTQRRDQSLELLAGLTTQIRVLDDAITTAALAHPDGPRLITHPGVGALTALATVVVLGPVARFHDSKHVVSYVGLAPAVHASADKAHLGHITKQGSPLLRFVLGQAAAHAARMDPDLQRTYRALVHRRGRPKAKVAVARKLLVRLFILLRDQIDYDEFCRRGRAARAAA

SEQ ID NO: 164329 - protein, 346 aa, unidentified
MEEITTVGIDLAKSVFQIHAIDASGRVVLSKAVRRSAFLALMAKIPPCLIGMEACASSHYWARELARLGHEVRLIPPAYVKAYVRRQKNDAADAAAICEAVSRPSMRFVPVKTADQQAVLMLHRSRALLVGQRTALICALRAHMAELGLVAPTGARNIASLLAILGDPSDQRLPVLARLALEPLARRIQGLQDEVDGLDKRLLDWHRANDDSRRLATIPGVGPLIASAIAASITDPSMFRSGREFAAFLGLVPRQSSTGGKERLGRISKMGDRYLRTLLVVGATAVLRHAKTKDSPTKTWVQTLLAKKSFKVAAVALANKNARIAWAIMTRGEVFRDTTQPRAMAA

SEQ ID NO: 164330 - protein, 422 aa, unidentified
MSFGAFSAARRKGFKMPYRVAAIDVHKKVLVVVVAEVREGEPEWTVRRFGTGAAELRRLAEWLEQEAVAEAVMESTAQYWKPVWLALEPQMRLHLAQAQSNRAPKGRKTDARDAERLWRRFVAGELMLSFVPDAGQRAWRMITRTRLSLVRERVQVRNQIESLLEEGGIKLAAVVSDLLGMSGRRILQALARGETDPETLAGLGEATLRCGRQALADALTGRMSPVHCALLAQHLERIALLDRQIEHLSRMAAEQMQPWEDALRRLVEVPGIGADAAQDILAEVGPTAAAFPTPGQMASWTGVCPGSQQSAGRNASGRSAKGNPNLRRVLTQAAHAAVRTKGSFFEHLFRRLVVRLGYAKALWAVAHKLCRIIWKILHEGVHYIERGDTLDPRTAQRRIQHHLRMLRKLGYPLPPKPSPAAQ

SEQ ID NO: 164331 - protein, 368 aa, unidentified
MRLFVGDDWAEEHHDVEVMDAGGRVLAKRRLPEGVAGMARLHELVGQQLGEDAEDAEVVVGIETDRGPWVAALIAAGYVVFPVNPLQASRYRERHGVSGAKSDPGDSHMLADMVRTDSHQLRPAAGDSPQAAAIKVVARTHKTLIWERTRQTQRLRHQLREYFPAALEAFEDLDATDALELLGKAPDPARAAKLTRAQVSAALKRAAVSEQVKILQGQVEAHFGRHPDAEIYLSQPGLGAILGGRVLGEFGDDPHRYTDARARKNYAATSPITRASGKKKIVAARYIHNGRLIDALMAQAFAALNASPGARACYDDLRNRGIEHNDALRRLANRLVGILHGCLKTRTLYDEETAWSHRENLPQSSVAA

SEQ ID NO: 164332 - protein, 406 aa, unidentified
MEIRPIYKRVIGLDVHQNKISACALIEQPDGTVTVEHREFGGYKRDRRALADWGRDMAPDVVVMESTGIYWKSPYAALEKVGIAAWVVNARHVKTVPGRKTDVADAQWLATLARAGLLRASFIPPADIRHLRLIARQRQKLGGMLASEKNRLHKLLADAGIRLNVLVSDIHGQAGRAMVKALIAGQPMPAILDCAGRLRATRAELFEALQPEELSAKHRFVLREVMAHIEYLEATMSRFEQTLLEGLDAWQPQLVLLQTLPGIDQMGAAMLLVEIGTDMQSFGSAERLASWVGICPGNNESAGKRKSGRTRKGNAWVRRLLCEFAQAAARSRCALKDKFAALSIRKGHKKSIVALAHKMLRIIHAMLTNGTPYQDRTVDYEALVVQRNAPRWIKMLAKHGYLPTAG

SEQ ID NO: 164333 - protein, 409 aa, unidentified
MRYYLGVDWADRTHAVWGMDEDGTKIAARSVSHTAEGFSEWGRELDEWRAQAIELWAAIERPDGRVVDFLLDHGVVVYPVNPKALDRARDRFRQSGAKSDPFDARVLADFLRTDHAHLRALPPSSEAAQELKLLAEDCQRHIRQQTRLVNQLTATLKAYYPRALEVAELTAVLAREFLQAYPTPEAVTALTERRWQRWARAHRLSEARTRELWAVLQRPQLPVPAHVVRAKVRLMQSLVAQLLPVMAAVAQYRKAIDDFFASMPAAQWMRTLPIGKHGITAPTLWARLGDAPGRWESFRHLQAQAGAVPVTKRSGKQRVVQFRFACDKALRYVVDQVAFLSLLSSEWARAYYDQQRARGHAHRQALRALGAKWLKIIFVMWQRQVPYDEQYHLAMMTRQQLRQHQKEIA

SEQ ID NO: 164334 - protein, 389 aa, unidentified
MAKISFDELMSIGIDIGKDTFHIVGFDPDGQLVMRKRIKRLALVATFEKLPRCVVGMEACLSAHFVSRTLRKLGFEPRIIPAIYVKPFIKGQKNDYNDAEAIAEAALRSNLPVVPEKSQELLDLQALHRVRSRLVSRRTATINQIRAFLIEQGITVRKGLRALKNSFETILEERKDEISPRMRQILIGLYGGWLWLDDRIETVSKEIEQISRTEENCVNVMTIPGIGPMISTAMVAAIGTGEAFGRGRDFAAWVGLVPRQYSTGGRTVLGRITKRGSRYLRMLFVQAAKVILMRTNRWPDFSFGDWLTRAAERMNRNKLAVALANKLARMAWSILRHRTAFDAPRDEVAIGVLSRIDPKEFATDRKHGTEQLRPQNLTAQTVIMDLAGN

SEQ ID NO: 164335 - protein, 317 aa, unidentified
MRTVALDLGSKITFCEVKDSKVVERATGSSLSDLERLLGPNTPPAKVAFEACREAWAVHDQLEMWGHEPLMLDTTRIRQLGIGQHKRKNDRIDAETMARALEIGRIPLAHVLSPHRRELRLQLSVRRGLVATRAEYITQIRGLARAHGKRVPNCDTENFLEHLRQTPLGEGMRLLAEPLVKVLEVLTPQIALVEAKLEQLCAGEPVIKRLGTAPGVKLIVAAAFVSVIDEAKRFRRAHHVEAYLGLVPSEHTSVHRKLGSITKQGNSYVRALLVQAAHSVFRLRADDPLKRWGEAIEQRRGKRIAVVAVARRLVGIL

SEQ ID NO: 164336 - protein, 334 aa, unidentified
MSNVTTVGIDLAKNVFSLHGVDASGAVVLRKTVSRARLMDAVAQLPVCLIGLEACSGAHEWARRLQALGHTVRLMAPRFVAPYRKNGKNDKNDGNDAEAICEAVSRPSMRFVPIKTLEQQAVLCLHRVRQGFIEERTATINRLRGLLAEFGFVLPQRVTEVRRRATEWLEQLPPRAACAVRDLREHLRVLDARVKEYERSIEAHARDHDGAKLAQQRLGIGPMTASAIVASVGDVREFKNGRQFSAWLGLVPRQHSTGGKQRLGHITGRGDPYLRTLLVMGARSVLQRASSQSDPLSRWALAVRVRRGYHRACVAVAAKNARVVWAMLNQHACA

SEQ ID NO: 164337 - protein, 315 aa, unidentified
MSKTTFVGIDVSKARLDVAVVPSGESFSVPNDDAGIERLVARVRELDPALVLLEATGGLERRALARLVTAGLRAMAVNPRNVRDYGRALGKLAKTDRLDAVILARFAEAVRPEWRPMADEQTHQLQEHLTRRRQLVEMITAEKNRLLSVEDHGIRKQIKATIGWLEKQLNINEYDLDQAIKETPVWREKANLLKSVPGVGRVTVSTMLALLPELGMLTRKQIAALVGVAPFNRDSGTLRGRRAVWGGRATVRSVLYMAALVGTRFNPALRAMYLRLLAAGKRKKVAVVACARKLLTILNAILRTRTAWRSVEVTP

SEQ ID NO: 164338 - protein, 354 aa, unidentified
MSQTLNAAIAVVGIDIGKNSFHIVGHDERGAIVLRQKWSRGQVEARFANMPPCLVGMEACVGAHHLSRKLNSLGHNARLMPAKYVRPYSRGQKNDFRDAEAIAEAVQRPTMKFVATKTAEQLDLQALHRVRERLVSQRTGIINQIRAFLLERGIAVRQGQRFLRAELPRILAMPPDVLSPRMVRIIEDLAGDWRRLDERVESLSNEIETIARQDAGCERLMSVPGIGPIISSAMVAAIGAGDVFTKGRDFAAWLGLVPKQISTGDRTILGKLSRRGNRYLRVLFVQAAWVVLIKPKIWERHGLKPWIEAARKRLHHNVLAIALANKLARIAWSVLARGRAFEARKIDQAANQSA

SEQ ID NO: 164339 - protein, 356 aa, unidentified
MSNITRVGVDLAKNLIQIHAVDLAGKVITNRAVKRENFLQWCAQLPAGCLVATEACTGAHHWCRQLRERGLDARMIAAQFVAPYRIQGKSGKNDANDAAAVCEAASRPHMNFVPPKTIAQQGMLCVHRLREGLKEERVACINRIRGLLAEFGVVVPQKPEVLEHHLSALIEDGGNEIAGMARLVLQRAQEHWKEIDQHIQWCDQRIAAHQKDDEQVQRAAGLKGIGPITASAVVAAVGDFKQFKNGAQFGAWLGLTPRQHSSGGKTSLGSITKRGDTYLRTLLIQGAKSVVLTHREPADPISQWAQRLRERCGWQKAAVALANKNARILWAVMTKGERFDVHHVSVHPSAARPAGA

SEQ ID NO: 164340 - protein, 352 aa, unidentified
MTNNISETIGCDLGDKKSELCVIGADGAVAWRGSVRTTRKAMTQTFTRPSAHVVIEVGAHSRWVAALLEELGHRVTVANPRRVKAISDSDTKTDRRDAELLARLGRADVNLLAPVQHRGRQQQADLAVAKSRDMLVAMRTKLVNHVRGTVKSLGERLPSCTAASFARQTRPLIPDELKAALEPVYQALDRIDEQIKQCDQMIERVAKRYPDVAVVSQVNGVGVLTALVFVLTIADKDRFKKSRMAGAFLGLRPRKSQSGKGDPELRITKSGDPFVRRLLVNGANYILGPFGQDSDLRRWGLELSKRGGKNAKKRAKVAVARKLAVLMHRLWVTGEVYEPTGYQQHRIEQAAA

SEQ ID NO: 164341 - protein, 460 aa, unidentified
MNRKHKKKAVNEPRDWSLNLEVVHPNAAGIDIGNESHYVAVSPDRDPIPVRHFACFTEDLHRLADWLKSCGIATVAMQSTGVYWLPVYEILTEEGLEVFLVNARHTKNLPGRKTDVQECQWLLQLHTFGLLNNSFRPPEEICVLRAYWRQRGEHVASASACIQRMQKVLTEMNVQLANVISDISGLTGMAIIQAILDGERDRYRLADLAHARIHATREEIARSLEGNWRKELLFILQQERNLYLIYQQQIAECDTALAAHLQSLDDKSKPGSQPPATRASKRAGSNAPTGFDLRGELYRISGTDLTQIEGINIMNAQTIISEVGVDMSRFPSEAHFASFLGLCPDNQITGGKVLRRGTRHVENRASTALRMAASSLSRSKTYLGAKFRRLRARLGAPKAITAMAHMLARLVYRMLKYGEQYVDKGMNYYEEKYRDHEIRSIQKKAKELGLDVTLSPATAA

SEQ ID NO: 164342 - protein, 358 aa, unidentified
MKQTTKYVGLDVHQATTVAVVGDDTGRVIARSVVPTEEAALLEFVRGMRGAVHVAFEEGTQAQWLYDLLVGRVARVIVGNRRGEPRRGSKGDWHDAEWLMARLRTGELRAVYHGSPHRATLKELGRAYRTVVEDATRVMSRLKALFRGRGIRTTGRGVYDPAQRAEWLAKLDGAGVRLRAATLYAELATLHTLRPMAKTALVAAARRDPAWDVLRTIPFLGPVRVALLLATLQTPWRFRTKRQLWSYAGLAVVTETTAEYALDAGGQPVRRRRPPMTRGLNRNHNHVVKEVLKGAATAAVARPGALRDFYQGLLARGMRAELARVTLTRKLAALTLRLWKTGERYDPAKLTIPAVPAR

SEQ ID NO: 164343 - protein, 479 aa, unidentified
MRLLSLTINPEAKMTQSRRTRSSSSRRRSLPPELQHVNLNAAGIDVGAEAHFVAVPAGRDPQGQNVRQFGAFTADLYTLADWLAACGVETVAMESTGVYWIPLFEVLEERGFEVKLVNPRHVKNVPGRKTDVLDCQWLQQLHTYGLLQAAFRPEDQICVLRSYLRQREMLVRYASHHIQHMHKALEQMNLKLHHVISDLTGVTGMRILRAIFEGERDPHKLAGLRDHRCKNDEATIALALEGHWRPEHLFALRQAVELFDFYRQQITACDAQIEDCLHTFQDRSAGRPLDKPTRRRNRQKNQPAFDVRSHLFRITGVDLTAIEGIDAQTALKLIGEIGLDMSRWPTEKHFASWLALSPGSKISGGKTLSARTKPYPNRAAAAFRLAAHGLHNSHSALGAFLRRKKAHLGAPKAITATAHKLARLVYAMLKNGSQYVQTGEAEYERRYRERVIHNLKRKARALGYDLFQRNLPALPLAPP

SEQ ID NO: 164344 - protein, 334 aa, unidentified
MNFKNFVGIDISKGTFDIALIKENNVSNTISDDFSNNSQGIVKLEEFLKKQGVNMQETLFCMEHTGIYCRLLSHYLTERKYHVWLEMPVQIIRSLGVQRGKNDQVDARRIAEYACLKKDKAVLWEPPREILIEINDLLTLRDRLVESRKSLKQPIKELLDAGFEDAAKLIESRCKITLNAIDKEIKQIEKELSNKINKDTNLKRLYDLATSVPGIGKITALALLYFTNEFRFYNNPKQLACYCGVAPFEHTSGTSVKGKTRVSSFANKKLKKLLHLVAMSTLSKDRELSSYYMRKVDEGKNKMIVINALRNKILHRLCAVIKRGTPYQLEYQIA

SEQ ID NO: 164345 - protein, 366 aa, unidentified
MKKISTVQAFSNETLKEQKLTIGLDLGDRWSFYCVLDEAGKIILEQKVATTPEAMKQTFGKIPRSLIALETGTHSPWVSRLLTELGHEVIVAHAQKVALITKSNRKDDRHDARALARLARIDPELLGPVRHRSAKVQIHLTVIRARAELVSARTALVNAARGLVKSFGERLPKCGTYQVNEKLAEGVNAELRDVLVPLLREVESLNERIREYDERMEKIAKEVYPEVALLQQVKGVGTQIALTYVLTIEDPYRFPKSREVGCFLGLRPGRRNSGESEPQKKISKEGDRYLRTMMVQGAHYILGPFGEDSDLRRWGLKLAERGGKNAKKRAIVAVARKLAVLLHRLWVSGEVYEPLRNSQKAIRAAA

SEQ ID NO: 164346 - protein, 365 aa, unidentified
MQKISTMRTASKNIFQGQLTVGLDLGDRSSAYCVLDGAGEILLEQRVATTPVAMRQVFEKMPRCRIAMETGTHSPWVSRLLTALGHEVIVAHAQKVRLIVKSRRKDDRLDARTLARLARIDPELQSPVKHRSAQAQLHLAEIRARAALVSTRTALVNAARGLVKSYGERLRKCHTQQIGREMAGGLSMELRQALEPLLREVESLNDRIQEYDRRIEKMAKERYPETALLQQVKGVGELIATTYVLTIEDPHRFRKSRDAGCFVGLQPGRRNSGESEPQMHISKEGDRYLRTLLVQGAHYILGPFGADSDLRRWGLKLAARGGKNGKKRAVVAVARKLAVLLHRLWVSGEVYEPLRNSQKAMNAAA

SEQ ID NO: 164347 - protein, 408 aa, unidentified
MKAMYRRCAGLDVHQKEIVACRRLLVGRKLQVEVGRFSTTTQGLLELAGWLEDGKVTHVAMEATGVYWKPVWHVLHGRFTLILANAAHIRNVPGRKSDVNDATWIAELLAHGLIRASFVPPQPIQELRDLTRTRKELTREIVRHTQRIHAVLEEANIKLASVITDILGFSGRRMLKAIVAGETDAGRLAGLGSSRLAAPREALVAALDGRIRDHHRFLIGQHLKTIEQIETAIGEFDARIEAALAPFRDPVERLKDVPGISQTAAQIVIAEIGVDMSQFPSADHLISWAGLCPRLDESAGKRRSTRVRKGATWLKPVLVQSALAAGRKKNSSFKTRYHALKGRVGPKKAAVAVAANLLRVIYHMLKDGTCYQDLGEAYRRPHNPARAAANLANRIRALGYQVDIRQAA

SEQ ID NO: 164348 - protein, 427 aa, unidentified
MPEKPVAGIDVSKDFSDMCIITPDNKVFQTVHIFHDATSLRRSLAALEAAAREFREKPEIVMESTAHYHRVIAQFLQSAGYEVMVINPMQSGALKNINIRKVKSDKSDAHRLALLYRLKTLHTTNQPNELLSNIRDYCRQRADIMNSHTAYVNRLTSLLDQAFPGYARVFSRVACKSSLGILKTYPSPAAILAADPEQLAETISKYARRGVTTDYVIKKVAALRRAAENAEEINLKREAYSVLIVTVAELLEGLQRHIETLKKRIIELATEDPSVKFEVSLLQTIPGIGLYSAVLLRAEIGDFSLFQKPKQLVAFFGMDPSTRQSGKFVGTKTKISKRGSPYARAILDICAQSAVHPVKGKEPANPVLANYYAEKVKTKEPKVVKCIIMRKLVNIIFAVLRDKKPFELRTPEEHIELLKHPNISRAA

SEQ ID NO: 164349 - protein, 349 aa, unidentified
MGEVSIIGVDIAKSVVQIHGVDADGTVVIRKRVGRAKVVEFFAKLPPCLVGMEACATAHQWARELKKLGHDTRLMPPTYVKAYVKRGKNDAADAAAICEAVTRPSMRFVPIKSVDQQSALMLHRTRDLLIRQRTQLINALRAHLAELGLVAAKGHEGVQQLVTAVTESGDEQLPSNARFACQSFVAQLHAVQTQINGLDKRVTQAHRANADSKRLEDIPGFGVILSTAVVATMTDPKAFRTGREFAAWIGLVPRQNSTGGKERLGSISKQGDRYLRRLLVLGAISIIGTARARPDKYPWVTELLGRRPAKVVAVALANKMARTAWVVLARGETYRAPTRSSNAAVAAAA

SEQ ID NO: 164350 - protein, 371 aa, unidentified
MGKRSMFVGMDVHKESIDVSLAEEGRDGEVRHYGVITGDVETLAKVVRALRAPDRRLRFVYEAGPCGFGIHRYLTAQGEDCVVVNPSSMPKRSGDRIKTDRRDGNALARLHRAGELTAIYIPTPADEALRDLVRAREDAVGLSTQAKHRLKAFLLRQGRRYAGRAGWTRPYRRWLADLSFPLAPQHIALQEYRDTIDETERRVERLTDQLRQLTPAWRWAPVVEALQALRGISFVTAVGLVAEVGDIRRFTHPRELMAYLGLVPSEYSSGPSVRRGGITKAGNPHARRLLAEAAWAYQGVPRIGRQMLYRQEGLSKTVCAIAWKAQLRLTSRFRKLVARGKAKPKVATAVARELTGFIWAIAREVPPPPAS

SEQ ID NO: 164351 - protein, 406 aa, unidentified
MRSIALDVHRDFCEVAIKEGGEVRSAGRVRTSVEEFELFARSLAKDDQVALEATGPANAIVRVLEPHVARVVVANTRRVRAIAEAKVKTDKVDAATLCELLDAGFLPAVWSPDESTRALRGLLGRRDRLVRSRTRAKNAVHAALQRNLKGRPPMSDVFGRVGRRWLGRLELPAHERQIVESCLREVDFLSPEIAALESELAKLALSSEAVKRLMSVPGVSLVSAATFVAVVGDIRRFESPKRLVGYVGLDPKVRQSGEQAARHGRISKQGSAAARHMLCEAAWIAVRTPGPLRAFYERLRARRGAQIALVATGRKLCVLFWHLLTREQDYAFGRPSLTRHKRRRLELMAGDPPRRGQRSGSGASKREQLHERELSEQFEQAYRRLVEDWQQKPRKSGAGATPGRAS

SEQ ID NO: 164352 - protein, 401 aa, unidentified
MNSVGIDISKNRSTVAVMRPFGDVVISPFEAGHTVSELSELAKRLRSLDGETRVVMEATGNYHTPVANLLTNAGLYVSVVNAKRVHGYGNDDLRRVKTDRKDAVKLANYGLDRWLKLPRYIPEEKTRLLLKSCYRQYQQHAKVQTMLKNNLIALLDMTFPNVNRLFSSPARADGHEKWVDFAEDFWHCGCVSKHSEKAFTKKYQSWCKKRKYYFREAKAHEIYTKASTCVDVMPMADTTKMLVEQAVAQLRATSSALAALRQEMQALASTLPEYPVVMEMFGVGPTLGPQLIAEIGDVRRFYSKKALVAYAGIDAPPNDSGDVTGRHRGMSKVGASSLRRTLFLVMSIYLQNAPQNEPVYQFMDKKRAEGKPYRVYMMASANKFLRIYYATVKHHLDNPKA

SEQ ID NO: 164353 - protein, 346 aa, unidentified
MKKIFIGIDFSKEKFDATVIKAEGVEERAERQHEVFDNKVSGFRRLLRWVKSVVDEQDTGLWLFCGENTGGYSRALCNYLYGSGYDMWLENALSIRRSSALQRTKSDKADAGIIAEYAMRNYDQMRLYKPLDKNLERLREVFLYRHNLVKLKASMTVRKGEKKQTQEKSDISRFMAMSSKHLISEFNKKIAECDMRIEKIICEDEELRRNFEIITSVPGVGTQNAVCLMVYTDNFSRFDYDSRKIACYYGVAPFGRQSGTSVNTPPHVSPFANKLIKALLTQAALASIQFCTQMAIYYHRLVEAGKKKPVAVNNVKNKLLHIITAMVRKQEMYNPDHDYHAALKAA

SEQ ID NO: 164354 - protein, 391 aa, unidentified
MDRVWVGIDVGKEFHWAHVLDASGTELLSRRVENDEADVSKLIDEALSLAGEVIWTVDQPGGSAALLLGLLWERDQRVLYVPGLTVNRASDAYRGESKTDARDARVIADQARMRSDLGDLEPGEEEVAELRILLGRRRDLLVEQNRTITRLGEALLSLSPALERALDLNRRGPLTLLTRYQSPRRLRRAGHKRIAAYLRARGVKGFDGVAGKALAAAKSQSISLPAEPVAARIVAELAAEVLALKDRIELVDEEIERRFFERPEAEILASLPGMGPLLGAEFLVAVGNLSAFESADHLAAYAGLVPAANDSGKRVGNNRRMRGGNKNLKRVFYQAAFASLRSSPESRAFYDRKRAEGKRHIQALIALARRRVNVIWAMMRDGTTFESRSAA

SEQ ID NO: 164355 - protein, 319 aa, unidentified
MMAQNNLVVVGIDVAKDKVDACIRPSSARQTFPNSSIGQRQLAAWLRRHKVGKAVMEASGGYERHWAKVLRQLGVEVLVDPKRVRSFARSAGRLAKNDKIDAAMIAWFAETFDQAPSQAYDAAREELVQMVNARQGLLDLQTTLQNRDEHSEVSAVQKMHARLLKRVAGEVLRLEAAIAALIKMTKRFAELAEIIASVPGLGDITCAGLIAAMPELGQVTNKVAAALLGVAPYDDDSGKRRGERQIKGGRRRMRNLFYMACLGAATRHNPVLKAFYRRLIANGKPPKVALVACMRKLIVILNIMIARRQKWDASLYLAS

SEQ ID NO: 164356 - protein, 333 aa, unidentified
MRLIDGSPRDGEGSSVDVLGIDVSKADFHVCLLQGDRAKAKSFSNDRTGYRELGKWLRDQKVAQVHACMEATGGYWLGLATALFESGMRVSVVNPSKTAFFARSQLRRTKTDKVDAAMIAEFCKTQDPGLWQPPPPETLELRALLSYRHQLVAQRTSLKQTVRDIHAGKELRELHSALLKSLNETVDAIERQMREVVKAHENLKTGVARLEAVKGIGPLTAAMFVAKLPVDRLRNGKAAAAYAGLSPSERQSGTSVHGKPRICKTGDAELRRDLYMPAKAAIRHNPILAEFAARLTERGKLPKVVTVAVMRKMVVLAYELLTAPDDAKLEATA

SEQ ID NO: 164357 - protein, 353 aa, unidentified
MPAPSSPTAPLKYVVGIDIAKDTFVACFGRIDVHQQLRFGKEATFDNTSAGFAALLRWTTKQQATAAPLWFVVEATGVYYEALAYFLSDNEQALSVLLPNKVKHFAQSTEQKSKTDQLDARLLCRLGLERALPAWQPPTPALRQLRALARERQSLKRQGARLKTQRHAYDHSYQPDARTLERLAARQQLLNQQFKAIDQDLADLLKAEPALARKLAHLTSVPGIGLTTAIVVVAETNGFVLIENERQLASYAGLDVVQRQSGLSAQAMRISRRGNVHLRQALYLPAVSSLRYNPQQMAFYTRLRARQPSGKPGVIAVMRKLLLLCFSLWKNDRPYDPHYHPAQVAEKEVAPAA

SEQ ID NO: 164358 - protein, 324 aa, unidentified
MTQLSSQPVSPLFVGIDVAKDKLDLARSDSGELLTVSNDDHGIRQIVELLRTAAPRCIVVESTGGLERALLEALLDAGLPVALVHPGRVRYFAIGCGILAKTDPIDASVLMKFAQLAEPRLAQKRSANQSELDALITCRRQLCATRAQQTNCKLSTRSKSAIKSIDAILAALDKQIDQLDKKIRQLIDSDDDFKQLDRQLRSVPGVGPVLSSTLIAELSELGDIDRRKIGSLVGVAPFNHDSGAHKGKRCIRGGRVQVRCVLYMATLAAMRFNPVLRRFAERLTKTGKTWKVTVVACMRKLLTLLNAMVRDNLLWSELTVAKNP

SEQ ID NO: 164359 - protein, 363 aa, unidentified
MHDSITWIGMDVHKESIVVTAVGNDPERIRARFELPNTDKGVDRLVARLQEFGDVRCVYEAGPCGFELRRVLDSRGIPCDVVAPSLIPKKAGDRVKTDRRDAEKLARLHRMGELTPIHVPSTAQEALRDLVRAREDAKEDVLRRRHRLLKFLLRQGRRHEGKSWTQVHWNWIRSLKFDDANTQTVLVEYVLALEQELERVQRLNLRIEEESRHPDVAPAVARLRTLRGVDTITAMTLISELVDMNRFSNPRELMAFAGLVPSEYSSGGRQCRGRITKTGNAHVRRVLVESAWHYRHSPTGAGPTIRKRREGQPPEVLEIARKAEMRLCKKYRKMTARGKSSRIAVVAVARELAGFVWAIGKNL

SEQ ID NO: 164360 - protein, 352 aa, unidentified
MSEKYVAMDVHKASVVIGVRDAAGKVIGQAVVETKAQTIKDYVRGLSGTIHLTFEEGTQSAWLYDLLGPLVAECIVCDPRRNKLLADGNKSDEIDVAKLSELLYLGRLRPVYHGGQGTRTLKELAHNYEALVKDHTRVKNRLKAIFRGRGIGYEGDEIYNCQQQAKWLEKLTERGVRERARQLYEQLDQLEGWVAAGRRQMLAESRRQPAKKNLQLIPTLGEISVAQLIATVDTPHRFRSKRQFWTYCGLAVVRHTSADYRFEQGELRRRVKPGPTRGLNRNYNRRLKRIFKSAALTGSIKGPFKPYYERLLARGLSSELAQVTLARKIAAITLTLWKKGERFDPEKMIKPA

SEQ ID NO: 164361 - protein, 501 aa, unidentified
MKAKQRKAKGNDHSSSMASKQRAKIAKAMQAPEQMEIVNRHAGGIDCGSEEHYAAVSPESVEEGEPFVRCFSAFTEGLDALVEWLKDCGVTTVAMESTGVYWVALYQKLEAAGIEVFLVNARHLRHVPGRKTDVKDCQWIQRLHSFGLLSASFRPEDMICRLRSLQRHRLNLVSAGAAEIQHMQKALQQMNLHLHHVVSDISGLSGLRIIEAILAGQRDPSQLAKLRDPRVRKSTVAQMEAALVGDYRPEHLFVLDQSLQAYRFYQARIEECDHEIEPLLQQLAERFECSSSPLAAESSQPEVIQDQAAQSQTARPIKPKRKRKPKANQPKIDLAGYLQRICGVDLTQVVGLDVLSVLLIVSEIGVDMSKWRNAKAFCSWLGLCPGNKISGGKVLDRRTCKVINRVATTLRLAAQAVGRSNTCLGIFYRRKKAHLGPAKATTATARKLACLVYHLLKYKDQYREPDPVTYQLKVQKTILNKLQKQAAALGYQLLPTALVPA

SEQ ID NO: 164362 - protein, 355 aa, unidentified
MKKTKQELQPGEPIFVGIDLHNAKWHVTARTAEVELFSGSIPGNWEALRRILDRYRDHQIQAVYEAGYFGFWLHDHLEEYGAECIVTPPSLIPQEYGNRVKTDRRDSRKLAYFLAKGMLKRVWVPTQEERYHRQVIRRRRQFVGDRIRTQSRIKAELRLYGIELPEPTGRWTQIYLRNLGRIRFKNHWMQESFNRLLELYHFLDKQIVKQTKLLFELSETELYRERVQILLTIPGIGMLGAMELLLELQDVTRFRRADQLAAYVGLTPSQYTSADKVRMGRITCMGKNTLRAMLVQASWALIRKDGVIREKYERLKAKSGAKRAIVAIARTLLIRMRRLLLDKNPYVVGVIASTS

SEQ ID NO: 164363 - protein, 346 aa, unidentified
MTHSTTVGVDLAKNIIQVSVVSAGGKELVNRALTRRKFAEFLGKQKPALVAFEACATSHYWARVAQRHGHDARIIPAKFVAPFRQGHKTDSNDALAVAEAARRPNIKEAPMKTVEQQGLQAIHRSRQLLIQECTALSNHLRGLLMEFGVVIPQGFASLLRAVPEVLEDGDNELPDLYRPSLHRMYTRLLELREHIEAMTREVEVLVKQHPICSRLTALEGIGPIGALLLYATLGSGNVFSSGREFAAYLGLAPRQYSSGGKTNIVGLSKKIGNCRLRSILILGARAYVYKLKEPKSSKDKWLKANIERNGESRAAIALANKNVRTAWAMVTQGTEYQRRGQLKVAA

SEQ ID NO: 164364 - protein, 312 aa, unidentified
MAKDTIGIDVSKDRLDAFWHSRTEARCLPNTPEGFGQLCDWLGKEEDVLIVFEATGAYHRGLERHLSLAGLPFIKVNPKQARRFAQAIGRLAKTDSVDARMLARMGVVLELTPQDVEGEDVHDLRELLTARRALVKDQVTAKTRLATALNPLVREQLGRRIEDIGADIQALDEIIAQIAKQRGTLEERIRRLMTIPGIGRLTATTMLIDMPELGHLDGKKITALAGLAPMTQQSGKWQGKERITGGRSSIRRAIYMPALVAIRFNRDLHDKYQQLLKAGKAKKVAITAIMRRIIILANTLLRERRDWLPDRP

SEQ ID NO: 164365 - protein, 310 aa, unidentified
MNDTIGIDISKDTLDIHRLSDGTRSQFGNDSSGLGTLRRWIGKVPVRVVYEATGRYHRDLEAALEPGGHALVKVNPARARRFAQAIGQGAKTDRVDAAMLARMGAVLDLEAKPVRSCSMHEIRELHVARIGLVKDRTACRNRLHGARNKVVLGQLRARLKQVERQIEQIDAELLRLIAGDPQLARRLEILTSVPGIGRVAAAAMIVEMPELGSMDGKEAASLAGLAPIPRESGVWKGKSRIGGGRHQLRRALYMPALVGIRHNRQLGQVYQTLCDAGKPAKVAITAVMRKLIILANALIRDDRKWAETAP

SEQ ID NO: 164366 - protein, 322 aa, unidentified
MAMHSFGGIDVSKDRLDVMVLPEEQCSSVPNDAAGWAKLVEQLRGFSISAVGIEASGGYERGAVRALLAAGMSVRQVNPFKLRQFARASGVLAKNDPLDARMIASFIAIMPTRPAQPHAPAVERLAEILTVRRQLSDAKVAAENASRLLEDAMLQRLSRRRVARLAADIDLLDGRLVEIVMADAALVHRYQLLTSMPGVGPVLACTLIALLPELGRMNRKQVAALVGLAPYAFDSGKLKGARCIWGGRASIRRVLYMAALIAMRCNPALKAFHNRLAATGKKPKVVIVAVMRKMIITLNAMLRNETPWVDRSSGRHSVLTAR

SEQ ID NO: 164367 - protein, 341 aa, unidentified
MGVKTYHVGVDLHRNNFTYCVRGSNGEETVGKEEIGNLKKFAKRLGKHASVAVEATGNTWMFCRVLKEHVGRLVIVNPNQFKVISRSVKKTDRNDAKKLAEFLEKDMLPEVRMKDELQAKVASLTQTREKLVQLRTVLKNKINNLFASQFIQLKREELSSEKGLLKVLTYHFDAISDVELRVMVDQIRSLNKSIAELEKAIEESGSKMDGFDNLKSIKGIGSKGAATLMSVIGNVNDFSSAKRLAAYIGIVPRVSDSNDTSHHGRITKLGSKIARTTLVQCALIAKKYNSYLFHFHEGIKMRRGGAKANIALARKFLEIIYRTLKNHWIFEDFTRFKIAKT

SEQ ID NO: 164368 - protein, 354 aa, unidentified
MAELAGTSRVVVGGIDTHKDLHVAAVLDLAGVVLGTESFATTRAGYRALVRWMRAYGEVQRVGIEGTGSYGAGVTRHLHEVGIEILEVDRPDRSDRRRRGKSDTLDAENAARAVLAGKRTTTPKTKDGLVESLRVLRLTRSTAVKARRVALQLLRNHIVSAPEALRDQVRTLTRMQLIRTCAAWRPEATGFRDPVVATRIALRSLARRILELNDEIADLDDLIKPLVQELAPALLQAPGIGVEVAGQLLVTAGDNPDRLRNEASFAMLCGAAPLPASSGKTQRHRLNRGGDRAANSALHLAILVRIRTDQRTRAYVARRTADGLSKLEIIRCLKRYLAREVFALLRADRPPIPA

SEQ ID NO: 164369 - protein, 382 aa, unidentified
MEQNIVFGIDVSSHSSTVCVVIDRIKQGKPFTISNDSFGYQKLLDHLNRYLITPLVVFESTGVYSLSLQAFLEENHIKYLKLNPLKAKKLMDNNLRHNKTDKLDAYHLALIEFCAPQKLREPQPKEYHEMQNASRYFEELTKNLIVAKNQLHRNLQSTFPQIESIMATPTGKIYWTIVSLFPHAQYVLDSDETRIYQELLSISGIGKQRARYLTARLYSLAEQAYPYDSKDSITVRAIQRNISDLFSLSEERDNVINYLEKLAKIVNSRALTIYQSIPGIARTTALRLIAELGDLRRFDTSARIDAFIGIDPGRYQSGEMDNHLGITKHGNHIARKILYRVIGQMESTKLSQPCHITDYYDNKKNLLTAEAIRRLPLHRCIN

SEQ ID NO: 164370 - protein, 423 aa, unidentified
MKGEIFFMKIVRPICCGMDVHKNIIVATIGITNKKTRITEYIQETFSTLNPDLLNLKQWLINHKCFDACMESTGKYWIPIFNILEDEINIYLTHPKYVKAIKGKKTDKKDSKWICDLFKHDLIKFSFIPPKEIRALREISRYRYKLVGMRSSERNRYQNCMTVSNIGIGSVFSDPFGKSAQAIMKEVLESDIIEDEKILKCIHGSCKNKDKILDSIKHCNIETDQRFKMNESMTHMEELQVHIDNCEIEMMKRAAPMFDQFMHITQLPGISTLSAILIISEIGVDMKQFESDKQLTCWAGLAPANNESANKKKSVRISKAGQYLKPLLVQCALGAIKDKEGYFGIKYSRIKKRRGHKKAIIAIARMMLVSIYHMILTGETFNPSDYESFRNPNPPIKQQVLTEESAIEFLKKSGFDVSKLTKP

SEQ ID NO: 164371 - protein, 366 aa, unidentified
MKKNNTMATGRKQIFKQAKLTIGLDLGDRTSHYCILDEAGNVILEGNLLTTSNGIRQAFIRIPRCRIALETGTHSPWVSRQLAQMGHEVIVAHARNVRLIGESSRKDDQFDARTLARLARIDPGLLGPVRHRSAQAQIHLTVIRARAALVGTRTALVNAARGLTKSYGQRLNKCGTEQMNRDSSQGLSQELRDALDPLLREIESLNERIAEYNGRIEQIAKQVHPEVARLKQVKGVGTLIALTYVLTLDDPHRFRRSRDAGCYLGLRPGRRNSGQSEPQLHISKEGDRYLRTLMVQGAHYILGPFGQDSDLRRWGLKLAERGGRNAKKRAVVAVARKLAVLLHKLWVSGEVYEPLRNNHKVESAVA

SEQ ID NO: 164372 - protein, 416 aa, unidentified
MKSWQEFTHYAGFDWAKDHHVVVIVDSQGRIVADFEFEHSLEGWKSFGEKTSAWPNLAVAIETSQGAAVDQLLQRQYALYPVHPVAAQSYRQRKAPSGTKTDHLDGWGLADALRLDGQGWKRLQPLDPLTQQLRLLARDEVSLIEQRTALVNQLQQALWEYYPAALQAFDDWTDTFTWEFILAFPTPEALVTAGKRRWEKFLHTHRLWRPETAEKRLKLFAQADQFQASAPMVRAKSQLAVTLCKLLCTLGKQLALYRKEIETLFQNHPDHDLFGSLPGAKQVLAPRLLAAVGSDPARYGTQEVLQCIAGTSPVSYQSGQLNKVHVRWACDKFLRHTAFLWADCFRKASAWGQAYYAQKRQEGMSHACALRCLGQRLLKILFRMLKDKTPYNAELHALNQQKHGSWVLKLVNKPAA

SEQ ID NO: 164373 - protein, 424 aa, unidentified
MNLTQNDRLKQVTSDTLIVGVDVGSQTHFCRAFDWRGFELSRRVFKFSNTGMGFLTFLRWTEELMNKTEMKKVIVGCEPTGCYWLTFQKFLQDHDVQLVTVNPFTVNRSMELDDNSPEKSDLKDPKTIALLVKDGRFSTSYLPSGVYAEIREASVCRDQIMKQHVRLSNQIQGWLQKFFPEYFECYADWDSTSGLMLLREAPLPQDILKIGAGGINQIWRDAKVRAAGIKRAQTLVEAAQNSVGLEAGEAARLEIWVLVNDYILKAEQLKRLDEYLEEKVKEVPNVEKLLAIKGVGMSTVIGFIAEVGDIGRFTDPKQIQKLAGMEIVKKSSGKKKGQPRISKRGRRKLRRTMYESARALMTWNPAFQDVFLYYRNRTKKPLGGMQAKIAVACKAIRIFYVVLKTGCDFDEEKFRKDIIRPEAA

SEQ ID NO: 164374 - protein, 419 aa, unidentified
MEVVHPRCAGIDISKTDAKVCVRIVPEGRTKPVVNVTTWPAMTANIIRLGEELLDQGVDYVVLEATSDYWKPFYYLLAQAGLDVSLVNPQHVRNMPGRKTDVSDAAWLADLGAHGLVKASFVPPEPVARLRDLIRTRTTFIRLRAQETQRIDRVLQDAGIKLSNVATDIMGVSGRAILTTLIVGGKNPDELADLALYRLRSKIPLLEQALSGRFDPTHHGVLVQVHLNLIDGYDQQIRVLDQRIEEAMHQFSWAGDLLVTIPGISKSTAQKVIAEIGVDMTVLPTPAHLTSWAGLAPGANESAGKMKSSKCRPGNKWLKGTLGIAALATAKKNNSYLQARHRRIRSRQGNKKALVATSRALLVAIWHVLSSRQPYTDPGVEFFTTLHPERSTRHAIARLEALGYHVTLTPINSPPPVAE

SEQ ID NO: 164375 - protein, 320 aa, unidentified
MMAQSDQIVVGIDVAKDKVDACIRAFKLRQTCQSTAQGRRKLVAWLRKHRVVKAVLEASGGYERDWARALRQAGMEVRIVDPKRVRSFALSAGRLAKNDTIDAEMIAWFGEIFKEAPGPTHDAAHEELLALVKGRIALVDLKTRLQAQNEHAASGLVQKTHARVLKNLASEIAKLEAAITAKIKATPHLAERAEIIESVPGLAETTSANLVAGMPELGQVSDDIAAALIGVAPYDDDSGKRRGERHIKGGRRWVRNAIYMPCLGAVTQNNPVLKSFYQRLIAKGKKPKVALVACMRKLIVILNTLIARRQKWDPCRYVVS

SEQ ID NO: 164376 - protein, 322 aa, unidentified
MSGSSVTVGIDVASAHVDVAALGAELPAPLLRLGNDAEGHSVLTDALARLKPELVLMEATGGYEAALACALQAAGLRVAVVNPRMARDFAKAMQRLAKTDKIDAATLAEFAAVLARRPDCERFIRPLSEPEQQDLADLVTRRRQLVAMQLSERQRLRLARPVTRPSIEALLEAIGRQLDDVEAQMVAHVAEHHSQMAKLLQSVAGIGKVATATLLAELPELGRLNRRQICALVGVAPYANDSGASRGRRRITGGRFEVRRALYMATLAATRHNAPIRAFYQRLVAAGKLKKVALIACMRKLITHLNAIARDHLNAQDRIINT

SEQ ID NO: 164377 - protein, 354 aa, unidentified
MREDKFAALDVHAATTTFVVLDDQGKTVTTGVAETKAEALLSLVKGISGRVHLTFEEGTHASWLYELLKPHVDELVVCNPRKNRRQTESKSDQIDAEQLARWLRSGDLSPVYHGHSEMRALKELVRGYEQAVDDSTRVKNRLKAIYRSRGIQTGGRGVYHPDTREDWLAQLDTASLQTRAEWLYCELDLLGALTKDATSAVEREARGHRGCRLLKTVPGIGWIRAAIIVAHVASPFRFRTKRQFWCYCGFAVVTWSSSDWVKEDGRFALKKTPVSTRGLNRKHNRHLKSAFKGAAQTSCRSGGVFAPHYRALVSSGMRESMARLTIARKITATSLVIWKKGEKFDLSKAVIRTE

SEQ ID NO: 164378 - protein, 315 aa, unidentified
MADTIAQSVGVDISKDTLDVHLHPAGAARRFVNTRAGRSGLIAWLAKFTIVRIVFEPTGPYHHAFERHLAEAGLPLAKVNPRQARRFAEAIGRHAKTDRIDAAMLARLAALLEPPIRPAPSQTLDDMAELIVARRARVKDRVAALQRDSVHRSTLLKRQAVQRLAQIERQIAAIDTALRERLAGDLTLRARFDILASIPGIGETTALIMLVEMPELGTLDHRCAASLAGLAPIARDSGQHRGKRFIRGGRSHLRQALYMPALAAVRFNADLKAKYKALRHAGKPPKVALTAIMRKLIILANALMRDGRTWSLKPA

SEQ ID NO: 164379 - protein, 360 aa, unidentified
MNIGCDVHKDFHIFCDMDEKGEIIGEGRIENNTLAIDKFARGHKGSKIAMEASSHSIPVYRQLVKHGFEVHMAHPGDLHKITKSKKKTDEHDAYDLAQLLRTGYLPESWVPDEEIQSLRSLTGRRVELGRRFSKVKNRIHSILAITGVKEPKYSDLFGRMGVHFLEHLNLSEDFDMVLRSLLRELAYLKEEIEILESRLALIATDGRFKKEVEQLMGIRGIGFYSALTILAWIGNVNRFPSHKKLSSWAGLVSSVRITGNTEIHGHITKAGPKELRWILVEDAGTAVKYPGKLRRFYLKRKRRHGHKKAIVATAHKLLIIIYHMLKEDKPYEERDDDLAYRKLRRMEQKGNRSNKRSDHW

SEQ ID NO: 164380 - protein, 425 aa, unidentified
MTAQPNATPAATWVAIDIAKRHHAVLIETPDGKQQQFRMASSMEEHDRLVALLRGLPQPARIAMEPTGDCHRTLAFRLLTEGFDVCLVSSVAGARYREAMFNSWDKNDPKDARVILALLKQGMTLRYIDPLLAGHHGLQELSKTHYKISLARTRLQHSLMTHYLPLYFPEIERYFDSAHADWFARFMLRFPTAASIQQRDCETFRKEAWDLVGRKVNKAAWLRELYEIALRSIGLPVADDSLEVQSFRLQLQRFQELVQQRDRLAEQAHQTLSGRPDYESLRSIPGIGPVLALTILAEAGDLRRFAHHRQFLKYCGLDLAKCQSGQYKGQERLSKRGNARLRFAFWFAATVAIRMRENSFREKYERYIRNDPSNADRKRKALTAVAAKMARVAYGLVKQKTQYRCYFENALPRGSTPLRRAVGTS

SEQ ID NO: 164381 - protein, 335 aa, unidentified
METVYFLGIDVSKKKLDTALTLDGVNMHENQIENNPAAIKSFIQLLRKEFNFPLSQLVVCMEHTGIYCQPFLDFAVSKKVNVCLEPALQIKQSQGMTRGKNDQVDAKRIAAYAFKNRQELKFWKPQRLALQKLKTLLVIRERLIRMRVQLEVPINETEEFLETSLRRMARSQCNKTLKAVISDIAKVDRQMDLIIKEDTKLSEQMKWATSVPGVGKITAANVIVDSGELERIPEVKKFACYAGIAPFEHRSGSSIRGKTRVSKMANMTIKRLLHLAAMSAIQCCEELKVYYHRKIAEGKNKMSALNAVRNKLISRIYACLKGQRIYQKTYLNTLA

SEQ ID NO: 164382 - protein, 345 aa, unidentified
MNHIAIDLGGRESQICIRRPNGEITEEKRVPTRRLPALMQDWTASRVILETSAEAFQIADAALASGHEVRVVPATMVKALGVGARGIKNDLRDARVLSEVSCRIDLPSVHVPSVAAREMKSACGSREVLVEARTKLVNNVRGWLRTKLLRVRSGVTTTFPTRVRGQATLQQEALPDHIERMLLVLDALNVQIKAADKQLQNLAGEHPVCRRLMTVPGVGPVTAVRFVAAIDDVKRFPTSHAVQSYLGLTPGENSSSERQQRTGITKAGSTALRTALIQGAWTAIRMCPREPMVQWATQIVLRRGKFIAVVALARKMAGILFALWRDGTTYRASMAACAVEALAPY

SEQ ID NO: 164383 - protein, 392 aa, unidentified
MMVSIGIDVSKDKHDCFILNSEGEVLADVFTVPNNMDGFQELLRVIRGCTSPQDKIKVGLEATGHYSYNILGILLNSGLPTCVLNPLHTNLYRKSLSLRKTKTDRVDARTIAAMLLSDVGLKPYTDTAYHNEELKSLTRCRFDKVKERARLKSSISRLVCILFPELEKLVPSLHIASVYALLEEFPGAKQIADAHLTRLKNLLADASKGRYDRDKALAIRDAARNSIGQRMPAKSLELQHTIRLIRELNAEIDEIEASIQAIMEDLNSPITSIPGIGFRMAAMILAEVGDFSRFDSPDKLLAYAGLSPSTYQSGHLRNCYPHMEKRGSRYLRYALYNAAKYVCLWDPAFTAYLAKKRAEGKHYNVALSHAAKKLVRLIFALEKSRLPYRLAA

SEQ ID NO: 164384 - protein, 339 aa, unidentified
MSDKFRKFIGIDVSKAHIHVCLMDDERKVLAACNIKNEADAVTKGISTLLEKHQITIEEVFCCIESTGKYDRRASNAIYEMGIALGVEPYWQIQSNLHVRNKNDQTDAERIADFARASYTTIRRWKPRSKSALALLELLSIREALSDERRGYIVRLAEIEATVGYSPTGIKLIRRRIKGLKADLEELEREIAQLIKADKRFYRIYKLLLSIPGIGKVNAWMLLAVTDGFARFATPRQLAAYSGVAPYEFRSGSSIRKRSKVSHRSNKQLKSLLHMAAVSITTRGKETDLRRFYERKLKEGKHKMSALNMVRNKLIHLIFAVIKRGTPYQTIHPNNTTAA

SEQ ID NO: 164385 - protein, 365 aa, unidentified
MIVIGTDTHKRTHTCGAVDAATGRQAGELTAAAREPGFRELLTRGRGLDEERIWAVEDCRHVSGPLERFLVAAGERVVRVPPKLMGQSRRGERAAGKSDPIDALAVARAALREGPETLPVAHLDEGALQIKLLLDHREDLVKARSQDQCRLRWHLHDLWPDLEIPAGALDRMVWLDRVARRLSRADQGTRVRIARELVVEIRRRTRRVTELGREIAALVEARAPELLGMEGCGPLTAARLIAETGGAARFSSDAKFARLAGVAPIPASSGNRTRHRLDRGGNRRLNCALHRIAVTQGRCHAPAQEFLARKQAEGKSRREALRCLKRHLARRVWRLLLKIERGRYKDTVDAQRDLQRPDRGGGLMP

SEQ ID NO: 164386 - protein, 338 aa, unidentified
MTIVIGLDQHRAQITAEWLDSATGEIARKRIAPAHRDAVRRFAARFAGQRLEVALEATTGWRFVVEEFEAIGAQVHLAEPAETAARRGTKKRAKSDRADARHLRELLMVGRLPESWIPPEHPLELRARVRLRHTLVDQRREWQQRIQATLYHHGAPPRSWLVGAEARAWLAALELPPAAREQIKVSLALIDAHQAQLAPLDAELRAYAKRQPGCRALMHHYGIGPLTAVTILAELGDARRFGSSREAVRYSGLDITVHQSDARRAPGRLSRQGPSALRWALFEAAQCARRPGSPDHDYYLQTAARLGGNRACLAIARKLLKRSYHTLRELGEEALQPA

SEQ ID NO: 164387 - protein, 420 aa, unidentified
MAKKGTKVRIEDLQDVYQSCAGIDVHKAAVTVCAIRGKGPEVEAELVEYGTTTGELRQLAEWLREQGVTHVAMESTGVYWRPVWQILESAGLQLLLANAKKVRNVPGRKTDQSDAIWLATLLRKGLIEGSFIPPEGIRALRDLCRSRASLVRDRTRVIQRIEKVLEEGNVKLDVVASDLVGVSGLRMLERLAEGETDTTAMAELALGRLRSKIPQLTEALEGSFRKHQLFLLKELLEQYDYLCKKIERFEIQIEDSARPIEEQVQRLDAIPGVNRLTAIAVLSEIGIDMSRFPTPQQLCKWATICPGNRESAGKRKSGVTGRGNRWLRGTLTQCAWAATHDKNSYLAVQYRRLLHRGKQRALVAVAHSVLNIIWHLLRNQIDYQDLGVDYFERQNLEGQKRAYVKKLEKLGFTVKLEPAA

SEQ ID NO: 164388 - protein, 321 aa, unidentified
MAIVTIGIDLAKNVFAVHGVDATGKAVLVRPSVARAKLLELIASLPPCLIGMEACSGAHHWAREFAKFGHTVRLMAPKFVVPYRLSGKRGKNDAADAAAICEAVTRPQMRFVPVKTLEQQGQLAVHRARQGFVEQRTATLNRIRGLLAEFGVILPLKAAVVRREATRHLEDLPGWANTVVGDLLSEVTRLDERIAQYDRHIATMASESAEIKQLMQLPGIGPTTATALMSTIGNGRDFKCGRQLSAWLGLVPGQYSSGGKARLGHITKAGDPYLRSLLVLGARAVLQLAKSKTDPLSRWANALAERRGYWRAVVAIAAKKG

SEQ ID NO: 164389 - protein, 341 aa, unidentified
MKKFIRIGVDLAKNYFQIHALVSEVGPAVTRKLRRSKMHEFFSQIEPSLIGMEACGSAHYWARELKAMGHEVLLMPPAYTKPYVKRGKNDAVDADACCEAMSRPGMRFVPVKSAEQQATLMLHKTRELLVKQRTMSVNALRGHLSEFGIIAAKGIGRVDELLDLVESDTTLPNAARASAKVLAQALEGLDKAIDDLEDEITNAQAQNEMTRLLYKVPGIGKIIASVIAASVPDPSVFKSGRDFTAWLGLTPRQNSSGGKQALGAITKQGNRYIRKLLVLGATSLLNVVGKRKGALRDWIVGLLAKKPARLVTVALANKLARILWAMMKTGESFRTEMFAKA

SEQ ID NO: 164390 - protein, 388 aa, unidentified
MTCIDVRAIDQTAIRGQNAIICGSLELSTTRWVVTMLLPGSEKMSRFNVSASDGGEELLRLLGRLRAKVEQQSGSLPGVVMIQEAGLDGFWVHRLLEAHGIESHVVDAGSVPVPRKRRRGKTDMIDGEALLRTLLAWRRGEPRVCSMVVPPSVEEEENRRLVRERETLVSERTQHGNRIKGLLKSQGITGYDPLRAKRRERLERLKTGQGQPLPERLKSQILRELDRLEVVMEQIAQIEADRDALLNALAATPNHPVAGLLRLRSLGHAFTSVLWFEGLYRPFANRRQLASLAGLAPTPWISGKIDREQGISKAGNRRLRTTMIELAWLWLRYQPGSALSCWFRDRVGDKRGRVRRLAIVALARKLLIALWRFATQGIIPEGAVLKAA

SEQ ID NO: 164391 - protein, 329 aa, unidentified
MKKDWYVGIDVSKKWLDVAIFVENSDLMGYFHTQVSNDKTGYKELLRWLKEHDVDASTCMYGMEHTGFYSDGLQHFLDKKGYKYTMLEPAVIKHYPIQPREKNDHLDAAKIADYLFRFKETINLSRVPDKTMEELRNLHRERKFYVEDRVVYLNRKQVVGKEEAKRLDKMIALLDKQVESIEEKIREIIRNDKSLMESYLYLTSITGIAFVNAVNAIVITQNFTVFKTARDYASYIGVAPHTKKSGTTVRWKPKPYKHCDLTAKADISQAAKIAVVHDVELKRFFERKLGGKEDADTIRKAMNAVKFKLVLRMFAVVKQKHEYRQFATI

SEQ ID NO: 164392 - protein, 409 aa, unidentified
MQVVHEVCCGLDVHKKSVTACVLWATGRRRQTREFGTFTRDLLELSDWLRICGVTHVALESTGVYWKPVWNLLEGQFEVLLVNAQHIKAVPGRKTDQKDSEWIADLLQHGLLRASFVPPTPTRELRDLTRYRASLAQEINRIANRIHKVLEDANIKLASVATDALGASGRAMLEAMVSGEQDSQRLAEMARGKLRNRIADLGRALEGRVSTHHRFLLRQLLDHLYFVESKMRRIEQEVEERLGPFQTEVARLCTVPGVDRVTAWALLAEIGLDMKQFPDAQHLASWAGLCPGNHESAGKRKSGKIRKGSLWLRRCLCQAAWAVSTKKNNYLSALFRRLAPRRGVKRATIAVAHSLLIIAYYILRDQVCYRDLGPDYFDHLNPEGLRRRLTNRLQRLGFKVTLEPIGSTA

SEQ ID NO: 164393 - protein, 338 aa, unidentified
MDRRYVGIDLHRRRSVIYAMNADGERLFCERIDNDSLRLLEVVGAAGEGAEVVIEATYGWYWAVDLLSDAGFSVHLAHPSGNDWGKRRVKNDERDARDLADLLRLGRLAEAWIAPPAVREARELVRYRARLVQLRSGLKAQVHAVMAKEGVLPGVTDMFGPKGRQLLDAMELADAYLVRVESLRDLIEIYDREVGMLERKIHELLRDDRGYQAIQALDGVGRTLGAIFVTEIGDITRFRSPEALCSWAGLTPRHRESDTKVVRGKITKQGSKLVRWAALEAIVRYHGGPPLRDGFHRIAERRGTNKARIATARKLMTLVYYGLRDGEIRCLAHAAGER

SEQ ID NO: 164394 - protein, 504 aa, unidentified
MNKFAATEAKTVNKSSDIAKTLSAVKAVTGRMPHRSARSLRCHPSRVYRRKPAERRGPVQKSERTSPREGFCISVTGDRTFGGRQKPPMKNWNEITHYLGFDWAKDHHQVVIVDRQARIVAEFEFEHSLEGWNSWRERVCDYPALAVAIETNQGAAVEQLLQSSVTIYPVNPRSAKAYRQRKVPTTNKTDRLDAWSLAEALRMDGQSWRPLQPLDPIIQELRLLCRDELNLIGQRTSMINQLQQALMEYYPSALEAFDDWTVPGTWKFLERFPTPEALTAAGAKKWNAFLHCHKLYREKTHERRIMAFRKASEWHIAPAIQRAKSFLVLSLVKCLIVLEKQLQHYRKRIEELFESHPDHDLFGSLPGAGPKMAPRLLSELGDDRTLFPDADSLRCYAGTAPVSYQSGQVHKVYLRRQCNKPLRCAIHLWADLSRRWCQWAQIYYQQLRKRGKSHAQALRCLGHRWLKIIWKMWQTKTTYDEALHTRNQIEHGSWVLQLIEKSGE

SEQ ID NO: 164395 - protein, 352 aa, unidentified
MERYIGGDVHQASVTFVVLSATGRQLREDVIETNGRALVGYLKQLAGSLHLCIEEGEWSNWLFEILSPHVAEFVVYRQQWRPGPKSDAIDARGLAEKLRKGEIKSPVYKTTAYRELREAARVYTKLTRDAARVKCRIKSVYRSRGLPYKGSEVFKDEKRQRHIKRLPGFLRGPVTLLGEELDQLSALKGLAEQQMIKASHQLKISRILETAPGMGPVRVAQMIPIVVTPHRFRTKRQFWSYCGFAIVTRSSSDWVRENKQWIKSKKVIQTRGLSFNHNRMLKMIFKGAATTVIAHSGSNPLRSGYDRQLDNGTKPNLAKLTVARKVAAIVLAMWKNEEKYDAERLVAAQATG

SEQ ID NO: 164396 - protein, 322 aa, unidentified
MQNITLIGIDLGKHSFHIHCQDKSGKALLRKKFTRTKLMQFLATCPPSVVVMEACAGAHFMARCISDFGHETKLISPQFVRPFVKSNKNDFVDAEAICEAASRPSMRFVQPRTETQQAMRALHRVRESLIRDKVKTTNQIHGFLLEFGISLPIGDAVIKRLSLVLAEHEIPEYLSRLLVRLHTHYFYLVEQIAELESELSQSINADDTAQRIMTIPGVGPITASLLSSQLGDGKQFSCSRDFAASTGLVPRQYSTGGKSTLLGISKRGDKNLRRLLVQCARSFMMQLERQHGKLAEWVREQLNKKHSNVVACALANKLARIA

SEQ ID NO: 164397 - protein, 402 aa, unidentified
MAYDFVIGMDVGKYFHHACVLDPQGRQVLSKRINQHEGSLRKLFGKFLANDAEVLVVVDQPNNIGRLTVAVAQAMGADVRYLPGLAMRQLSRIHVGNSKTDVRDAYVIAHAGLNLPDALRSVDRVEEVFLQLKVLNGIDEDLARAYTRLINQMRSALVGTYPAFEHVLRGQMIHRKWILHLLAKYGGPTKIRRVGKARLTAFARGHRARNPEPVIDAMLAAIHGQTVSIAGAEYAELGVAMSAKDALAKLEHHKEIEAQVLELIQDIPQTEILLSMPGIGPRSAAQILMTVGDMSDFPNAAHLASYAGLTPQTNQSGTSIMSNSPNRAGNKKLKNALWQSSFASIRFHERSRQFYERKRKEGKRHNAAVVALARRRLNVLFAMMRSGELYRDIPTAQEAAAA

SEQ ID NO: 164398 - protein, 371 aa, unidentified
MSSEKYIGLDVHQATICVAVMDAKGKVVMESILETKATTILEFFAGLRGTLSVTFEEGTWAAWLYDLLKPHVANLVVCNPRKNALLKHGNKSDKIDARKLANLLRLNDLEPVYHGETGVRMLRELARSYLTIVKDVSRVMSRLKAIYRSWAIPCAGRDVYYTRHRGEWLGKIPEAGSRRRAEQLYQQLDMLQPLRQQARRELLAESRKHTITAKLRQIPSLGPIRSALAVALIQTPHRFRTKRQLWTYSGLGLETRDSGEYHYVGGQVRRRKKQVFIRGLNKDHNHDLKGLFKAAATRASVRPGPFQDFYQRSLAKGIQPTMARLTLARKIAAITLTLWKKGARATPSGWLYDSETVRAKCAMSVKRPGAN

SEQ ID NO: 164399 - protein, 455 aa, unidentified
MGKRNGLSRGDARRNARLIRMRGIVRHDRAILAIDLADTKQVLALCDHDSRVLARRTVRGRAWQLEEALRWGRTAAVEHGFAGVVVGCEPTGHRWRIVAELCDRLGVDLVCVQPLLVGRAREQEDLTRDKSDPKDAVLIGRLVAGLRCYLPERTDQVWARLRQLGGRRVQLIIQVGAARQQLRDLLECAWPAVLEAAAEPLDSRTWRAAVQVALARTAGDPATLSRLGEARFARAVTRELARWGAKRRCLRIVRAVWAAATTPQALATGVGSQRPGALERAGLTLDDWHHALGQLAEAEQRMTGVLDSLDLTSLVTTIPGLSAVGAAAILAETGELARFDSARALVKHAGLCPRANESGAFAGTTRISRRGRPALRLAAWRATWGALAHNPVLAARHAHLTGRTHNQLTTAQARTALAGALLRWLWVVVTTRTPWQAAIAAGRLDPRREVTAPAA

SEQ ID NO: 164400 - protein, 408 aa, unidentified
MELLHPRCAGLDVHKDVVMACARIQVREYAKHPTAEFSTTTSGLLALADWLEEHQCQHVAMEATGVYWKPVWHVLEGRFELLLVNPAHARNVPGRKSDVNDAHWLADLLAHGLIRASFVPPQPIQELRDLTRTRKQLVRQIARHTLRIQKTLEDANIKLTGVISTLLGTSGRAILKALIAGETDPERLLEHTTGRLRAPRERLLEGLRGAVTDHHRFMLKLHLRQIDSLDSSIRLLERQMGKLLRPFRQRVEQLATIPGVSDTVAQVLIAEIGLDMTRFPTSGHLVSWAGLCPRMDESAGKRRSNRVRQGAPWLKTTLVMAAWAGVGARGTYVRAQFQRLKTRRGPKKAVVAVAASILTAAYYILRDHVPYKELGADYFDRRDRSSVVRRLSRRIEALGYRVEVHQTA

SEQ ID NO: 164401 - protein, 396 aa, unidentified
MRNDVTIYVGIDFSKEKFNACLLMEQGVMGESEFPNSKTGYLKLTKWVKNTSELGRSFDSSLVLFCGEHTGTCSIGLCEYLYAKGMKIWLESALKIKYGSGLKRIKDDKADAEMIAYYAKRFYEPGSCALFEPDSADLKTLRTLYQFRNRVVCDRVAIGNRISSGAFDCSTLVRNRMVKHHKEAQKDEKDIEKEMVRLMETSEELASNYQILISFKGIGPITAAALIIYTSNFKKFDNPRKFACYCGIAPFGKQSGTSINTKPHVSRFAHIGIKAAMVQACKSAMQYNAVIKAYAQRLYAKGKHEGIVMNNVKNKVMHIIFKMIQTQTLWEQEYQQKHPKECKPIPGKNGIGATEAAPIINATLKTSSSVVECTFLEKHSFQKNSKKTSSFSCVET

SEQ ID NO: 164402 - protein, 374 aa, unidentified
MRDHSEAFVAFDTSKSRNAVAIAEAGRAGEVRFFGEIENSAAATAKLVRKLAGKYARLTFCYEAGPTGYGLYRQIKSLGYECLVVAPSLIPRKPGDRVKTNRRDALGAVKLLRAGELTAVWVPDPRHEAMRDLTRARGAAVEDLRRKRQQVSAFLLRQGRHYSDGKPWTKAHMRWLASQKLEHPEQRIAFEEMLLAVRQAQERIERLEQAIRAAVPDWSLAAMVTALMAMRGIDLVSATALLAEIGDLSRFQTAPELMAYLGLVPSEASTGDTVKHGPITKAGNRRARRMLVECAWSYQHPPRVGKEKQEKVAAAPRAVREIAWKAQCRLSARYRALIRRGKLKTVAVTAVARELAGFIWAIGREVTTADAAAR

SEQ ID NO: 164403 - protein, 429 aa, unidentified
MPYRIAGIDVHKKMLAVVVSNVEVESEFQFERRMFGGNPEQLRSLAAWLLEQEVEEVVMESTAQYWKPVWETLERYWKPIREKREDARRRSGTLHLAQALSNRGRRGRKKDFLDAERLVKRLVARELTLSFVPDAEQRLWRTVTRRKYQLTRDRARLQNQVESLLEEAHIKLSSLVSDLLGASARRMLKALADGETNPAALAALADKQLRATPEQLCDALGACTELNPVYRRLLKMALEQLQFLEQQIGDLDQETASLLRQHQDAVERLAEVPGLGVDSATQIIAEVGPTAATFPSGKHLSSWVGACPGNEESAGVNYSHRSPQGNRHMRRLLNQAANAAVKVKGSIFEIVYRRSVPRLGHNQVIGAIAHRQCRLIWLILHQGVRYEEHGPAVTKQSRQARTARMIRQLRKLGYQVELPNSQPANSAGR

SEQ ID NO: 164404 - protein, 393 aa, unidentified
MICVGIDVAKDKHDCFILSSEGEALADVFTIQNNAEGFDRLLQTIRRCTRPEDKIKVGLEATGHYSYNILGFLLDKGLDTYVINPLHTNLYRKSLSLRKTKTDRVDARTIAAMLMSDVDLKSYTDTAYHNEELKSLTRYRFDKVLERAKLKQSVSRLVTILFPELEKLVPTLHMASVYALLSEFPGARQVAEAHLTHLKAVLYDASKGRYGRDMATTLRDAARCSVGSVMPAKSLELQHTIRLIRELDAEIEDIETAIQSMMDEIQSPITTIPGIGVRMGAMILAEIGDFTRFDSPDKILAYAGMSPSTYQSGQLSLSGAYSHMEKRGSRYLRYALYNATKYVCLWDPAFAAYLAKKRGEGKHYNVAISHAAKKLVRLIYAMEKSKQSYRNAA

SEQ ID NO: 164405 - protein, 372 aa, unidentified
MRHHTEAFIGIDTSKSRNAVAIAEGGRGGEVRFLGEFPATEAAMRKLVAKLAAKYSRLTFCYEAGPTGYGLYRLIKSLGHECVVVAPSLIPKKPGERVKTNRRDALSLAKLLRAGELTAVWVPNERHEAVRDLSRARLAAKKDLQGKRQQISSLMLRLGRCYPGKTTWGPAHMKWLMSQKLEHREQRMALEELLQGIRQEGERVERLEQAIREAVPEWSLAEVVTALQAMRGIDLIAAVAILAEIGDLSRFQNPRELMAYLGLVPSESSTGDTVKRGGITKAGNGRARRILVEAAWSYRYPARVGREKQPKVAAAPRRVREIAWKAQTRLCGRFRSLLRKGKLPTVAATAVARELSAFIWAINREVMRTRGT

SEQ ID NO: 164406 - protein, 343 aa, unidentified
MQDVATVGLDIAKQVFQAHGADASGETLFNTKIKRENVLEFFSKLKPCLIGMESCATSYYWARKLLEFGHDVRLIHTRYVKPFVKRGKTDANDAEAINVALTQKTMRFVPVKTLNQQAAITIFRTRSLFVSQRTQLVNALRGHLAEAGLVAAKGIQNYSKLLKLMESAADTVLPTVMKQALTDICDQIHRLNDLVTKLDKEIERRVQHDENACRLLTIPGVGPKTAMCVIATIPDIHRFPSGRHFSSWLGLTPRTHSSGGRSVLRRITKMGNSELRTMLYLGGTVIMMRDSKTPIGRWAARLRARRPYKVAAIAVANRLARIIWALLTNGGVYDPTYGREASA

SEQ ID NO: 164407 - protein, 340 aa, unidentified
MEKSEQIQPHAWILGIDVSKQSIDVCLIRSSDGQLFESKFHNNLSGFRHLKRWCKEMKCECDSSTLCCMEHTGLYTRLLVHYLLGREVHVWLEGSLQIKRSQGLIRGKSDKIDAQRIARYAHLYQGKARIMQLGILTLEKLKDLQANRKRLMKALQSLRTSVQELKPFDPAIGKVLEQTNKEAIRGLEKSLDKVDEQILSFINEDQELKLKYDLMLTVKGVGKVLAAMLLVYTHGFNRLNDSRKLACYSGVAPFVYESGTSIRGKTGISKFANNDLKQVLHMAAISSVQHNSELHLYYQRKVQEGKNKMSVINAVRNKLLHRIVAVVNRGTPYEVRLKNS

SEQ ID NO: 164408 - protein, 462 aa, unidentified
MAAVMIGIDPHKASHTAVAIGAAEEPLGQLQVRASASQAERLLGWAAAWPERAWAIEGAGGLGHLLAQQLLAAGERVLDVPPKLGARVRLLATGDTNKNDPNDARSVAVAALRSAGVRAARRDDHAAVLRVWSKRHRDLGRTRTQVVCRLHAVLCDLVAGGVSKHITAAHAARLVESITPSGAVEAARCELAAAFTEDLRGIDDRIRETRTKLTAAVQAAGTSLTGLFGVGPVIAAAVIGDVRAVARFPGRDHFAAYNGTAPIEVSSGDRKVYRLSRRGNRRLNHAIHMAAVTQIRHRHSDGRAYYDKKLAEGKTRKEALRALKRQISDAIFARLQADARRAAAGVKGPGRQPGNDSDSSAAGSHPAHRLFGQATPGPRHHPTTAARTRGRAGHSPAAATLLPATPHLQVERPQRSEDERPGGAARRRPHSAAGKVTGPSSAVKPQRPKTTSRAAKKTGQTP

SEQ ID NO: 164409 - protein, 401 aa, unidentified
MDVSKRDAKVCLRCPGRRAGSYAKTTSTFGSVTTEVLRLRQHLIEAKVTLVVMEATGDYWKPFYYLLEDGPFELMLVNPAHARNLPGRKTDVSDAQWLAELGAHGLVRGSFVPPQPIRELRDLTRLRTTLIRDRVREINRLERVLQDAGIKLSSVATDILGVSGRAILEALVAGQTDPQVLASLARMSLRNKTAQLLLALDGRFTDHHAFLVRLHLHVIDQLAANIAELGARIDDLVSPYRRVLTLLRTIPGVSERVAVTALAEIGADMSRFPTASHLASWAGGCPGHHESAGRAKHVGTRPGNNHLKAALGNAAIGAARTKNSYLQSRYRRLAGRTSALKALVAIEHAIITAIWHMITTGADYHDLGADYYHRRDPAKTMRRITKQANEIGLTVRFDPIA

SEQ ID NO: 164410 - protein, 309 aa, unidentified
MLTAEADKCKTKVVVNTAAGVQALLAWCAKHGAQPAQLHAILEPTGLYHEQAATALPQVRVSLVNPAQARDFAKALALRSKNDALDSYVLARYGQTLSPALWHPAPLHARQLRALLTRREALSKDLLRELNRKEKSQFSPSAPLVDGSIDKAIAFLREQIKQIERAIDQHIDNHPDLKQDCELLNSIPAIGPQAGNAILAVMHNRHIDSAQSLAAYLGMVPVQRQSGSSLNSCAHLSKAGPSQVRATLYMAALVGTRHNPHIRALYQRLLKAGKSKKAALGAAMRKLVHLCFGVLKNRIPYQPNYAMNG

SEQ ID NO: 164411 - protein, 345 aa, unidentified
MPIVGGLDIHRKQLTFDYLDTVTGEVQRGQVSPADRAHLRAWLRRFAGRDDVAFALEGCTGWRYVAEELAAAGVAAHVGEPADTAFARGRKRHAKTDKTDARHLRQLLADGRLPECWIPPAQILECRALLEAYHDLRREHTAWVERIHAVFFHQGAPRLGEGALRTERSLAALRAAAGTHLSPAGQLQVATAVDMLTAVEARMDTLRRQLRDTARRLTGARVLADRLYGVGPLAALAMTCWLGGAGRFSSSRKAVRFAGLDVTVYSSDGKRSPGHLSRQGPEILRWVAYEAGKTHGRASAPGHDYYAAVKDRQDGKIAALSQARKLIRQACHILAELGDDALTAT

SEQ ID NO: 164412 - protein, 401 aa, unidentified
MRAADWFFVTIAAFDNSGDRTTMASMGDSVRPNTTVYAAIELSKKSWAVGIAHPDRDRPSMHRIAGGNLADLIGRLRKAAGERRIVVCYEAGYDGFWLARSLLKIGIDCRVLDPASIQVNRRARRVKTDRIDSLALLRSLIAVDRGERHVCAVVRVPTVEEEDARRSHRERQRLVRERTGHINRIKGLLFAQGIRGIEPKRRRTRIDFGKLTTAEGRPLGERLRRELEREYQRLELVQNQLRIVEKERDTADAQDPAVERKRELLCALQGVGSTSAAILAREVFARPFASRRHLASYLGLTPSAYDSGSMTRCQGISKAGNSWARRVLVEVAWLWRKYQPASDLSEWYVRKTAGQSSRIRRIMLIALARKLAISLWRYVETGLVPDGAVMAKTALHQGAAT

SEQ ID NO: 164413 - protein, 344 aa, unidentified
MIYIGMDVHQKSTTLCLFDPSRAAAEQYRTLTRPTTAEELRAVLSPLHGQCQVAFEVGTQAQWIASILRPLAEDVQVANPSRIPWLFRDGRKNDRLDARKLATLLYLKQLPTVHLPKAEVSAWRALIHHRRTLVKRRTMAKNQIRTIVRAFGHRCPFKNLWTHRGQTWLLSVELDDARTVMLVALLDELTFFDQKIEEIEAKLEAIAAVHPQVALLRTIPGVGPRTAEAIVAFADGAERFRNRRHFASYFGMTPTEDSSGLVERHGHISKRGPSVVRWVLIEAAHQAIKRCPEFRAFYDSLRRGKKDRGKKAMVAVGRKVLTVAYAMLRDQTPYCAEKVRRQAA

SEQ ID NO: 164414 - protein, 364 aa, unidentified
MQKISTMQASGKNIFEGQLTIGLDLGDRSSAYCVLNEAGEIVLEHKLATTPEAMKQVFGSMPRCRIAMETGTHSPWVSRLLNALGHEVIVGHAQKVRLITKSRRKDDRLDARTLARLARIDPELLSPVQHRSAQAQLHLAEIRARAGLVSARTALVNAARGLVKSYGERVHKCDTRQFSREASGLSTGLREALEPLLCQIESLNESIQEYDRRIEKMAKETYPETALLKQVKGVGELIATTYVLTLEDAHRFRKSRDAGCFVGLQPGRRNSGESEPQMRISKEGDEYLRTLLVQGAHYILGPFGEDSDLRRWGQKLSARGGKNAKKRAVVAVARKLAVLLHRLWVSGEVYEPLRNSQKAMSTAA

SEQ ID NO: 164415 - protein, 332 aa, unidentified
MGVGARIPQAREGEQFLSKRKNYIGIDVSKQLLEVAVHESDFRYRCPNQAGAFLELLAELIALRPARIVLEATAGLEKPVVAALHGAGLPVVVINPRQVRAFAKAVGQLAKTDRLDAAVLAHFGAAIKPPLRPLKSKEEQELEALMGRRGQLVDMLVAEKNRRNSATNEAVRETIKEHIDWLEDRIAELDEQLQARLVSSAVWQNKAAILQSVPGIGPVVSFSLLAELPELGTLNRQRISKLVGVAPLNCDSGQQRGVRHIFGGRARVRSMLYMAALTALRFNPVIKEFYQRLAGKGKPHKVALTACMRKLLSIVNLMVRNQTIWKTDLVLA

SEQ ID NO: 164416 - protein, 410 aa, unidentified
MLLFIGDDWSEAHHDVEVVDASGRVLERRKLPEGVAGVATLHELVAAHLDPAAEADQVLVGIETDRGPWVQALLAAGYGVFAINPLQVARYRERHSPSGAKSDGADAHLLAEIVRLDRAHHRQVAGDSDLAEHVKIATRAHQTMIWSRVRQANHLRSLLREYYPAALVAFGADLAHSDALAVLAAAPSPEQGRRLPQARIETLLRRGGRQLNITVTAAKIKTALGSDQLSARPAVVPAYAASAAALIAVLSAMVAQTEVLAGQVEQGFGQHPDVEIYRSQPGLGAILGARVLAEFGDDPTRYADVKARKNYSGMSPITRASGTKRVVLARYARNRRLGDALFLQAQSALRASPGARAYYDQHRAQGATHYQALRTVASRLVGILHGCLRHRTLYDEHLAWHHRTEPSLAA

SEQ ID NO: 164417 - protein, 319 aa, unidentified
MAIIGVDVSKLSLVAVRTSSTGITKENFEIPNTAVEIGTWLDQLQGKHKYLLVASEATGDYHNTLAKACLSRGIKFRLLNPILTKQFNRATIRKRKTDLTDSEIIAKLAIQGEGSIVSATTFAPSKAIHRATIRLVKVKQALERMSTRFNEMFPEENAVNQQLSNCVELLGESCIKLRKEAKIKTDPKLRKLLTSIPGIGEHVVVTLINEINDIGRFPSPKSLVAYAGLDPRVKQSGTSLKHNTHITKRGSVYLRRDIFIAASIASRWEPEIKNYFEKKLGEGKRYREALVAVSRKLLNRVYAVWKRGTPYERLAIKSQ

SEQ ID NO: 164418 - protein, 341 aa, unidentified
MEKVSIIGLDLAKNMFQAHGACTDGSVGFRKNLSRNNVLMFFAAQPRCVVAMEACASSHFWAREIGKIGHEVKMIPPIYVKPFVKRQKNDTADSEAIAEAASRPTMRFVAVKSEEKQALGMAFRVRDLFVRQRTQAINALRGHLAEYGVIAPQGIAHLGRLIRVVVDPDNGMQGSVVALANMMLDQIKGLQERIDILEKEIRTRSKRDDVASRLMTVPGIGPICATAMEAFAPPAETFSKGRDFAAWVGLTPRQHSSGGKERLGNTSKMGQRDLRRLLIIGAMAVVRWAVRKGAPEGSWLARMLLRKPRMLVAVALANKMARIAWALMAKGGIYRNPAAVV

SEQ ID NO: 164419 - protein, 395 aa, unidentified
MISVGIDVSKGKSTVCILKPGGEVVKPPFEMDHTVEDLDSLVSLIKSFDEETRVVLEDTGHYHLPVASYLASHGIFVCCVNALRMKKFCAQSIRRAKTDKIDAVRIATFGITYWSELTQAYDAPDTYDELRFLARQYYQITSILVKAKVNLSNLLDQVMPGISDLLQNQKDNHKLTEFVGRYIHFQAILDMREKQFTADYCKWAKKMGYRCNERKAAEIYALAQNGIPSLPNSQSIKIAVREAIKLIHSTEESRNTILAQMQALCKTLPEYPVVREMNCIGDVLAPRIIAEIGDVRRFRNKHSLIAYAGIDAPPYQSGAFNASERKISKRGNSYLRKTGYEIMQSLIKHKPADDAVYNFIQKKRSEGKCGKEAMIAGLNKFLRIYYGKVMEVYSE

SEQ ID NO: 164420 - protein, 319 aa, unidentified
MPQHHRPANAGLRILGADVAKSHVVFHDSLTGRSWTTANAPADLGQALYAYADYDWLVCETTGGYERQLLEAAGRLGLTSCRADAAQVKAFIASHGGRAKTDRIDAAWLARYGLERAHRLLSWQTPDPHRQAFAELLRHRQSLLAQRTQAKNRRSAPGGGQRLQALLDEQIAFLTRQIDRIDQDMADLVQAVPDLARDEQTLRAIPGVGPVAARCLIALLPELGRLGPKQAASLAGLAPHPRESGKLKARRRMNGGRNGLRPVLFMAALAAARAHPSLSPVYQRLISAGKPKRLAIAAIARKLVVIANAKLRDQHQQLT

SEQ ID NO: 164421 - protein, 413 aa, unidentified
MQVLYERCCGLDVHKKTVVACVLITSPDGQVQKQGRTFATTTASLLALADWLASLDISHVALESTGIYWRPVFNLLEEGRTIILVHAQHMRAVPGHKTDIKDSEWLADLLRHGLLKASFIPSKPTRDLRDLVRYRKTLVQERAQEVNRLHKVLETANVKVSSVVSDVLGKSGRRMLAAIIEGVSDAEALADLARGTLRHKLPQLQEALHGQIESQHRVLLGQIFAHISFLEHSLEHLQQEIEQRLCPFEEAMQLLLSIPGIQAITAAAILAEIGVEMSRFPSAKHLASWAGVCPGNKQSGGKRLSGKTTKGNVRLRAVVVEAVWNISRMKDNYLSAQYHRLARRLGKLQAAIAVAHSLLIVIYHVLRDKKPYHDLGTDYFDSLDKERLTRQALRRLEALGYAVTLTPKEEVVI

SEQ ID NO: 164422 - protein, 358 aa, unidentified
MGEITRVGVDLAKRVIQVHAVDATGRVIVAKQLQRDGFTAWCAQLPPGCLVAMEACSGSHHWGRRLRAMGMEVKLLAPHFVSPYRLSGKTGKNDAADAAAICEAASRPTMRFVPVKSVEQQSMMALHRWREGYKEERTACINRIRGLLAEFGLVFAQRPEVLRAALAEVIEDASNELGAVARMALQRAHLHWIELECHIAWCDERIARHVRSDEQAKAAAKLCGIGPVTASALVATVDDFKQFKNGRQFSAWMGLVPRQSSSGGKAVLGEITKRGDEYLRTLLIQGAKSAVFTAHRRSDRLSRWIVQLRDRVGWQKAAVALANKHARILWSILVGGQSFDPEHVPTKHRRPSLAAVAA

SEQ ID NO: 164423 - protein, 338 aa, unidentified
MNNHSLIAIDLAKNVFQVCIVNSNNRVLMNKSFNRNALSEFMIKQKPALVAMEACYSSHYWGRLFQSDGHQVNLLPAQHVKPFVRGNKNDHNDALAIAEAAKRPDIKSVPIKTVAQQDIQSLHRLRERCVSQRTSLSNQTRGLLSEYGIVFPQGFKAFKQALALLLDPKDTQLTVVIKQQLQYVSDEFDRMCSRLKELNQSLAQIAHDNSHCQRLMSIPGIGYVNATGLYSAIGNGSQFKNARERSVWLGITPKQFASGNKQVMAGITKRGNRYLRKQLIHGARALMTRCKKRDDHLSHWLINIVKRRGTNKACVALANKMARLSWTLLQKNQMYKPQ

SEQ ID NO: 164424 - protein, 338 aa, unidentified
MKAYAGIDLHSTNNYIGIMDQDGKKLFGQRLPNQPSKVLSVLTPFKDALDSVVVESTYNWYWLVDMLQEHGFDVRLANPAAIQQFSGLKYTDDETDAYWLANLKRLNILKEGYIYPRDIRPTRDMLRRRLMFVHQRTAHILSLQSLITRQLALNYTGEMIKRLREVTLKEMFGDSDFFTLAKSNKETIEFLGIKIKHLEKEVLHKIKLKPEFITLTTIPGIGDILGITIMLEVGEISRFTKVGNYSSYCRCVNSRRISNEKKKGTGNRKNGNKYLAWAYVEAANHALRLCPEAHRFYQRKRAKSKNVIAIKALSNKLARASYYLMRDKVPFDAKKLFN

SEQ ID NO: 164425 - protein, 369 aa, unidentified
MPHVTSIGLDVHARSVAAAAFNPFTGEVVRRSFGTDASEIAEWALGFEEPRACYESGPTGFHMARELRALGLDCAVAAVSRMQRPAADSRRKNDRRDAEFIARMLATHNIVEVPLPDAAAEAARDLDRALGDATADYLRARQRLNMFLIRLGRVWDERNAGGTRKKAWTRAHWRWISEIRLEGPQRDVLEHYVTAARCAESDRRQLERKVVALAGTDRWRPAVEALCCIKGIDTLTAFRLAAEAGSFSRFRSAPAFASWCGLTPSERSSGETERRGGMTKAGNRLVRTALIESAWHYSMCTPRPKAPAPGADVPAAIRSRADECTARLCRRREALSAAGKNACKANAAVARELACWVWEIGCRAEGTLG

SEQ ID NO: 164426 - protein, 427 aa, unidentified
MKEKIEPKEMGWESHVYFMGFDWAKGHHQIVMLNSKGKIVLDLEITHTAEGWHNLRDKLTNLAGTNLAVVAATIETTCGPAVERLLGLGCTLYPLNPKAAQRYRDRKAPSGVKTDHFDALSFANALRTDGHGWRPLKPEDPKIQELRLVCRDEIQLIEQRTALVNKLQQALHEYYPAALEAFEDWTAESSWAFVQRFPTPQALKKAGKYRWDKFLHVHHLYRSDTYPKRIDIFKQATEFCGGQAVTNAKSMLAVSLAKQLQVLQQQLKAYRKRIEELFRDHPDHDLFGSLPGAGEKLAPRLLSECGEDRERFGDFEALQCYVGTAPVSFQSGQVHRVKFRRARNKHFRTAVHLWADLSRTQCAWAQIYYQQKRKEGKSHACALRCLGQRWLKILWKMWQTRTPYNEQLHMSNQLKHGSWVFTLSSVK

SEQ ID NO: 164427 - protein, 355 aa, unidentified
MSSEKYIGLDVHQATISVAVLDSTGKLVMESILETKAATILEFFAGLRGTVSVTFEEGTWAAWLYDVLKPHVAKLVVCNPRKNALLKDGNKSDRIDAHKLAELLYLNKLSSVYHGETGVRMLRELARSYLTIVKDLTRVMSRLKAVYRSWAIPCAGRDVYYTRHRDEWLGKINEAGVRRRAERLYQQLDMLQYLRQQARRELLAESRKHAITVKLRQIPSLGPIRSALAVALIQTPHRFRTKRQLWAYSGLALETRTSAEYCYVKGGLRRSKKQISIRGLNKDHNHDLKGLFKGAATRASVLPGPFQDFYQRSLAKGIKPTMARLTLARKIAAITLTLWKKGENFDADKLKSQAA

SEQ ID NO: 164428 - protein, 337 aa, unidentified
MQQQREYVGIDLHRRRSVIVRLSPEGDKLDVVRIDNDPVALAVEVAKAGPDPEVVIEATYGWYWAVDLLQANGARVHLAHPLGNNWGNRRVKNDERDATDLADLLRLGRLAEAWIAPPATRELRELVRYRAKLVAIRSGLKAQIHAVLAKQGVAVPMTNLFGVGGQRLLDDCALDGAYARRVRSLRELVSDLDGHIATFGDHVAQALDGHVGYEAVQHIAGVGPVLAAIFVAEIGDVYRFSGPDKLACWVGLTPRHRESDTTVHRGPITKQGSRLVRWAAIEAISRGRCSFLQDHHRRIAERRNNRNIGRVAAAHKLIHLVYWALRDGHVRCLEAAA

SEQ ID NO: 164429 - protein, 386 aa, unidentified
MMTMTRTEESTAVATGTGPTLLLAFELSERVWKIGFTTGLGQRPRRRQIPARATDRILEEIARAKVRFRLPTTTPVVSCYEAGREAFWLHRWLVAHGVSNHVIDSSSIEVNRRARRAKTDRLDLEGLLQLLTRHQSGERRVWRVVRVPRVEEEDARQLHRTRETLQQDRTRMINRLKGLMTTQGLVLQIDADFLTQLETARLWDGTPIPAGLKARLQRGWAQLAFVTRTLADVDAERAALAPKLTTTMGRYVAALPTLRGIGPIGTWTLATEIFGWREIKNRRQLGGLVGLVPAPYQSGDRTHDQGITRAGNKHVRRLMVQLAWSWLRYQPDSALTQWYQGKFGRGSRRLRRIGIVALARKLLIALWRYAEHGEIPEGAMVKGQAA

SEQ ID NO: 164430 - protein, 334 aa, unidentified
MTSSSVTPSPSATPVPPVFVGIDVAKETLDVARSDTGEVRQFHNTPAGIRSLVASLLPARPARIVLEATGGLEEPVLDALLDAQLPVARVNPGKVRHLARGLGIQAKTDAIDAAILVEFARLAEPRLAQKRSEKQAELDALVTCRRQLVSAKTDQGNQLASTTSPFAKKALRTVLASLDKQIKRLDKQIASIVDSDDDMKHKDRILQSAPGVGPVLSSAIISQLPEAGQTDRHEVAALTGVAPFNHDSGKHKGKRAIRGGRADLRSILYMCTQVAMMHNPILRAMAERLEKLNKLPKVAIVACMRKFLTLLNAMLRDNLTWDQLDVVKKLAPNA

SEQ ID NO: 164431 - protein, 467 aa, unidentified
MLSDAMQTLAGRDADMTAEATGATSQRRVASCPVRERPRISWMRGDAPPRISFGRLRSRALGQAPPHRRREPGMIYAGVDIAKTDHVIGAVDERGAEMCPPMPFKNTEAGLERAVAWLEGLAGSPSDVVVGMEATGHYWMACYSFLVARGYSVAVINPMQVKAVRKLKGLDKVKNDRVDAGLIAEALRIGQYDETRLATDEMASLRSLSRYLQSLRGMVAELKTQCICLMDAHFPEYAGIFSDMFGAGSRAVLSKSPLPFELARRRADSLARDIAEASRRGGKSSGYAAKIKAAAKSSIGVRLGQEAASFQVKSLIRQIEFADSECAGVEARLRSLLDEVEPLVLTIPGVSYVTGAQIVSEIGDVSRFRNAPALVSYAGLNSSVSQSGQFDSGGGPITKHGSPYLRRALWLAANRARQYDPGLRAFYDRKRAEGKPHRVAVTAVARKLCHIVFAVMRDQVPYDPGRE

SEQ ID NO: 164432 - protein, 309 aa, unidentified
MKEQVVYLGVDVAKAYLDAAIGKHKRRLANDGTGHRQLINWIQQIEAQVQVICEPSGGYERMLIQALVGAQVKVSLVQANRVRQFARAAGILAKTDSIDAEVLCAFGEAMRPQTLSASKLAQEQLRELESQRRHLSRLLVMEQNRGARLGDSSVRRLNRSLNKQIQKQIERIDLLINQHIAGSQELSTKAHKLTAICGVGPRTAALLLAQMPELGQLNRREVAALVGVAPFNRDSGKWRGKRTIFGGRRHVRHGLYMAALVTARHNPILRAFYRRLRAAGKPAKLALTATMRKLLIVLNSALKPDPIYA

SEQ ID NO: 164433 - protein, 375 aa, unidentified
MAEITRALIARVGVDLAKNVIQVHAVDAAGRRVVTRAFKREQFVAWCAQLPPGCLVAMEACSSAHHFARRLRAVGLDARLIAASFVSPYRMEGKSGKNDMTDAAAICEAASRPTMRFVAIKSCEQQGVMSLHRVREGLKEERTGCINQIRGVLGEFGLVFPKSAKALRAVLSDVIEDAGNELSGVARLVVQRAFEHWRELDAHMSWCDQQVGQHVRTSAPAKRAAKVIGIGELGASALTASVGEFKQFKSGDQFGSWLGIVPRQNSSGGKASLGRITKRGDDYLRTLLIQGAKAAVMSAGKRDDPISRWLVQLTARVGWQKACVAMANKNARILWSVMTREQGYDPHHVSVKPAAKQPSPPKVSAAVPARQACAA

SEQ ID NO: 164434 - protein, 440 aa, unidentified
MTNDSIQTNSAPVREPAVPIVCWVGLDWADQQHCLVVRTAPGAAAKTHLVEHKPEALDQWLLQLRKDHPQGRIAVAIEQSRGPVLYALMKYDFLALYPVNPRCLADYRRAFKVSGAKDDPLDADLLCELVCLHADRLRALAVDDVPTRQLRLLVEARRVFVGDRTGFSNRLGANLKCYYPLALDLIGEDLATPMALDFLRRWPNLAKLQAAKPGILRAFFYAHNSRSEDKIAQRLEAVKQATPLTEDPALVQPLQLQMERLAQQLRSLNQAIDQYDAHIKMVFAQHSEKWLFDPLPGCGAVLAPRLAAAFGTIRANFESADDLLCFSGVAPVKKESGTLKVVHFRYARPVFVHQSIVEFAKCSIGQCEWARLLYEHQLTKGKSRWAAIRMVAFKWLRILWRCWQDRQAYDETKYLRSLQRDGVELYRSIYGACCRSKQRL

SEQ ID NO: 164435 - protein, 334 aa, unidentified
MYYSGIDLHTDNSYITTQDDSGCVVKQERTANDREDVLAYFHSLSGPHVVVVESTSGWYWLNDLLQENGIELVLAHAKYLKAIAYAKVKTDKVDSQTLATLLRQNLIPRAHKISRELRGFRDTMRLRLRLVQQRTACLRRIDRIAVKFNTTAVSDPYRFQLWVLHHTRDSFTSQILALEKSLHPVLIPNDDVQHLLGVPGIGKLTAFTLYLEIDGIERFATDKHFVSYCRLVPAADNSNRHQRHRSSNDGNKYLKIAFTEAAVHAIQYYPEFKSFYHRLARRSGQAVARTVVAKELAKIVYYILKNNVAYRGFKGQPISRPKSMQWPRLPSPNA

SEQ ID NO: 164436 - protein, 411 aa, unidentified
MDVVHARCAGLDVHKATVVAGVRMPSPRCGERCGETMTFATTTRGLRELREWLIAHGVTHVALESTGVYWRPVYAVLEGVVEMILVNARHVKMVPGRKTDVRDCEWLAQLLECGLLRGSFVPPAGVRDLRDLTRLRKTLIRERSQHVNRVAKTLELAQLKLGCVVTDIMGKTGRAILQALSTGIDDPVRLADCAQGNLRKKRAALREALVGGLTPHYAFLLQQHLSLIDALDVHIATLDARIAGAMAPFAEAATLVQSMPGIAARAAQAIIAETGIDMSQFPTAAHFASWARLCPGNNESAGKRRPTTTGKGATWLRATLQEAAWAAVRSRKSYYRALYHRLRARRGPKKAIVAVQHAMVVALWHMLKHRVSHRDLGADYFDRQNTERIRRHHVRRLERLGYDVVLVEKAA

SEQ ID NO: 164437 - protein, 350 aa, unidentified
MKITRAGIDIAKSVFHIHAVDRHDRPQWQTKLRRGKWIEALCARLAPGAEVGMEACASAHHWGRELQKRGFRVKLIAAQFVKPYVKSNKNDRVDAEAICEAMGRPGMRFVAVKSVAQQDRQAAHRIREELVGHRTAKANQIRGLVGEYGLVAPVGIQQLRRALPEWLENADNGLTDEFRSLLADLAADLRQLDDRIVRLDETIAQCVKNDPIARRLLELRGVGSLTASALSSALGDGAAFSKGRDFAASLGLTPRQHSTGGKDRLLGISKRGDGYLRKLLVHGARAVIRHARNRDDVLSDWLKELTARKHVNVVTVALANKTARIAWAIVRNETDYDPRLAAGRQALILQ

SEQ ID NO: 164438 - protein, 383 aa, unidentified
MKKAYLGIDAHKETNVIATAFSGRGDPELYGKAPADLDAFVRVLRRVLAKYGLEKEDVAICYEAGPTGFVLCRRLRSLGFECEVVAPSKIPKAAGDRVKTDRRDARKLARMFRAGDLVFVNVPDVADEVIRDVCRGRTDAADVRARARQQLGALLLRNGYRYGGKSPWTEPHMRYLRELVLPEPAQKFVLEEYLQRVDASVAQVERIENQMERLLPGWQRRKFVEALQGFRGFGLVASMTLGSELGDLLRFDHPRRLMAYVGLVPGENSSGERRRQGAITKCGNSHVRWMLVEVAHHYRYPPKVSKELSKRQEGLSRDVRAVAWRAQERLHRRFCRLLLRGVHPNKVVIAIARELTAFIWELAQVLEKERTAATPRPLARRAS

SEQ ID NO: 164439 - protein, 346 aa, unidentified
MNKITRIGLDIAKNIFVLHAVNEHGKLVKRQTLDRSKVLAFFAQTEPCLVGIESCASSQHWAREIAKLGHNVKLMNPKFVVPYRKSGKNDANDAEAICEALSRPTMRFVPVKSVEQQAVCSLHTSRQFLVVQRTALINHCRGILTEFGIVMPKGADKVRRLLAEKLQDDDNTIPPLLHTLMQDHLLDLARVEERIETIDKQLAQWAKHNQQALTLQQMRGIGMITATAFASGVCDATLFKNGRQFAAWLGLVPRQYSSGGKNKLGSITKAGDPYLRTMLTQGARSIVFHSKDKNDNFSLWIQRLIARVGMNKAVIAVAAKQARVMWAMMTKNTHYQPEKICSPLLA

SEQ ID NO: 164440 - protein, 274 aa, unidentified
MKTIATIGIDLAKNVFQAHGVDDAGNVLVRRQLRRAEVLRFFSSVRPCLVGIEACGSSHYWAREIEKLGHTVKLMPAGYVKPYVKRGKTDAADAEAICEAVTRPTMRFVAAKSAEQQSVLMMHKVRELLVRQRTMLINSLRGHLSEFGIIGAGGAKNVPKLVEHFHEMQSTLPELARTMLWAIIDQLQRLGVEVVKIEKKIIDAVRSDAAARRLLSIPGVGPITASAITAAVADIKNFSSGRRFASWLGLTPRPHSSGGKERMSGISKQGDGYC

SEQ ID NO: 164441 - protein, 411 aa, unidentified
MLEVKVENCAGIDVGKKFLAVCVLTGPVDRKPAEEVRRFGTSVKELERLRAWLIEKKCTEAVMESTGSYWKPVFNILEGSLKIILANPEQVKALRGKKTDPNDSRWLASLLRHGLVQGSFIPPRDIRELRDLTRRRRTLVGDGAAEKNRVQKILEDANVKLGNVLSDVFGTSGQAMLEALLENKQSPQEIAGLGHWSLAPKIPQIIEALEGHRMSDHHRFMIRQCLRHMRSIEEMIEELDTEIAVRLKPYQQQVKLACTVPGIKPTAAASILAETGMDMSPEGPFPDCHHLASWATVCPGNNESAGKRKSGRMRQGNRWLRATLTQTGWAGAADKKSRFPLRYQKVKLRRGGQCAVMAIAHAQLIGIYWALRNGIPYPEQVQGMEQDRREAQIRYHLQRLTKLGYEPDMHG

SEQ ID NO: 164442 - protein, 344 aa, unidentified
MFREKVAQSDLNGKGLILEKYDHYVAIDWSMRIMAIAHMTTRRKAPQVFERPTNLKELKTYLSTLSGRIVLTIEETTTSQWLFLELLDHVSRIIICDPYRNRLLCHGPKTDKIDAGKLCLLLYNGMLSEVFHSTSDLYELRLLVGAYVDHVQAGVRCQNQKSALLRGHQDQSPTALFILNRLDSDIERYHATKEEYEKHFATIVRKNKLLRNLICVDGVGNIGATKILACVVDARRFPNRGKYYSYCGLARHEKISGGRSYGSRTPRFNHMLKDVYKTAASAVVGSTKPLNEYYEALRSKGVAEHNARHAVARYIARVTLAMIKSGQSYDPYRWRQNVIEHDHL

SEQ ID NO: 164443 - protein, 325 aa, unidentified
MDPDDKHGIAEKMSDNLPQTIGIDISKASLDCHVHPAGAERQFANTAKGHKALIAWLRQWPVERIAYEATATYHRALEAALADWPCVKLNPERARRFAQATGTLAKTDRIDAMLLARMAATLQPPVRPARSAQQAQMAELINARDGLMRDRTALKNREKNLTIAFLKRQCWQRLEQIDRHIEALDTEIANLIAADAALARRHEILTSIAGVGTLTANQLIATMPELGSLENKQAASLAGLAPVARQSGQWKGKSFIRGGRANVRQALYMPALVAARYNPDLKAKYQQLVTAGKPAKIAITAVMRKLVVTANALLKADRCWTQSPA

SEQ ID NO: 164444 - protein, 310 aa, unidentified
MDRIIVGIDVSKDRLDVAVRPSGEAFAVSRNAAGIEQLVARLRKLSPHIVALEATGGFETVVVAALGAAGLPGAVVNPAQVRAFAKALGQRAKTDPIDAGVIAHFAEATNLEPRPLPDEQTRLLADLVARRRQIVAMIGAERQRQQRLTAPRLSKSIARLIKALEKELASLDADIGDAVQGSPAWRAKEELVTSVPGIGPVISRTLVADLPELGQIGHKQITALVGYAPFTRQSGKWRGKSFIGGGRTAVRAAIFMGAMVAKKHNPVLKAFFDRLVAAGKPKLVALIAVARKLLIILNAIVRDNRPWQNA

SEQ ID NO: 164445 - protein, 392 aa, unidentified
MYIVGIDIGKNHHEASIVSPEGKQIGRSLRFATTHKGADSLMSFIFKNIGNSPCVFGMEATGHYWYPIYSFLKAKGYTIYVINPIQSDSLRKMYIRQTKNDSIDSFLIAEVIRFGQFGTTSMADENILAMRQLCRYRDSVISSRTEIKLRIGTIMEQIFPEYEKQFSSLWVSTSMGILEKYLTPENIENAPIDELFEIIKDKSHNKLTMKKAISIREAAADTFGIKIAQDAFSFQLKQLIDRMNFLDKQIEALDCQILEYYKNFDCYLHTIPGTGMIAAATILAEIGDINRFKSSSALVAFAGIDPTVRQSGEFSSTHNHMSKRGSPYLRHAIFLAATARSFHNSPLNAYYKKKRDQGKHHLTATGAVARKLTTVIYAVLRDSKPYEPKKFC

SEQ ID NO: 164446 - protein, 402 aa, unidentified
MNAVGIDVSKGKSMVAIMRPFGEIVSAPFEIKHTASDIHSLVELINSVEGESRIVMEHTGRYYEVLAHQLSEANLFVSAINPKLIKDFDNDSLRKVKSDKADAVKIARYTLDKWQNLKQYNVMDELRNQLKTMNRQFGFYIKHKTAMKNNLIGILDQTYPGVNTYFDSPARSDGSQKWVDFASTYWHVDCVRKMSLNSFIDHYQNWCKRKKYNFSQSKAEEIYGKAKELVPVLSKDAITKLIIKQAVDQLNSASTTVESLRTLMNETASKLPEYPVVMAMKGVGTSLGPQLIAEIGDVSRFTHKSAITAFAGVDPGVNESGSYEQKSVPTSKRGSSDLRKTLFQVMDVLIKTHPQDDPVYQFIDKKRAQGKPYYVYMTAGANKFLRIYYGRVKEYLSSLPES

SEQ ID NO: 164447 - protein, 375 aa, unidentified
MNAITKCVGLDVSKEKIAVAVADQDASPRFCGVIPNTREAIRKQLRRLGESHELRVCYEAGVTGYGLSRFLQTLGIECVVAAPSKIERVPGPRVKTDRKDALMLAEKLRKGDLVSVWVPDEGDEALRDLVRARKARMEDRTQARQRVSMFLMRHGIVKPDTMTPWGNPYRTWLRSLTFVNRASQMAFQEYIIAVEETEMAIRRLEQEIHEIATHSSYAPMMQALQALRGFKEIAAATVVAEIGDFTRFAHPQQLMSYAGLVPRESSSGNKVWRGAITKTGNPCLRWILTESAWSYRYRPSVSASMAKRMEGLSPHVQAIAWKAQSRLHRKYMRLLSIGKSRPVALMAVARELLGFIWAIAQQVSHESNGSAGLVA

SEQ ID NO: 164448 - protein, 450 aa, unidentified
METDMARRCIGLDVHREFAQVAIWQGGLVTQAGRFATTPEGVRAFADGLGPADEVALEATGNTWAIATLLASRAGRVVVSNPVKTRAIAEAKVKTDKVDAEILAQLLAADYLPAVWRPDPATAALRRQVLRRAHIVRQRTRLKNQVHAILHRNLIPRCPAADLFGHKGRRWLGEQDLPPDELAAATALLRQLDFHAEELRLIDTDLGQVALGRPEVLRLMTVPGIDATVALSIVAVVGDFTRFRTPDKLVAYLGLNPRVRQSGGQPASHGRITKAGSAHARGMLVEAAWSASKAAGPLRAFYQRVQARRGMQIAVVATARKLAVLCWHLIISGEDYAYAQPSLVAHKRRKLELRAGLPSARGQKGKSAGYSLQAVRAAERDLAAQAEVAYRVTIAAWQPTRPTGRTAAGTPAARTAATRRTGAGRPGVDVAATTGARLSRPSRGNAARQG

SEQ ID NO: 164449 - protein, 298 aa, unidentified
MTIVAGFDVHRAQITFDALDRETGEVKRGRIRATPEAVREWAGRFVGEQVHVAVEAGTGWLFVCEALREAGAVPHLAEPAETSALRGPKRRAKTDREDARWLRTLLCEGRLPEAWIPPAHVREWRTRTRLRKTLVDERTRWLARVQATLFHHGIAGVPDKLLSAKGREFLAGLELPDSARERTEVALALIEALDRQLAPLEAELRLFARRQPGCRALMRHYGIGELTAPTILCELGDVTRLSASRKAVRCAGIDIGVHRSDRRSRAGKLTKQGSPQLRWALYESAQAACRPTSPDRAD

SEQ ID NO: 164450 - protein, 343 aa, unidentified
MNDITTIGLDTAKSVFQVHGVDAKGETVLRRQLKRRQVLAFFAKLPSCLVGIEACGASHYWSRELTKLGHTVRLIPPRYVKPYVKSQKNDATDAEAICEAVTRPNMRFVPTKTREQQSILMLHRTRHLLVRQRTSTINAIRSHLAEYGVVSGVGRNGVEALLKIIRDEQDDRVPAIARDCLMALGVQLEMLKRQVLELDAKILAIHRNNELSRRLEAIPGVGPCIATALVASIADPRAFRSGRQMAAWIGLVPKQNSSGGKDRLGGITKAGDRYLRSMLMLGALSVIKRAKQLGYTRRPWLAQLMARRPVKVAAIALANKIIRMVWAMMVRGENYREPVALAA

SEQ ID NO: 164451 - protein, 335 aa, unidentified
MPLYCGIDLHAKNSYLAIIDEQRKRIFKRNVTNDRKLILAFLDPYRSELQGVVVESTFNWYWLVDTLMDDGYTVHLANVSAIQQYEGIKYVDDKHDAFWLADLLSLGILKEGYIYPKEQRPIRDLLRKRGHLMKLRTSLLVSLTNTLANVCGTKVPSHRIKGKEDHVSVHLDHHESLALMGQVSKAAIDMLTDQIKTIESHVEKQCKFDTPLLSLPGVGKILGLTILLETGPIGRFPAVGNYVSYCRKAESTWKSSEKVKGRGNRKNGNRYLSWAFAEAAEHARMFDTASRNFYNRKLHERNSPVAHAALANKLSRAAYYIMRDRVPYEEAKLFG

SEQ ID NO: 164452 - protein, 385 aa, unidentified
MANQNDLSRSLVALEQNNTIIAVIEMSLNYWLIAGIVPGVDRHPLKKLNVDEKALLQLLRQWRDEAAKAGHVITRMAVAFEAGRDGFWLARWLRARGVDAHVIHPTSVAVPREHRRAKTDRLDTELLKRAFLGWLRGEPEHCRMAAIPSLQEEDAKRPTRERENLVGERTRIINRTKACLVRFGIRNFKPTLRKAPERLNQLCTPEGDPLPPNTLAELRRDMARLRFIIGQINEIEAARLQRLEQAPVEGPTAMVRLVARVIGVGIETADMLVHEILSRDLRDRRAVARYAGLTGAPDESGSKRREKGLAKAGNARVRRGMIQLAWRFLLHQKDSALTQWYRARTASAGRKRKTMIVALARKLLIALWRLATTGEVPTRVVLRAA

SEQ ID NO: 164453 - protein, 450 aa, unidentified
MAKRKKQHTTVKPLHVLQPNAAGIDIGATEIYIAVPEDRSSETVRQFGTFTEDLHQAAQWLKDCNIESVAMESTGVYWIPVFQILESYGLDIILVNARHVKNVPGRKTDVQDCQWIQYLHCVGLLRGSFRPDQDVCAVRSLLRHRDTMVKAASSHVQHIQKALTQMNFQIHNVISDIVGVTGLAIMDAIVSGERDREKLADLADPRIKAGRQTILKSLEGDFRSEHLFTLKQALFSYRHYQQLIQDCDQEIENHLKTFDSRIDIDENPLPPSRNSRRKPKTAEPTFDLKFHLYRLFGTDLTRIDGISILTSHVIFTEVGPDLSKFPTANHFCSWLGLSPQNKISGGKILSSGTRPGSNRIAHALRLAANALLRSKSYLGDYYRRMRSRHGAPKAITATAHKLARIVYYLIKHQQPFDESIFAEQEKHHQERMKRRLIKQAKSFGLQVVPA

SEQ ID NO: 164454 - protein, 402 aa, unidentified
MNAVGIDVSKGKSMVAIMRPFGEIVSTPFEIKHTSSDINSLVKLIKSIEGESRIVMEHTGRYYEVLAHQLSEANLFVSAINPKLIKDFDNDSLRKVKTDKADSVKIARYTLDKWQNLKQYSVMDELRNQLKTMNRQFGFYMKHKTAMKNNLIGILDQTYPGVNTYFDSPARSDGSQKWVDFASTYWHVDCVRKMSINAFIDHYENWCKRKKYNFSKSKAEEIYGKAKELVPVLPKDDITKLIIKQAVDQLNSASITVESLRTLMNETASKLPEYPVVMAMKGVGTSLGPQLMAEIGDVSRFTHKGAITAFAGVDPGVNESGSYEQKSVPTSKRGSSDLRKTLFQVMDVLIKTHPQDDPVYQFLDKKRAQKKPYYVYMTAGANKFLRIYYGRVKEYLASLPES

SEQ ID NO: 164455 - protein, 362 aa, unidentified
MKNIRQCVGIDCSKDTLDTAINFLDENFQTKIHATEVFENNDKGFKRLMKWMHKLCLKDMPCQVVVEATGVYHEQLAYALVNNGFTISIVLPNKIRNYCRSTDIRTVTDKISAKQISEFGLVKKLDNWIIPDKIYTQLKALSRERIQLSDEKTAASNQLHAFKHAALTLSSTAHRSAKRIKFIEQQIQQIEDEMKQLVKEHSTLKEKIEKICSIKGLGFITVVSIIAETNGFNLVRNHRQVVCYAGYDIIVKDSGTSVRSKPRISHKGNKYIRRALHFPALTAVKYNVSLENIYNRIYDKQNIKMKGYVAVQRKLLILIYTLWNKDEAYNPEYVHSSIKNLEQPNKTALTELDHVRSLNFIC

SEQ ID NO: 164456 - protein, 293 aa, unidentified
MEQYAGIDVSLELSSVCVVDAQGKIVKEAKVASEPEALIGFFETLGIAVNRIGLEAGPLSQWLRAGLKRAGFDAVLLETRHVKAALSAMTVKTDRKDARGIAQLIRMGWFRPVHAKSIGAQEIRALLVARKQLLGRLIDVELSIRGILRGFGLKVGPVTRKNFEARIRELVTGQATLERITMAMLSARAALKAEYAKLHKAVLTIVRDDAVCRRLMTVPSVGPLVAITYKSAIDDPHRIAKSKAAGALFGLTPKKYQSGEKDVTGGITLAGDEMVRTALYEAGVSEALCKGSL

SEQ ID NO: 164457 - protein, 384 aa, unidentified
MAAVIIGVDPHKLSATIEVLDGQEKMLGGGRFGTDRDGYRQMLATGRRWPQRVWAVEGSNGIGRHVAQRLVADGESVVDVPAKLSARARVFSTGHGRKTDATDAHSIAVVAVRTSTLTAVDVDGELVALRLLADRRDELAGARTRTANRLHRLLLELIPAGAPRFLSATQARALLATVRPRDVAGRTRRQLAAELLADIVVLDRKLKDSDRRLTEAVTATSSGLPGLYGIGPVGAARILGDVGNIARFRSKAHFASWTGTAPIDASSGQQQRHRLSRAGNRRLNRVLHIMAIVQIRHDTEGRAYYQRKLAAGKTPMEALRCLKRRLSDVVFRQLVADANRTREAGPGGHSGATLQSSAASPTPAADSSDKSLPGPAERQPTPVP

SEQ ID NO: 164458 - protein, 342 aa, unidentified
MKFYCGIDLHATNSFLCVIDDKDNIFLKEKVKNDLGAILYALESFSPRPPVVVEATINWYWLVDGLQEAGFDVKLAHTMALYMITGAKIKTDRRDAFSLAKLLRLNAIPEAYIYPKDKRPIRDLLRKRKKVVNLRANAYGALRRVLLQHGIYGYSQAAIKSLTEEQLDQHLEHCATQAGCHLEVQRIRFYSYQIKTLENIILSSVDDDRGFELLQTIPGVGKILALTILYESGDIDRFQSAKQFCSYARVVPGIAQSGGISKRGRGSKQGNPHLKWAFCQAAALSVRYNTRIRKFKQRHLARRRSKAKKLVTLCIVAHKLATAAYNVLKDRVPFKQELMFGS

SEQ ID NO: 164459 - protein, 455 aa, unidentified
MKKNNETEKETGQVKKKRFKTGLPVYNPHAAGIDVGDGKHDVAISDDAGGHHVREYQSFTEDIEQLVKWLVSEGITTVAMESTGVYWLNLYLMLEEAGIEPYLVNAKHVKNVTGRKRDDTDAIWLQKLHSCGLLQKSFQPEGQIRVLRTYVRQRKNLITIASDSVRRMQKALELMNIKLHVVISDILGKTGLLMVKAILDGERDPRQLLHLKDPRIKASDEVVLKSLKGIWKEEYLFMLQQAYDGYTFYQTQIKACEEKIKEQLLAQAATILEGDVSELDITIKKKPKKNQLFFDARPMLKVIAGVDLCEVEGISEISTLELLSEIGTDMSKWKSSKHFAAWLNVAPNTKVTGGKIISSKMQRKKNHAGQTLRMSGSTLSTAKSPLGDYARKMKGRLGKKGGVVATAHKLARIIYTMLKEKRAYDKDLVAQSHQEWKEKRIKYLEKQLEQLKKAA

SEQ ID NO: 164460 - protein, 354 aa, unidentified
MHYVGVDYHKKSSYVTVMDERGKVVKEGQIANTQEALAALLDGSAEGASAVLEAGRNWPVMYDWLEELVDEVTLAHPAKVRVIAEAKVKTDRIDSRMLAHLLRADLIPAAYVPGAVTREQRRRLRQRMFPVGLSTMVKNRIHTLIDRHPQLSPEAGSWSDLFGKAGRAWLQRLELPPSEAQILRTDLALLGALEQHIKQSNRWVSQLAKGDERAKLLVTLPGIGDFFAVLLAVEIDDVRRFLRAEKLCAYAGLVPSTYASGGYVYHGRITKQGNKWIRWACIEAVYPAIRQDPDLAALYGRLKATKGANVAKVAVAKRLLTIVYRLLTERRPYRPATDQPALRKRNSPAALTAV

SEQ ID NO: 164461 - protein, 353 aa, unidentified
MWIIGCDFHPRYQQVYGVNKKTGEVVERRLSHEGPEAKTFYRELPAGAVVGMEATGAARWFERLMEECGHHLWIGDAARIRASTVRKQKTDTRDARQIYRLLELGEFPRIWVPTPAERDVRQLLLHRHKLVQWRTQLQNQLRALARSEGFLSRQSLWSGHGRQELESLALGPWASERRQDLLRLLDPLEQRIAILSAQIESEASKRPEVLALLEQPGVGLLTGLAFVLTLGPVHRFHRSRSVVSYLGLNPGESSSGERQRLGHISKQGNRMMRWLLVQAAWIAARKDPELARVFKRLAFRRGGKIAVVAVARKLAVKLYWRLRTAASNTVQPPAPMQGSSRKVMVNATGSPSF

SEQ ID NO: 164462 - protein, 441 aa, unidentified
MPGGQSLPTSEFIIGGCAMFKIFRKNCCGLDVHKTWIYACIGITDENGRTNYHQTRFSSFTKGLRELADWLAKFDCVDVCMESASKYWIPVFNILEKTCHVTLAHPKYTKPQPGNKTDRKDAKYICDLFMCDMIKPSFIPPPDIRNLRDLMRYRFKLTNITTGEKNRAQNCLTVSNLKLDDVFSDVFGKSSMSITKFIIDHPGEQFDVTPFVDGRCKKPMEEIQSAVDGSISPEQAAKLREILRHIDELEIHKKSIESEILRLAEPYSHQLDLIHSVPGFSANPMTAIALIAEIGVDMSVFPTAKNLSSWAGCCPRNDSSGGKRKSTRISRAGTYLKPLLVQVANAIVKSDKYPEFKDRYRRLRSRRGHKKAIIAICRMLLTAIWNILSKCEPYDPSGYLANRSIPNGDTFITKAQALNYMRSRGFVICDDPHDSTIEAPA

SEQ ID NO: 164463 - protein, 359 aa, unidentified
MNSIGIDVGKRQCRASIKDQHGRILDELSFSNDSAGIRYLLSKASRYGTARAVVESTGNMWIRIHDTLEENGIDTVLAHPLKTKLIAEAKIKSDKLDSRILADLLRGGLVYESYVPSKEFREKRSLVRHRVALVKARTSIENKVHALLDKYEYKTELTDIFGKAGLEWLKGLELSPIDSVIMDTSLASIENLSIQIGVVSRHVAKYAWNNRDVRLLVSMNGLDIFSAMVIATEIVDIRRFATPWKLVAYAGLAPGQRESAGKTRRGKITKQGSRWLRWIMVQSARRAVIHDDRFRTCYQRIRERRGDAKAITAVAKEMLVVIWHMLTKNETYRGVKEELYKRKLAKLERIALEPEVIDE

SEQ ID NO: 164464 - protein, 343 aa, unidentified
MKITAIGLDLAKSVFQVHGVDNRGHAIVRKQLRRDQVVPYFAKVPPCLVGMEACGGAHHWARRLREFGHTVRLISPQFVKPYVKSNKNDAADAEAICEAVGRPNMRFVPIKTVEQQSVLSVHRVRQGFVKARTAQANQIRGLLAEFGLILPQGISNVARRVPGLVDEAAELPVPMRQLVNRLLEHMKMLDQQAKELEAQIKAWHQGSELSRNLEAIPGIGPLTASALVASIADAKSFKNGRQVAAWIGLVPKQDSTGGKPKLLGMSKRGDTYLRTLLIHGARSAIVSAQRWHKPNAWLERLLSRRHPNVAAVALANKNARTAWALLAHEREFRPDYVPQPPIA

SEQ ID NO: 164465 - protein, 343 aa, unidentified
MSGAYEGRQIVGMDLHRRRSVLVRMSETGEHLETVRISNDPEYLREVMTRAGEAPEVVLEAAYGWYWAADALAELGATVHLAHPLGVKMFGLRRVKNDERDAADLADLLRMGRLPEAWIAPPATRELRGWVRHRAKLVALRSGLRCKIHAVLASAGMQVPMSDLFGVSGRELLTTATLTVESRSRVESLLRIIGALDFEIDLYTKLVASRLRTDPGYHAIQAIPGVGPVLAAAFVAEIGDITRFHRPAELASWAGLTPRHHESDTTVHRARITKQGSRLVRWAAVEAVQRVPARTRLGQRRDRVAERRGHNIGVVAAARDLITLVFYGLRDHHVRCLPTKAAP

SEQ ID NO: 164466 - protein, 341 aa, unidentified
MNKLTKKRHFIGIDISSETLDLALMEEESFGSFKDKKVENSLAGFNKITDWLKKQNKALKECLFCMEHTGTYGLLLFAWLSQMELDFCVEPGMQIKRSLGMTRGKNDKIDARRIAEYACKNKATLKAFTLPSILVVQIKQLLTYREQNVRIRTSLKNSVKSHQQYQRISGLKEISEHINQQIKQQDVLIKEIEKQIVELIKSDPAVRKNFELIRSVKGIGLVIGAFMLVTTNNFTSFENGRKYACYSGIAPFENTSGTSIKGKSRVSYLGNKTMKALLSNGANSASKWDPQMKAYYQRKTEEGKDHKLIMNSISCKLVNRMFAVVNRQTPYTIMYEHNFTG

SEQ ID NO: 164467 - protein, 391 aa, unidentified
MIYIGIDVAKDKHDCFITNSDSEVLFKAFTILNNLDGFNDLYQKIESVMDDVTKVKVGLEATGHYSYNLLGYLIDKGLPTYVINPLHTNLYRKSLSLRQTKTDKVDARTIASMLMSDVNLKSYSDTSYHNEELKSLTRYRFDKVKERAKLKTSVSRLVCILFPELEKLVPTLHMASVYALLSEFPSAKHVATAHLTRLTNLLSESSKGRYGKDTAITFRDSARASIGSNMPAKSLELKHTIKLIQEVDSEIDEIENEIKIIMDEINSPILSIPGINYRMGAMIIAEIGDFNRFDSPDKILAYAGFSPSTYQSGQLDGAYAHMEKRGSRYLRYALYNATKYVCHWDPTFAVYLAKKRAEGKHYNVAISHAVKKLVRVIYHLEKTKQQYIKAA

SEQ ID NO: 164468 - protein, 364 aa, unidentified
MEEPTHIGLDVHKETIAVAVLRAGTVECDERVIPNTPEALRKLLSRYPDRSLLRTCYEAGPTGYDTQRLITSLGIACDVIAPSLIPRRSGVRVKTDRTDARNLARLHRAGELVAVRVPTPAEEALRDLVRAREDLKNDRRIARQRIRSFLLRYGKRYPAPGSRWSFRFEVWMRALRFDEPASQAAFDHLVGAYFVRDSQLGAVDAQITELALLEPLAEPVARLRAFRGIDTLTAVTLLTETCDFRRFATAGSYMAFTGLTPSEHSSGASRHQSSITKSGNAHIRRVLVEAAWAYRYAPAVRGKLRARQIGQPPEVVAYSWAAQCRLHGTYRRLAAKKGPNKAVVAVARELAGFVWGAMTDNMAV

SEQ ID NO: 164469 - protein, 340 aa, unidentified
MTEIKRIAIDMSKSVFTLHGVDDAGRAVLRRNLRRGELLRYFEKLPPVEVALEACGGSHHWGRALAALGHRVRLIPPQYVKPFVKRGKNDRNDAEAIAVAAAQPSIGSVPIKSVEQQAAAMLLSVRELLVRQRTQLVNAVRGHAAEMGAVAPLGEKGLKELQAEIAAADEAAVPAAAKQAIALLSREAERIEIRLRAIEAELLQQHKANPVSRRLAAIPGIGPIGALNLALRVDQTQFASARHFAAWLGLVPRECSTAGRQRLGGISRAGDERLRQLLVLGATAVIQHAKPGRPATSQWLLNLLSHKPRKLAAVALANKMARIVWAMMTSGKTYRPAPAA

SEQ ID NO: 164470 - protein, 435 aa, unidentified
MDEVTDEPLYRDRVCGIDIGKAGMVATIRVPSERDPARRAAETRSFGTTKREVLALADWLRCWQVPAVVMEATGDYWKGPFYRLEAEGLECVLADAKQVKNLPGRPKRDPSDSRWLAACFERGAVTPCFVATEEFRVIRLHTRYRRELTEERTREKQRAEKLLESAAVKLSSVVSDLHGVTGRAVMDQLIAGERDPKALAQLARARARRKIAELEEALDGAEFFTPAHAALLATMLARIDHLNTEIDQLTGVIERLLAPYEEQLQQAESMPGWGRRSAQDAVAETGADMTRFPTGGHLASWAGRTPLDNQSGKRQGRAKSKKGNRYLGGLLGETAVAAGRTQTREGARYRRIARRRGKPKAQVAVGNTQLKVYHTLLSNPGMRYQDLGVDYYERQRGIRRRIAHHVGKLGALGFDVTLCRRPDPQSAGTGETTAA

SEQ ID NO: 164471 - protein, 359 aa, unidentified
MKQTTKYVGLDVHQATTVAVVGDETGRVIARSVVPTEAMALLEFMRGMRGAVHVVLEEGTQAQWLHDLLVGRVARVIVCDRRGEPRRGSKGDWHDAEWLMGRLRTGELRAVYHGSPHLATLRELGRAYRNVIEDATRVMSRLKALFRGRGIRTTGRGVYDPAERAAWLAKLDGAGVRLRAATLYAELEVLQTLRPTAKAALVAEARRDPAWGVLRTIPFLGPVRVALLLATLQTPWRFRTKRQLWTYAGLAVVTHTTSEYALDASGRPVRRRRSPMTRGLNRNHNHVVKEVLKGAATVAAVRAGEFRDFYQALLARGMREELARVTLTRKLAALTLRLWKTGERYDARKLTTSHVVPAR

SEQ ID NO: 164472 - protein, 357 aa, unidentified
MAEGSWVGLDVHARTTLAGVLDAASGELSLQRVQPRSEETIAWLLSLAQPVRVAYEAGPTGYGLARACARAGIACTVAAPSKIPRAPGDRVKTDRRDAERLARLLRLGELVAVRVPDPVGEEARDLVRAREDARGDLMRARHRLSKLLLRHGLVYEGSAWTRAHDTWLRRQRFAGRVLALACDESYGAVAQAKGRRDALDQAIVELAGEPPFVEVVGRLCCLRGVSTLTALALSVELGEWERFRPESLGPFLGLVPSEDSSGERRRQGAITKTGNTHARRLLVEAAWHQRRPLRTSAALERRRQGQPAPVRARADESARRLHQRWHALEGRGKRRTIVAVAVARELAGHCWALATMK

SEQ ID NO: 164473 - protein, 462 aa, unidentified
MKGKSRRRSSQRARREQRILERIHLNAAGIDIGSESHWVAVPEDRDGQPVREFKSFTHELLALADWLETCGVDTVAMESTGVYWIPLYEILEERGIEVLLVNARHVKGVPGRKSDILDCQWIQQLHTFGLLRGSFRPDAPVTALRCLVRHRDQLVEAAASYVQRMQKTMVLMNLQLHNVISDVTGVTGIAILRDIVAGQTDPTVLARHRHPRCKASESEIAASLTGHYRDEHLFVLRQALELYDLYQEKIRSCDEQIEARIRALEATCESPGTLLPKSRRTQGRSSNEPPFEIRSPLFTLCGGVDLSELPGIGPYGALKLVSEIGLDMSRWPSEKHFASWLTVAPRNQISGGKLLSSRTQPSANRAAKILRMAAMSLGRSDHALGAFYRRMGARVGKAKAITATARKLALLVYRMLRYRTPYHELSAADYDRQQRSRILRGLRKRAASLGCELVDTSTGLVM

SEQ ID NO: 164474 - protein, 466 aa, unidentified
MTPHKDYCLDPRPPATPTLPQSPVLADALQVCHPHAAGIDIGEAEHWVAVPPGCDPQPVRRFGTFTVDLDALADWLIDCGVTTVAMESTGVYWIPLFELLEARGVQVLLIDPRQAKRAPGRPKTDRLDCKWLQRLHAYGLLAGAFRPEDQVCVLRSYLRHRQMLLTSAAHHIQHMHKALQQMNLKLTQVVSDLTGVTGMAILKAIIAGERDPVTLAKLRNPHCHHDEDDIAKALQGTWRAEHLFALQQAVALYEFYHQQLALCDQQIKSHLETFADKSEGKPLPPKARRHKKTNEPRFDARTPLYRLAGVDLTTIEGIEENTALIILSEIGTDMYRWPSVKHFCSWLGLCPQHQISGGKILSRRVRPGAHRVTVALRLAARSLHHSHSALGAFFRRMKARLGTPKAITATAHKLARLVYSLLQHGSAYVHQGLEAYEAQYRERKVTTMAKQAKALGYTLVPLPAQG

SEQ ID NO: 164475 - protein, 414 aa, unidentified
MELLHERCAGLDIGKKDLKACVRTPNPSGRRSRRQEIRTFATTTNALLELRDWLVAQKVTLVVLEATGDYWRGAFYLLEDCLNVMLVNAAHVKGLPGRKTDVSDAAWLCQMGECGLLRASFVPPEPIRQLRDLTRYRATLAAERTREASRLEKELEDAGIKLSSVATDILGVSGRAMLTALIEGERDVHVLAEMAKARMRPKIPQLVEALTGNFGEHHAFLCRLHLERIDQLSAAILELSTRIEDQMSPFARQLEHLTTIPGVGQATAEVIIAETGADMTRFRTAGHLASWAGICPGHHESAGKRKSGKTRHGNRWLGGALGTATMAASRTKDTTYLGARYQRLVPRLGKKKAIVAVEHSILTAVWHMLTHDIDYHDLGGDYFTRLDPERAMRRIVRQANALGFTVRFDPIQAA

SEQ ID NO: 164476 - protein, 401 aa, unidentified
MKEFNPEQQGIETASALEIVRTAENVDVHAAYVGLDVHKETIAVAIAEPGRGEPIYRGEIANKPKSVEKLLAKLSESYHGGLLLFCYEAGPCGYVLYRRILASGHDCQVVAPSRIPKEPGERIKNDRRDALKLARLLRGGDLTAVWVPDQEQERMRDLSRARDDMKAQERKARQQLNAFLLRHGYHWPRGKSRWTPAHENWLAGLKMEHPWQQVVLEEYITAERAAGERVTQLSDHLMRALPEWSLAPVVDSLIALRGVDKLAAIVLLAELGDISRFDSPRQLMGFLGLVPSEHSTGTRRRQGGITRTGNAHARRMLVESAWGYRFPARQTKHLKGKARNASPEAKQIAWKAQTRLCGRYRTLTRAGKNTKLVFVAIARELAGFIWDIVRHEMPRLAPQQG

SEQ ID NO: 164477 - protein, 350 aa, unidentified
MRIIGCDYHPGFQQIAFVDSETGECGERRLQHREEAEKFYRDLAAQGMKVRVGMEASGHARWFERLLAELQFELWIGDAAVIRTKRVRKQKTDRQDAQLILQLMMEDRFPQIWVANWENRDLRQLLWHRHRMVQARTRIMNQLQAVALNEGLRCKKRLWRDAGREQLESFPLAPWASRRRRDLLELLDRLTPTIAELSQAIEQEAEKCPAAQRLRTHPGVGSLTALAFVLIIGSAERFQCGKQIASYLGLVPSEESSGDRRRLGHISKQGNALLRFLLVEAAQVTVRSLPEWRSKYFHLAMRRGRKIAKVAMARKLAIQLFWMMRKEWDYEQVRRFGPHAGQPEHRRGVQ

SEQ ID NO: 164478 - protein, 386 aa, unidentified
MNSVGIDVSKGKSMIAVMRPFGEVVVSSFEIHHTDSELCELTKLLSGLSGETRVVMESTGNYHLPVAWLLNDSGFYVSVVNAMLVHDYGNNSLRRAKTDKKDTIKLANYGLDHWLTLPRYVPEEDTRLMLKNCYRQYQQYSKVRTMLKNNLISLLDTAFPGANRLFSSPPRADGSEKWVDFVAAFWHCECVCGLSEKAFISKYQKWCKKCSYNFSEDKALDIYASACGHFSVMPKTDTAKLLVEQAVSQLRATSAALAALKLEMQSLASSLPEYPMVMRMFGVDPALGPQLMAEIGDVRRFHSKKALVAFAGIDALPYQSGQMDIYSRSISKRGSASLRRTLFLLMGVYLQNAPVNEPVYQFMDKKRSEGKPYKVYMMASAFTMPL

SEQ ID NO: 164479 - protein, 315 aa, unidentified
MNNKERVVGIDVSKATLDVALLPSGEVLQFANDANGIEELGKKLKLAAADLVVMEATGGYETAVATALVGSGLRVAVVNPRQIRDFAKATGRLAKNDRLDAQVIAAFGQAIEPEIVRLPDEDARALEALLVRRRQLVAMRVQEVNRLGLMQGAMRKRIKAHIDWLEKEIDKLDIDLTAGLRSSPAWRAKDELLRSFKGVGPITSGTLMVALPELGQLDRRAIAALVGLAPFNRDSGVMRGRRSIYGGRSQVRTLLYMAATTAIRANPVIRAFYERLKSRGKPHKVAMVACMRKMLTILNAMVRQSTPWTPETNPV

SEQ ID NO: 164480 - protein, 346 aa, unidentified
MMIIGCDFHPRLQQICFLLEETGECGQRRLMHTAEAEHYYRSLCGAKVRVGIEATGSYGWFRRLLNELGQELLVGDATQIRASNPRRQKTDKRDAEHILGLLVEDRFPAIWQPPAENEQLRQLLLHRSRLVRLRTRVTNQLDGMAKNEGLLVPGGWSSKRRKGIEALPLPGWYGERRRDLLGLLDRIEERIAPLDKAVSQAAANNAEACLLMTHPGVGPVVSLAYVLTIGNWQRFPRGKQVGSYLGLIPAEESSGEKRRLGHISKQGNTLVRWLLVEAAATAQRYDASWHRQYVQLSMTKHHGVAKVAIAHKLAVRLYWMLRSGEDYQHVRERGSNARQSECPGGR

SEQ ID NO: 164481 - protein, 403 aa, unidentified
MVPDMVEVRPNNLSKEISTMTTEWYGRLPSSAAALVHMSASCCAAARVSVRAPFSQDGGSEMNAVHTVVGVDVAKNVFQAYWVVAETGEIRNMQIKRAKFLEHFAGRPRCLIGMEACGGAHHWARELSKHGHDVVLLPAKAVGAFVAGNKSDAIDARAIWTAAQQGGIKRVAVKSEAQQAVLALHRMRQQLVKVRTAQSNALRGLLMEYGEVFRQGRASLARGIAAALERIEQRLPRVVVESLMELWQRVGQIDGQVKQIERRLKSLLTEDRNAQRVLQIPGVGMLTATAVSATMGQASAFASGREFAAWLGLVPAHTGTGGKTRMLGISKRGDSYVRTLLIHGARSVFSSTKHPGPWLQKISQRRPLNVAVVALANKMARTIWALLAHGRTYQPDHVSRAST

SEQ ID NO: 164482 - protein, 446 aa, unidentified
MIMGKAKIAKAIIDLVRSNAAGIDIASEVHYVSVPDDRDSPSVRKFGSFTEDLHKMAQWLKQCNIDTVAMESTGIYWVQPYLILEEYGFEVYLVNARHIKNVSGRKSDVQDCQWIRQLHSYGLLNRSFQPESLTRELRAYMRHRKHLVESTANQILHMQKAFEQMNIKLHDVISDITGQSGTRMIKAILEGERDANTLAQLADGRIKATQEQIVKSLTGVWREEHLFELKQAFDLYQYLNLKIIECDAQVTNVLTRLIGNNSSNEIKRHKRSHKNSFHFDGTKYLKQILGIDVTRIYGISEITATEIISEVGTDMSKWSTEKHFVSWLNLAPNNRITGGKMLKPKKTNKRNKAGQAFMMAAATLKNSDHWLGAFYRRIRARRGTGIAIKATARKISLIFYKMLKDKIEFDPLSIETYNQYFKERRIKSIEKQAHSLGLKLVPIFVS

SEQ ID NO: 164483 - protein, 428 aa, unidentified
MNCTQNEKLNQVTPHTLIVGVDIAKFKHVARAQDDRGKILGKALVFTNTKEGFEAFFSWLEEMQHKHEKSDVLVGMEPTGHYWLNLAYTLKERLVSFGVVNPLHVKRSKELDDNSPTKNDIKDARVIAQLIKDGRFSYPRLPMDEDAEIKAGITIRNQIVGDLQVLQGRVHNWLDKYFPEFLTVFKDWSGKMALATLEHIPLPGQLNQTIPERVAEIWSTYGGVQRPSLKRIQRLQEAAARSVGLNVGLQMAQREIATNIKRYKMLKEELCALEKELETLVLTLPGIAEMLTVPGVGMVTVIELYSELGDIKNFKNPRQILKYAGLNLRESSSGKHKGQARITKRGRAKLRALLFRTVMPLVRHNRAFKALHQYYTTRQENPLRKKQSLIVLCGKLVRVLHTVGQKQCPFDEERMIQDIPHLSLALKV

SEQ ID NO: 164484 - protein, 407 aa, unidentified
MFKIFRNNCCGLDVHKTWIYACIGITDPNGRTEYKQARFSSFSKGLRELAAWLAKYSCIEVCMESTGKYWIPVFNILEKSCFVTLAHPKYTKPQKGNKTDRKDAKWICNLFMCDMIKPSFIPSPEIRQLRDLVRYRVKLTNMLTGEKNRAQNCLTISNLKLDDVFSDVFGKSARSITNYILEHPGETFDVSPFVDPRCKTPVSEIQAAVDGAISPEQAVKLRQCLAHIDELEAHRKEIESEILQIAEPFSAVLDLLYTLPGLDKNPMTAIAILSEIGPDMSVFPSSKHLVSWAGCCPRNDQSNQKVKSRRISRAGSYLKPLLVQVANALIKSKKHPEFKERYHRIKSRRGHKKAIIAVCKMLLTAIWNMLSKLEPYNPDGFLEHRPVKQEKILTVSQALELLRLANY

SEQ ID NO: 164485 - protein, 461 aa, unidentified
MSTIFLGIDVSKGYGDFAFINESGGILRHCRFDDTEQGHSSLFEVLAELSDEKFVQRFIVGIESSGGLERNWIGFFRKYASTFKIQLNRLNPFAVKRFLDGDLHRGVTDKSSSIGIAQYLRKGLFHAGDFDDEMDGLRTLYRVVRRQIAQSSELRNELQSLLPVVHPELVRYCRFGIRKWTLELLCRYPTVSFLSRIDPSELAGIVFLRAGRAESVVDSARASVASQLDDNTGDTVVFLAGEILRRDKQIKMYKKKICSNLSNDETFRILNSIPGIGIWSAACIRLEIGRIERFHSPEALVAYAGLDPRTRQSGDSMVNCGISRRGRKQIRQILYPVILASLHYNPVISSFYSRLRGSGKKHLVAAVACMNKILHIAYGCMISRQMFDKERYFEVYQRYNEEKMKRRSERRAMVSNLSITAPVSKREAGKRRAAAMPQCGKTAQVRGQAAATVLYNNRGRE

SEQ ID NO: 164486 - protein, 401 aa, unidentified
MVSDFMKGRYNLMKIFVGIDIAKLNHFAAAISSDGEILIEPFKFTNDADGFQLLVSKLESFDKNSIIIGLESTAHYGDNLVRYLVAEFYQVCVLNPIKTCQMRKNNVRKTKTDKVDTFVIAKTLMMQDDLRFITFFDLDMMDLKALGRFRQKTIKQRTRLKIQLTTYVDQVFPEIQYFFKSGLHQHAVYALLKEAPSPKEIASMHMTHLANLLKVNSHGHFTKELAKELRVLAQKSVGANDSAISIQITQTIQQIELLDSQLEKIEAEMTDIMKFNDSVIMTIPGIGYINGGMILGEIGDIHRFSNPNKLLAFAGLDPSVYQSGNFQAKTTRMSKRGSRVLRYALVNAAWNVVRNNATFKAYYDAKRAEGRSHYNALGHCAGKLVRVIWKMLTDEVEFNLE

SEQ ID NO: 164487 - protein, 343 aa, unidentified
MQIRSVGIDLGKTTFHLVALGDGGKVLFKKKFTQKQLITFTANLQVSLIGMEACSGAHFLGRALGAQGHDVRLIPAQFVKPFVKSNKNDFLDAEAIAEAVDRKNMRFVPIKTDDQLDLQALHRVRDRLMARRTSVINQIRAFLLERGVVFAKSPIRLREQMPDVLENADENLTPRMRNLLSLLWDEWKGLEQQLTALNLEVEQIASSEAACRRLQQIPGIGPLIATAMVAAIGNGAAFHKGREFAAWMGLVPSQHSTGGKAKLLGISKRGNHYLRKILIHGARSVVLHCKRDRVSMGPWMTALEARAPRNVLVVAVANKLARIAWAVLSSGNDYRALPVQMAA

SEQ ID NO: 164488 - protein, 413 aa, unidentified
MSLTPASAVARVCAGIDWAKDDHAVCIIDTHGGVLDRFFVDHDAAGLKTLVRRLLRAGVEEVGIERGDGPVVDALFQAEITTLVIAPGQLKNLRSRYGSAGNKDDRFDAYVLADVTRTDRHRLQPLVRDSAATTAIRTTVRARRDLVAHRVAAANQLRAHLQLVFPGAASLFADIDTAISLSFIERFTTQTQADWLSPKRLGTWLSSVGYSGRTDPAVLHARLLAAPRGSTGPDAGAHAATTLAYVTLVRVLNTQIGAQEDSLTTQLTTHPDTHIYAALPRVKTLRTARLLAEIGDARGKFPTPQSLAALAGDAPSTRQSGKTKTVTFRWGCNKQLRDALCDFAAGSRHANPWAADLYNRAIARGHDHPHAVRILARAWAHVIWRCWHDNTAYDPAQHRALQTVLAHTTAQAA

SEQ ID NO: 164489 - protein, 481 aa, unidentified
MSRQKKHPEEPAEEKTKADKSKRVGRRKGMCLEDRPILEPNAAGIDIGAREIFVAVPPDRDEHPVRVFSTFTEDLEKMAKWLVSCGVTTAAMESTGVYWIPPYDVLEQHGVKPCLVDARGMKNVPGRRTDWHECQWIQFLHSVGLLRGAFRPDGEVCAVRSLMRHRSDLVQMTNQHIQHMQKALTQMNVQIHHVISDITGLTGLAIVDAIGDGQRDPLELAKLRDPRIQASEETIIKSLKGNWRPEHLFTLKQSRQMYRHYQEQIAACDEEIEKLLVAFQPRVDPKEKPLPPDRKKKQRGRKKKNANPKTGFDLRTESYKLFGVDLTQIPGLMAMVLTLFSEVGRDMSRWKTAGQFVSWLALCPDNDITGGRVAWRGMRRVHNRAGDLFRMAAYALHHDATPLGDYLRRMKSKLGPAGATTATAHKIAIIFYTMVKKQVEYDATLWAERDAAREKRFEAKIKRQAQQLGYKLVPIEEKPAA

SEQ ID NO: 164490 - protein, 387 aa, unidentified
MHKPHDDGKACLTAFVQDSTLTVVIEMSLRGWLVAGMVPGVNREPRKKIAPNPEVLLQLLYRWRDEAIRAGKEITRIAVAYETGRDGFWLARWLRARGIDAHVIHATSVAVSREHRRAKTDRIDTAMLQRGFLGWLRGERGHCSMAIVPTVAEENGRYPHRERETLVKQRTSTVNGMKSILIQFGVRNFNPVLRKAPEKLGSVRTPEGIPLPSNAVAALRRQMERFRVIKEQIKAIELTRLQRLQRDPAEKFNAMVFLLVRIIGLGIETAEQLVHEILSRNLRDRKAVARYAGLTGSPDESGSKRREKGLSRSGNGRVHKILIQLSWRLLRFQPESDLVRWFKTRTANAQGSRKPMIVALARKLIIALWRYVNTGLVPEGFQLRSAA

SEQ ID NO: 164491 - protein, 423 aa, unidentified
MEVLYPRCAGLDVHKETIVACVRLSVGGKTTRECRTFDTSTSGLLALLAWLTEQGCTHVAMEATGVYWKPVWNILSDGAFELIVANAAHIKNVPGRKTDVNDATWIADLLACGLIRASFIPEPEIQELRALLRARTQLTREQTRHVQRLQKTLEEANIKLDSVITDIMGLSGRRMVEAIIGGEASPARLADLADRRLKASRQELIEALCGRVTDHHRFMLRLHLDQYDRVAGAIATIDAAVDAAIARMDQRETAGQASFRALILLLATIPGVGVLAATVILAEIGTDMSRFPTAGHLLSWAGLCPGQNESAGKRRSSKLRKGAPWLKVILVQCAWAARRKKGSYYKAQYHRLSSKHGPKKAVCAVAASMLTAIYHMLKDGTEHRDLGADHFDRRPTEVKAKRLVGQLAKLGFEVELRPLAQAA

SEQ ID NO: 164492 - protein, 458 aa, unidentified
MARNRSTDKIIRGMALVHPNAAAIDIGATMHMAAVSADRTPEPVRSFGTFTADLHRLVDWFTECGVETVVMESTGVYWIPIFELLDASGFAVFLVNARDAKHVPGRKTDVSDAQWLQRLHSYGLLSASFRPKGRIAELRSYVRQRERLLEYAASHIQHMQKALTEMNLQIHHVVADITGATGMRIIRSILAGERDPAVLAAMRDSRCRADAGTIEKALGGNYRAEHLFALEQALALYDTYQEKASACDARIEAVLKELSIDRDRCTTPLPPPGRRMPNTANALDFDVRAALFELLGKDVTRINGLGPYLTLKLIAECGDDLSNWPSAKHFTSWLCLAPRNKISGGKVLSSRTRRSGNKATSLLRLAAISVGRTNTALGAFYRRLATRIGKAKAVTATARKIAVLFYNALRYGMEYIDPGALAYETRYRERVIDNLQRRAKAFGFALQPLEPTPDNAVS

SEQ ID NO: 164493 - protein, 332 aa, unidentified
MKIVGCDLHARQQSIAMVDTETGEFTEKLLKHEGNAVRDFCASLEGPVVVGIEATGAMQWFLELLEELGIKCRVGHPAKIRAAETRKQKHDRRDAEVILDLLEMKDRFPDIWMPSTEQRDLRTLLRDRHQWVKMRTRLQHTLQAIALNHALREGRALWTAAGQRALRGLALPPYTDQRRDELLSLYTQLDKRIQQLDKQVETEARQRPGARRLLTHPSVGPVTALATEVFLGDPNRFATANPVASYIGMIPCEHSSGKRQRLGKLTKEGNSLLRYLWIEATLHAVVKGGELKRFYRRKLIQKGMGKARVAAARKLGIRLCCRQKRIRGSLRQ

SEQ ID NO: 164494 - protein, 345 aa, unidentified
MPIVGGLDIHRKQITFDYLDTGTGQVQRGQIAPADRVHLRAWLARLAGRDDVAFALEGCAGWRYVAEELAAAGITAHLAEPADTAFARGRKRHAKTDKTGARHLRMLLAEGRLPECWIPPGRILECRALLEACNDLRRERTAWAQQIHAVLFHQGAPALGEGALRTDKGVAGLREAAAVHLSPAGQLQVATALAVIDALEARLHVVRHQLTDAARHLAGAKALAARLYGVGPVTALAITCWLGGAGRFSSSRQAVRFAGLDITVSSSDRKGPPGRLSRQGPPVLRWAVYEAGKAHARTSAPDHRYYAAVKDRKNSKRACLSEARKILRQAHHILAELGDDALAAA

SEQ ID NO: 164495 - protein, 361 aa, unidentified
MDKIYKINGNKPVGQGQPIYVGLDVHKKSWSVSVYSSQGEYKSFSQPPEADKLVNYLKRTFPGSQYYSVYEAGYCGFWIHDQLQQQGVDSMVVNPADVPTKQKEHQHKRDRIDCRKLARNLCHGEMEGIYIPSPAMREDRTLVRTRYAFVKKRTRCKNQIKGMLLFYGLHLTDEQAYAPWSADFIKWIEGIRMERDSGNTALKAHLEELAYLRQLINKVNQEVLKLARSEEYAVPVKVLKSAPGISTLSAMILLTELCDMARFASLDSLCSYVGLIPAIKSSGETEYVRGITPRRNAYLRWILIEAAWVAVRKDPAMMMAFNEYCKRMRKNKAIVKIARKLLNRIRYILKHQTPYVPCVAK

SEQ ID NO: 164496 - protein, 330 aa, unidentified
MYLGIDIHKKYSQVAVVDSDGNLQQESRLPNDRLADLAEQYAGSEAAIEASSNYRPIYETLDEHCDVTLVDPSKNRIIAEATVKTDRVDAKRLALMLRADMLAESYVPPDETRELRDLVRTRKALVEERTAEKNRVQAVLARTDNTYESELFGPNGREFLAELSLSDVNRKIVEAHLSVIDEYNAQIEIFDAEISQRVVESPAAQRLLSIPGVGETTAATVLAEVGEIERFDRDKELVSYAGLDPEVHQSGDTEIRGSISKEGSAPLRWTLVQSALVAVQYDDYLGNFYTRLKKRKNHQIAIVATARKLLVSMFHMLTRKEPYDPPEVNT

SEQ ID NO: 164497 - protein, 353 aa, unidentified
MNNDKYVAMDVHKASVVIGVRDSEGKMIGRAVVQTKAQTLRDYVRGLSGTVHLTFEEGTQAAWLYDLLKPLVAECIVCDPRRNKLLESGNKSDDVDVEKLSELLYLGRLRAVYHGGQGTRALKELAQNYEALVKDNTRVKNRLKAIFRGRGISYEGSELYDYEQRAQWLAHLSERGVKERASQLYEQLAQLEEWVARARLQMLRESRKQKAKKILEQIPTLGEISVAQLIATVDTPFRFRSKRQFWTYSGLAVVRHTSADYQFTEGELRRRAKPGPTRGLNRNYNRRLKRIFKSAALAGSSKGPFKPYYERLLARGLNPELAQVTLARKIAAVTLTLWKKGASFDQEKLVKPE

SEQ ID NO: 164498 - protein, 317 aa, unidentified
MMIIGCDFHPNWQQIAWLDTETGETGERKLVHADGDAEQFYRGLPAPVLIGMEATGNSHWLVDLLNELGHELWVGDAAQIRASYVRQQKTDKRDAAHILKLLLEGRFPRVWMPSSEVRDLRQLLLHRCKLVILRARVKNELQHLCLNKGVQRQRKLWTKAGQQVLRELRLKPWASRRRDDLLGLMAMLDRQIEPLDEAVKAEAQRDQMALLLQTQPGVGPITALAYVLTMGDVSRFPRGKQVASYLGLIPREHSSGGRQHLGAISKQGNRMLRMLLVEAAQTAFAPARRRRRDVRIEESWPMSGPNRCLVERCSAGK

SEQ ID NO: 164499 - protein, 407 aa, unidentified
MEIVHAKCAGLDVHQKTVVACARIAAKGRVTHEVRTFGTTTRDLLALAEWLTAHGCTHVAMESTGIYWTPVWHVLEASFTLVLANPRHIRNVPGRKTDVNDATWIADLLAHGLIRGSFVPPEPIQDLRDLTRTRKQLMREIARHSLRIQKTLDRANVKLNTVLTDILGASGRAILHALIAGERDPERLAALASGRLKASRVDLVTALHGRVTPHHCFMLQLHLTQIETLEAAVRDLEARLGDALAPFRAAVDRLITIHGIAQTAARVLIAEIGADMSRFPSSAHLLSWAGLCPRLHESAGKRLSTRTLPGNPWLKTTLVQAAWAAVHKKDTYLHAQFLRLKSRRGPKKAIVAVAASILTAAYHILKHGVDYHDLGGDFFDRRDKAKLAKRLIARLHDLGLTVEVRAA

SEQ ID NO: 164500 - protein, 310 aa, unidentified
MIMSWVGIDVSKDRLDVHVAPVGEAWAVGRDDSGLAELVERLSGLEVICIGIEATGGYETIVAAALGAASLPVAVINPARIRHFAQAIGRRAQTDPIDAAVIARFVETLQPPVRALADEATLMLADLVARRRQIIAMIVAERQRLARASAQRLRKSIERLLAALQKELSDLDLAIGDAVKDSPLWHEHEQLLSSIPGIGPATARTLITELPELGQLDRHRIAALVGLAPWTRQSGQWRGKAMIGGGRASVRAALYMATFVASRFNPTLKVLYQRLLDTGKAKKLALIAVARKLLNIANAIVRSKTPWQNA

SEQ ID NO: 164501 - protein, 364 aa, unidentified
MEKVTTHVGLDVHSERIVVATLVGQSREPVIQDIPNDPKVIRRTFRRLAAEAYELRCCYEAGPCGFELFRQLTEMGIACEVIAPSLIPVKAGDRVKTDRRDASKLARLYRAGELTTITVPTSDQEAARDLVRAREDVRKDLTAARHRLGKFLIRHGRVFSDGHNWTDRFWRWLDKQRFERAGERLTFEHYAREVQHLQQLRAELDAEIERMAKTEPYAANVAKLACLRGISTLSAMALLVEIHDFRRFESPRQLMAFVGLVPSEYSSGGHETRGKITKTGNGHARRILVEAAWGYRHRPSFGPRVRQVLSGQPAKVAEYAAKAQHRLHRRYARLVSKGKKSQLAATAVARELCGFVWGLMTMAA

SEQ ID NO: 164502 - protein, 406 aa, unidentified
MQGPVITVDVSKGSCHYQPYVSNGHPMRKPKVLHDTVEGFQSLSDLIDTMKDRYECETIPVIFEATGVYHRCLQKYLDDHQIPYYIISPLMSASYRKTTPNSNKTDDLDCSHIAKAYYGECNLFPYDKPSKSFHNLRELNRYYECELNHLRMRKNTFRKYLDIVYPRLDKCFKGHSSLYDEIPMEVIKQYPHPSLLLKHKEETIVKKIEKKTSHNASFIQNIVHEMYECSMHCYSGADVTDVESMILPELVDDLQSQEERCDEILKQLVSEAQKTPYFTSIVSIVGIGDNLAARIIAELGDMSRFSCRRAITAYAGLNPKIRQSGDMDGIHLAISKKGNKHLRCLMYLAVSCNYRLKKGDVLYEFNQKKRQQSFSPLKPKAATIATAHKLLLIIYALCTNGTVYHS

SEQ ID NO: 164503 - protein, 354 aa, unidentified
MNIGVDTHKKTHVLVAVGAQGQTLGTRTVANSPAGWAAALQWAREQQQQQVRWGVENTGSLGKGFAQFLLAQGEADVREVVPHRTAQYRRRGRTQDKTDTADALAMARLLGAEGAGLPLVHADDASTELRLLSDHRDNLVADRTRLVNQLHAQMLQLDPQYQERSGPLTRAAGVRYCEQFDPPHADALVCTRLLIVRQLATRIAALTTAIAELTALMGRRVLALGTPLLQLRGVGPVIAARLLGELGCILRVHSAAALAALAGIAPVAVASGSRHGHRVNFGGNRQLNRAIHVIALTQRRCEPLAQAYYAKKRAEGKTARAAMRCLKRRLVDVLYRLWYDRPVESPQPVAAIAA

SEQ ID NO: 164504 - protein, 403 aa, unidentified
MNSVGIDISKGRSMIAVMRPFGEVVISPFEVRHTDSELSELARQLKSLDGETRVVMEATGNYHAPVAKLLHDAGLYVSVVNAKLVHGYGNNDLRRVKTDKKDSVKLANYGLDRWLTLPRYIPEEDTRLLLKNCYRQYRQYSKVQTVLKNNLISLLDTVFPNANRLFSSPIRGDGSEKWVDFVAEFWHCRCVSEKSEKAFTNKYQHWCRKHGYNFSEAKAHTIHAEASGCIGVMPKSETTKLLVEQAVAQLRATSVALTALKREMQSLSSMLPEYPVVMDMFGVGPTLGPQLIAEIGDVRRFYSKKALVAYAGLDAPPNDSGDVTGRHKSMSKIGASSLRRTLFLVMSVYLRNAPLDEPVYQFMDRKRAEGKPYRVYMMASANKFLRIYYATVKAYLESLEHTA

SEQ ID NO: 164505 - protein, 345 aa, unidentified
MEQIIRIGMDTSKNVFQLQGVNAVEQPILRKTFSRKEMVKFFEKTAPTTIALEACGGSHHWARLLSCLGHEVKLIAPQLTKPYVKRGKNDAADAEALCEAMSRPTMRFVPVKTADQQAALMLAGMRERLIRNRTQLANAIRGFGMEFGIVAASGMCRIEPLLERIAGDQSLPDLARELFAVHGDEYRGLLSEIKRIEEKLMDLHRADECSRRLAEIPGVGPVGASLLMMKTPDPRMFKCGRDWIGLTPKDHSTAGKVRLGGVTRAGDEMLRSVLVVGATAVLQHVRAGRSRHASRWLTELLQRKKPKLVAVALANKIARIAWKTYGGERRNVSANGRTAEGSIGD

SEQ ID NO: 164506 - protein, 368 aa, unidentified
MKEVTTYVGIDAHKKDLFIAMLTGHATSPVTWQLHNEPNAVRRLVRKLEREAPGPVRVCYEAGPCGYALQRQMTTPRVACQVIAPALIPRKPGERIKTNRRDARKLAELHRAGLLTEVRPPTPEDEAVRDLCRARDDAREDLQRARHRLGKLLLRRGLHFSGRNWTKAHRQWIDRLDWTHAPERVVVDDYLLAIDHLEARLIELDARLTQVAETAPYREPVSWLRCFRGIDTLTAILILAELHDFRRFQSPRALMAYLGLVPGEDSSGEKHRRGRITRTGNTLVRRLLVETAWHYQHRAHVGVTLAKRRKGQPTRVIAIADKAQQRLCRRFRRLAEQHKPAPKIAVAIARELAGFLWAALQPAPVAVQ

SEQ ID NO: 164507 - protein, 346 aa, unidentified
MMIIGCDFHPSWQQVSWVDTETGETGVRKLVHASGDAKLFYERLARPARIGMEATGNSQWFIELVEDLGHEVWIGDAAQIRASYVRKQKTDKRDADHILKLMMENRFPRLWTPDREQRDLRQLVLHRHNLVEMRSRVKNELQHLSLNKGMQRKHKLWSQAGQKLLRELPLKPWAACRREDLLGLLATMEEQIGRLDAAVQRAAEQHPQACLLMTQPGVGPNTALAYVLTIGDVSRFARSKQVASYLGLIPREESSGGRQKLGAITKQGNRMLRSLLVEAAQIAVRFDPGMRKQYLHRCHQKPKGVAKVAAARKLAVRLYWMLRTNVAYPEIVRIESGPRVPLVGAR

SEQ ID NO: 164508 - protein, 344 aa, unidentified
MTTIDYIGFDIHKKTISFCAKAQDGRILDEGTIAAQRGDLKAWAKERPRPWVGAMEATLFTGWIYDYLKPLAQELKVAHPPMLKAIAASKKKNDQVDARKIADLLRCDLLPECYMAPSPVRAMRRVLRYRNLVVRQATRMKNRIAGLLMETGTPYAKQRLHGKAYFGELLGSLRQMPDAVVELLKLSRGQLELFESIQRRLLRELRERPELSQRVERLQSIPSVGEILSLTWALEIGEVSRFSSIGEACSYCGLTSAERNSAGVEQRGPISKQRNKHLQTILIEAAKLAPRFNPQLAAVHERELQRGNRNRATLAVARKLVAYLMAVDKSGKPFQLRASEGRQA

SEQ ID NO: 164509 - protein, 478 aa, unidentified
MASKQKQRPDLVPAPMLLHESLYVGIDVGKARHVAGFVSTTLLERHQRFEACPALVVENSREGFRSLIDRMCSYVPLEQVFVLLEHTGHYHRALVEYLQEHDISVYVMPVQKRPAGMLKTDKRDALSLANHLFNQLEKGIQLSDKTHLVRRMLPPTEAARQLKGWMRHRYELIRESTQRKNKLISICDELFPEMTQVLKDPTLPTALAIREKFPTPAAIATATLSALAELRIKHSYPSNAQLMQLQQLAAQSIGTKDLVRQRGLVLEQAQLIRELRLLQEHIQQLDREISQLVERSREGQILTSIPGIGIIQAAAIMAAIGTILNFERASELKSYCGWAPVSEISGTTLDRVQLTHGGTRTMKQMLFLCVAHAIQLDCEWAKLYERLVPKKCMYDERKRAYRGKLKVIGRIAGQLIEMVYALLKQDAEILSQIPQGQEPPPPILYDPEIHQRHRNGEYRPIKHVPRHRKVIRLPERLS

SEQ ID NO: 164510 - protein, 313 aa, unidentified
MSELYVGVDVSKEYLDVALSDGTNFRVGNDVAGQQELVTRFGAAPPALVLMEATGGLERALAVQLSAAGVALRIVNARHVRHFAKATGLLAKTDRLDAQALVRFAQTLKPEPRAIQPEQTLALQALIVRRRQLVEMLTMERNRLRTAHRGVRKDLQSSIRWLEKRLAGVDEDIDGALRACGVWREKVELLESVPGIARVISVSLLASLPELGQLNRHQISALAGVAPFNRDSGRWQGRRSIYGGRPLVRSALYMAALVGARHNPVLRTFYQRLRAAGKPAKVALTACMRKLLVILNTMLKNGQRWDNHVPLQA

SEQ ID NO: 164511 - protein, 345 aa, unidentified
MTIVEAARAITGGVDTHLDVHVAAALDPVGGVLGVESFPTTPKGYRSLVSWLGSFGTITKVGVEGTGTYGAGLTRFMRRGGIEVIEVTRPNREERRRQGKSDPVDAIEAARAALSGRAKATAKGRDGEVEAIRVLLVAKRSARVARIRALVQIRNLTLTGPDRLRTRLRDLSSDTLAGNAARLRPRRGDPVEFATSVALSTLGRRVLALEEEVARLDELLEQLVVSVAPELLKVYGVGVDSAAVLLTTAGDNPERLRSEAAFARLCGVAPLPASSGKTNRHRLSRGGDRQANQALWRIVMTRMALEPRTREYVERRTKGGLSKREVIRVLKRYVAREVYRYLPRP

SEQ ID NO: 164512 - protein, 338 aa, unidentified
MQNHVGIDLHSTNSYIGIVDQDGTRIFNKRVPNDLGTIIATLKPFKEKIKNIAVESTFNWYWLVDGLMDEGYNLHLANVCAMKQYEGIKHTDDQTDAFWLAEMLRLKILPTGHIYPKEQRPIRDLLRRRLQLVHHRTSLLMSMTSMIQNCTSVNLSRYEKKNLTHHEITGLLDSPYQVMSANSINNVVLEINENIDKIEKAINMKVKLTQRYKKLNSVWGIGEILATTIMLETGDIRRFKDVGNYASYCRCVPTIKLSNGKTKGRGNKKCGNQYLAWAYLEAAYCMQRAYPDAKKWFQRKLNKKGRFVAIKALASKIARACYLIMKNNIEFEPSKLFA

SEQ ID NO: 164513 - protein, 416 aa, unidentified
MEVIHPRCAGLDVHKKTVVACAITPSPQGGWHKETQTFTTMTGELLKLSDWLLARECTHVAMESTGEYWKPVFNILEASFEVMLVNAQHIKAVPGRKTDVKDSQWIAELLQHGLLRPSFIPPIAQRDLRDLTRHRTNFVRERVNLVNRIQKVLEGANIKLAAVVSDVMGVSGRAILEAIVLGQTNPAVMAELAKGRLRSKREELIQALEGRVRPHQRFILAELLCQLDSLDETIARFDEEIQRYCDPFEPIVELLDTIPGVGRTTAEMIVSEIGVDMSRFPSASHLAAWAGLAPGNYESAGKRLSGKTRKGNQTLRSGLMQSAHVASRSRTYLAAQYRRIATRRGKKRATMAVAHSILVIAYHIIQRHEPYRELGVNYFDQQRPETMTKRLVKRLEQLGHRVTLESQPTTQVVSCG

SEQ ID NO: 164514 - protein, 412 aa, unidentified
MKVVHEICCGIDVHAKMLVACLLLANGEKEIRSFSTMTEDLLRLRDWLVSSHCTHVAIESTGVYWKPVFNILEDALEVILINPEHARALRGHKTDVKDAEWLADLLRHGLLRASFIPPPEIRELRELTRYRESVVREQSSVANRIQKVIESGNIKLGQVASDALGASGRQMLWALARGETDAVKLAALAQRRLKEKIPQLQRALQGRLTTNQRFVLRELLRRWEELEAADQRVTKEVDRYLQDRPKLARGREILDSVVGVGPRAAEVIMAEIGVVMKPTFLSDAHLASWAGICPGNKASGGKRLSGRTRKGNTYLRSALVQAAWGATMKKNCYLSSQYLRLVKRLGRKKALVAVAHSLLVIIYHVLDRDQTYTELGGDYFDRHHVEQQRDYFIRRLQMLGLKVNVEALAAAA

SEQ ID NO: 164515 - protein, 354 aa, unidentified
MTSTKYIGMDVHKESISIAVMNAAGKIVMECVIETKANMIVQCIDGLRGDLHVTFEEGTSAAWLYDLLKPHVTKLIVCDPRKNASMREDSQNDKIDARRLAELLRVDHLSPVYHGEHGLRTLKELVRSYLTVTKDLVRVKTRVKAIYRSWAIPCNGKEVYAACHRAEWLEKIKELGVRRRAEFYYQQLDALRVLRQGVRRELLAESKKQRAWKQLCQIPAIGPIRAAVLLGILQTPHRFRTKRPLWKYSGLAIETCSSADHRSIHGQLQRSKKNSVRGLNQNCNHDLKNLFKGAAIVASSKPGPFQEFYAALLAKGLRPEMARLTLARKIATIVLIVWKKGVCFDAQHLKPQTA

SEQ ID NO: 164516 - protein, 402 aa, unidentified
MNCVGIDVSKGKSTIAVMRPFGEVVVSPFEVCHTASELSELARLLKSLDGETRVVMESTGNYHAPVAWLLHGAGLYVSVVNAMLVHDYGNNSLRRGKTDKKDAVKLANYGLDHWLTLPRYVPEENARLMLKTCYRQYQQYSKVQTMLKNNLISLLDTAFPDANRLFTSPPRADGSEKWVDFVAAFWHCECVCGLSKKAFTTKYQKWCRKHGYNFSEDKALDIYVSACGRFGVMPKTKTAKLLVEQAISQLQATSAALAALKQEMQSLAASLPEYPVVMGMFGVGPTLGPQLIAEIGDVRRFHSKKALVAFAGIDAPPYQSGQIDVRSRSISKRGSASLRRTLFLVMGILLQCAPMDEPVYQFMNKKRSEGKPYRVYMMASANKFLRIYYASVKAYLDSLEHN

SEQ ID NO: 164517 - protein, 504 aa, unidentified
MTFPPWEPAFWLAIPLRKSVNPFGGDLCFGWLGSLRLYLYKPLGCVSTLWNWMPAGKDITMHYQKVLKMPESIPYLSVGFDVGADFTWMSIMLPNGILIGKPFKIIHSDPQSRELAISKIKEAQEMYSLESRCFLESTGIYHIPLLCFLRDKGFDCAVINPIITKNSTNMNVRKLHNDKFDSKKAAKVGLDASLKASIVPDDAIIDLRNLVRDYYYFKDLQSAIVLKLHAELKVSFPAYLNVFSKVTTQTSLKLLEAYPLAADMLAAPKDELVETIRSTARFGETYALARYDAICTAAKDAAVFGRALPSNALRIRLYIKMYREYQAHLDSILEELHQAVGKLEGTPDYDRISFIQTLHGVGFLSAVVLIAEMGSFDLFSSPKKLYAYFGLDPGVNDSGKFHGDRVHMSKRGSSLARRILHMVAINNLKVDKATKTPVNPVIYDYYTRKCASKKKSVAVGAVMHKICNIIFAMLRDNKPFELITPEEHRERYAAEHPESVNTAA

SEQ ID NO: 164518 - protein, 312 aa, unidentified
MAPLYLGLDVAKATVELGSEPAGLGGQFATDPSGLAALVTQCRAQPVALVVLEATGGYEAPVAAALATAGLPVAVVNPRQVRDFARALGRLAKTDRVDAQVLALFGARLQPTPRPLPDEATQELEAVLLRRRQLLEMLHAERQRLPRARGREVRRNLRAHIRWLEHSLIDTDATLEGLIQASPLWRVQDQLLQSVPGVGPTLARTLLAELPELGQLDRHQIAALVGLAPLAHDSGTHRGRRHCWGGRPALRTVLYMAALVAARWNPVLRPFYQRLRAGGKPAKVALVAVARKLLTILNAMMRDQRPWQSAYA

SEQ ID NO: 164519 - protein, 339 aa, unidentified
MSEAGYVGIDLHRRRSVIVQMDAAGEVLSTTRILNDKESLARALEPAGPDAKVVMEATYGWYWAADVVKASGAELHLAHPLGIKGFNYRRVKNDVRDAMDLADLLRMNRLPEAWVATPEFRELRELVRHRYKLVSGRTSRKNGIHAVLGKQGAELGIGDIFCIEGRRRLENILLDPAFRMRVDAQLRLVDVFDEEVDAVDAELRQRLKGHQGYHAIQAIPGVGPVLAATMVAEIGDVSRFPTSRHLCSWAGLTPKVRDSDTTSKKGRITKQGSRVLRWACIEAACRTHPNHLRAWSDQITERKGNRLIARTAVARKILTLAFYGLRDGEIRCLARAEAT

SEQ ID NO: 164520 - protein, 350 aa, unidentified
MTMVGGLDVHRHQITFDYVDDDGLVHWGQIRPATRHTLRVWLGEHCPQRDAEFALEGCTGWRYVSDELAAAGVGVHLGDPAEIAALRGPKKRAKTDRADARLLRTLLLEGRFPESWIPPAHMLEIRTLGRLYCTLMDQRRAWQQRIHAQLFHQGCPPIRALLSAAGREALAGAELSAVGRQYVDAALWRIDELSAEIEPLRTQIVNFARRQAGCRALQTHYGIGWLCAAIIWAEIGDARRFTSSDQLVRYAGMDVTVYSSDNKRAPGHLSRQGSPELRWAAFEAAKCAARRGSPDYAYYRRLAAKHERHNGKNPTLAVERKILRRCYHTLRELGAPALALPDTSSQQAAA

SEQ ID NO: 164521 - protein, 405 aa, unidentified
MDGATPTRLAGLDWASRLHVVCVLDPDGQVRARFQVPHTGKDLRGLTRRLAKLDVGRVAIERPDGPVVQALLEAGLEVVVLPSRQVKHLRARYGSAGNKDDRFDAYVLADVLRTDGHRLHPLRPDSPETAGLRAVSRARKQLVDHRVALANELRANLEVAFPAAVSLFAEVDSPIALRFLGRFPSAERAAWLTQARLGGFLRRVGYCGRVPTAELYQRLLDAPEGLTGIHGEACAAVTASLVATLLTVRAQIDELDGEIVERLGTHADGHIFTSLPRSGRVRAAALLAELGDCRQRFPDSPSLECLAGAAPSTRQSGKHKTVTFRFACDKKLRQAVMDFAGDSRQANPWAAHIYNQARARGHRHPHAVRILARAWLRVIWRCWQDGVAYDPTRHGAYQRLIAQGG

SEQ ID NO: 164522 - protein, 384 aa, unidentified
MGGIILDVLMTRCAGLDVHAETIVACVMIGEQDDELFIETETFPTLTKDLFRLLKWLENHGITHIAMESTGIYWKPVYNILEDYFDITLANAQRIKNVPGRKTDVSDAEWIAKLLRYGLIEKSFVPPEDIRNLRDLTRLRKKWIGHLTSEKNRILKVLECSNVKLNSVISDVFGVSGRKLLSKLIQNGYVDSIDVENSIHGRMKHKKQMITDSLFGTLNDHQVFLIKQSWQHIVYLESLISEIEERIDEILKNYKEEVELLLTIPGIKKDSAAIIIAEIGVNMEQFPTSQHLASWAGVAPGNHESAGKRKSTKTTKGNPHIKTVLCEVAWAISRSRNRWLAAKYWSIAARRGKKKALVAISHRMLRIIYSMLINKEPYKEPLIN

SEQ ID NO: 164523 - protein, 397 aa, unidentified
MSAVVGIDVGAYKHAAAVCRSGERDAERSVLRISADRVGFDELERWLERQGPVERVVLESSGHYYWPLASHLHRRGYQVAVVNPLRAKYFAKSRLQRSKSDPADARTLAALGMSEEPRVKDPLMGAEAKEAARFWGGLVKEQGQVRQKLLRLVEIGFPELKECFEDPLCETALAVLREAPTARAAARRRVATLADTKKPGGRRRLGETKARRLHDLAKQTIAPPELDAQMGFEVGMQIQQFDLLDKQIEIAEQRVAEVLDSELARRLQTIPGVGPALAATFIAEIGDIWRFDDFDQLASYAGVHPKEQSSGNKGLKTETSWRMAKTGNSYLRAAAYKMAVVGTVHNPVIRAHYLRKRAEGKSAMNALGHCMSKALSIVWGVWRSGLDFDPTLGRPRT

SEQ ID NO: 164524 - protein, 352 aa, unidentified
MVVAGVDCHKDTHTIVFLNELGQVEQRLSIPATGRGYAKALEASRQYGEVRWGLEGTGSYGALFAQQLIASGATVYEVPGSFTKRHRQHGSRRGKSDPIDAAAIAEAVLREADRLPLFGAAVEQQALRLRYDRRDRLVAERTRAINRLRSAALRLGLEDVPDTLKAPEIEQLHHRAKRLAGANPAIDALVDEIAEAREDIERCTMRVRRIEQLLRPFVTRIAPELLALKGISTVGAAGLIGHAGNLRNCRNASAFAMRSGTAPIPCSSGRREALRVNCGGDRQLNRILHVMALTQVRYADHAGRIYYDRKRKEGKTHAAAFRSLKRQLATVVFYRLQPCHQRLWSADSRTAA

SEQ ID NO: 164525 - protein, 402 aa, unidentified
MNAVGIDVSKGKSMVAIMRPFGEIVSTPFEIKHTTSDIHSLVELINSVEGESRIVMEHTGRYYEVLAHQLSEANLFVSTINPKLIKDFDNDSLRKVKSDKADAVKIARYALDKWQNLKQYSVMDELRNQLKTMNRQFGFYMKHKTAMKNNLISILDQTYPGVNTYFDSPARSDGSQKWVDFASTYWHVDCVRKISLNAFIDHYQNWCKRKKYNFSQSKAEEIYGKAKELVPVLPKDAITKLIIKQAIDQLISVSTTVESLRTLMNETASKLPEYPVVMAMKGVGTSLGPQLMAEIGDVSRFTHKGAITAFAGVDPGVNESGSYEQKSVPTSKRGSSDLRKTLFQVMDVLIKTHPQDDPVYQFLDKKRAQKKPYYVYMTAGANKFLRIYYGRVKEYLASLPES

SEQ ID NO: 164526 - protein, 343 aa, unidentified
MEHFAGLDVSVKETSVCIVDGTGVIAREVKVASEPAALLQVLMNTGYHIKRIGLEAGPLSQWLFSALADAGLPVICVETRHMRAVLKAQINKTDRNDARGVAQMMRVGLYRPVHVKTLRSQKLRMLLTHRKLLQSKAIAIDNDLRATLRNFGLKVGTVGAVKFEARIKELVGDAPDLAVLVEPLLIVRRVLREQVGILHRRLLAIVQDDDVCRRLMTVPGVGAVVALTYRATVDVPARFRSSKAVGAVFGLTPSKYQSGEVDRTGAISRCGDEMMRMMLYEAAQTVLVRSTKWSWLKAWAMKIARHRGMKKAIVALARRLAVIMHRIWVDGTEFRWTRDIAAA

SEQ ID NO: 164527 - protein, 391 aa, unidentified
MNPRALGWDIHRKFSKVSLMEMDAEGEIHAVERARLDHADKEAMQAWLSRLDREIPVALEATFGWPWVADLLEALGHAVHLGHPPVIRALAKHEAKTDRCDGDRLGKFLLRGILPESYLAPPEVRQRRERTRYRMALVALRTGIKNRIQAILHRLGILHTFSDLFGKAGRDFLERLSLPEGSAQALRGYLDVLDVLSLSIAEVEQWMTENLEVDEMVRLLMTIPGIGLILAHVIRSEIGQIERFPTARHLASYDGLAAMSHDTAGREGPRHCSPACNHVLRWALIEAVHGVQKTKGRHGLRLRKLYARLAAGGKKGAKSSAKVATAHELSRLVHVVWTKRVPYTDTPPSRPGSRAGRRTIQESPPGKTTLRSDQPRHPMVRRRNTVGQTLL

SEQ ID NO: 164528 - protein, 311 aa, unidentified
MNETFVGIDVSKDSLEVALRPSNTVQSFTNDDEGIAQLIESLRPQQPALIVLEATGKYERPVARALAVEGLLFNIINPRQGRAFARATGVLAKTDRIDALLLARFAEVLQPEARSLKDEQTEALSDLVIRRRQIVEMITAEKNRLALATKRVRRDIQVHIRWMEKRLEDINDDIDELIRQSPLRREKDQLLQSVTGVGPVLASTILASLPELGTLNRKQIAALVGVAPFNRESGRYKGKQKIQGGRASVRNVLYMGTVAGIRSNPVLRSFYERLVAKGKPKKLALTACMRKLLVILNTMLKNGTCWQNQPA

SEQ ID NO: 164529 - protein, 321 aa, unidentified
MQANHTVVYAGVDVAKATLQLHLQGQQSEFTNTPKGLDQLVAQLQTVANVHVVCEATGGYERAMVKALHQGQIPVSVINPARVRAAAQAQGQRAKSDRIDARGLTTYGQLYQPKPTPPVSSTQEQLADLAQWLKQLIHGQALAKTQAEHHQDAFVLRQHAELLAHLEAQIEAVEKQIEALIEKDAALQQRVACLDKIQGVGPRTAWMVLAHMPELGQLNRQEAAALAGLAPWTRESGTMKGMRCIGGGRPEVRLALYMAALSAARCNPVLCVLYKRLRAKGKLPKVALTAVMRRLLTYMNYCIKALPAETADARTEQLKAA

SEQ ID NO: 164530 - protein, 399 aa, unidentified
MPSMRSNGDRIKRFRDLKATLRTQRDRLLVGIDVAKAVDVAQIRLAHTRILDKTVPIPNTTAGFGTFWRRLARHQRATGVTEIVVALEPTGTYHQALAQFLDAQGADVVLVDNHIAALHRRLLDRTWDKSDPKDAHNLCDLLEQGRVLFCALPDEPVASLRRLVRLLRRARVELGACKARWQNTLRPALGPAGEPLPAPVITALPAPLRAFLPTAERHAAPGRPRALSPGVAAEMADLATRCTAVRGRIATLEAALVATTTPLPATAWLRSIPGLGPTLTAIVLAELGDIAWFTKFSQLRKLAGLDIIRVQSGQWAGTARISRCGRPLLRWALYQAALGACRTPVWRVKRATLLAKRQGDPHAFFKTTVELAAKLLRVIWGVWRSGRPYTAGRAGAPVA

SEQ ID NO: 164531 - protein, 349 aa, unidentified
MALTIVEETRPITGGVDTHADTHVAAALDPVGGLLGVGEFPATAAGYARLLGWLGGFGTVCLVGIEGTGSYGAGLARHITAAGIRVVEVDRSDRQDRRRQGKSDPLDAVSAARAAQSGRARGAPKGRDGAVEAIRALMVARRSAAGERTRTINQARALVLTGPDDLRALFGRHTPAALITGLVSLRPRTGDVAGHATRVALRELGRRAQFLDGQLERLDELIVPLVTAHAPGLLALYGVGPRTAALLLIAAGDHPGRLRSEAAWAHLCGAAPIPASSGKVTRHRLNPGGDRQANHALWRIVFTRLGSDAATRAYAERRTAEGKSKAEIIRCLKRYVAREVYPHLRPAAG

SEQ ID NO: 164532 - protein, 369 aa, unidentified
MDTFNVCILEVSQERSRVKASHKFKNETKGFKEFDAWVKKHKKPDVQTGFYMEATGVYYENLAWYLFEQEYSVYVLLPYKTKHYLKSIGIKSKNDKIDAQGLAQMGAEQKHNPWRPHSKSIYILRALTRQHESVTKLKTSLQNQLHSNEHSAVRNATVKKQLNATLRLLEKQLTELSGEISNIIDADEKLNEKYGHIDQLRGISKLSWATIIAETSGFETFENQRQLVSYAGYDVVENQSGNHVGKTKISKKGNSRIRRILYMPALVSVRIKEPVLYNLYQRVTERTGIKMKGYVAVQKKLLVLIYHIWKNDKAFRSDYSKIFGEEESKDLFPFGFGETIKESSPDKRATQDEHSYELSSKVLFPLAQI

SEQ ID NO: 164533 - protein, 325 aa, unidentified
MMYLGIDLSKAYFDVTLRNEQGEKTTAHFDNTPAGFVGLEKWLKGQGGREVHVCMEATNVYWEPVAHFLHAKGMTVSVVNPARIKGFAMSQLRRNKTDKQDSDVIVDFCQAMHPKAWTPPSAAVSKLRSLVRLRATLVKTLTQHKNRLTDAQDDEVKACWQRLIDTLEAEIAQVESQIEHHITQHPALQATATLIRSVKGLGKIATWTILAEMPDLAEYEDAHAAAADAGVNPAHHESGDTVRHKPKLSKVGKAAIRGVLYLPAITAIQHNPIVRALAERLAQRGKPKKVIIVAAMRKLLHLAYGVVKNKIPFDPLYPASPLPAT

SEQ ID NO: 164534 - protein, 369 aa, unidentified
MSKARSAVGVDGPTASCANVELFKSNERAARMKFKRIAIDTSKHVFTIHGVDEQERPVLRRELKRDQLEAFFRKLPGTEVVLEACGGSHHWARVIQGMGHRVRLIPPQYVKPFLKRSKNDDKDAEAINEAAARPSMRSVAVKTVDQQAKGIIVKHREMLVGQRTQAINALRGHATEFGVVAAKGTAKVAPLLAVLASDKAIPAAARAMFAQMGAHIEALESRIAGLDAELLAMHKAHPVSRLLAEIPGVGPMIATTMALTVEPQNFASGRHFAAWLGLTPREHSTGGKQRLGKISKAGNERLRTLLVVGAMSVIRFAKPGSKSASPWLLQLLERKPRKLAAVALANKMARIIWAMMARGEAYRRQPVTA

SEQ ID NO: 164535 - protein, 322 aa, unidentified
MNNEFVGIDVSKATLDAAHLPTGNTWRESNDDAGVERLVARCKALAPELVVLEATGGYEVVVATALATAGIAVAVVNPRQVRDFAKAMNKLAKTDQIDAGVLALFAERVRPEPRPVADEQQRRMEALMLRHRQIVEMFVAEGNRLESCREVKVREDIMATMNWLKRRLKDIDGDLDRELRNSPVWREREALFCSVPGVGRTTIATLASDLSELGKLNRKQIAALVGLAPFNDDSGTSKKGKRRCRGGRSTVRSVLYMATLTAVRWNPVIKAHYTHLLARGKEKKVALVACMRKLLTHLNAMARDNKPWNHALATGNVASAPA

SEQ ID NO: 164536 - protein, 344 aa, unidentified
MSKHTVRSGDIAGLRARFSQLKDKVQVRTGQVVPIIVIQEAGLDGFWIHRLLQDGRVESHVVDPASIATSRRRRRAKTDKIDGEALVRALLAYKRGEPRVCAMVRAPTPQEEDRRRICRERKTLTAERVEHVNRIKGLLFAQGISDYEPLLRKRRERLEELRTGDGRPLPEHLKAQIGRELDRLELALQQIKSVETERDAMLSPSDEGTPAPGAMLKNLKGIGPEFAGVLWSEGLFRTFSNRRQVAAYAGLAPTPWRSGSVAHEQGVSKAGNPRLRTTMIQLAWLWVRHQPRSMLTLWFQQRVQLNGGRVRKVLIVALARKLLIAFWKYVTAGVVLDGAETTAA

SEQ ID NO: 164537 - protein, 288 aa, unidentified
MNYSGIDLHSNNSMVSVIDETDRVVAEKRLPNDLARILAFLAPWRTGLAGVVVESTFNWYWLVDGLQTAGYVVHLANTTAIKKYDGLKHSGDETDARYLAHLLRLGILPTGTILPAKHREVRDLARKRMQLVRSRTSHILAVENITARQSGTRITSNQVKQLDQITVDQLHLPDDVALAVRANVAVIATLSSQIAIVEKRLHEKVAPRPDYTILTTVPGIGQTLATIIVLETGTIERFASAGNFASYARCVDSQRMSNGKKKKRGQYQEWKSIPVLGIHRSSQLRDAL

SEQ ID NO: 164538 - protein, 342 aa, unidentified
MQVSTIGLDIAKNVFQVHGIDANEKVVVRKQLRRSQVLAFFKALPPCLIGMEACGTAHYWARELTKLGHTVRLMPAKDVKAYIKRNKNDAADAEAICEAVRRPTMRFVQVKSAEQQSQLMLHRTRDLLMRQRTQVINALRAHMAELGITAAQGTAGLKELLKIIAGDADGRLPVDAHASLVVLAAELQAMQTLIGSLEKRIMAQHRTSDESKRVATIPGIAVIGATAITATVTDPKVFRSGRDFAAWIGLVPRQDSTGGKQKLGPISKQGDRYLRRILVVGAHAVLKQAKQKPEKYPWLTQLLARKPFKVVAVALANKMARTAWALLAHGGTYRAPLLAAAA

SEQ ID NO: 164539 - protein, 420 aa, unidentified
MAPLSNQQFKAFVGLDWADTKHDICLQQAGDDRREFDCIPHQVTRIDEWAKALHQRFGGPIAVALELATGPIVSVLQKHAFVTLFPINPAMLAKYREAFKPSRAKDDPTDAELALDLLLRHPERFSPLRPQSAGMRSLLSLIEQRRELVGDKTRFTNRLTNALKQYYPQALEWFEDIDTVLFCDFLTRWPTLPAVRRASRKTLETFFHVHNCRRAKLIEGRLESIRCAVPLTDDPGIVAPHRLLALMLVSQLRTALAAIDVFDREIAAVARTLPDFDLFDSLPGAGPHLTPRLLAAFGEQRDRFKGADELQKYSGIAPVTERSGKKCWVHWRWQCPTFLRQTFVEWAGQTINKSFWAGAYYRQQRAKGSSHQAAVRALAFKWIRIVYRCWQTGTRYDESIYLNALRKRGSSLLRNLELPG

SEQ ID NO: 164540 - protein, 351 aa, unidentified
MKEYRAVGIDVSDKDMKVVGLDAGGEVARRQSVACTPGAVRKVFGVLAPSVVVLETGGHTNWIARELMGLGHEVVVANARKVKAIWADERKSDWRDAETLARLVRSDRKLLRPVQVRSAQGQQDRELLRAREGLVKARSQLVCLVRSLVKGQGGRLPSGGTEAFARRSRQVLEGPMRERLEGVLEAIEALSEQIRRYDRQIEVVVQERYTGPVKAMTQVTGVGTLTALALVLAVERPERFQPARALGPYLGLTPRRDQSGEVDKPLGITHAGNEQVRRLLVGSAHYILGPFGPDCALRRTGLQLAQRGGKSAKKRAVVAVARKLGILLLRLWQTGEMYESLRGARRLTPAA

SEQ ID NO: 164541 - protein, 275 aa, unidentified
METIYYTGIDQHKRNSQLTTLDADGGIVRSSKVKNNPDAIRAYFRTLPGTHMATTETTTGWYWMNDLLRAEGAQLSLAHAKYVKAISYAKVKTDKVDALTLAQLLRIGMIPEAHKISDELRDVRDTLRTRLHLVEKHTSAINSVHRVLEKFNATDVEQLPELFRLQTDLHTERAELITRQIKTIDQTLNGRLLDSEDVQRLLWIPGIGRLNAFTIYLEVDGMDRFESVKNFHSYCRLVPGASNSGGKTRQSSSKAGNRYLKMAFSHAATRAIHRR

SEQ ID NO: 164542 - protein, 370 aa, unidentified
MRNAHGTIYVGIDVSKDKLAVAIAGGERGDEVLSLGTFENTPTSVDKLLKKLAGRGDISACYEAGPTGYGLYRQIRAAGCECCVVAPSLIPVRAGERVKTDRLDALRLARLLRAGELTPVWVPDETHEAMRDLVRARESAAEDQRHKRQLVSAFVLRHGRVYQRSKPWTMRYRRWLQTLAFEHPAHQIALQEMLQAERNASERLERLTGHIEALVPDWTLAPAVNALQALRGVALISAVTFMAEIGDVRRFETPVKLMAYLGLVPSEYSTGKTTRRGGITRAGNARVRHKLIEGAWTYRLQARPGERKLYILREQSPEVQDIAWKAQSRLTARYRKLIQRGKKPTVVTAAIAREMAAFMWDIARRTMPAR

SEQ ID NO: 164543 - protein, 340 aa, unidentified
MKKRYIGIDLHRNRFTCCIRLDNDRTYVTEWALEALARLVKKLRATDEVAVEITSNTRLFHEAVLPHVARVVVGDTNQFRVISQSVKKTDPNDARLLSLYLSKNLLPEVRMKDKDLAQLASLTQTRDTLVKQRSALKNKVNNILSARGLNLAKEALSSEKKLAEVLELPFDEIVRIELRVIVEQIRGLNKSIAELEKTIGEEGSKLEGHKGLSSIKGIGKITGAILLSVIGDVNDFADEGRLASYFGIVPRVSNSNQTERSGRIHKRGTKLGRTALVQSALIAANYSPYLKRFYEQVKARKGAGKAIIALAHKFLGIIYRTLKNKWVFEDFPNFVLAEES

SEQ ID NO: 164544 - protein, 343 aa, unidentified
MQTVTTIGLDIAKSVFQVHGVDAAGQVVIRRKLKRRYVLAFFQKLPPCLVGIEACASSHYWARELQMLGHTARLMPPAYVKPYVKRQKNDMGDAEAICEAVTRANMRFVPIKTPEQQSGLVLHRTRHLFIRQQTAVINAIRAHLAEFGIVAPVGRKGVEELLRVVADGNDKRVPDVVRACVGALGAQLLSLKKQILELDRMIMAWYRSNETSRRLHYIPGVGPLLATALVANVADPRAFRSGRNFSAWIGLVPKQHSSGGKDRLGSISKQGDRYLRSLFVAGALSVIRYAKAHGSKHRPWLTALLARRPAKVAAIALANKLARMAWAMMAKGERYRNPVALAA

SEQ ID NO: 164545 - protein, 341 aa, unidentified
MQVSTIGIDLAKNVFQVHGVDAIGKVTITKKLRRSQVLALFDRFPRCLIGMEACATSHHWARELRALGHDVRLMPASYVKAYVKRNKNDAADAAAICEAVTRPSMRFVPVKTADQQSALMLHRTRDLLVRQRTQLINAMRAHLAELGLVAARGREGVQSLIALVRDNVSQLPDLARSALQAILSQLDALGQQIANIERHLHAQHRVNEVSQRLETIPGIGVIGATAIAATVTDPKVFKSGREFAAWIGLVPRQNSSGGKERLGSISKQGDRYLRRLLVIGATAVIRQARTHPDEHPWLIQLLARRPAKVVAVALANKTARIAWAVLARGGTYRAPALAARV

SEQ ID NO: 164546 - protein, 355 aa, unidentified
MTVLADRVDGVIGVDTHRDTLTAAAVTAVGGLLGQLVVAADAAGYQQLLDFARARVPGRRCFAVEGAGSYGAGLTRLLVERGEWVVEVDRPKRPARRGGKSDALDAVRAAREALAQERLAAPRRRGDREALRVLLATRQGAVTARTGAINQLKALIVGAPEQLRAELRRYSTSGQVGYCAGLRDRPTRSLEHRMTVSGLRSTALRVQFLTAEASQLEGEIGRLVGAVAPWLLELPGIGPISAAQVLVSWSHAGRLRSEAAFAALAGVAPIPASSGQVTRHRLNRGGDRRLNRALHTVALVRLRDDPTTRAYAARRRGDGKSPREIRRCVKRAIPRHLFKLLQRYDRPDVEIVRIC

SEQ ID NO: 164547 - protein, 435 aa, unidentified
MEEVEDEPLFCDRVAGIDIGKATVMVTIRVPSEARAKGRQQEAREFGTTRRELLALADWLRGWQVERAGMEATSDYWKPVLFTLEQEGFDCLLYQASQVKALPGRPKTDKLDSVWLARITEQGSLAGSFVPPEEIRRLRTHTRCRRKLVQMRTAQKERCEKLLEDAHLKLSSVISDIHGVSGRDMLRAIAAGERNPKVLAQMARGVMRSKIARLEQALDCSFFTGEHAFILTMMLDSIDSLTAQAGVLDARIADMCQPYQRQLEQLDEIPGFGTTTAQDLIAEIGTDMNVFPTAGHLASYARQAPRVKESAGKRKGKNATGRGNPYIGGALGEASISAGRTQTFIGEKYRRLTRRMPKRKAQVAIMRSQLVIAHALLSDPDARYQDLGPDYYERKADIRRRARNHARALERLGYKVTLEAIDPGTGELHLLATAG

SEQ ID NO: 164548 - protein, 364 aa, unidentified
MSEYTWIGLDVHADSITAAILEGDREQPEIIKLSGDLMKVRRLFRHLSKKAPLRACYEATGAGFVLQRVLTNDGFHCEVIAPSLIPRKPGDRRKTDRLDAVMLARLYRSGHLTPVHVPTEDIEALRRLLRLRYTYQIYCKATKNRISGMLRNHGFVFQEAKSTWTKKHRQWLTKLRLELYGPLQTALATELEHLEYLQTQREALDAELQRFAQSHPYRDKVEALCCLRGVKTLTALTLLCEIDDVHRFRSPRPLMAYFGLVPSERSSGDRERKGPITKAGNIHARRLLIEAAWNNRHRSGADLILTRRRQGQPPAIVAIAMKAQHRLYKKFWRLDQRKHRHVAITAVARELCGFVWAILNAAPQ

SEQ ID NO: 164549 - protein, 371 aa, unidentified
MKSIIYIGMDVHKKTYSLCALLKETGEIIGETKIPADVSLIIKFIENAKKSVDSDDVQIKTGYEAGCLGYSLYWQLAAKGIECDILAPSTMHRSAKNKVVKNDRRDAKNIAANLANGTYKSVYVPTDEDVEIKEYIRMMHDFKIELKKVKQHINAFLLRFGHHYPGKSKWIPAHIKWLKELELSDIYREILDEYLSQLEILSEKIERFKYRLEELSQKETYNEKIGQLRCIKGIDTTAAMTMHAETSDFDRFPTANAFASYCGLTPGEDSSGESYHRLGITKQGDSMIRTTMVEAAQVLVRGTIGKKGKKVKSKQKDQDVKVIDYADKAVVRLQKKYHRMIFRGVKRNIAITAVARELACFVWGIETGHIS

SEQ ID NO: 164550 - protein, 357 aa, unidentified
MSTQTAVGWDIHRKFSQLSVVAQSEQGEIRVVKRMRLEHVDRAAMREELSKLPPGTPIAMEGAFGWPWIADLVDELGLDPHLGHPPAIRVLAKNEAKADRMDADRLGRFWLRGIFPESYLSTPEVRQLRDRMRYRMALVQLRTGIKSRIQAILHRQGVSHDYSDLFGKGGRAFLTTLALPEACRAALDGWLAQIDLLDEQLAEVEAWMQQHLEEDDITRLLKTIPGIGLILAHVNRAEVGQLTQRFPSRRHLTSYSGLAPLADDSADRHGHRHIAAACNHTLRWAFIEAAHCVVKSKSCPANLRHLYNRLTHGGRANKNQAKVGVARELCELVYVIWKKGEPYRETTSPVRPQRSKH

SEQ ID NO: 164551 - protein, 355 aa, unidentified
MSSEKYIGLDVHQATISVAVMDSQGKLIMESILETKASTILEFLAGLRGALSVTFEEGTWAAWLYDLLKPHVAHLIVCNPRKNALLKQGNKSDKIDARKLADRLRLHDLKPVYHGETGVRMLRELARSYLTVVKDLSRVMNRLKALYRSWAIPCAGRDVYYTRHRSQWLGKIPEAGTRRRAEQLYQQLDMLQHLRQQARRELLAESRKHTITAKLKQIPSLGPIRSALAVALIQTPHRFRSKRQLWTYSGLGLETRDSGEYHYVRGQVRRRKKQATIRGLNKDYNHDLKSLFKGAATRASVKPGPLQEFYQRSLAKGIKPTMVRLTLARKIAAITLTLWKKGEDFDIDKLKSQAA

SEQ ID NO: 164552 - protein, 362 aa, unidentified
MKQFIGCDVHKRYSVFVSMDEAGKASRAVRVAHGNGELETYLSGLPAGTPVAVETTGHWYWLLDAIEKAGLEPHLAHALAAKRMMVGPNKTDPLDAKGLATLLLNGSLPEVWVPPGSLRDLRGLLRSRLALRRMGTALKNRISSALARYGLPQQFKGDLFGSGPAATKCREESIAALPAHSRFAAEQEWKLLQAVEEGVCALTTEMAGSIGKLGWVRRLRTLPGVGEILGPTIYLEIGQVERFPTPAHLAAYAGLVPRVISSGGHTRLGRTRRECNRFLKWAFVEAAEVIVAHQESMAARHVVRLYRRVKNNKPDRHNKAVVAVARHLAESAWHILERNQDYREPQPTPGMIQRFHTVGRPL

SEQ ID NO: 164553 - protein, 359 aa, unidentified
MQRNKNSFKGQKIFVGIDVHKLTWEVAVLTESGFLKRHSQESSAKVLFDFLRKHYPDGEYHAVYESGFSGFATYYALKELGIECVITHAADVPTTQYEEVMKTDKIDAEKLARSLKNGEIKRPVYIREKDNIDDRGVIRIRKTIQKELSCYKSRVKHMLHNNGVELPKRFEKPGSHWSRAFITWLMQDVKLLSSTRLSLDLLVRQVEVIRSSLLQANRELRKMSQTARYKHRFDLLLTIPGIGQHVAMCILTEVWDVNRFPNEKAFAHYLGLVPGSHDSGPHKSNGEKTFRGNKHLGPMVIEACWIAIHKDLGLGACYAYHKQRRNPQKAIVRVARRMSNIIYSVLKNDKAYEPYQWDK

SEQ ID NO: 164554 - protein, 343 aa, unidentified
MEITRVGVDLAKSVFQVHGVDRKGSCVWKRQLKRSIWLRVMSEKLQPGCEIGMEACSGAHHWARVLRDRGFRVKLIAPQHVKPYVKSQKNDATDAAAICEAMSRPDMRFVAIKTVEQQDIQALHRVRSSLIAQRTALANQVRGLVSEYGLVAPQQLVSVRRAIPDWLEEGENGLTDRFRGLLSSLWEDLLRLDERVADLDREIGCVATRHPDAKRLQQLRGIGPLVATALVAHFGDARHFAKGREAAVSLGLTPRHHGTGGKNRLLGITKRGDPYLRSILIHGARAVVSTAHRKEDRLSRWVTELKERRHANVAAVALANKTVRIAWAMLSNGTNYEPEFVAV

SEQ ID NO: 164555 - protein, 383 aa, unidentified
MDTAATRNIEYSAFEPVLYLAFELSEAHWKLGFTIGVGQRPRERNIRSCDLVALQKEIQQAKKRFDLPETVRVVSCYEAGRDGFWLHRYLIQEGIENLIVDSSSIEVNRRQRRAKTDRMDVEKLLSQLIRYRSGDRKVWSVVHAPSVEDEDQRHLNRELAAAKKDRTRHNNRIKGLLVGQGVRLAIKADFLDRLDAVRTWEGLPLPPGLQMRLKREYERMKLAERQIKELERERIEAIRHSEDPSVDMVRQLLKLKGIGLNSAWLYTMEFFSWRKFQNRKEVGALAGLTPTPHESGSSSRERGMSKAGNRHIRGMAVEIAWGWLRYQPDSELTQWYEERFGHGSSRMRRIGIVALARKLLVELWRYLETGAIPKGAVLKTRLI

SEQ ID NO: 164556 - protein, 364 aa, unidentified
MVLPPGVCVQEGGPEVIVVGIDPHKQTHTAVAVNAATGQVLAELTVKARTPGFERLVMWARGFDHERTFAVEDGRHVSGHLERHLIARGERSVRVPPRMMGEARRSDRVSGKSDPVDATAVARAVLRHPDLPEATLAGIEREIGLLVAHREMLVNERTDRICKLRWLLHDIDPDLAPPLRTLDRFRTIDGLTKTLQAMEPSVLIRICLDLLARCRDVTVRANELEREISSLISTHARALLEIPGCAALTAAKIVAETAQIGRFATEGHFARYAGTAPIPASSGARHRQRFNRRGNRQLNAAIHRIAVTQLRIHEPAKDYVAKKRAEGKTKPEAIRALKRHITRTVFKTMISMSQPTNRLTAAAA

SEQ ID NO: 164557 - protein, 409 aa, unidentified
MCIKTKKVKWINKKTMIATFDIGKNVHYGYFKAPDGRERKPFCFHNTQKSFKQLWADIFQFKQDHHLEQIVIGFESTGPYAEPLFHFLRKKPVKLVQVNPVHTKRIKELTGNSPNKTDKKDPRVIADVISLGHALTLIVPSGASAHLRRLTQARERALRDRTATSNQLQHLIFVIFPEFLSIMKNISTKTATYLIKHYPGAQNIAAMGVEDLTAIMRKISRGKLAGERAKELIAAAKNSVGICEGRESIFLEIAYLSARIENENDFIDTLENQLDEYLQQIPYSSSIMSVKGIGVVTTAGLIGEVADFKKFDTISELMKLAGLDLYEISSGKHRGQRRISKRGRPLMRKLLFFAAINAVKSNGIMHETYQRMLERGMLKMKALVAISRKLLGLIFAIVRDNTKYIEDYN

SEQ ID NO: 164558 - protein, 347 aa, unidentified
MKILALDLGKYKTVGCDYERETGKHRFKASLTTPAGLQQLVKEVKPDRVVIEVCNIAGWVSDLVRGMGIETQVANTNEDAWRWRKVKKKNDQRDALKAAQLSAVNQVKEVYIPPLEVRQWRSLITFRQQLVRRRGRMKNHIRDLLVSEGELLPRGQSCWTNAGIARLEALARPLSEVGMKEMWRGQLYIELQQLQAVQAEIAAVEKKLDAIAATDVRVKLLRTIPGVGPRLAEAIVALLDRPQRFHKASEVSAYVGLVPKELDSGETVRRGPITKQGSRLLRSLLVEVAWAGLRHNPWVRETYQQISGGKKSRKKIAIVAVARRLLVRCWAMLRDGTSWRAPVPAIS

SEQ ID NO: 164559 - protein, 412 aa, unidentified
MQRMTDVPGTVHAGEPAWTVGIDLGRRAAHEAVLRAPDGTDRRLRFTHSRDGIDGFLGELAGLEGRVLVIIEPTATRWQALAEELSGKGLEVRQVHAATVAKLRGARDITGAKSDRVDARTLAGAVDYSHLVRPDTPAVACAHALCLERLRLRRERRRLRGAVKTCLDTIWPEFLQTFRGGERGVTARAVIAVTGGDPARATRLGAQELERRVRAAAPGRHIGHNKIKQLIEKTSRPVGYRAARGAYAARLQRLMRRRALVEGQLEMLEEELLHLYPRLPGAQRLDSLPGLRELDRALLLAAAGDVRRLRSARALGKLGGCAPIARDSGQSTPKRKISERCRYQLRDAAFHAARHIIKACPAFRALYRALRQRLTARQAVIACANRLLRVIWRMVNSDVDYNPAKVAPALNH

SEQ ID NO: 164560 - protein, 361 aa, unidentified
MSRYYGIDLGKTKFKVAVLNECGEDAHIMTYSINALGAFINRVQKDDYVVVEATTNAFWFVEKIKPYVKECYVVDPFKFSIISLSKKKTDTVDAVKLAKRLRYYIQYDRSQDEFPTVFIPPIEVQELRSLFTTYQTIKKEKNITKNRIRSLLTQNGFIGFEKKDLSYIKTQQDILSLPLSEALRAQLQVLFILLRTQLESLESIKETILQKGILFKREVYILTSIKGISPFIALAIMADAVTIDRFRNAKHFCSYMRATPRIDASGNMTKIGRINKQSRHLAMSLLMECINHFRNADPVIEHFYVKKSRGKSKGKVRVAVIRKMLVIIYKMLSTGTLYDYCDEKNHNRKIKEYENIIEKVA

SEQ ID NO: 164561 - protein, 351 aa, unidentified
MSHKTAATVAHTIGIDTGKNTLHLIGLDDKGAIVLREKIARGRITARFANVPRCLIGIEAGMATHYVARELSALGHDVRQVPPAYAKPFRQGHKNDFRDAHAIAEAVQRPSTRCVPVKTDDQLDLQALHRVRSRLVGQRTAVINQIRGFLLEHGIAVRQGLRFLRQQLPDILAKRGDVLSPRMIRIMEDLSGDWRRLDERIQPITEEIEVLAHASASCRQLMTAPGIGPLIASAMVAAIGNGAAFAKGRDFAAWLGLVPKQMSTGDRTILGRISKRGNRYLRTLLMQGARVILLRPANWPKHSFGLWLTAAAQRLHHNVLATALANKLARIAWTVLAQGRSYEARVEPRVA

SEQ ID NO: 164562 - protein, 394 aa, unidentified
MIYAGVDIAKTDHVIGAVDERGAEMCRPMPFKNTEAGLERAVAWLEGLAGSPSDVVVGMEATGHYWMACYSFLVARGYSVAVINPMQVKAVRKLKKLDKVKNDRIDAWLIAETLRIGQYDETRLATDEVASLRSLSRYLQSLRGMAAELKTQCVCLMDAHFPEYAGIFSDMFGAGSRAVPSKSPLPFELARRRADSLARDIAEASRRGGKSAGYAARIKAAARSSIGVRLGQEAASFQVKSLIRQIEFADSECAKVEARVRALLDEVEPLVLTIPGVSYATGAQIVSEIGDVSRFRNASALVSYAGLNSSVSQSGQFDSGGGPITKHGSPYLRRALWLAANRARQYDPGLRAFYDKKRAEGKPHRVAVTAVARKLCHIAFAVMRDQVPYDPGRE

SEQ ID NO: 164563 - protein, 325 aa, unidentified
MSSHEIVGIDVAARTLVAIGDEVVLQPAYENTPEGRRALVTALGCSKRPVRVVLEATGIYFLDLACELAAAGIEVMVLNPKAAHHFAEAILQRRKDDPVDAAMLREYGRRMAFVRWTPPRPELFAVRALAREAQAQTKAVTAAKNRLHALTAATLTPARLIRALERQIRASEALIDQLITAARELIAGDGELQRLFERTDSVPGFAAKGAVMVMAELVILPPMGARQWVAQAGLDVREERSGTSLARKPRISRRGNKRLRQALFFPALTAARCCPEAGAFVDRLVARGKTKLQAIIALMRKLLHALHALWRNNEDFNAAKLFAKA

SEQ ID NO: 164564 - protein, 387 aa, unidentified
MVTKTKRRKSRGSKKRFIGKPTGQIQERVQAVGPERFGVIAVDCAKRRSKWMLCNFYGKVIVEPTQVEHTTGGLRAMTQRVAAACQAEGLTDTIVAVEMTGIYHKPVQRAFRKARFDTRIVHPFASNHYRRPLHPDAKTDDNDLEAIFHAAIKGYGLLTLPVGEVYQSLQAISRHRHNLVKQRARLMVQIRRLLHQTMPGFADLWEDDKLFHKSIALCVALNFSSADAIRKAGVDGIASHLNNTKVRFQRRTIERIVAWAGTAAEPSELGAMHTRQWQQLNEVRQLLGEQITAAEREMAGFLAKTPYILLLSVTGINVVSAARLAGEAGPIEHYASARAINGRAGLYPSRYQSDEVDHADGSLVRQCNRKLRGAAMLIAENLIKCHP

SEQ ID NO: 164565 - protein, 347 aa, unidentified
MLYAGLDLSRQRLDVHLMDEAGLTLEVTAVRPVADALRDLVIHVGRHGQPVEAVIESMNGARFVHDQLELAGWDVAIADAQKVKGIAPLAAKTDRIDARVLAELARRDLVPAIWLPDPSVRADRERARFRLHLVRHRTALKNRIHATLIAFGHPVPVSDLFGTAGRELLGRLEIPEPWETTLTKSLRLVDDLDREIDVCEAELRHLGADHPDIPLLMTAPGIAWVLGYTIASEIGDISRFTSPKKLAGYTGLCPLVYQSGRRDDRGPLAKNGPKYLRWALIEAATHAARHPAYREHYQRTAKRLGRQRGSKVARVEVARELATAIWHMLTKREPFAPGRPPVRPLVA

SEQ ID NO: 164566 - protein, 344 aa, unidentified
MENYAGIDVSLELSSVCVVDAQGKIVKEAKAASEPEALVAFFRTLGFAVKRIGLEAGPLSQWLHAGLKRAGFEAVLLETRHVKAALSAMTVKTDRKDAHGIAQLIRMGWFRPVHAKSIGSQEVRALLVARKQLLERLIDVELSIRGILRGFGLKVGPVTRKGFEARIRELVAGQATLERIAGAMLSARAALKAEYEKLHKAVLALVRDDAICRRLMTVPSVGPLVAITYKSAMDDPHRITKSKSAGALFGLTPKKYQSGEKDITGGITRAGDEMVRTALYEAANVLLSRITRFSKLKRWGMDVAKRRGSKRAKVALARKIAVILHRMWIDGTTYQWAAAEPIAA

SEQ ID NO: 164567 - protein, 323 aa, unidentified
MDHVLGIDVSKDTLDLVLDQRFHRKVLNDMGGFQQIHQWLDSQNVDRVHACLEATGQYGDGVAEYLYEQKHLVSVVNPARIKRYGESKLHRNKNDKADAALIAEFCMKEKPACWKPLSNNMKHLRALVRRLSDLQTSRQQERNRFGSGEKDEWVLSDLQSHIHYLDDCIHNTTKAIHQFIDQNTSLKSQCDLLISIPGIGKLTAVRLLAEIGDISSFENAPQLAAFAGLNPRGFSSGSSVHKKTKISKQGRAFLRCILFMPAIVAQKHNPVIRQFCNRLADRNLPKMAIVVASMRKLLHLCFGVLKNQVPFDPNYGDQFNFAT

SEQ ID NO: 164568 - protein, 337 aa, unidentified
MNYFAGLDVSLEKTHICVLDRNGTVVLETSSASTPEAISSALEGAPACKRVVFETGRMAPMLYHGLADLDVPVICIESRQAYQALKTLATHKTDRNDARGLAQLARTGFFKPVHVKSLPSHAVRALIMARKKLVGQRITLENQIRGLAVVFGVRLPRGLSPAFVEEVIAMSNGIAGLSSAMRGLIAARDAVLAAVAAIDADMKRLVRASDACRRLMTIPGVGPLTALAFTAAIDDPDRFRRSRDLGAYLGLVPRRYQSGEIDYTGSISKVGDRRVRTLLYEAANVMLTRFKGQLKLKDWAIAIARRSNMRKARIALARRLAIIMHAMLKHGTEFKPA

SEQ ID NO: 164569 - protein, 341 aa, unidentified
MGARNYFVGVDLHRNQFTYCVRYSNGEEKVGKEPIEDLERFARRLGNHASVAVEATGNTWMFCQVLKQYAGRLVVVNPNQFKVISHSVKKTDKNDAKVLAEFLEKDLLPEVRMKNELQAKVASLTQTREKLVQLRTVLKNKINNLFASRFINLKREELSSEKGLLKVLSYHFDAISDVELRVMVDQIRSLNRSIEELDKAIEDSGSKMDGFDNLTSVKGIGAKGASTLLSVIGNVNDFRSAKQLAAYIGIVPRVSDSNETVHHGRITKLGSKIARTTLVQCSLIAKRYNPYLHAFHERIKAGRGGAKENIAWARKFLEIIYRVLKNKLVFEDFTTFKLKTT

SEQ ID NO: 164570 - protein, 356 aa, unidentified
MKTKISMLAIDLAKGSFQVCAVGQDGAVLSNRAMSRTRVAALLAEQPTCVVAMEACATSHHWGRLAQAYGHEVRLVPAAYVKPFVKRQKNDRADAEAIAEAALRPTMRFVAVKSADTQARAVAFRTHQCLVRQRTQLINALRRHLAEFGLVAPTGPASLKVLENAMEAEATDLPDPVREMGAVYLEQIGNLTEVIEKLAADLEAASKTDEEQRRLCTIPGIGPVTAGAVAAFAPDLDTFDSGRNFAASRGTCASGTTLGLVPRQRSTGGKTKLGAVSKMGQTDIRRLLIVGASRQGRASRATSVIRWVVRKGGSPNRWLAALVARKPKMVAAVALANKMARMIWAMSTKREDYRMA

SEQ ID NO: 164571 - protein, 387 aa, unidentified
MPVAAHRSEAPTTIRTDLGAIFVSLELSQSKWLITSLSPGGGEKMSKHAVATGDVAGMLACFAELKRKAWARTGRCFPIIVIQEAGLDGFWIHRVLEAEGAESYVVDAASIATSRRRRRAKTDRIDGEALVRALLAYKRGEPRVCAMVRVPTPEEEDRRRLSRERHALTNERVRHVNRIKGLLFSQGVSDYEPLRRDRRKQLEERKTGDGRPLPAHLKAQIGRELDRLELLLEQIKAVEAARDAMLSATTVVSPAPAMLLALKGIGPEFAAVLWSEGLSRHFDNRRQVAAYAGLAPTPWQSGSVDQNQGVSKSGNPRLRTTLIQMAWLWVRHQPHAALTLWFKDRVKQNGGRLKKTTIVALARKLLVALWKYVNAGIVIEGAVIKTA

SEQ ID NO: 164572 - protein, 376 aa, unidentified
MKNNNLSVSGIGESQASIEQKNSRLLKLGLDMHYRQVTVAIQEEDGRIKAVGKMGHEAFVSWLEKKRKEGWEIYSCYEAGASGYWLHRLLVEMGVKNLVVVVPKAMDQAGQKQKTDRRDAGELCDALDRYLRGNGKALSAVAVPTVEQEEQRALIRYHRQIMADRSRYEARGKGLLCAQGIEVQGKWWQAKGWKELHHDPRLKDWMKEQLEGWRGKLLGAEQQQQKLRCRIEALAPAILPKGVGAYSAVVLEYEMKGLGRFKNARAVSSYTGLCPGIHSSDGRGKEGSINRCGNAVVRWNLVEMVWRLLKWQPDYEPVRQLAAGLVRSKRAKKRLVVKAARQLAIDLWRLRTGQTTPQKLSLVMQCNPMKSERASR

SEQ ID NO: 164573 - protein, 312 aa, unidentified
MAQMVITAGIDVSKAWLDVALWPTKAELRVERNAAGYHRLGAWLSEHGVMRVGLEASGGYEVEVIDALQARGFEVARFNAQRVRLFAKAKGRLAKNDRADARTIAQATAVLLDAAPPQRRRDLEPLVEHLTYRRRLREWIVDCTNQLEHLKDKALRRKLIARRAAWQNELAAHDRTLASLVAQHDEWHDLEQRLRTVPGVGPVLAQTLLALLPELGRLSRRAIASLSGVAPFDDDSGKRAGERHIKGGRAVVREALYMAALAAKRYNPAIAAFANRLAGKKPKVIIVACMRKLLVILNAMMRDGSAWQTVSA

SEQ ID NO: 164574 - protein, 346 aa, unidentified
MEHYVGLDVSLKLTAICIVDRTGKIKREGVVSSDPEAIAEFIKSHASHVERIGLETGPTVTWLWTELSKLGLPVICIDARHAKAVLKMQINKTDRNDAVGIARIMQCGWYKEVRVKDLDSHAIKALLVSRALLVKIKRDLENQIRGLLKNLGLVIGQAKRNVFLLRAAQLTEGRPELAAAVGPLLKSREAIAQQIEDLDRKVLRLARNNVQVRRFMTAPGVGPITALCYLATIDDPTRFKRSSSVGAYAGLTTRRYASGEVDWTGRISKCGDKMLRTYLYEAANVLLTRVARWSTLKAWGIRLAKRSGLRKAKVAVARKLAVILHRMWIEGTEFNWSSKEATNQPA

SEQ ID NO: 164575 - protein, 395 aa, unidentified
MFIVGIDVAKRSHEVCMITSDGQTVQRPFSIRNNCTGYNLMLEKIRKHTNIKSQIVFAMESTAHYWLALFTRLRKDGYHVILLNPIQTSAMRDMFIRKIKTDAKDSFIIAELIRFGRYAESNVAQDRLLALKELCRNRFYLVDMAGDLKRKLIALIDRVFPEYEAQFDTIFCKSSVALLKKYPTPQRLSNAHLDKLTELLWNSSNGHFGEWKARELKDLARNSFGVEDCDGAYSTLILLMLDQIQSLSGKADALEKEISRLFQSFDTTVTTIPGVGPIIGAVILSEVGDISRFSSADKLAAYIGVDPSVNQSGEFQAAHAHMSKRGSPYLRRCIWMASQVAVQRDPMFRAYYEKKAAEGLKYMTIIGHVTRKMTAVVFAILRDHKVYEPVLPTAA

SEQ ID NO: 164576 - protein, 389 aa, unidentified
MKIFVGIDIAKLNHFAAAISSDGEIIIEPFKFTNDADGFQLLVSKLESFDKNSIIIGLESTAHYGDNLVRYLVAEFYQVCVLNPIKTCQMRKNNVRKTKTDKVDTFVIAKTLMMQDDLRFITFFDLDMMDLKALGRFRQKTIKQRTRLKIQLTTYVDQVFPEIQYFFKSGLHQHAVYALLKEAPSPKEIASMHMTHLANLLKVNSHGHFTKELAKELRVLAQKSVGANDSAISIQITQTIQQIELLDSQLEKIEAEMTDIMKFNDSVIMTIPGIGYINGGMILGEIGDIHRFSNPNKLLAFAGLDPSVYQSGNFQAKTTRMSKRGSRVLRYALVNAAWNVVRNNATFKAYYDAKRAEGRSHYNALGHCSGKLVRVIWKMLTDNVEFNLK

SEQ ID NO: 164577 - protein, 332 aa, unidentified
MRYVGLDIHKKHTQACVRNEKGKILLDERFKTDADEIGKFFSKVEGHGPLTVAMEATGFYFWIYNCIAARGHDVKVVHPARIKPLMKAKSKNDRNDASMLAELLRTGCLEGIYVPSEEVRDMRDLTRYRESLVRKKGDLKREMIAALDQRGIKMPAEFRTNFTKKHMAWMRSLEIFTVDEKLDLLELTMAKLENVEQKIEEEWGKDEDVVLMQSVPGIGLVTSAVVKAEIGDTKRFGSPDNLAAYMGLVPTTYQSGEKEWSGPTRHGNSRVKHVLLEATLMHLHICPDSKISRYYHRKRDTIGAKKAIVAAGRKMAEALYFMLERREEFHAH

SEQ ID NO: 164578 - protein, 387 aa, unidentified
MIYVGIDIAKLNHFASAISSDGEIMLQPFKFTNDYDGFHLLLHKLDSFDPDSLIIGLESTAHYGNNLLEFLVKHNYKVCVINPIQTSAMRKNNIRKTKTDKVDTYIIAKTLMMDPHRFFSQHDLSIMHLKELGRFRMKLIKKRTQGKIQLMSYVDQAFPELQYFFKSGIHQKSVYAVLKEAPTTKDIASMHLTHLSHLLEVSSHGHFKKDTATELRILAQKSVGCNDSSISTQITQTIELIELLDSQVHDVESEMELIVNSLASIIMTIPGIGFINGGMILGEIGDIMRFSSPSKVLAFAGLDPTVYQSGNFNASHTKMSKRGSCPLRYALINAAHNVVKNNKTFKDYYDQKISEGKSHYNALGHCAGKLVRIIYKMLTDNVSFNLD

SEQ ID NO: 164579 - protein, 407 aa, unidentified
MDVFCGIDWAEDHHDIALVGQDGQLLGRCRISDDAAGLAQLLTLLAGHGDSAGDLIPVAIETPRGLLVACLRATGRKIYPVNPMAVARYRDRHSVAGGKSDHGDAVVLANVLRTDMGMHRPLPADTELAQAIAVLARAQQDAVWDRTTAHNRLRSHLREYFPGFLAAFADARGGIVRPEARAVLAAAPTPADAARLTVTRLRAVLKKAGRSRGIDTEAARLREAFRNPQMRQLPLVEHAMGRQALALLGQLNAACAAASGLEQAATESFNLHPDAGIITSFPGLGPLTGARVLAEIGDDRSRFQDAKGLKAYAGAAPITRASGKTRSVSHRRIKNNRLASVGYTWAFSALTASPGARGHYDRRRDHGDRHTAAQRHLFGRLLGCLHHCLTTGQNYDETTAFPNTAEK

SEQ ID NO: 164580 - protein, 359 aa, unidentified
MQTQSNKIDFNGQNIYVGFDVHLKSWTVTVMTEKLTHKTFTQPPKPEALYHYLIKTFPGGTFHSAYEAGFCGYWIHNKLTNFGINSIVVNPADIPTTGKEIVMKDDTRDSIKIARSLRNGDLNPIYVPSLPALEDRGLVRTRATLVKDLTRYKNRIKSFLYFHGIELPEAFNKPKTYWSNRFNKWLEDVEMTEASGKASLNVLLDQSRHLRASILQVTGQIRDLAKTDRYKMQQELLRSIPGVGLLTAMVILTEIETINRFDSIDQLCGFIGLVPSTNSSGDHDIIGDITPRGHGVLRSAIIESAWMAARLDPALHKCYLDYCKRMEPNKAIIRIAKKLISRIRFVLKNNQPYVCSVVK

SEQ ID NO: 164581 - protein, 325 aa, unidentified
MVPERTEAHAGVDVSKERLEVCVRRGREAREDERTFGVSNDPAGTQTLLACLLEERPALVILEATGGFERPVAAALAAAGLPIAVVNPRQARDFARATGRLAKTDRIDAQILARFAQAVRPAPRPVPEEEAQALAEITARRRQVVGMLTAEKNRLGAATTKPVRKRLQAHVRWLEKELSCTDGDLEEAIAKSPTWRENEELLRGVPGVGPVVARTLLAELPELGSLPPKQLAALVGVAPLNRDSGAFRGRRAVWGGRATVRAALYMGALVATRHNPQIKEFYERLLGAGKPRKVALVACMRKLLIILNAMLKNRTRWRSPQTLAP

SEQ ID NO: 164582 - protein, 466 aa, unidentified
MEVLYARCAGVDVHKKTVVVCRIIPGPDGQPLQEIRTFTTMTRDLLALSDWLAEGGVTHVAMESTGVYWKPVYNLLEGTFTLLLVNAAHIKQVPGRKSDVLDCAWIADLLRHGLLKGSFVPERGLRELRELTRYRTALVRERAAEQNRVHKTLEGANIKLSAVATDLMGVSARQMLAALCTGRSDTEAIAQLAKGRLREKIPLLEQALEGDFQPHQRFLVAQQLAHIDYLEGLIDPVSEEVAQRLEPLAPPPSGPAPAPGRDALDEAAAFAAAELEARREALHLRLALDGLQEQEAVEGPLSFAAAVALLVTITGISQRTAEVIVSEIGTDMSRFPSAGHLCSWAGLVPGLNVSAGKRHGNRTRRGSPWLRSALVEAAHGASRSKGTSLSAQYQRLAARRGRKKAIVAVAHTIRATAYYLLKNRTTYEELGDAYYDERDKEAIQRRLVRRLEEIGYTVTVELAQAA

SEQ ID NO: 164583 - protein, 409 aa, unidentified
MMKQNIIFGIDVSSKSSTVCVVIDRIKQGETFKITNDSFGYQDLLDRLNQYLITPLVVFEATGVYSLSLQAFLEDYHIKYLKLNPLKAKKLMDNNLRHNKTDKVDAYRLALTQFNAPQKLRAPQPKEYHELQNASRYYEELAQALIINKNQLHRNLQSAFPQIESILSTSSGRVYWTIVSLFPHAQYVLNHNENQVFQSLLAISGIGKQRAHYLTTRLYALARQAYPYDNESSITIRAIQRNIANLLSLSAERDNVINYMEKLAMQANARSLNIYESIPGIAKTTAVRLVAELGDLRRFDTSAQIDAFVGIDPGRYQSGEKDSHLEITKHGNHLARKILYRTITQMETVKATQPCHITDYYDKKKRSSNSRGYKKIAIASVHKLIRTMFALIKHDQLYDYNVATHNQRL

SEQ ID NO: 164584 - protein, 423 aa, unidentified
MMKLKYSICCGLDVHKNVIVATIVITNKDGISEYRQKSFSTINSDIQRFHNWLIENNCYHVCMESTGKYWIPIFNYLENDIDVCLTHPKYVKAIKGKKTDKKDSKWIADLYKFDLVRCSFIPPKDFRQLRELSRYRFKLVCMKSSEKNRIQNCMTVSNIGIASVLSDPFGKTATEIISYLLKHTADSMDEKAVRKLIKNGAKSKSDEIIEAIKGYNIETDQAKKLELARGHLEYLDDMITQTEVELYVRIKPYYEFVEFVSTMPGMTELSSTIVLAETGVDMSIFDDAKHLCSWCGLSPANNESAGKKKSVRIAKAGDYLKPLMVQCALAAIKNKKQPYFAIKYRRIKKRRGHKKAIIAIARMMMVCIYHMVSEKKSFSPTDYEELMDPQNHVERVVLNENNVFAYLESLGYDTSKLVKRNDN

SEQ ID NO: 164585 - protein, 454 aa, unidentified
MEAGLLSMINLDAAGIDLGSETHWVAVPSDRDEKPIRSFGCFTADLHEMAGWLKECGIKSIAMESTGVYWIPVFQVLESSGFEVKLVNARHIKNVPGRKTDVLDCQWLQRLHSYGLLSGSFRPEDKICVLRSYLRHRDTLVKHASTHIHHMQKALIQMNLHLHKVLSDITGVTGMRMIRAIVDGERNPSVLASMRGRGVKKTEGEIMKALQGDYRKEHVFALRQAIELYDVYHQKIEACDIEIEKILKQFDSRVSADSPAQTKVRRKQKQRKNQSHIDLRGYLYRITGVDFTLIPGLEALSVQTIISEVGLNPSAFPSEKHFTSWLGLCPNNRITGGKIMKSSTRKVVNRATNAFRLAAQALANSHSALGAYYRRMRSRLGPSKANTATAHKLARMFYRLWKSGGTYVEPGLDYYEKKYKERVITNMKKKAKALGFNIVIEPLEQNATGQLCSA

SEQ ID NO: 164586 - protein, 407 aa, unidentified
MDVVHPKCAGLDVHQQTVVACARLGSGPAVTYDVRTFGTTTQALLALADWLTTHGCTHIAMESTGVYWKPVWQVLDGAFELVLANAMHIRNIPGRKTDVNDATWIADLLAHGLIRGSFVPPAPIQELRDLTRTRKQLVREIAQHTLRIQKTLEQANIKLTVVLADILGASGRAILQALVAGEHDPERLAALANERVKASRADLIAALHGRATAHHRFLLKLHLAQIEALEAAVRDVEARLGEALAPFRAAIDRLITMPGVSETVARVLVAEIGFDMSRFPTAGHLVSWAGLCPRLHESAGKRLSNRTRPSNPWLKTTLVQAAWSAARKKDSYLRAQFVRLKSRRGPKKAVLAVAASMLTAAYHMLKTSSDYRDLGADHFDRRDKAKLARRLIARLHDLGVIVEVRAA

SEQ ID NO: 164587 - protein, 465 aa, unidentified
MGSEGCLFFETLISLSKLTIIISRMHECVFERVWENVPFEDDNICPYQEQNKMEKQKNIVCGADIHKKFIMATILSRDGNKIRGRFGMTLDEILRFKEWVINNNCEAVAIESTGIYWVSIYTVLEGNIEVILANAYKVKHTPGRKTDKRDSVWLAELCLNGMIEPSRIFPKDDRELRTLTRAREKLVNNSTQMKNRIHKELESACIKISSVLSDIFGVSGMKIINGLLEGKNIDEILKMITSKRILKKEQELRKAVINSLDPARILLIRTYLELIERIENEIEILNKEIMSRMQKLKEDLEIAMSMTGMGFTSASTILAEIGNYRDFVTAEQLASWCGLTPKVSQSADKLVTGSITKQGSKHVRRMLVQVAHAIAKSRNSKLKRFFLHILAKKGKKKAIVALARKVLCILHHLLVNREKYQDTEMSKTKKVKLNWSSSPVQMTEQDMINVLVGAGYTIQKMKVCV

SEQ ID NO: 164588 - protein, 335 aa, unidentified
MQRQYVGIDLHRRRSVIVRRDSTGQALETTKIDNDPAAFAAVLAKAGPEPEVVLEACYGWYWVADLLAAEGARVHLAHPLGNNWGHRRVKNDERDAADLADLLRLGRLAEAWIAPPAVRELRELVRYRHRLVQLRSGLRAQAHAVLAKEGVKVPMSDLFGKAGQALLDSCQLGRAYTVRVESLRDLIGLFERETKMLDGEIAAALAGHPGYEAVQAIPGVGPVLAAVFVAEIGDVSRFPGPSQLCSWVGLTPRHHESDTTVRRGRITKQGSRLVRWAAVEAAQGRASNTFLQAHRHRIADRRGKAVATVATARKIVTLVYYGLRDGAIRCLAETE

SEQ ID NO: 164589 - protein, 386 aa, unidentified
MRTDVAPPPQPATVAQPATILVSLELSQKSWVITVQPPDVEKMSRHGIEAGDTEKLLSLLHHHRTRTAARTGATPHIVSIQEAGLDGFWLHRWLEAAGIESHVVDAASIAAPRRKRRAKTDGIDGETLVRTLAAWRRREPHVCSMVAVPTVEQEDRRRLSRERERLMKERIGLTNRIYGLLASQGAGAYDALKTDRWPALAALRTGDGGELPPQLAAEIRRMLVRLDLIMEQIKAVEAERDAMLAAEAAEHGPVVALLCRLYGIGPQFAAVLVLECLYRTFGNRRQLAAFAGLAPTPWRSGSINREQGISGGGNPRLRKTLIEMAWMWLRWQPGSALSQWFQQRAAGANGRTRRILAVALARKLLIALWRYVQDGVVPQGAVLKAA

SEQ ID NO: 164590 - protein, 320 aa, unidentified
MMAQNDLVVVGIDVAKDKVDACIRRFTLRQTFPNTAQGHRKLVAWLRKYQVGKAVMEASGGYERQWRNVLHNAGIEVRIVDPRRVRSFAQSAGRLAKNDPIDAEMIAWFAETFSQAPGQIPDAAREELATLAKARKALVDVKIRLQAQDEHAAPEPARKAYARVLKSLAAEIDKLEAAISAKVKATPEFVERAEIIESVPGLAQATSAILIAGMPELGQVSDEVAAALIGVAPYDDDSGKRRGERYIKGGRRWVRNAIYMPCLGAATQYNPVLKAFYQRLLAKGKEPKVALVACMRKLIIILNTMLARRQKWNPGRHAMA

SEQ ID NO: 164591 - protein, 386 aa, unidentified
MNVGADKPLTAIRTDLGAIFVSLELSRSSWLITSLSPGGGEKMSKHSVHGGDFAGLMERLAQLQEKARLRTGQSFRIIVVQEAGLDGFWIHRALQNEGIESHVVDAASIATSRRRRRAKTDKIDGETLVRALLAYKRGEPRVCAMVKAPTPGEEDRRHLCRERKALTAERVRHVNRIKGLLFSQGISGYQPLRRDRRQRLEELQTGDGRAFPQHLKALVNRELDRLELLLRQIKTVEAARDALLAVGQTAKPAPAAMLLDIRGIGPEFAAVLWSEGLFRHFENRRQIAAYAGLAPTPWQSGAVDREQGVSKAGNPRLRTTLIQLAWLWLRNQPRSALSVWFHERVSRHGGRLRKTTIVALARKLLIALWKYVTAGVVIDGVTMKVA

SEQ ID NO: 164592 - protein, 360 aa, unidentified
MQTKVNENLFKDQPFYVGIDTHKKNWKVTILSEMYEHKTFSQNPDPEILASYLKRNFPGGIYHSVYEAGFSGFGACRKLNDLGVKCIVVNPSDVPTTQKEKLLKTDKADSRKLAKSLRSQEFEAIHIPDQKLEADRALVRQRFRVMKDLSRTKNRVKSLLFQFGIDIPTRFTASQTRYWSGIFFTWLKELQIEQVSLKRTLDNYILIGQSQRDNLLLVNKQIRELLQTDDYKSNCVLLLSIPGIGLISAMYILTQLGDILRFPRLDDLCNYIGLVPSMHSSGEKNITGKMVHRGRKELKIMLIEASWEAIRKDPALMARFNELAKRMHKNKAIIRIAKNLLGRIRYVLIHQQKYELSVVK

SEQ ID NO: 164593 - protein, 482 aa, unidentified
MKKSSIYPNRSQELAALFEKASNPSKLMCVPIDYAKKDHLVMFCNGNGEVLRKPFLVKNSVDGVKYLLGQVNRSCRHRHIQSDLVFFGGEDVNSYAENFANTIRSKGWLVANVNAHDAKKQRENLQASTDRLDLMGIATMLLNRRANCYPAQSGVYRNLRTIVRHRRKLVKMKTEVRNRIHTLIDRLFPGFLNEKKSGILPFSNSSLYLMEERFSAPQIRRRQRSALIRNLEKRGTKKAEQVAAKLQEYASQVLTTPDEYTATLQVSLASHVTHYRCLFDGAQQLVNEMAQLLAQTQGAFLTSIKGIGIVLAAGVAAEIGDPLVQRSTDQVASYAGIVPKVKQSGGSQGPSITSHVSKRSNHILKDFIVQSAFHIGRYGPKDLKDDYSRREAAGQHADFGIARRFIRMAMCMMRTSQVYLPPDMRSTHIKAERRAEYYQAMWSYLRDKWRKVGGLNLAFAMDKPLGQWRYIVQEIYGIKLKM

SEQ ID NO: 164594 - protein, 445 aa, unidentified
MSESLISAASEPEWAAFAAIDWADQKNFWRLVSAGSQRYEQGELENTPEAVEAWAVALQQRFGGRPIALILEQSRGALVYMLTKYPHLALFPVHPTTAARYRETFAPSGAKSDPSDTASLLDLLLRHRERLTPLQPDTVETRLLHFLVEQRRQFVDEKTCQSNRLTACLKLYFPQILHWFDDVTTPLVGDLLERWPTLEQLQHAHPGTLRRFFHEHNCRTEKLIEERIAAIYQAIPATQDQAVLEAGKMMTGGLVALLATLRSHIAALDERIADVVSTHPDSVLFASLPGAGPVLVPRLIAAFGTRRDRFQNADEMERYSGIAPVKRASGKTERIGFRLACPKFLRQTFHEFASHSIGQSEWAKAYYEHLRRDEKKDHHAAVRSLAFKWIRIIFRCWKDGKPYDEQVYQKSLRRRGSLLGAALASATCVEWKTVAGFQKLSEKNA

SEQ ID NO: 164595 - protein, 404 aa, unidentified
MIFVGDDWAEDHHDVYLMDADGARLASRRLAEGLTGIGALHELIADHVGEPSQVVIGIETDRGLWVQALGVSGYQVFAVNPLAVARYRERHQVSGAKSDAGDAKVLADLVRTDRHNHRSLAGDSPEAEAIKVLARAHQNLIWARTRHTNMLRSALREYYPAALNAFDDLHDRDALAVLSRAPAPAEGTRLSLSKIRSALKHAGRQRNIDARAHEIAVALRTEQLAAPATVTAAFAATTRATVGIIGELNRQITDLETQLATHFETHPDADIYLSLPGLGVILGARVLGEFGDDPNRYTTAKSRKNYAGTSPLTVASGKKYAVLARRVRNRRLYDAIDHWALGAINHSTGARAFYDQHRAAGDLHHQALRALGNRLVGILHGCLRHHTTYNEHTAWAHRQTAQAA

SEQ ID NO: 164596 - protein, 275 aa, unidentified
MNYNTVYVGMDVHKESFTLCSCKYEDEKASHYQRTPASYKNVLRYLAFLRTIYGEDTRFVCGYEAGCLGYSLYHQLENFNVECVILAPTTMLEQRSKRRIKTDKRDAEIIARSLAQHNYSPVHIPTETDNQTKEFIRMRDDHKAELKKIKQQILSFCLRQGYQYDGSGNWTAKHVKWLRSLKPAGLYKEILDEYLLTYTILTDKLNRLDQRIEELASKEEYTESVSKLTCFLGIKTHTALSVIVEVGDFQRFVSARKFAGYLGLVPGQHSSGDDR

SEQ ID NO: 164597 - protein, 351 aa, unidentified
MPRRSTVRAITTIGIDMGKNTLHMVGLDSRGAIVLRERVSRGRITSRLANLPPCLIGIEAGMATHYVARELAALGHDVKQVPPAYAKPFRQGHKNDFRDAHAVAEAVQRPTTRFVPAKTNEQLDLQALHRVRSRLVSQRTAVINQIRGFLLERGIIVRQGPRFLRHLLSDILARRTDVLSPRMVRIVSDLAGDWRQLDERIETVTDEIETLAKSDDSCRRVMTVPGIGPIISSAMVAAIGSGAAFARGRDYSAWLGLVPKQMSTGDRTILGHISKRGNSYLRMLFIQAARVILVRPANWPKHGFGAWLLRAIQRLHPNVLVAALANKLARIAWTVLTQERSYEARITKAAA

SEQ ID NO: 164598 - protein, 418 aa, unidentified
MLFVGDDWAEAHHDIEIEDESGRVLARRRVPEGLAGITTLHELVAEHLDPTGELDQVLIGIETDRGPWVQALLAAGYVVFAINPLQVARYRERHSPSGAKSDPGDAHLLAEIIRLDRAHHRRIAGDSQIAEHVKIAARAHQTMIWSRVRQVNTLRSLLREYYPAALAAFGTDLAGRDALAVLTAAPSPDLGRRLSQARIETLLRRAGRQRNVSATAAKIRAALRSEQLAARPGVIGAYTASASALLAVLTAVAAQTEVLAGQVEQGFGQHPDAEIYRSQPGLGDILGARVLAEFGDDPGRYADAKARKNYSGMSPITKASGTKRVVLARYARNRRLGDALFLQAYSALRTSPGARALYDPSVRAEPPTTKRCAPSPTGSSASSMAACEATHSTTSTSPGTANQTNSALQLDRLRSWDV

SEQ ID NO: 164599 - protein, 413 aa, unidentified
MVQVVHERCCGLDVHQKTVVACLITPGPDGQPQKVIRTFGTMTADLLELADWLRAADCHPVAMEATGVYWKPIWNLLEDEFALLLVNARHIKAVPGRKTDVKDSEWLADLLRHGLLRASFVPDRPQRELRELTRYRTSLVGERAAEIQRLHKTLEGANLKLGSVTSKVLGVSARQMLDALLAGTTEPAVLADLAKGRLRAKRPQLERALAGQPGLHQHFLLAQQLAHIDFLHETLEQVSAEIAKRLHPFEAAVERLDAIPGVGRLTAEILLAEIGPDMSRFPTAGHLAAWAGMCPGNDESAGKRRRGRARKGSPALRTALLEAGQAAARTKDTYLAAQYHRLVPRLGKKKAAFAVGHSILRIVYYLLLRDTTYVDLGGHYFDERYRQQRERRHVRGLEHLGYAVTLTPKEPAA

SEQ ID NO: 164600 - protein, 345 aa, unidentified
MTMLADGVEFVVGVDTHKQAHTATVVDRLGGVGETFEFSADPAGYRSVLGLVEAHGGVRVWAVEGTGSYGAGLTGFLQDCGERVVEVERPGRPVRRNGAKSDAIDAVRAARQVLASKDLIEPRRGGEREAVRVLLATRNGAVVARTKALNGLQALVVTAPERLRSRLRGLSTTQLTRQASRLRLSAAQPIEYQATVRAMRACARRAIACGQEADELETELGRILTDQVPHLLAEPGIGPISAAAIYLAWSHHGRIRNDAAFAALAGVSPIPASSGQTTRHRLNRGGDRQLNRALHTITLSRLSCHPETKTYATRRLTEGKTSREIRRCLKRHLARRIYKLLEHTP

SEQ ID NO: 164601 - protein, 425 aa, unidentified
MNYKQNEKINQVKESTLVVGIDIGSTTQYARAFDWRGIELGKVFPFSNSREGFESFKAWMKHLQDKYKKLDAIVGIEPTGHYWFDLGAYLEDEGILLVMVNPYAVKQTKELDDNSQSKNDRKDPKVIAKLVTEGRYSAPYTPDGVYADLRIMVANRKRLIREMTQIKNRFARWFAIYFPEYTDVFGDYEAQSSMLLLKKVCTPEAIVELGAEKINQIWRDAKLRAVGMKRATTLCETAKRSIGLKKGSSAARYEMKLLLEDYEYKKAQLDAVMEEIEKLCRKIPESEQMLAIKGIGVITVAGFLAEVGDVRRFESPRQIQKLAGLSLRENSSGKHKGQTTISKRGRSKLRAVLFNAAIPLIAKNPEFKSLHEYYTTRANNPLKKKQSVIAISCKLIRVFYAILANGVTYDAQKLISDIHRQPQAA

SEQ ID NO: 164602 - protein, 323 aa, unidentified
MTKHITICAGIDTGKRKLDVAMEGSREQLQVENTSEGHVVLLAWLRQHRVKRVGIEASGGYEQPVVAELRRKRFIVVVFQPAQVRAYAKFHSQRAKNDKIDAALIADCTAAVRKIHAAPDARLLPFAEQLTMIDQIGEDIARLKNRIESCRNARIKELWKEDIARLEKREKVELKALTASIRKHPDLAKRLDLINSIDGIGPPTAVAILVRMPEIGQITREQAAALAGLAPYDDDSGEQVGARHIDGGRQRLRRALYTAALAASFRWNSQLISLYQRLIASGKEHKRALVACARKMLVFANTIVARGTPWQDRPPEKAVLTTG

SEQ ID NO: 164603 - protein, 355 aa, unidentified
MKLYKKNTEFVQDKQVFCGIDVHDKQWTLAFFCDGEIVETIQTQPYYKALLNRLANYQSARKISFVYEAGFSGFVLYRQLSKDGYSCIVTPPSRIVKTDQKVKTDKRDATKLAMLLSAHLLKAVTVPPVDVEADRSIVRRHDQLVKSQTRSKNHINSFLKLHDLKPPADIKARWTKKHLAWLAHISFDQPAHESTFKQLLNNYCTIRNEIKETLLFLRKLSRDPRYQENYQIVTSVKGVGLITGMTFLLELFDMSRFSNVNKFSSFMGLTPSQFSSGDHVRLGHITREGNDHLRRVLVESSWTVIRYDPILREKYLRLRARGVNGKKAIVAVARTLAVRLRRCLLDKTPYMVGID

SEQ ID NO: 164604 - protein, 313 aa, unidentified
MIGIDVSKDSLSVCCWDDQGKQPRWHAQFENSPAGIGQLLARSTAQEPWVLEPTGMYSRLVARTGVAQGRRVLQASPRAAKQFLASVHPRAKTDRLDAQGLAQYASSVELKPVVIKSDLMQRLSELLCARRSLSRSLSTFRQQAQALPEARAQLLAAASAVAQHLRELDRELQHLARQEPQIQRLMQVPGVGPVTATALIVRLISVPFATSDQFVAYLGLDLRVRDSGQHRGQRRLTKHGDAELRRLLYLAAQASLRSKDATFASQYQRERDKGLASTQALCAVARKLARVAWSLVRHEAEYDPRRVYSQPAR

SEQ ID NO: 164605 - protein, 358 aa, unidentified
MTDTATSPIVIGGVDTHKDLHVAAVVDAHDRVIATEAFSTTRAGYRAMLRWMRTHGDIARVGIECTGSYGAGVMRHLDQAGIEVLEVTAGDKADRRKRGKDDTIDAEQAAHAAYARRRTVTPRAHDGMVESLRALKIARSTAVKARRVALQMIHALIISAPEELRDQLRNMTRMQLIRTIASWRPDATGYRDPVTATKMSLKSLARRYLELHDEIADLEIAMHALVDELAPDLLARPGVGYESATQLLITAGDNPDRLASEGSFAMLCGTAPLPASSGKTTRHRLNRGGDRAANSALHMIAVSRWRIDPATKEYVARKKAEGHSNPEILRLLKRYIARETYYLLRNQHRAIHQRATTA

SEQ ID NO: 164606 - protein, 345 aa, unidentified
MVTTIGIDPHKATHTAVAIDRSEQVLAEITIPADRYQTTKLVDWAGGLDGDGRLWAVEAAGGLGYLLSQQLVACGEQVVDVPAVLASRVRVLSSGRSEKNDPNDARSIAIAALRQPSLTVVHRQDHVQVLRMLAKRHRELTSLRTQAVCRLHAVLAQLRPGGHSRHLSAKAASRMLQGIRTLDVVGEQRRQMAHTHLGDIRRLDRDIKANKALVRKAVTAADTTLTDIYGVGPMVAAFVIGYTGDPSRFTTADHYAAYNGTAPIEYSSGGSKKHRLSLRGNRVLNHAIHMAAMAQISKPTSAGWAYYDKKQTEGKTKKEALRALKRRISDAVYRQLVADQKRHQV

SEQ ID NO: 164607 - protein, 342 aa, unidentified
MQAVTLGIDLGKRWFHVIGLDTGGHVVMRVKLNRAQLHHLFATHPACVMALETCCGAQHLGRLAASHGHDVRLIPAQHVRPFVKSQKNDFNDATALAEVARLPSMRTVPLRTVEQVDVQAIHRARQRVIENRNGLVNQIRGLLLDRGIAISQGLRPLHAAVPGILENAQNGLSPQFRELLATLFEVLRQTEMVVVQFTEQLHALAREVRVYQRLQTVPGVGPLVATALVSAIGNATTFRTSRDLSAWIGLVPRQHTTGGKPRLLGITKRGNSYLRRLFVQGARALWVWKDKRDDPLHRWIRRLGLRMHPHVAVCALANKLVRICWAILRGDDVVFSHENAAA

SEQ ID NO: 164608 - protein, 500 aa, unidentified
MEIVYQCCTGLDIHKKDVKACLITTGPDGEIHKEIRTYPTKTQDLLQMRDWLKEAGCGHIAMESTGVYWKPVYNMLEGYFELLVVNPQYVKALTGHKTDVKDAEWIADLFRLGMLKASFIPSTDQRELRELTRYRTRLGEERVREVNRLQKTLEDTNIKLGDVVSDVMGKAARMILHALANGETDPHRLASFAVGRVRASQEQLERALTGQVSAHHRFMLGEQLKQIENLDAAIKRVSQEIANRFGGPETDPITEKPQIVPSKEEKPEPTKPTQESVSSGTNDQVVGPSLLDGPMSPSSTSQPAEGSRAQRDEDIQRAIQASESGLCGRATQLLSWHQAMELLCSIPGISERAAQGILAEIGLNMGQFPSARHLASWAGVCPGNNESAGKRFSGKTRQGNPWLRRLLVQVAHAAAHSKKSYLAVQYRRIASRRGAKRAAMAVAHSILVIIYHVLLEQKPYQDLGSNFFDERDRQVIEKQLVRRLERLGYRVDLQELPQAG

SEQ ID NO: 164609 - protein, 327 aa, unidentified
MLSITLGIDISKNKLDVALYRADRYKEACFSNDKDGYCRLSKWLKKLQAKEATVCIEATGRYGDGVSLHLHERGHKVSVVNPARIKAYGDSQLKRNKTDGEDAKTIAHFCATQKPDLWTPPPAAIQELQALSRHLETLKADRTRELNRQQSGLTVAVVLDAIEEHIAFLNKQIAAIEQQISDLIDQDPDLCQQRDLLTSIPGIGELTAAKFIAEVPDVTRFESAGQLAAYAGLTPRQHSSGSSVHRRARLVKTGNGRFRTLFYMPALSAMSHNPIIKALATRLTARGKNRMTIVGAAMRKLVHLAFGVLRRKRPFDPDYLVNVQVTT

SEQ ID NO: 164610 - protein, 338 aa, unidentified
MDYFVGIDLHSSNSYIAIIDNENRRVFKKKVKNDLQNVLHVLEPHRKQIKGIVVESTYNWYWLVDGLMEKGYKVHLANPSAIKQYEGLKHSDDVTDAFHLANLLRLGILPEGYIYPKEERPVRDLLRKRLQLVQQCTALILSFENLLTRNLGTRINVNEINKLTEEDVEDIFQQEHLILSGKASIATINFLGTRIQQIEKAVHKVAKLRSEYKLLMTVPGIGKILALTIMYEAGPIERFAKVGNYASYCRCVGSERISNGKKKGKGNRKNGNKHLSRAHVEAAHNALRHYEYVKRYYQRKMAKTNNVVARKAIAHKLARACYYIIRDQKAFDPGKLFV

SEQ ID NO: 164611 - protein, 415 aa, unidentified
MEIIYSRVAGIDVGKREVAVAVRMPGDIPGQRRQLVRKYKTFYQVLREMVAWLVQQGVTHVAMEATGVYWKPVFHALCEAEQIEVLLVNARHAKNVPGRKTDVKDSEWLAQLLECGLLRGSFIPPKDIAAIRELTRYRKKLIEERTRELQRLSKVLEDGGIKIDSVASSITTLSARDMIQALIAGERDPRVLAELARGVMRNKIPDLTMACAGRFADHHALLARMHTDHIDHLTTMIEVLDHRIEEVVDPFAEPLRLLRSIPGIGERAAQVIISEIGVDMSRFPTAAHLASWAGLCPGNNESAGKHKSGRTRKGNVEVRTILTECAWSAGRTGTYVGAQFRRMHRRFGKTGGGKAAIAIAHTLIVIIWHVLHDRAEYRDLGADYFTRYDNPDARKRRLIHDLQSMGYEVTIAPAA

SEQ ID NO: 164612 - protein, 317 aa, unidentified
MEKITNFFVGVDVSKNWLDVHIHPKNESLQFDNSDIGIEKLLKVLSKHTIEQIVCESSGGYENLLLKLCCDAGYKIWQIDPKRIKAFIASQGVKAKTDKIDAKMIARFASQQQSEYSKYKRSDDNEKVRALVRRRADLTEMAAMEKKRLKGPSGYYCRERIESLLAVINKDIESLGIEIKNLIEQNEEMKERKEILESIPGIGATTAAALIADMPELGKLENKQAAALLGVVPYTKQSGMYKGIEVISGGRPAPRCALYMAALAASRYNPTMKIFYNRLRTAGKKPKVAIVAVMNKLIVTSNAMLKKKMKWSVVATS

SEQ ID NO: 164613 - protein, 338 aa, unidentified
MTIYAGLDVSDKTTHVCVVDAEGAIVWRGVCATDPEVIAKTLERHARGLVRVVLETGSLSSFLYHGLIERDVPAICICARHAKGVLSTRVNKSDPHDAEGLAQMARTGWFKAVRIKQEATHLDRAQLKIREQLTGSRLAMTNQLRGMLKLFGLRLGKVTTPARRAERLAALFAQKPEIKEIMMPLIESIEALDAQLKRSGKLVAARAAADPVAARLMTVPSIGPIAALAFKSSIEDPGRFARGEDVGAFAGLVPKRNQSGERDYKGRISKAGDAMLRSALYEAANVLLARVTRPCALQTWGRKLAETKGPKRARVAVARKLAILLHRLWQSETEFCWN

SEQ ID NO: 164614 - protein, 320 aa, unidentified
MNTYCGLDLGVKSSAFCIVDEKGKLIAEAEIPTDEKCFERAFGRADMMRVVVEACPLAEWACQLLEELGHEAIIIDARHAKAVIRTKKKTDQVDARVILSFAQSQRLPIWSPESKSPRQLYQLVVQADAIRADLRQWANRRHAQEYTPDVPEAVKKAQRAIVRSLTQQLTKVEEAITLLCRTDKELKEPASGGLVTITGIAHLSAVKVLAYGGNALTERNRKELTAHAGLASCHHQSGTSARGKSRLAKQGDRRLRSAPYMPTLVGIVHNPVLKQFYEHLLQMGKPKMVALVACMRKLLLIIRSMLINKKPFNPELLPLT

SEQ ID NO: 164615 - protein, 458 aa, unidentified
MGYNGLPPAAWWSGGRGIADLERAVERERRSPMDFTVMRDVFATAHADSVVLACDVHGDFITLYAKVRGVRVERVFRNRTDSIVEELEGMKATARKAGIKYVLLVAEPTGVHHRVLMRVAEALGMETAWVSGEHVSKMRVVETNDTGKTDTKDPKVIHTLARMGKTLRHRSLVEPYNLLREWHKTYDAAEDNVVAAKCALHNVVRAVFPDLGFSKDFKFGLAGCVLGRRYGFNPYRIGPMRPSRLSAALRKAGVRIQASTLEELVQRARVSAQKGPGEREATVLESRVVQLYEDLDLHQKRKEKAKAAMVELYREARKLDPKLPEGVHGVISTFYLARIVAETGPLSDFPSARQLLRFAGLNLRERNSGKSRGKTKISKKGRTLLRKVQIHMVLPMVREDAVYGEYYARLRKSGLPGTKAMTAVARHFLKVLYGWYRSGAAFDRDRMFTCESQYTQVA

SEQ ID NO: 164616 - protein, 360 aa, unidentified
MALNVGCDLHKKYAVFVAMDERGKASPAVTVPCDSLELSSHLHRYPPGTPMAVEASGSWYWFIDLVEAAELDARLVHPLEAKKRMGGRNKNDRLDAKGLAMLLLNGTLPEVWIPPAPLRDLRGLVRSRLALRRHTTTLKNRIHGALRRYGQYEPGEAKDLFQGKGRVQLSVYVGALPPETRLATRHEWELVDEAERHIEELEKRIHLGIGQLGYVRLLKSLPGVGDILSAAIYLEVGAVDRFPVAARLASYSGLTPTVHESGGKRRMGPTSRQANIYLKWAFVEAANCIVRHKHRYADRHVVHLYDRLRAKGKNHSQAAVAMARHLAEATWWILTKKQPYREPAPATMSSSENGSARQSV

SEQ ID NO: 164617 - protein, 340 aa, unidentified
MDIITIGLDIAKITFHYVGLDKYGKQVHRKKLRRGQLLSYFANFPACTIVMEACSGAYYWQREFIKLGHKVKLLPAQHVKAHLRGNKNDYNDALAIAEASRVPEMREVAPKTIEQQSMQALHRLREGAVDDRTTLVNRVRGLLSEFGIVFNQGVKNVREGLPSVLEDATNELTHTFRDALGLKYTQLLQLDESVKKFNQLIKQASEEHKEIELLQSIPGFGSIVSSSYYSVIGDGRAFAKSRDVSASLGVVPRQHSTGGKTVLQGISKRGDKYLRKMLINGARSVVNHAHKKDDALNVWVTRLVETRGRNKATVALANKLARIAWAVTVSGKPYQENHAI

SEQ ID NO: 164618 - protein, 410 aa, unidentified
MKIAGIDVHKKVLMAVVVDASLPEEKPARRRFVTMPSELHRLLTWLREQGVEEAVMESTAQYWRSVWLELEPHMRLHLAQAFSNRAPRGRKHDFKDAERLVRRLIADELILSFVPSGEQRNWRGLTRMKLQLTRDRVRLQNQIECLLEEMRIKLSIVVSNLLGASGLRILRALAKGETDPQKLAQLGGERLQCTEEQLADALTGRAQPVHGAMLALQLERLQLIDQQMAQLNSMIAAAMKPHQDAVIRLAEVPGLGVDSAQQIIAEVGAQASTFPSAAELTSWVGTCPGKEESAEQNHSSRSAKGNKYMRRVLNQAAHAAVAKKGSHFQAVFRRLLPRLGYQSAIWAVAHRLCRLVWKILHEGVRFIEQGHEVAPREKKKRAQMLVRALRKLGYEVTITPINQVAPMAAV

SEQ ID NO: 164619 - protein, 413 aa, unidentified
MAVSCGIDWSEEHHDVAVVDADGRLVAKRRIGDDAAGFGQLLEVLAEAGDRPEAPIPVAIETTRGLLVACLRATGRPIYAINPLAVARYRQRHAVSGKKSDHADAVVLANILRTDRAAHRPLPADSELVRAIAVLARAQQDAVWDRTQAHNKLRSLLREYYPGLLAAFRTTRGGIMRPEARALLAAAPTPADAARLTRPELVGLLRQAGRQRRLATHAARLYAVFAASCLRQPPLVEQAMGRHALALLGALNTACANADELATATRQAFDQHPDAKLITSFVGLGQLTGARVLAELGDDRSRFAAAKAVKAYAGAAPVTRASGKSLLVTHRRVKNQRLATAGYQWAFGALTASPGAHAHYQRRRAAGDAHAAALRNLFNRLLGCLHHCLQTQQPYQEHAAFAPPGWQHRPASA

SEQ ID NO: 164620 - protein, 327 aa, unidentified
MMFIGIDISKEKIDLSWLRDQLTNKIKTKVFKNKRQDFVTIEKWLLNTTKSAASELVITLEPTGVYHEALMYFLHEQGFNIILANPGKAKKYADALNIIHKTDKSDATMLAHYGCAKHAVVNYWQPEALEIRELKALIRRLDALESNRQREANRLEASEFSNVSARVCQSIKVTIAFLDDEIKQLKSDIDNHIDNEPDLKRNRKLLESIPGIGPVLSRELTYLFAAKKFNKAKEAAAYCGLIPRHNESGKLKGRTSISKLGPARIRCKLYMAAIVAGQWNKTIKRHKLTLINNGKTPMQAVCANMRKLIHICFGVIKNQEAFKLQES

SEQ ID NO: 164621 - protein, 449 aa, unidentified
MGKGSGITRGDRRRNARKARLRVLVPHENAVAGLDLGEKKQALAVTGADGEVLARRSPRVSVHELGPYLDRALEQALAAGYAGLSVACEPTGSRWMVVQDLCEERGLPFVCVQPLVSHVAREQEDLTGDKTDEGDSGLIARLARELHCYEPERLEGAWAELRDEGRRRAQLITNATAAKQLIRDKLGLVAPALLESACEPFDSATWLASLEVVLERCGGDTAAVAAMGYAAFAAAAAAALPGWGGKRAGGTCRQLFSALGDGRGVTRMRRAALRRVRGALADLKYARARRAQAETEMIALLGELGVDADRICEIPGLSPATLAAILAETGDLHNYESSSSVVKHAGMSPARNESGSFRGQAKISRRGRPVLRLAVWRATWPVLRHCGVLAAKHAALTGRDDDSKLTPEQARVACAASLLRWIWSLAVHGTRWDARIAAGELGHHHAMAA

SEQ ID NO: 164622 - protein, 384 aa, unidentified
MRAAKKRGPGPSHLLITPDIAGNVVGVDPHKQTLTATIADPRGGIVASEHFRVSGDGHRALEAWALAFGPVARWGVEGASSWGRHTAMFLCGRGYDVRDVCANRTPRSDRARQRGKSDVLDSERIARETLAHSLLPKAFKRAGEDQGPDEHHQLLALWHNRRRSILTSRQHLLNEAEHLLCELPLELRDQLPDSKAVRPRLAALAARNRRRRYDAPTRLRLALLDGYAAQIAALDREEKTVVGELRALVRTSGSTLADLCGLNTRSVAELLVETGDVRRFTEGGFARFNATAPLPASTAEGPGEPVRHRYNPGGNRRINRILHMMAITQLRCEPRAQAIFANARKRGHTKKEARRILKRHLSDVIYRRMTRDQAAQLAQPLLAA

SEQ ID NO: 164623 - protein, 321 aa, unidentified
MTYVGINVSKLTFVVAYSSAKSSKTKTFKNTAKGIREFIKTISVDEHHCVMEATGNYSTLLVYMLSEFGFTVSLENPLKIKNFSRVMLSVIKSDEIDARLIALYGEKMQPSPYRMRSDSILILKQKRTVLRQLKKQLIATSNLKGSMEVLPIFDSKCKKTIDKTIAFLEKQIKYMEEELASLANDEFKKQMDLLTSIKGIGVTLATALIVSTGGFTYFDNAKQFTRYLGLSPTYQQSGTSVNVKGHINRNGDPVLRSQLYVAAFSSLRCNTECKACFDRLRSNGKPGKVAIIAVANKLVRQAFAVVTQNKPYIDGFISVKP

SEQ ID NO: 164624 - protein, 430 aa, unidentified
MDYSTQNKKIEAVTEKTLVIGIDVGSETHFARAFDHRGIEFSKKPFKFSNDEAGFAEFKTWILEHMKAHDKDKVIPGMEPTGHYWFNLGKFLQDNDMKPVLVNPHHVKKSKELDDNTQNKNDRKDPKVIAGLVREGRYMIPYLPDGVYADLRTASNMRFQVQSELTRILNRISRWFSIYFPEYKTVYGNLDAASGILVLKKAPLPEDILTLGVDGINKIWRDAKMRAVGKKRAQTLVDAAEHSIGSKEGAISARMEIRMLIEDYESRKVRLQEIMILIEELVAKIPMAEKLMEIKGVGLKTVSGFLAEVGDISRFKNPKELQKLAGLALVENSSGKHKGETTISRRGRKRLRYLLFEVAMSLVAKNYEFAELHHYYTTRKQNPLKKMQSLMVVAEKLIRVFYVILTKGVDYDPKKMTEDIKRPHDSSQAA

SEQ ID NO: 164625 - protein, 375 aa, unidentified
MQKKVRFLGLDVHAETIAVAVAEADGEVRSLGVIPNRGESIRKLVKRLGPAEHLRACYEAGPTGYVLYWQLTELGVECVVIAPTLVPVKAGDRVKTDRRDALKLARSHRAGDLTAVWVPDAASEALRDLVRAREAAKQDQLRARHRLSKFLLRTGQRATAGVNAWTELYMAWVRQLRYEQAGQEATRLDYLHEVEHMGARVKRLEEAITEAVKLASPQVQEVVRGLQALRGIAEISAVTIVAELGQIARFETARQLMGYSGVVPRENSSGQRQQRGGITKTGNAHLRRIAIEAAWSYRLKPAVGPGLRKRQKDVPESIQEIAWKAQLRLHKRYARLAAAGKDQRKIVTAVGRELLGFIWAIGVKVETAARQSIAA

SEQ ID NO: 164626 - protein, 383 aa, unidentified
MNDLIRIGVDTSKSVFQLHGVNAAEQPVLRKKLRRRQVIEFFQKLPATRVGIEACGASHHWGRELSALGHEVVLLPPHRVKPYVERNKNDAADAEAICEAMSRPRMSFVPVKTAEQQAALMLVGVRDQLVGRRTQLSNAIRGYAAEFGLVAAKGTDKIEPLLVRIASDENLPPLAKDLFATLGNEYVRLKPELRKIEGKLMAWHRDNELSRRLAEIPSVGPIGATLSVMKVGNPHAFRSGRDFSAWLGMTPKDHSTAGKVRLGAITKAGDEALRSVLVAGATSVIQQVRKGRGRPSPWLVALVKRKPPKLAAVALANKTARIIWKLMVSGERYNPQRAPQRFVPPTDSLAPGTRRQGQAACGGDLRSALTACALRAPSAPPSA

SEQ ID NO: 164627 - protein, 463 aa, unidentified
MKKARKKRSRKIKAAAPDAALSTTVHPDAAGIDIGAEELVAAVPPARCAGDTVRTFTSFTSGVHALRDWLLECRITTVAMESTGNYWITAYAVLEDAGIEVCLVNARHVKGVPGKKTDVQDAQWLQQLHAAGLLRKSFRPAKDIVPLRYLMRHRSEMVAEGARQVQLMQKVLTEMNLKLQHVFSDVDGVSAQAIISAILAGERDATRLADLRDHRCRSPKAKIIEALRGDYRAEYLFVLRQCQQRWEQVNASLLACDAEIGRLCASISGEGQQSGPLPLAENKRQHMPQKNSLAMPVFAEGWRFYGVDLSAVPGVGSAVLGTFMSELGTGSQIKRAFRSAEAFSSWLGLCPDNRVSGGKVLKAKTRKVVSRVAAVLRMAAQTLRNSEHKLGEYCRRMKARLGKAEGITATAHKLARILYAVITRRVPYHEDEAFKQTPASKNRRLLNLHKQAAKLGFQLTPAA

SEQ ID NO: 164628 - protein, 456 aa, unidentified
MKIPQSTIRLLTGRLVKILLNREVSTMKSNTQNAKIEAITEKTLVLGIDVGSEMHYARAFDYRGIEYSKKPFKFSNTEAGFATFKEWILDLKERHEKDKVVPGMEPTGHYWFNLGKFLQDNEMKPVLVNPHHVKKSKELDDNNPTKNDRKDPKVIAGLVREGRYMIPYLPEGVYADLRTASNIRFQLQAELTRIQNRISRWFNIYFPEYKTVYGKPDAKSGMLILKAAPLPEDILTLGIDGVNQIWRDAKLRAVGKARAKILIEAAEHSVGSKEGAVSARMEIRMLLEDYESRNICLQEVMTLIEGLVKQIPMAEKLLEIKGVGIKTVSGFLAEVGDISRFNNPKELQKLAGLALVENSSGKHKGETTISRRGRKRLRYLLFEVAMSLVAKNPEFRELHNYYTTRRLNPLKKMQSLMAIAAKLIRVFYAMLTKGVDYDPKKMVSDIKRPAVYIQAA

SEQ ID NO: 164629 - protein, 372 aa, unidentified
MQSYYVGLDVHSRESVFVVENEAGAIVARGSVPTTINGLKHLRDSCGLPAATDVALETGTSAFFVARELARLELKPVVIDAQEVRRKAQRPEQKSDTRDALELCEGLRRGFYRSIVHVPSPAISDLRTTLSRRRHFIRIQTAEVNAVKRLLRGVGRNSGRRGSLRTDAHWQSLLASDLVPEQLQEHVRHHYAVWRQGAERVRALDLSLGESARQRRDAVKRLETVPGVGPIVALTAIAVFAEVGRFESAKHAASYAGLVPSTFQSGERDAHGHITKRGSAELRAMLCEAAHHARRPAHPLHPHFARVCARRGYKTAVVAVAHRLCRLLFAMLRDGTDFSVTRVGVEEGEFERTTTYKYRLRPKSAGRLPTAG

SEQ ID NO: 164630 - protein, 343 aa, unidentified
MQVVRTVGLDIAKSIFQVHGVDGAGQVVIRRQLKRRYVLAFFQKLPACLVGIEACASSHYWSRELKALGHTVKLMPPAYVKPYVKRQKNDATDAEAICEAVTRANMRFVATKTPEQQSGLTLHRTRHLFIRQQTAVINVIRAHLAEFGIVAPVGRKGVEALLDVVANPTDTRVPAIARACLAALGAQLCRLKEQILEFDRMIIAWHRSHEASKRLDAISGVGPVLATALIASIAEPKAFRSGRSFSAWIGLVPKQHSSGGKDRLGSISKQGDRYLRSLFMAGALAVIRYAKIHGSRHRPWLTALLARRPSKVAAIALANKIARMVWAMMARGERYKEPVALAA

SEQ ID NO: 164631 - protein, 341 aa, unidentified
MQITTIGLDIAKNVFQIHGIDAAEKVIVRKQLRRCQVTAFFEALAPCLVGMEACATSHHWARELTKLGHEVRLMPAKDVKAYVKRNKNDAADAEAICEAVRRPTMRFVRIKSAEQQGQLMLHRARDLLMRQRTQVINALRAHLAEFGITAAQGREGIKELLAIVAQEEGSRLPSDAHASLTVLAAQLQAVQTMIGSLEKRIVAQHRSNEASKRLETIPGIGVIGATTIAAVVPDPRVFRSGRDFAAWIGIVPRQDSTGGKQKLGPISKQGDQYLRRILIVGAHAVLRRARQQPEKYPWLTQLLARRPFKVVAVALANKMARVAWALLAKGGTYRAPQLVAA

SEQ ID NO: 164632 - protein, 341 aa, unidentified
MTVVGGLDLHRRQITFDVLDTDTGQLRRGRVAPAQRDSLRDWLTQFADQHVELAVEGCTGWRFVVEECRAADVQVHLAEPAQTASARGRKKRAKTDRLDARWLRELLEDGRVPESWIPPTHVLEIRAKARLYRSLMDERTGWLRRIHAVQFHHGAARENRLSSTADRERLLGCEALSASGRQSIAVAMRVIDSLDAEADRLRQELITFAGRQPGCRALQQEYGIGKLLSAVIWCELGDARRFHSSDDAVRDSGLDISIYSSDGKRSPGRLTRQGPPLLRWALYEAARCAARPSSPDHAYYEKVAARLGKKRATLSVARKLARRCYHRLRALGDQALAETDG

SEQ ID NO: 164633 - protein, 426 aa, unidentified
MTYRIAGIDVHKRMLAVVIADVAVEGEYQFERRKVGTSPSELCRLADWLVAQHVEEVVMESTAQYWRPVWATLEQRWRLQRLQESDGARSGQLHLAQAQSNRGAAGRKKDFPDAERLVKRLVAQELKLSFVPDVEQRLWRTIMRRKHQLTRNRVQFQNRLECLLEEAHIKLSSLVSDLLGKSARYMLQAVAEGETNPETIAALADHRLRATAPQLRDALGACRDLHPVYRQLLKMALEELKLMEEQIDKLEQEMANLLSAQQDVVQRLAEVPGLGVDSAQQIIAEVGPQAAAFPSAKHLASWVGVCPGEEESAGVNYSHRSPKGNRQMKGLLNQASNAAVKTKGSIFEFIYRRLVVRLGHAQAIGAIAHRLCRLIWMILHQAIRYEERGPAVSPSTTERRAAKMIRELRRLGYRIEPVECKAEGSV

SEQ ID NO: 164634 - protein, 406 aa, unidentified
MEGPIITVDVSKGSCHYQPFIENGHPMRKPKQLSATIDGFQKLGQTIKDLEAKTEREDIPVIFEATGVYHRPLQKYLEDHKIRYYIISPLLSATYRKTDLHSNKTDALDCAHIAKAYYCEKELRQYQAQPQEYKRLYQLSRIYESELVHLRKRKVSLRSMLDIIYPRIDKTFKGNQNLYDPIPMEILKRYPHPSLLLSHREDTIVKTVGHRTGHLKGYTERIVHKIYEKAKECYSGCEINDIEVLKLPNLIENVQEQKKKCDSLLKEMIEIARTCPYFASVVSIVGIGENLASRIIAELGDVNRFDNRAAIVAYAGLNPKIQQSGDIDGLHLKISKKGNKHLRCLLYLGAQCNYRLRKEDPLYEFTKKKRQQTQCPLSSKAAYTASAHKLLVIIYSLCKNGTLYHS

SEQ ID NO: 164635 - protein, 352 aa, unidentified
MSHNSLPNVTIGLDLGDRMSRTYEVDAGGVCLREATVPTTETGITQYFAKRARCRVVIEVGTHSPWVSRMLEQLGHETIVANPSAMFGGGRRRRRNDRLDARFLARQGRADVELLYPIQHRSADAQRDLEHLRARDQLVAVRTKLINHVRGAVKSRGGRLSRCSAEAFAKRAAVELPDVLADAVTPLLDVIADLTRRIAAADQQVAVLIRERHPVAQRLQQPAGVGPLTALAYVLLIEDPRRFHKSRDVGAYFGLVPRLDESGDAAPQLRISKAGDALGRRLLVSASQYILGPFGPDCDLRRHGMAIAQRGGKNAKKRAVIAVARKLAVMLHHLWVSADAYDPDYQLKRRAA

SEQ ID NO: 164636 - protein, 384 aa, unidentified
MRDATTFVGLDVHKREIFVSIVGPWDGGSREMRIANQSAAVRKLAKRLREGSAGSLRCCYEAGPCGYTVQRRFAEEGVECSVVAPSLIPVKPGQRIKTDRRDARRLAELLRGDELTSVRVPTPAEEAVRDLSRAREDVREDLGRCRHRLTKLLLRRGLSYSQGRAWTQAHRAWLRAIELDHPAERVVLADYLLAIEHQEARLRELEARLKEAGESEPYRDGVAALRCFRGIDTITAITLLAEIHDIARFASARALMAYLGLVPSEHSSGERVHRGSITKTGNSHARRVLIEAAWHYRHRPGVGLALNRRRHGQPPWLVAIADRAQIRLNRTYTRMVLQKTKPPNKAVVAVARELVGFIWAVLLDSRALSNERALSNERTRTTRR

SEQ ID NO: 164637 - protein, 322 aa, unidentified
MQGKMTSVRAELAVYAGIDVCKAWLDVYGHPTGQSFRVPNSKKGCKHLALELTSANAGLIVMEATGKLHRLCHRELSAAGFAVAIVNPYRSRKLADAFGQLAKTDAIDARMLALYGEAISPAVTPVPAKTLAELQELVLARQAAKAQETALKNQYGAAESPVLKRLLKALLDAQARLIDGLKAAIAAILSKDAGLKRRFEILASIKGVGPVVAATLVACLSELGVLSGGKIALLAGVAPINCDSGEMRGQRHIKGGRAHVRSALYMAAVCAIRCNPDLKAFNDRLRAAGKAPKVALTAVMRKLVRLANTLITEDRFWTPKHA

SEQ ID NO: 164638 - protein, 366 aa, unidentified
MKKNSTVVVGRKQIFKQARLTIGLDLGDRSSHYCMLDEAGNVILERSLPTTANGMRQAFGRIARCRIALETGTHSPWVSRQLAQMSHEVIVAHARNVRLIGESSRKDDQLDARTLARLARIDPGLLGPVRHRSAETQIQLTVIRARAVLVSTRTALVNAARGLTKSYGERLNKCGTEQMNRGSSEGLSQELREALDPLLREIESLNERIKEYDQRIEQIAKEVHPEVAWLKQVKGVGTLIALTYVLTLDDPRRFRHSRDVGCFLGLRPGRRNSGKSEPQLHISKEGDRYLRTLMVQGAHYILGPFGQDSDLRRWGLKLAERGGKNAKKRAVVAVARKLAVLLHKLWVSGEVYEPLRNSHKVVRAVA

SEQ ID NO: 164639 - protein, 360 aa, unidentified
MNRNANHSMSAGQIIGTMNGLQVFGLDIAKQVFQVHTVDMRTGEIINEQIKRAKVLEHFANRVPCVIGIEACGGANYWARELRALGHNVKLIPAANVRPFVTGNKTDATDARGIWLAIQQPGVKFVAVKTVEQQATLTLHRQRDQLVKMRLMQTNALRGLLYEFGATFAKGTAALFKEVQATLEGLQSQLPQMVADSLREQVERIKVIGEDIAKIEKRLRVQLTGDKNMQRVLAIPGVGTLTATAVIATMGEASAFKSGREFCAWLGLVPKQTGSGGKVRLGHISKRGDKYVRTLLIHGARAALCRAKEPSAWLVALKERRPTNVAIVAQAAKMARTIWAVTAKEQEYQRGHQSVRPAMA

SEQ ID NO: 164640 - protein, 325 aa, unidentified
MRQPQSQVKPQTQVGLDVSSQTLDVHIRVDGKAFSVPNTDAGFDQLCEILSAYDVSMILMEATGGYEDNVACYLQLQGFDVVVINPRFARRFAQSMGRLAKTDRIDAAILSQMAFMIDSGPDRERYIKPVTDEQRKQLSRLSSRRRQVVDLITIEKQRLTHADDYARESINGIISLLNVELKRIESDILRYVKKNFSELANRLLSIPGVGEQAMIVLIADLAELGHVNRRRISALLGVAPFNHDSGKFKGQRRIRDGRQTVRNVLYMGVISATRFNPVIKAFYDSLLLRGKPRKVAIIACMHKLIRIINAMMRTGKPFDTSLHGV

SEQ ID NO: 164641 - protein, 341 aa, unidentified
MKKFIRIGVDLAKNYFQIHALVNEGTPAVTRKLRRSKMHEFFSQIEPCLVGMEACGSAHYWARELKAMGHEVLLMPPAYTKPYVKRGKNDAVDADACCEAMSRPGMRFVPIKSAEQQATLMLHKTRDLLVKQRTMSVNALRSHLSEFGIIAAKGIGRVDDLLDLVQRDTALPNAARAGVRVLARALQGLDKAINDLEDEITSADAQNEMTRLLYKVPGIGKIIASVVPASVPDPNVFKSGRDFAAWLGLTPRQNSSGGKQTLGTITKQGNRYIRKLLVLGATSLLNVVGKRKGALRDWIVGLLAKKPARLVTVALANKLARIIWAMMRTGENFRTETFAKA

SEQ ID NO: 164642 - protein, 418 aa, unidentified
MLVAGIDVGAEVHHVAVVDRAEAVVVKATAFAENAAGYQELFALLARAGARGGEDLPLATASAPPPSALVVMEATGHYWQNLFAALVAKGFAVALVNPLRTHRFAGEELARTKTDRIDCLQIARFGAQKRPAAAHLPDAAVEELRELVRLRERLMQEVVARINQLHRLVDLGFPEFTRYLKDLNTALATAILHQYPTAQAFRGRARKRLAKLSYDGRHQVGAELAQQLIDAAAISVGSQHSSSHQLGVRYACEDLETLSKRLKRLDGDVAGMLQRHQVGQLLTTIGGIGETTAAMLIAELGDPARFASAAALTAYVGLCPGHKHSGKHQPKSSSLSPIGNRRLRRALWMPTLSAATQSNPWLMAFYRRLIQRGKPHKVALCAAMRKLLAAIYSVAKYRRSFIPFLSPPSAVRIDYEKA

SEQ ID NO: 164643 - protein, 411 aa, unidentified
MEVVHERCCGLDIHKKLIVACAVTPGNGGLPRRHVRTFGTMTDELQQLSGWLAEQAVTHIAMESTGSYWKPIFNVLEGSFELLLVNAQHLKAVPGRKTDVKDAEWIADLLRHGLLKASFIPDQDQRELRELVRYRTSLVQERTAAANRLQKVLEGANVKLASVATNILGRSGREMLQALIAGETNTAVMAEFARGRLRDKRPALERALAGRFGPHQRFLVAEILAHIDFLDDTIERLSAEIGERERPFEAVLDRLDTIPGVGRRIAEIIVAEVGPDVRRFPSAGQLASWVGLCPGQDESAGKRRSGKTRKGNRWLRTALVEAAHAATRTKTYLAAQFRRLATRRGPKKAMVAVAHSILRIVYHLLIDEHPFEDLGETYFDQRQRQHVSRRLKQRLERLGYRVQLEPITCAA

SEQ ID NO: 164644 - protein, 360 aa, unidentified
MFGERRSVGLDVHARSVVAAAIDGRTGEVLKARLTPSHADVLEWIARLPGPCAVVYESGPAGFGLARALTAAGWRCEVAASSKLQRPAGDRVKTDARDALYLARLLRLDEIVSVRIPTPAEEAARDLVRAREAARQDLMRARHRLSKLLLRHGIVYSGGKAWTELHDRWLHRQRFDSTATQAAFEDAYETVVLATARRARLDEKITALAGDSEFTPLTRRLACLRGISTLTGFALAVEIGDWERFTGGSIGAYLGLVPSEHSSGQSRVQGAITKTGNTHVRRLLVEAAWHHRTSYRPGAVLQRRWDQAPAAARARAHAGNQRLHARWVNLNLRKKRPVIAHVAVARELAGWCWSLAVLPD

SEQ ID NO: 164645 - protein, 340 aa, unidentified
MEWTVAVGVDTHKDAHVCVALDRLGRQLERASFPASEAGYGACLAWALALGEPAFAVEGCGSFGAGLARVLTGAGLPVWEAERPRRRERRRGKSDTLDALRAARRLLSDGEGLSELRSLPGREALRVLLVERRSAVSARTQALNQLHGLALTAPTRLRERLETLAGERLAEAALRLRPAETAGVDERVLVEVARRLGRRAQALTRELAALDARIAELVRSLAGKLLAEPGVGPVCAAQLVVSSGDPARLRSEAAFAALAGTSPVEASSGRQKRHRLNRGGDRRLNEALHVIALNRIRHHPETAAYHARLLERGKTRREARRCVKRVLARYFYRQLCALLA

SEQ ID NO: 164646 - protein, 370 aa, unidentified
MKSIVYIGMDVHKNSYSLCAIYGKTGEVLGETKIGPDIKLIEKFINTVKNKINEDVDVMTGYEAGCLGYSLYWQLKAKGIDCEILAPTTMQRSAKNKVIKNDRRDAQMIATNLNNGTYKAVYVPNDHDVEIKEYIRMMDDFKDEAKKVKQHINAFVLRLGYRYEGKSRWTPAHIKWLRELELTSMYKEILNEYLSELELLTEKAERFQHKLEELSQEDPYKEKIGELRCFKGIDTTAAMVLHAEVSDFNRFPNAKAFASFCGLTPGENSSGDKNKRLSITKQGNSHVRTILVECAQVLVRGAIGKKGKKVKSKQLGQDVKVIDYADKAVLRLQKKYHQMILRGVNKNIAITAIARELACFVWGVETGHIA

SEQ ID NO: 164647 - protein, 367 aa, unidentified
MKKHSSKQGSLSSTDVELCTTICVDLAKQVFQLAGEDATGRVIYEDRIKSRQAFHDFLLRLPATVTVLMECGPGAQAWARLLQAKGNAVRILPAQRVAEHRSGAKNDRNDTHAILRAGRDTSIASISIKSTTALAIQALHRIRRGNIKRHTALGNQIRGLLLEHGVSMPQGDAAIGKHVPRSLEDASLPLPDLLRELLDELLTDWLSLGERIAGLSRRLEATAREDKVAQRLVTIRGVGPIIATAIVAKQTEPSRFASGRMYSAFFGIVPDQHSSGNKVRLGRMSKRGDGYIRSLMIQGAHAVLSQLRPDSDQPDDRRLLRWLSRLGRKEAAIRLANRNLRIIWALLQNDQVYQHKPNSNPEAAMSL

SEQ ID NO: 164648 - protein, 347 aa, unidentified
MSHKTAATVAPTIGIDTGKNTLHLIGLDDNGAIVLREKIARGRIAARFANVPRCLIGIEAGMATHYVARELIALGHDVRQVPPAYAKPFRQGHKNDFRDAHAIAEAVQRPSTRCVPVKTDDQLDLQALHRVRSRLVGQRTAVINQIRGFLLEHGIAVRQGLRFLRQQLPDILAKRSDVLSPRMIRIIEDLSADWRRLDERIEHVTEEIEVLAHGSEGCRQLMTVPGIGPLIASAMVAAIGNGAAFAKGRDFAAWLGLVPKQMSTGDRTILGRISKRGNRYLRTMIMQGARVILLRPANWAKHSFGPWLTAAAQRLHHNVLATALANKLARIAWTVLMQARSYEARVN

SEQ ID NO: 164649 - protein, 392 aa, unidentified
MVVSVGIDVSKDKHDCFILNSEGEILSDVFTIPNSLDGFTILLQRIRDCSSSQDNIKVGLEATGHYSYNILGFLLDNGLPTYVLNPLRTNLYRKSLSLRKTKTDRVDARTIAAMLLSDAGLKPYTDTVYHNEELKSLTRYRFDKVKERAKLKSSVSRLVCILFPELEKLTPTLHMPSVYALLDEFPGAKQIAEANLTHLKAILHNASKGRYNRDKAIDIRESARASIGAVMSAKSLELRHTIRLIRELDAEIEDIEAAIQSIMNEMHSPITTIPGIGTRMGAMILAEVGDFSRFDSPDKLLEYAGMSPSTYQSGQLKNCYPHMEKRGSRYLRYALYNATKYVCLWAPTFAAYLAKKRAEGKHYNIALSHAAKKLVRLIFAMEKSRQPYCSAT

SEQ ID NO: 164650 - protein, 319 aa, unidentified
MAQNELVVVGIDVAKHKVDVCIRSPLLRQTFENTAQGQRKLVAWLRKHRVNKAVMEASGGYERGWVRVLREAGIEVRIVDPKRVRSFALSAGRLAKNDAIDAEMIAWFAKTFSEAPCQIYDAAHEELLALAKARISLVDLKARLESQSEHAAPSLVQAARRRLLKNLVCEIARIEAAISARIKATPHLAERAEIIESIPGFAETTSANLVAGMPELGQVSNEVAAALIGVAPYDDDSGKRRGERHIKGGRRWVRNAIYMPCVGAATLNNPVLKVYYQRLIARGKEPKVALIACMRKLIIILNTMIARRQKWDSSRYALG

SEQ ID NO: 164651 - protein, 406 aa, unidentified
MDVVYSHVCGLDVHKKNIVACTITPEGKEIRTFGTMTDDLLMLMDWLRAKKCTHTAMESTGPYWKPIYNLLELEEIEALVVNAQHIKNVPGRKTDVKDAEWIAGLLRHGLLKGSFIPNREQRELRELIRYRRSLIEERAREVSRIQKVLEGANIKLSSVASNVLGKSGRAMIEAMIAGETDPEALSDLAKRKLRNKKADLKRALNGLMGPHQKLMLGAQLRHVDYLDEEIDRLDEEIKKRMLPFEEDLELLDTIPGVARRTAETILAEIGSNMDQYPSAAHLCSWAGLCPGQNESAGKRMSGKTRKGNKKLRSALVEAAKAAARTKETYLSSQYHRIAARRGANRATVAVAHSILSMTYYILKRKQPYIELGPTYYEERKRDVIIKHSIKKLESLGVSITVNTTAS

SEQ ID NO: 164652 - protein, 389 aa, unidentified
MTIVAEQYRNVIGVDTHARTHTYVSIDSITGRVVAEETFPTSPPGIRRAIWWMDRVSSGPFLAAVEGVSTYGSLLCAALRDAGIPLTEARPPKRAERRGGKSDAIDAEAAARDALGQQLERLIVPRMGTQRAALRVLLAARRNIEQHQAADRCALTALVRIVDLQVDARRRLSAGQIRTIAGWRRHAGDDLERQVARVEASRLAGSVIALGVQLRANKQQLQELVAVIAPGLLEHAGIGPVSSAVFLAAWSHPGRVRSEAAFASLAGACPIPASSGNTIRYRLNRHGDRQLNWALDVVARSRILHDPDTRAYAARRRAEGKTPAEIRRIIKRYIARQVHRELTFIFASAPTSGQPAVGVGGVPGRGIQEPPSEAQGRGYAVESPERSRA

SEQ ID NO: 164653 - protein, 387 aa, unidentified
MSQSNDLSRSLVALKQDSTLIAVVELSRSTWLVAGIVPSVARHPLKKLEPDAAALLRLLERWRDEALQHGRTIARIAVAFEAGRDGFWLARWLRARGIEAHVIHPTSVAVSREHRRAKTDRLDTELLKRVFLGWLRGEPDHCTMAAVPTLEEEDARRPNREHESLVGERTRIVNRMKANLARLGIRGFKPTLRGASERLDTLRTPEGEALPPNASAELRRDMARLHLVVAQLKEIEAARLKRLVERPDQGPNAMVRLLAQVVGIGVETADMLVHEVLLRNLRDRRAVARYAGLTGAPDESGSRRRERGLAKAGNARVRRGMVQLAWRFLWFQKGSALAQWYRARTADARGGTRKTMIVALARKLLVALWRFVTTGEPPAGVVLCPAS

SEQ ID NO: 164654 - protein, 333 aa, unidentified
MPLFVGLDLSLRTTSICVVEADGSVVWEGKAESEPVPLLKALSRWRKKIRLVGIEACPLAEWLYGALIESGLATVCIEVRHAHRFLSTRPNKTDRNDAHGIADMMRLGHYRAVHVKSKPSLRLRTTLIARKKFVDHMLAIELTIRGLKVHGLKVSAVHRRTFAARIDTLLTDAPELKIAIEPLLEARNLMRKQKAIIDRRLSQMARQDDVCRRLMTIPGVGPIVSLCYKATIDDPSRFRTSKAVAAHLGLTPRVLSVWRDRSVGSHQQMRRQAAATRVVRGSRLASSHRQEVVEPESLGHEARQKGWHQKGARRRGAQIGDHHAQNVGEWRSV

SEQ ID NO: 164655 - protein, 351 aa, unidentified
MESKLTADPKLYIGIDIHKRSWKVHCSTDLFSGKSFSMPPEPEQLKAYVNKHFPDHEVSTAYEAGCCGYYAHRCFESYGWNSLVVNPADIHRKGKERFTKTDRIDAQLISRELKDGRLSSIHVPDRHREALRSLFRRRNDLVKDFRRIKSYIKMQLLYFGIKVPEQYDNDHWSHGFRGWLDHIVFQYPIAKASLDSRMRYFRFIDEDLRLVSSQLRAYCRKHFKKDYYLLRSIPGIGGIVACGIISELGDLRRFNNVKHIAGYVGLAPGVYQSGANSKTMGITPRAHRLIRSYFIEASWQAIRTDPVMQSYYRKHAGKDSKKIIIKVARKLLCRTLAVIKTETPYEIGVVE

SEQ ID NO: 164656 - protein, 367 aa, unidentified
MEWPAPFPSVYYDAVVCEKERNGPMTIVILGVDLGKNSCSVVGVDATGRVVTRRAMRRQTLIDYVAKLPVCVVAMEACCGAHHLGRLFAAQGHEVRLMSPEYVRPYIKAQKNDDRDAEGIAEAASRPTMRFVDLKSQEQLDLQTLHRVRSRLVAERTNLINQLRAILLERGVIFPVGRRKLELGVDGMLAEGIERLSPRLHQLVGELRAEWKLLDAKIGALNTEFIQLARNNAAMRRLTSIPGIGVLNATALVAAVGDASSFAKARDLGAWLGLVPRQYSTGGKARLLGISKRGNTYLRTLLIHGARAALPSLSTTDTPLGRWLNAMIERGVHRNAVVVALANKLARIAWATLRKEAGFDRGYPVAG

SEQ ID NO: 164657 - protein, 318 aa, unidentified
MSAAENSKVSVGIDVSKNKLDIAVHESGAVWSSNNDSRDCPALAIKLKQLQATSIVLEATGGCETLVTAILAAAGLPVIVVNPRQVRDFAKATGQLAKTDRLDCCVLAHFAAAINPPVRPVKTEETQHLEALLGRRRQIVEMLTAEKNRLASNRDRAVSKDLQAHIAWLERRLKASDDQLQRVLKNSPAWRERDQLLRSVPGVGPVLALTLLAQLPELGQLNRREIAKLVGVAPFNWDSGLWRGSRHIWGGRAEVRSTLFMATLSAIRFNPTIKPFYQRLIRAGKAPKVAIVACMRKLLTILNVMLKTQTSWRTVHSS

SEQ ID NO: 164658 - protein, 356 aa, unidentified
MEKLTTVGIDLAKDVIAVCVLDVHGAAMERRVLRRDVFERWAEQLPASNVAMEACGSAHHWGRWFAARGHTARLIAAEFVMPFRKGGKNDTADAEAIAIAARQPTMRFVPIKTVDQQTILAWHSAREGWKEERTALLNRMRGLLAEYGVVIARSADRFLAALPKLSEDSRLPDPVRALLLEAREQFAALHARLARCDTQIAAHARNSPAARRAGELLGVGPVTSSALVATVPDARVFKSGRQFGAWLGVTPRQHSSGGKTRLGRISLRGNVYPRTLLIQGARSTLQAAINTEPSRASRLQRWIIELYARKGYHKTLIAIANKHARILWAMLAKDQHYDASAWQRHPMTQPCASVTP

SEQ ID NO: 164659 - protein, 354 aa, unidentified
MIIIGADYHPGFQQIAFVDTETGEFQERRLQHREEAEEFYRELAAQGRQVRVGMEASGQARWFERLLAELHCELWIGDAADIRTRRVRKQKTDRQDAQLILRLMLEDRFPQIWVPSWENRDLRQLLWHRHRMVQARTRIMNQLQALALNEGLRCKKRLWRDAGREQLESFALAPWASRRRRDLLELLDRLTPTIAELTQAIEQEAEKCPAAQRLQTHPGVGALTALSFVLIIGRADRFQCGKQIASYLGLVPLEDSSGNRRRLGHITKQGNSLMRFLLVEAAQVTVRSDPEWRSKYFHLAMRRGRKIAKVAMARRLAVRMYWMWRKGWDYEQCKKFGSHAGQPENRDGVQSITE

SEQ ID NO: 164660 - protein, 412 aa, unidentified
MDVLIERCAGLDVHKDTVMACVRFPGSDGRRAQEIHEFGTTTAELLALGDWLAAHGVTVVGMESTGVYWKAPFYVLEDAFTCHLLNARHLKNVPGRKTDVRDAEWIAQLVEHGLVRPSFVPPKPIRELRNLTRYRKAQIEERTREAQRLDKILQDAGVKLSSVATNILGVSSRAVLKAMVQGTTDPEVLAELARGRLRVKIPALKEALVGRFGPHHALIVGTILSKLEFLEEVISHLSEEIEEAIAPFGRQVELLETIPGVDRRSAESIIAEIGVDMARFGSSARLASWAGMCPGNNESAGKHRSGKTRKGSKWLRVTLTESAKAAARSKGTYFSAQHARLRGRRGAGRATIAVGHSILVAVYHLLDRNEPFHDLGADFFVGRHDPQRHANKLVRQLKALGFEVNLQPVEAA

SEQ ID NO: 164661 - protein, 330 aa, unidentified
MKQMYFIGVDVSKGKLDVCIIDMQGQVIIEKIIGNTRSAIRNFIEKILRVLKTGKDNILICCEHTGIYCRPLQLVATEMGYSLWLENAYKINRASTDMRGKSDKKDALRIAEYALRYSDRKVLHNEAPEEIAQLRTMLDARNTLLEKLTSLRQQVNECKKFDPDKFALLKDCYGQSIRTLVKELRKMKDKILELVASNEKLAADAKLLQSIPGIGEQVSLNFMSVTNGMTSFETAKQLACYAGVVPFPNQSGTVVRKDRVSRFANKKLKKLLHLAAMAAVKAHGELRNYYLRKVKEGKNKMAVLNAIRNKLVHRMVAVLKRQQPYVHLQR

SEQ ID NO: 164662 - protein, 354 aa, unidentified
MTSSVRHVIGGVDTHGATHHAAALDAGTGKLLGDQQFPVTPAGYGQLAAWLRGFGQVEQVGMEGTGSYGAGLFRYLDAEGVTVIEVDRPNRRDRRRQGKSDPIDAIAAARAVLAGVATAIPKRRTGPVEAIRILRTTRAGVVKARVAALNQISGLIFCAPEDLHATLTGLSRADLITRCARLRVDDTAIADPASAAKFALRALARRVQNFDLEIDDADRQLHILTRATAPATSAIFGAGSDVTAQILATVGDNPDRITSEAALARLCGAAPVPASSGNTTRHRLHRGGDRQANRALWVIVLSRLRWHEPTRAYVARRTAEGKTKKEIIRCLKRAIVREVYIAIKTDFPDLTAIA

SEQ ID NO: 164663 - protein, 324 aa, unidentified
MLSFCGIDVSKDRLDVMVLPEEQCCSVPNDARGWAALVERLRNFSIAAIGLEASGGYERGVARALLAAGISVRQVNPFKLRQFARASGVLAKNDPLDARMIASFVGIMPTRPAQRPTPAAEQLAEMLAVRRQLSAEKVAAENASRLLEDAMLQRLSRRRIRRLAADIELLAERLVEIVTSKVALAHRYRLLTSMPGVGPVLACTLIALLPELGGMTRKQVAALVGVAPYAFESGALKGRRCIWGGRANVRQALYMAAMSASNWNPELKAFHDRLAAAGKKPKVIIVAVMRKVITTLNAMVRDGVVWADRLSSRHTVPTAREPLR

SEQ ID NO: 164664 - protein, 408 aa, unidentified
MRLFIGDDWAEDHHDVELMDERGKRLVKARIPEGVAGIAKLHELVGKALGEAAEDDTEVVVGIETDRGPWVGALIAAGYTVLAVNPLVAARYRERRAVSGAKSDAGDAHMLADMVRTDGHQLRPVAGDSDLAEAIKVVTRAHKTLIWERTRHTQRLRHVLRDYFPAALAAFEDLDAPESLELLAKAPDPASAARLSKSQIAAALKRARRRDVQAKAEWIQAALRAQHLGQPPAVTAAYAASVRALTAVLAVVDAQAHALQQEVAAHFGQHPAARIIVSQPGLGPIIGARVLAEFGDDPDRYVDAKARKNYAATSPITRASGKKRVVAARYVHNDRLIDALMFQASKAIVSSPGARAYYDKQRERGAGYNAALRQVANRLVGILHGCLKHGTLYDEATAWANQAKTVAA

SEQ ID NO: 164665 - protein, 428 aa, unidentified
MDELNRSRLEEFRQLRQEVRHSGEYLIVGIDIAKGQHHAFFGTATGKTLLRRFVFCNDYEGFRKLLDQAEVLRVRYDLKKVVYGMEPTANYHKPLGEYLITQGRMVVLVSGVTVKRNRESLDGRWDKHDAKDSANVADLISQGKCLYYEYPSAELRGLRGLLSLKRRMKKQEQGYRVRIRNHLIAQYFPEMDSSYGRSETEGLAIVRWCFPPSQITEIDVDPFIERVTSRRIRMEQRRRLEGIWEKAGESIGCDAVPGVEHEARVMVDGLRQIREMIKETEGKIQELCEPFLEYQSLLSIPGFGPDLSAKVLGAIGDPDRFQNGKQVLKLAGLDLSADRSGKNSDRAVPEISKRGKADLRYALYQAAFIASTKNPYFMGYYTNKLRGREKEKGIHTKMIVKLSAKMLLIAWTLMKRKEAFNPAYLKAE

SEQ ID NO: 164666 - protein, 360 aa, unidentified
MSTLPVFVGLDYHQSTVQVCVVDAAGKVLLNRACENRWQTLRDAVLAAGRPVRVAIEACTGASDLAQELVDHAGWSVDLAHTTYVARMKRQPDKTDYSDARMLADLTRVGYLPQVWLPPAYIRDLRRLVSLRNSLVSQRRNLKLRLTGLLRDHRVTIPHSRWTMPWIKKVQAPETLPTVGHLIAVEILDQLKDIMARIGRVEDQMELFTQGDPIVSYLRTLPCVGPVTSWVLRAFIGDITRFKNGKQLAHYCGLSPGNASSGKKVADSGLVNTGNTLLRATLIELGQRLARTQERWKTMRTQMKARGKAQCVIVAAIANRFIRAAYYPWKQTELSRIAPTATSLGSGVMNPHTGEVSSSR

SEQ ID NO: 164667 - protein, 347 aa, unidentified
MEKYSRIGVDTSKQIFQLHGVDEAEHPVLRRKLKRREVLSFFAGLSPTIVGMEACGGAHYWARELARLGHEVRLIAPQYVKPYVKRGKNDAADAEAICEAMSRPTMRFVPVKSEESQAALMLAGLRERLVRNRVQLANAIRGYAAEFGLVAAKGPAKLEPLLLRLSTDESLPDLARELFAVQAEEYAQLQAKIAAVDAKLMAWQRANATSRRLTRIPGVGPVIASLLVMKTPDPHAFRSGRQFAAWIGLTPKDHSTAGKTRHGVITRAGDETLRSLLVVGATAVIWQARRGTGRCASPWLLALLKRKPPKLAAVALANKIARIAWKLMTTGEAYDARHALLAVPVEV

SEQ ID NO: 164668 - protein, 266 aa, unidentified
MVYMGVDLHRRFCYLTALDARGQVLWQGQVANDAASLKDYFARWAEPVEVAVEACSFWPAFVDAIQSQVARIVLVHAQRVKAIASAKLKNDRVDSATLAHLLRTPLLPEAWMADLATRELRQATRLQVSLGRERTRWKNQVHAVLHQQGRRPPASDLFGKQGRKWLAEVNLPPMTRHAVDTYLSLIDQLQEKIQVEEKNLRARVRTDHRLRWLVTIPGLGPYSAALVLAEIGDIRRFPSNWQWYSYAGLVPRVRKSAERCWLVLST

SEQ ID NO: 164669 - protein, 443 aa, unidentified
MQDAQPDQSAMPEIAVWIGIDWADQKHAYAMQIAGEERVGRGEIDHTPEAVEEFFTELGRRFPDQMIAVALEQARGSLLFMLSKYGHLVLYPVHSSTMDHYRKSFYPSGAKSDPTDADLILELLRKHPDRLRPFRPDTVATRTIQFLVEARRDAVNDKTRYLNRLTSQLKMFFPQILQWFKEVDAPVVSDVLTAWPTLEHMQAAKPSALAKFFGRHRFSPERSDQLRTALVAAIPATRDQAVIATGVIVVKRLIEQLRVLRASIKEHAEKIEELTTSHPDFEIFASLPGAGKVMIPRLIAALGTDRDRYMTAAELQCYSGVAPVISRSGQQCHTDWRRACPKFLRQTFHEWAWYSTRKCSWARQYYDTQRARKKSHHAAVRALSFKWIRILFRCWKDRSLYDEARYTAALASRRSRQDQPSVKIMWKNIAGFCKPAEIPSENA

SEQ ID NO: 164670 - protein, 462 aa, unidentified
MTVPKTKGSRTKATPLPTSLPAIRPLVAGLDVGSSEHWICGPARADGQPNVRGFGTTTDQLQALADWLAEQGVESVAMESTSVYWIPIYELLESRGIEALLVNARQLHNVPGRKTDVTDCQWLQLLHSCGLLRGSFRPSEAITRLRALQRQLANLVAERTRCVQWMQKALDQMNVQVHRAVTDLTGTTGLAIVRAIVGGERDPARLALHRDYRCRKSAAEIARYLTGTWRDEHLFNLTSALRLFDALEAEIAAYDAQLLTAVESLQPPDRQADPVPPHPNPAKEKAIKARGEQQARTTLWRFAGVDLTRIDGISAGAAQVVLTEVGPDLAAFPSEDQFVSWLRLCPRTPISGGKPLKKRRNGLGANRIAGVLRMAATSLQRSKTALGAAFRRIARHKGGAVAVFATARQLAQLIYRMLRYGHDYVDIGEQAYHQRFLVRRFAALTESARSLGYTLVPTAATE

SEQ ID NO: 164671 - protein, 339 aa, unidentified
MNSMAVGVDIAKQVFQVHYIDPESGEIVNKPIKRAMFLEHFANRAPCLIGMEACGGAHHWARQLIKMGHEVKLIPAEFAKAFNIRNKSDAADARAIWLAVQQPGKPVAVKTETQQAMLALHRMRQQLIKFRTMQVNNLRGLLTEYGEVMGKSRAALDRAIPAVLERVAERLPAVVIDSLREQWNGLTKLDEQVAQIERRMREWKKEDKAVKAISEIPGVGLLTATAAVATMGDPKAFSSGREFAAWAGLVPKQTGSGGKVILHGISKRGDTYLRTLLIHGARSVLEHGKEPGPWVEQMIKRRPKNVVIVALANKMARTIWAVLAHDRPYRRDYVSVKPA

SEQ ID NO: 164672 - protein, 411 aa, unidentified
MEVLYERCCGIDVHKRVLVCCLKCGNKQEIRTFDSNNDEIRELTKWLQQRKCQIIAMESTGSYWKPLYNIFELSGLDAIVANARDIKNVPGRKTDIGDAEWIADLLRHGLIKASYIPNREQRELRELSRYRISLVRERARELNRLQKMLEGGNVKLSNVVSNINGRSARKLLQSMLESDEPLTRECVEGMIHGKLVRKVDAILKAMNGFLTPLQKELIRRVVDHIDDMSQRIGEMDDMLSRYLQPYQEAIEKLDELPGIGKRSAETITIIIETGLDMSRFATDKHFSSWAGLAPGNNESAQKRRRCRVVKGNQTLRTTLVQCAKAASRCKSYFRAQYQRLVVRRGANRATVAVAHSMLIAIYHILKSGKTFIDLGEDFYTQFNRDKKITHHLKQLTKLGWLPHAAEDVAIA

SEQ ID NO: 164673 - protein, 377 aa, unidentified
MSRPILYLGMDVHKESVTIAVLPAEAASPTHVERLPNDFVKLRRWMDRRAETAAIRACYEASGAGYVLQRAMREWGYPCEGIAPSLIPTRPGSQRKHDKYDAAQLARLYRAGELTPVRIPSEAEERVRDIVRCRETFQREALKSRHYILKFLARRGFVYRDGTNWSGRHFVWLRHLASSNSPLAREDALVYGEYLPLLEYKLARRDELDRQIEALALSPALATTVAYLQCFRGLQVHSAMVLACELVDWRRFARPGQLMAYLGLVSREDSSGDRERRGSITKAGNRHCRHALVQAAWSYRHKPKVGTALMLRQQGQPAWVITHAWKAQHRLYKLYHHLAYRKKPQVAAVAVARELVGFLWAVMREVEPVRTETTAVH

SEQ ID NO: 164674 - protein, 343 aa, unidentified
MQTVTTIGLDIAKSVFQVHGQDDAGQVVIRRQLKRRSVLAFFQKLPPCLVGIEACASAHHWSRELQTLGHNVRLIPPAYVKPYVKRQKNDAADAEAICEAVTRANMRFVPTKTAEQQSALVLHRTRHLFIRQQTAVINAIRAHLAEFGIVAPVGRHGVEELLNVLADPNDKRVPELARACLSAFGAQLRRIKEQVLEFDRLIRAWHRSDEMSMRLDEAPGVGPVLATAVVATVADPKSFRSGRNFSAWIGIVPKQHSSGGKNRLGSISKQGDRYLRGLFVAGALAIIRYAKIHGTKHRPWLTALLARRPTKVAAIALANKLARMVWAMMVKGERYKEPVALAA

SEQ ID NO: 164675 - protein, 344 aa, unidentified
MDNHTQYSGFAGVDLAKKVMQIHFVSGDGEITDKQVKRAEFLDFFRNRTKCLIGMEACGASQDWARKLEAMGHEVHLMSPKAVKPFVSGQKNDYNDAIGIYKAIFNGVRRVPVKSTEIRDLQTLRRIRSQVTKDRVKEINHVRGLLAEYGIVMGKSITAFNKGISSALESLKERGDVSPLVAEELQTTVESIKTKIERQKRLDREIEQLARGCKNYENFLKTPGVGPFTAAMLCVLLCDPAIFANGRQFAAYIGLAPRSRGSGGKNFIIGIPSKFNCDSESRAVFVECAQALARYKNKSPWVDGILRRKPKKVAVIAIANKLARQVWAMANKGESFKQMTILTA

SEQ ID NO: 164676 - protein, 375 aa, unidentified
MKKRSFDDKVVVPSKTKSPKERPMNTSKYIGMDVHMATTVIAVVNSVGGTVAEAVVETKPSTLLDFLKSQRGTVHVTFEEGTQAAWLHDLIRPHVAEVVVCNPREIPAQDNKADRSDAKRLAELLRTQRLKAVYHGEHGTQALKELSRSYGAILSDSTRVKNRLKGVFRGRGISCTGTTVYSKKGREQWLKMLDDSAVRSRISKLFKELDCLTELRNEAEKELLAEARKNPATKILRSIPGIGPVRAAVILGFTITPHRFRTKSQFWKYCGLAVMSEITGEYAVIDGRVVRSRKKPFVRGLNINYNHALKEAFKGAATTAAMGAWRSHFDALVANGTRPSLVLLTLARKIASIVLAVWKKGELYDSKKMKIMHAV

SEQ ID NO: 164677 - protein, 376 aa, unidentified
MGQISTVRSRRFLGLDVHKATIAVAVAEDDDQQPQMWDTIPNEPGAVRSMVRKLSRGGVELKAAYEAGPTGYGLCRQLLGLGVDCMVVVPTLIERPRGRVKTDKRDAILLARLLRRGDLTPIWIPDEEHEALRALVRARYDAKEEHHRARQRMNKFLLQMGIRVPAGIKPWTKRYHQWLKEGVQLAQPPAQVVFEDNRRVEQQAEERVRHLEQELRTWSAENPRVALMIEALQILRGIGFLTAATIAIEVGDFRRFATAPGFMNFIGLTPSEHSSGESQHRGGITRAGNRYLRHVMVQSAHHSRHVPNVSRERGERMKEMPKELVEIGLRAQGRLHYRYRTLSRRIGRPKSIVAVARELSGFVLEVGHHIEELRAA

SEQ ID NO: 164678 - protein, 339 aa, unidentified
MLIIGCDYHPSFQQIAFVDSATGECGERKLTHMVEAESFYRTLNGGSVRVGMEATGHAHWFERLLAELNIELWIGDPAEIRAKRVRKQKTDRQDAEHLLQLLAENRFPRIWVPSAENRDLRQLLWHRHRLVQMRTRVKNQLQAIALNQGIRRQKGLWSKRGRAQLESLVLAPWSTRRRQDLLELLDRLNPRIEELSAAIQQTAAQRPEVQRLMTHPGVGPITALAFVLILGVPDRFHGGKQVGSYLGLIPCEESSGGHQRLGHISKQGNTLLRFLLIESAHALVRYDPDWRRRFLHLAMRRGRPIAKVAMARRLAVRLYWMWREGWDYQSTVKFGSHVG

SEQ ID NO: 164679 - protein, 345 aa, unidentified
MDELWCGIDWAEEHHDIAVIDDRGAVLVTERISDDIAGVGRLTELILDHRPEGLNGLPIAIETTQGLLVAALRSAGADVYAINPLSVSRYRDRYSPSRAKSDTADALVLANILRTDCDNHRRLPRDSDQAQAIKVLARAHQDAIWDRQQIASKARSLLRQYFPAFLATFDDLTTMGARTVLRLAPTPAAAAMLRPSTVAAALRRGGRKRGVDIEARRIVAGLRSPHLRQPPSVEDAMGRQAQAYARALATAADNVDSLEAALTTEFTEHPDAPILTSFPGLGTILGARILGEMGDDRERFTTARGLKAYAGTAPVTRASGTKTTVRFRLVRNKRLNHAAYLWHCR

SEQ ID NO: 164680 - protein, 416 aa, unidentified
MIGKKGEIHIMQHVVAFDVSMGKSIMVIYNRYRQCEVEKEINHNRPSFEQLHETLQELMRRSGEKPEIVFEATGVYSKPLERFFQDNNYTYCRINPLEANLQTASMRRQKTDKSDAHELAKSYFRVGREQTYQEKGYYQQMRGLTRYYDELDIEITHLYSRLHAILQLSFPELEQLFTKRSALFLNIVQLYPHPDEVLAHSKTVICNRLKTHTQKRLSLKRVEEKGIALLEAAKTSYPAISRKDVRCEQVKDYASRITDLKEKKAQLVKQMVDLSNERTEYHVLRSFPGIGETTAVRIIGELGDIRRFKNNKQLNAYVGIDIRRYQSGNTHYKDKINKRGNNKLRKILFFMVTAMITLRKKTKNHLVEYYDKLKKQPLRKPHKVASVACMNKFLKVAFHLITHEKLYDYEIASTSS

SEQ ID NO: 164681 - protein, 348 aa, unidentified
MAHFVGLDVSVKETSVCVVDDAGKVIMEQKVPTEPADIIALLTSLGVSFSRIGIEAGPLSQWLVNALTAAELPVICVETRHMKALLTAQQINKTDRNDARGIAQMMRVGLFKPVHVKTLVAQEQRMLLTSRKLLQRKLLDLESDLRGTLRNFGLKVGVVSGGRYEARVRELVEGFPRLAAIVEPLLNVRRVMRQQLAVLHKMLLDTVRGDPVCRLLMTAPGVGAVVALTYRATVDQPQRFVHSRAVGAHVGLTPKRYQSGEVDYDGGVSKCGDALLRTMLYEAAQVLLTHGSKWSWLKAWGIRVAQRRGMRRAIVAVARRLAVVLHRMWVDGSEFRWSKDSAAVPAVA

SEQ ID NO: 164682 - protein, 347 aa, unidentified
MTIIVEPTRAVTGGVDTHLDVHVAAVLDEIGGLLATEAFEANQGGEHRLVRWLGSFGPLARVGVEGTGSYGAGLARLLAASGVDVVEVDRPNRQVRRRQGKTDTLDAIEAARAAQSGRAAGRAKSRDGNVEAIRVLVVARRSARTTKTKSLNQIRHLGFTAPNPLRERLSGLTAARLAVEAASMRPRAGTDAVTFATKTSLRILGRRVLAIDAELVELDTLLSALVTATAPRLLELHGVGIHTAALLLVTAGDNPQRLRSEASWAHLCGVSPIQASSGKVTRHRLNRGGDRQANHALWRIALTRMSSDPRTRVYVERRTADGKPKAEIMRILKRYIAREVFALLPRN

SEQ ID NO: 164683 - protein, 366 aa, unidentified
MTMIGAERPETRVEVILGVDTHLEFHVAVAVDHLGRRLGESSVPTTTKGYERLLCWAEGFGPVRCAGVEGTSSYGAGLARHLKTQGVEVLEVERPKRRQRSPRRNVKSDSSDAERAARAVLASETSGAPKSGDGCVEMIRALRAARRSAMKARTQAANQLQGLRVTAPDELLNRLRGLSTKELVAAAARFRLGDDPRDVPAATKFALRSVARRYEALSGEIAELDAHLDRLVAQVAPELVSLLGIGTDHAATLLIVAGDNPKRLRSEASFASLCGVSPIEASSGKVVRHRLNRGGNRDANRALYMICLARMRRDRRTQEYVARRTAGEAWQEQARDHPLPQALRRQGGLPRANLLRRLFLADRVIR

SEQ ID NO: 164684 - protein, 428 aa, unidentified
MQAVVASERTQAVWEAVIERCCGLDVHQKTVTACLLAGALDQQPSESLRTFSTTTRGLLELRDWLEEHGCSHVAIESTGIYWRPVFHILEDTVTVLLVNACHMKQVPGRKTDLKDAQWIARLLRWGLLKPSLIPPRPIRDLRDLCRYRKKLTEQASAEKNRIQKVLEDANIKLASVVSTVFGVSGRAMLEALMQGVMSPAETADLAKRKLRSKIPQLVEALEGRVNEHHRFLMRMQMEHLEYLEKAIAQLHERIDEKIKPYQHEVDLIRTTPGIDTVGAQHIFAEIGGDISVFPSEGHLASWIGICPGNNESAGKRKSGRTTRGNRWLKALLVQCAHGASQTKGTYLKAFYHRVAARRGKKRAALAVAHKQTAIIYHELSEDKPYQELGENFFDRINQKALEQRLVRRLRSLGYRVDLHPEPVTPQCS

SEQ ID NO: 164685 - protein, 388 aa, unidentified
MEARTVNALPPAAADHAAIRCLLAIELSKKSWVVAINTPLADKISRHTLPGCDWTGLLELIRRVRTRVVRELGRPVEMISCYEAGYDGFWLHRLLEGQGVHSLVVDPASVQVDRRARRAKTDRIDVERLLRSLMAYLRGEPKVWSVVRVPSVAEEDDRRLHRERDRLIAERIQHVNRIKGLCAIHGIYDYQPMRPDRTRRLEQLRTGDGGALPPRHKAEIARELQRMELVLQMLKEIDAERNAIASARMSAHTNAKKIQDLVKLKAIGPEIATVLTGEVLYRPFNNRRELASYVGLTPSHFQSGSTCRDQGISKAGNPKARTTMIELAWLWLRYQPDSAFSVWFRERVGNLKGRIRRITIVAMARKLLIALWRYLETGVLPTGAVLKV

SEQ ID NO: 164686 - protein, 338 aa, unidentified
MYYTGIDLHKITSYLTTVDSSGNIVKQADIKNVAHNFVQYFTGLGSENITTVESTMTWYWLNDLLTSLNIPMILAHAKYVKAIAYAKVKTDKVDSHTLAQLLRMDYIPAAHKIANDKRILRDALRARLKIVQRHTSITNSMQLLLAKYNLTSPDDLDEIPRYQYNQLCEVEALLKEQMLNLEKQLYPSLIPNDDIQRLLWIPGIGKMNAFTIMLEIDDISRFADVKNFYSYCRLVPSARNSGGKSKQRSSKDGSKYLKVAFSDAAIHAVQYYPIIRKYHNSLTRKKNKQIAKTIIAKELASIVYYVLKYKANFNNTFKGKELDHTKSLQWPRVASPYA

SEQ ID NO: 164687 - protein, 374 aa, unidentified
MNSIIYVGLDVHKESYTVCSYRVEDDEVKYPQRLEADYRKVLKYLEFLTKCYGEDVEFVCGYEAGPIGYRLYHQLNDRGVKCIIVAPSTMGVTNNNRVKTDKKDAANIARCLAFRLYSAVFVPTAEDEEVKEYIRMRDDKKQALKKVKQQILSFVLRHGYRYEGGNNWTKVHIKWLKSLGFEGLLKEVMDEYMITYEYLENKIERITERIEEIALGERYAENVKKLVCLLGVKTYTALSVIVETGDFKRFANAGKYASFVGLVPSEDSSGEIQIQGGITKAGNKQIRRLLVESAQSYGRGVIGHKSKELARRQKGNTPRVIAYADKANERLRRKFYRMVLRNGKERNKAITAVARELACFMWGLMTDNIGIKIN

SEQ ID NO: 164688 - protein, 354 aa, unidentified
MDIIGLDLHQRESQLCLGDADGTITERRIVTSRERFTAVLGSRPRARILLEASTESEWVARHLESLGHEVVVADPNYALMYGHRGRHIKTDQRDVAALAEANRLGLYRAVHRVSAPQRQRRRTLRIREHLVRTRTQLINLRRAQLRQEGYRLPSGAAEAAVARYRRLSLPEAVTTALTPLITVLDSLAPVLDAADAAATAAAAADPVATRLMTVPGVGPITALTFRAALDDVTRFADAKAVSAYLGVVPREDSSGGRRRQGGITKVGPRSVRTLLVQGAWTVWRQRRRRTALHVWVEQLAARRGRRIAIVALARRLARILFALWRDGSTYQAAMLPVSSRPPDLRDVARESVAG

SEQ ID NO: 164689 - protein, 411 aa, unidentified
MNPVVGLDVAKGESQVQAFLDKKQPYKKSFKVAHTLEGLASLLDFMKEVEDVSGGRPPIVLESTGHYHTPVVQYFEDRGYLLIIVNPLISYRAKSSSLRKVKTDVIDARHLCELYYKEDLEPYKQRGIQLLNLRNLTRQHENITGMFVQTKLQFQAVLDQVFPEYCGVFGALYSDVSLLTLQTFPTSEETLEAGQEIIANKIKELCKSRSQQWANSQAEKLIAAAAQNPFQKNLYHSLSLSLDMYINMLLEYKKHLSTLESEIDALAKSIEECKIIQSIPGIGEKIAATIISEIGEIDRFNHPKKLVAFAGIDPSVFESGTFKGTLNRITKRGSSRLRHALYMAVKCAIRDCRKKKTTDEIIPRNKRLREFYDKKREEGKPFKVAVIACANKLLHWIYALLKSKSAFQDLA

SEQ ID NO: 164690 - protein, 425 aa, unidentified
MEVVYPTCCGVDVHKKFLVATIVTSDQFTPQYQKKRFSTFNNSILQFKKWLLDNHCRDVCMESTGKYWVPVFNLLEDSINVTIANPKWVRAVKGNKDDTKDSKWIGDLFRLGLVPGSFIPCKAIRILREYTRYRFKLASCKSSEKNRFQNAFTVCNVALDAVVSDMFGKSASSITNYLVSSDPDSFDPQLCVSLLKSSLKKKADEVLESIEGYQMTPEQQYRARLIRSHLEFVENSINHLDTMLNTLVAPYENAIQLLCTIPGVDRTSAITIISEIGTDMTHFTSSKRLCCWAGLTPGNNESAGKKKSVRITRAGVYLKPALVQVAHAAVKAKDNPYYRIKYERIAKRRGKKRAIIAIARMILTAIYHMLSTGEVFNPCDLYQVDMTVELRDKQKEKALKRAVSLLISQGIVQASDILDSTLKPA

SEQ ID NO: 164691 - protein, 349 aa, unidentified
MSEAYDGPQVVGMDLHRRRSVLVRMTADGRKLETARIINSPAELRRVIARAGKWPQVVLEATYGWYWAADTLAAAGARVHLAHPLGVKAFAYRRVKNDEKDAADLADLLRMGRLPEAWIAPVEIRELRELTRYRIKVVRLRTSCKDQVHAVLAKLGIEVTCSDIFGVAGSAWLDGLELPQPYAGKVASLRTLAAALTAEITLLEAAIADLLAHHDGYHAVQALPGIGAVLAAVLVAEIGDITRFSCPARLCSWAGLTPRHRESDTKVSRGHITKQGSPLVRWALVEAIQHVPAGHPLRQRKDDILARRGDQAKHIAKIAVARQLLTWVFYAMRDGQVRALAPATGQQAA

SEQ ID NO: 164692 - protein, 420 aa, unidentified
MTTSNSTPAAAVLVAIDIAKVRNEVLIEAPGHKRRRRLLVLNNRAEHDHLIEVLQAYGRPVVCAFEATGNYHRPIAWRLAEAGFEVRLVSSLALARTREALHNSWDKNDPKDAQVMLHMLRIQATQVYHDPLRAGINDVQELSKTHEAIARAKTEIQHRILTHYLPLYFPEIDRFRGNSRSDWFFAFLHAFPTPASIMVLTKEEFVTAAWDVVGRKVSKTQILMDIYETARSSIGLPLPLDAPAIRMFRMVIDEARSLIRQRNEIEAQADELLRHSPDYQLLRQIPGIGPINALTIIAEAGDLRRFGHHRQFLKFCGLDLSTQQSGQYRGQTRLSKFGNARLRRTLWIAGQVAIRQRENGFRHKFERYIARDRDNPDLRRKAMTAITAKMARVVHAVIKGGSDYRPFIEGRVPGGRTSVS

SEQ ID NO: 164693 - protein, 313 aa, unidentified
MKKTICGVDVSKAKLDVCIEPAHRLASFNNDTAGIAELAKFCREHKVDLVVMEASGGYERHVFIELWEQDISCALTNPRSVRRYAEAMGILEKTDRIDASVIARFADAKGLAPTPLPSQAQLRLKALVARLRQVTDDLTVQKQRRSSMFDNTEMQASVDEVIALLKRQSRSLEGEIASMIDDDPLWAKLADTWRELKGVAGRTVARLHAELPEIGTLSNKAIAKLAGLAPLANDSGKRKGKRPTRGGRAGVRSILFLVAAIVARYDKNIGTFKERLVKAGKEKMVIRIALARKLLVILNAKARDARAQYANAT

SEQ ID NO: 164694 - protein, 459 aa, unidentified
MSRLSNRQDSSEIIVRPFDGLARIHPNAAGMDIGAHEIMVCVPGPDSTQAIRAFGTYTVDLYAIADWLQQSGIRTVAMESTGVYWIPLFETLEARGLQCCLISATAIKRFPGRKSDVLDCQWIQTLHSYGLLADSFRTEADLVALRTLLRHREKLISHRSPHVLHMQKSLLQMNIQLSQVLSDVTGVTGQAIIRAIVTGERNPQKLAAMRNYRCQKDEQEIAKALTGTWRAEHLFVLQQSLGFFDFYTQQIEACDAEIERTYAAIRPHWGDPDNQAPLPPKKAKSHSRNAPKGVQVRFHLRRIAGVDIIAVHGISVSLAQTIIAEIGTDMSKFPTEKNFCSWLGLAPHNEITGGKVIRSYTLKNHNRAGQAFRQAAASVIRSNCAFGAFYRRLKSRLGPAQAVVATAHKIARTVYHMLKFQLEYQTISATEYEQHFREREIKYLQRKAAQFGFALSPQQ

SEQ ID NO: 164695 - protein, 360 aa, unidentified
MEELVMALDHRWCVGVDLHKDTLTACVFCGCCGEVSFQKIACRCRRQIAEYFAALPRPHTVALESVGFYRWLWEMLEPIVEELVLADATQARALAGRRLKTDREDALNIAQLLAAGRLPRSYAPPIEVQWLRDLTRHRNSFSRQHARILHRVKSIMNANNRPGPARMQSDGLIRYLKAQGEKLPARHVEMLWQCVDALTLTERQIAHTERTIGQVVRRESFREVYGILTSFPGVALVTAATVMAEVGDFKRFPDTKAIGRYAGLNPRVYASGGKQRMGHIAKTGSPDLRWVLQQAAWTAIRYDEHVKRIFRESPNGQAARQPPWPSRESCSPGCISPPRKENLTEHRAPGTRSCRGPPND

SEQ ID NO: 164696 - protein, 331 aa, unidentified
MQSQRHVGIDVSKDRLDVALGSEGELWQVSNDSAGHSELLERLSGVKPALIVLEASGGYEAVVAGVLWDAGHPVAVVNPRQVRDFARGMGKLAKTDQIDARVLAMFGEKVPIEVRAPLDAEARELQTMVVRRRQLVEMLTMEKNRRPLVPSGRARKSLDKHIAWLEEAVRRTSDDIDQTVRQSPLWREKEDLLRSVKGIGPVSARTLLVELPELGRLNRKQIAALVGVAPFNRDSGRFKGQRTIAGGRSHVRTVLYMAAVTAARHNPLIRALYQRLIAAGKKKKVAIVACIRKLLTILTAMVRDNVHFTLAPHPGPLPTATAAGRGGKISL

SEQ ID NO: 164697 - protein, 367 aa, unidentified
MKKISTVAMERIQIFKESQRTIGMDLGDRSSHYCILNEAGEVIWESKLPTTPKGIEEVFSRIPRSRMALETGTHSPWVSRQLTELGHEVIVAHARNVRLIGESSRKDDRLDARTLARLARIDPGLLSPVRHRSAKAQIHLTVIRARATLVSARTALVNAARGLTKSYGARLPKCGSEQMNREIAQGLSQELREALDPLLAEIESLNERIAEYDRRIEKVAKEAYPEAALLRQVKGVGPLIALTYVLTLDDPHRFRRSRDAGCFLGLRPGRRNSGMSEPQMHISKEGDRYLRTLLVQGAHYILGPFGQDSDLRRWGLKLAKRGGKNAKKRAVVAVARKLAVLLHKLWVSGEVYEPLRNNNHKVVAAVA

SEQ ID NO: 164698 - protein, 346 aa, unidentified
MSYSTTVGVDLAKNVIQISVVSGRDKELLNRSLTRKKFAQFLGKQKPSLVAFESCATSHYWARAAQRHGHAVRIIPAKAVAPFRQGHKTDSNDALAVAEAARRPNIKDAPMKSIEQQGMQAILRARDRLIQECVASSNHMRGILLEFGITIPQGFAALLRKLPEALEDGDNELPDFYRPTLHCLYHRMLELRGDLEAMTKDVDLMVKNHPVCSKLTAIEGIGPIGAMSLYASLGTGEAFASGREFAAYVGLTPRQYSSGGKANIVGLSKKIGNRKLRSVLIQGALAYVYRMKEPRSSKDRWLKDLIERAGPRRAAVALANKNVRTAWALVTQGTEYQRRERLEMAA

SEQ ID NO: 164699 - protein, 366 aa, unidentified
MARKAQSLFGYQISYDIRISCELGKEATMKKYIGMDAHSSICVFSVVDEKGTEVNQAKIATNGLLLVEYIRSIKGSKKLVFEECELSAWLFETLHGEVDELIVCNPTRNQQYKKAKTDKLDAQNLARLLRGGFLTPVYHDGSKTEWLRALMSGYQDVVDTGVSVKNRYKSLFRKAGLPARGTKLYDDSSLLEDLPRPDQRFVGHSFYRLLEALEKEREQYVAAIGKLGRTFPEIKLLKGIPGIGDISAAKIIAQVISAQRFKDKHKFWSYCGLVRHRMESGGHVYGSRRGWGNRTLKCVFKMAAKSVLTGENELRAHYDELRAKGTSDKSARNAVSRKLAAITLSILKTRRPYDETRILSQAEQAG

SEQ ID NO: 164700 - protein, 506 aa, unidentified
MVSLDPFARMVPIIGGFFIGDPQGIPISSVHIPQIIGSGQPNFEEKKAMEKPSRKTKKEVVDALEQINRNAAGIDIGSEEVYVAVPPDRDEESVQSFPTFTADLQRLADWLKGCKIETVAMEATGVYWIPLYEILEERGFQVCLVNARHLKNVSGRKSDVLDCQWIQQLHTYGLLSPSFRPPDQIVAIRSLVRHREMLVKYRSAHIQHMQKALTLMNLRLTNVLSDITGLTGMKIIRAIVAGEHNPGILAQFRDERCKKSAAEIAKSLEGHYRREHLFALKQALELYDFYDRQLQECDAELEALYQQFDPPDDPGTPPPPPHTSKRRKNQAYFDLAPAVYRMCGVDLTQVDGLDALTVQKVLCEIGTDMSKWPTVKHFASWLRLCPNNRITGGKVKQSGTSPTQNRASTALRIAAASLTHSDSALGAFYRRMRARHGAPAAITATAHKLARIIYFLLKERRSYHDIGSDSYEQQYRSRVLRNLRRQATNLGFRLEPIIPLCTNEVS

SEQ ID NO: 164701 - protein, 343 aa, unidentified
MYYIGLDVHKKTISYCVKDAAGCVHQEGKIGSTRRELDAWVRTLPQPRMIAMEATIFTGWIYDHLLPHAEAVKVAHPLMLRAIAAAKRKNDRIDAAKIADCLRCDFLPECHMASTAIRNRRRILRYRHLVLRQAVQMKNRVSGLLMETGVSYDKLRLHRMGYFADLMSSSEEISDSIRPLLKLCREHIDRSARLDTALLRSLERDPLLADRLQRLRTVPGVGPITALTWALEVGYTSRFRSIKQAISYCGLCSAEKSSADKVMRTPISKQRNKHIQQVLVEAARLAPRYSDELALLYERERQRGNSNRATLAVARKMVAHMLAVERRNTDFVPGGEFQRTAAA

SEQ ID NO: 164702 - protein, 342 aa, unidentified
MGMDTHKQFSFVTALTEKGDVIKQEKLVNFSDEFNEFFRELSRNKTLEIAIESTEMIMPFVKALERYGKIKVAHPTKLRLIAESKVKTDKIDSTVIANLLRTNYLPESYIPPEEIREIRTLCREHYAIKALIVRVKNQIRHYLLSQGIIREDNVFTKENRKKLREMNSDFINRKLDMLECMEEKLREVDDEIKERVSNVKEVELLTTIPGIGIYTAALLYSEIADIERFKKFSKLCSYVGLNPSMYQSGNRKYFGRITKQGNGCGSELGFGVVGIEMGADTKRLCSSKIRSRTENLFRKTETKERGKESDCCNSKKVAEKGVRSVEEERALRKLWFVVIMAF

SEQ ID NO: 164703 - protein, 408 aa, unidentified
MNTLYVGIDVSSKSNVVYLMLPNGDKHSNFSVANSHEGSTQLVKRILSALTSHSLDTVLIGLEATSVYGDNLVYFLREDATLAPFNRKIHVLNPKQVKKFHDAYNDLPKNDYVDSFVIADCLRFGRINKEVYLGDYRYKALQNLTRARFFAVQNLIKEKQRFMNVLFKKYSTMTQEKVFSDTFSTTALAVYDEFDSAEALANMDLHELTDFIIEKGKNRFPDPDAVAKAIQKAARSSYRLPKTVNDSVNQVLSISITSMKALESQIKEFDKAIKAQMEPLPNVLISIPGIGPVYSAGIMAEIGDINRFDNQAALAKYAGLAWKQHQSGSFEAEVTRLIPSGNRFLKYYLYEAAFSLVRCDKEYSDFYHLKYKEVNRCQHKRALALTARKFVRLVFRLLKDNRLYVPAK

SEQ ID NO: 164704 - protein, 391 aa, unidentified
MYSDGSKHSSFSVPNNRNGAKIIVDRVTSVLLLQDIPQVVIGMEATSVYGDNLMRFLRESGSLGRFERSLHMLNPKQVKKFRDAYSDLPKNDHVDSYVIADHLRFGRINKEVYMDDYKYQALKMYTRARHQLVQELTREKQRFLNTVFISFSGLTQEKIFSNKFGATSMALIEEFSSLDELAYMSTDELVDYIRKKGKNHFENPEEIAEAVQRAAKNSYRPPQVIADAAKQMLAISMNTIRLLQKQIKEYDKAIEKMLEAFPQTLTSVKGIGNIYAAGIIAEIGDINRFPSQASLAKYAGLVWTQHQSSDFEAEDKRMIQGGNHHLKYYLCEAANALRRCDPEFKRFYALKYKEANKHNHKRALALTARKLVRLVYTLLKTNRLYIPPEEH

SEQ ID NO: 164705 - protein, 404 aa, unidentified
MSYRELFIGIDVSKFKHDVAIMTEFKQLLRPPFVIGNDKHGFRSLLNICKQLRQKYGVEKFYVGMEATSDYWKNLYYFLKTQSQFSVTVINPLQTKAFAQSNLRRAKTDPINAQDIALFMVERRPPASVDRAPEYEIIKDIDRQIYHLKKQQTMVVNKLRLELTKVAPELEAATKSIATKQMLALLVHYPTAEAIATASVDELRRLRYGDHRWHLPLSFIHRVKALTQDSIAFKRGDGAGCVVQSLARFLTTIQQEVAQLKHQAKELYHVAKEQQSLLATIPGISEDTAIILEAYIGDVHRFANARKLVAYFGMNPVVSLSGVPKKNTFSFLQKKGNPIVRAKLFMATLSMIRFKIEPIYSFYKRLVDSGKPKLVAINAAMRKLLVIIYHMLKNNEPFKNNKNQ

SEQ ID NO: 164706 - protein, 418 aa, unidentified
MEAIIEKCCGLDVHQATVVACLLTGTSSQRPKKEVRTFRTVTRELQAMSEWLRAEGCTHVAMESTGVYWKPVYAVLEGGFDLVVGNAHHIKNVPGRKTDVKDSEWLADLMRHGLIRKSFVPPKPLRELRDLLRYRRKLVESGSSERNRLLAVLETANIKLASVASDVFGVSGRLMLDALIAGRATPTEMAKLAKGKLRDKLVELQLALEGSVGDHHRFLLAMQLRRLKNVEDELEVLDKRIEEKLEPYRAQHTLLVTIPGVNWYIAAVLIAEIGVDMTVFLSAYHLAAWAGVCPGNNESAGKHRAGKARRGNVHLKTALVGAATSAARTKGTYLKDKYHRLRARRGNLRAAVAIAHKILVAAYHMLVRQLPYQDLGGSYLDKLDETRTTSNLVRRLERLGYAVELKAAKPLQSAEVFS

SEQ ID NO: 164707 - protein, 484 aa, unidentified
MKPKPEEKNKRATNHPTQHHWHEMNRKQRREMMRKMQTEDLSLEVIHPDAGGIDIGNESHYVAVPPGRDSQSVRRFGCTTAELKAMGAWLKQCRIRTVAMQSTGVYWVAVYDILEQAGLEVYLVNARDTKNLPGRKSDVQESQWLMKLHTYGLLRNSFRPSQEIRVMRTYWRQRNDLVQSAGRHILRIQKALTQMNLQLANVLSDLSGATGQAIIKAILGGERDPHKLAAFRDCRVKASEEQVARSLEGNWQPDLLFVLKQEQAGYEFCQKQIAECDRQLHQYLQQREDRSQGAPLPEEKRKERLRKKKKGNAPQFDLRERLFRMTGTDLTRIDGIDVMTATTIISEAGWDMSKWKTEDHFVSWLRLCPDNRISGNKIIGKGRLPTNNPISIALRMAASTLRLSKTYLGAQFRRLRTRLDAPIAIKAMAAKLARLVYRMLRYGMKYVDQGAAFYELRHRELQIKHLKSKAEKLGYRVTPIPAAA

SEQ ID NO: 164708 - protein, 319 aa, unidentified
MAEEVYVGIDVSKAELVVAARPGGERMTLTNDRAGIKRLVGRLGELKPRLVVVEATGGLQRQVVAALWTAGIAVAAVNPSWVRNFAKGRGLRAKTDRKDAELLALYAERERPQVRPPADAETQALQELVMRREQLVAMLVAEEHRLTHALGPVRKELRHHISYLEGRLKQIAEDIDKTVRRSAGWRRKSEIVRSVPGFGKVFCSMVLAKVPELGALNRKQIGALVGVAPVPDDSGTRHGRRAIAGGRFEVRNKLYMCALVASRANPVLKEFYQRLVARGKPKKLALVAVMRKLIVTLNAMLKTNSMWRPPCLAVSVREN

SEQ ID NO: 164709 - protein, 400 aa, unidentified
MSGLKGSFDGFVGIDVSKDKFDACGITGDETKLFQFSATMDRKGFEKLKGHLAAVSISSVLIGMESTASYHVNLFSYLVSEGYKVLLINPLLISNYVKMQLRKTKTDKKDAVVIAQYLLTNGDTLIQRAAPSLISDLRDLSRQRESLVDEMTSLKIEIKQLLNITFPELEHMAGIFTKSILKLLQQYPSAFALRDADLGQLSQMLIADSYGHKREAFAAGLIKAAHSSIGSKSPAKDMILKQKISLLLHLEDALQEITGMLIEMSRKLMEEEINIMTSIKGIGDKTAANFLIEMGGDINQYERSGKIIAMAGLDPAVYQSGKHEGKGRITKRGNRHLRRIIWMMTTRVIQYTDIFNVYYLKRRKEGLPYKMAVLATAHKLIRVIYAMLTHRTTFCPQVNS

SEQ ID NO: 164710 - protein, 292 aa, unidentified
MFVVGIDAHTRYVVLVVLNSSGQRVLGPTRVRVSEPARVREVLAPFQPLEAVVETSSTWPWLEDVLQPLGVRFVLAHARRLRAIAEANYKRDEIDAELLGRMRLAGLIPAVYATPPTQREWATLIRHRTALVAQRTAPVNRIHAQLHRRGLWLERGRLLTRQGRAWVRHEAGPQLSLEERALVRSYAGLAPRSSQSGERGIRHGSIPAGANRWLRGALVRAVVSHVQTAPASALSQYYTMQKARVGWPVARVATARKLARVIHALLRTQRTWIETPTRGELRSTHAAQTAII

SEQ ID NO: 164711 - protein, 474 aa, unidentified
MLPENVKQKLSSMKLYLGGDVSKGYADWVILSEKKQAVLDNFQLDDTYAGHCKLYAMLEAYFGKHRDLEVYAAVESTGGYENNWFSTLKSYQKVFNLKVARVNPAGVNFNRRAGLKRNVTDAISALSIAEYLINHPDNIKYDQDDQWKSLCRHWNFVEMQKQQRVQTINQLETILYSANPTLMRFKKDNLPNWLLELIIQYPTADTLAKARPEKLAKIPYLSLARAKTLVAEAKQSIASATDKNAEILVSQIARQIKSFDENIKSQMQLIERDLTCPEIEILKTFKGIDTISAIGLLLEIETIERFPTVKGFSCYFGLHPKFKQSGDKIIGVRMSKQGSKNMRKILFNIAKGAITYNPLITAVYEKKLSQGMAKMAAIGVCMHKILRIIYGMLKNKQAYNPLIDIQNCEKSKDKQQEKQQQENANIDKSRRYQEFDVKAPISRKQTKKRKEHDLSQCEITSQSTGSTCSSETKL

SEQ ID NO: 164712 - protein, 386 aa, unidentified
MIYIGIDISKYKHDCFICNDTGEVIVENFSFENTKKGFQQFLDLLKPYDNSNVHIGLEATGHYGLNLKLFLEKNNYSFMEFNPLLVKEFKKSLTLRRTKTDKVDAIVICQKLMSVPYKPNSKLFYHKYSIKSLSRLRDSLVKQRSKYMVQLTNILDIVFPEFKSFFNNRFSSTSLYLLNKYRSAEKIANMRDFDTPNKLSKGHFTYAKFAKLKELAKNSIGESNEVFEIELQTLISLYNEIDSKINSIDKQISTIIKELNPPTLSIPGIGELTTAVIISEYGDFNRFSNADKLLSFAGLEPGIYQSGTILTNGKMVKRGSGYLRYSLMNIANVVIRYNPIFYDFYLKKRSEGKTHRVALSHVCKKLLRVIYKLETQNIQFDPSLLK

SEQ ID NO: 164713 - protein, 376 aa, unidentified
MIVRPIHGSRIPCRDVRYHEQGCRDHTKGNSHELRLLFFSFLLFSFLASVCHFQHFPPDNMTILGCDISKDTVDSVLLAPDFVLLQRLDCLNTVEELTKILQELKKDYADLCVGCESTGMYHQSLVEACDAVKIPCKLLNPILTKEFNRSSIRKKKTDRDDAVVIAKLLAQGEGTVIHSDDCTDRLKATVRSARKIADLSRSLLLHSRHAGKLLPTELPRYEHVQEELLTLQKALKKSAITMCDASLRSLLESIPGIGAWTASVILAETKNFERCRNADAFVAFAGLDPRVQQSGTTLNRNSRLTKRGSPHLRAALFVAASVGRMHDPELRAYYNAKKGQGKKFTAITCALSRKLCYRIYAVIKRKTPYEVHEKQS

SEQ ID NO: 164714 - protein, 424 aa, unidentified
MNLTQNDRLNQVTAETLVIGVDIGSQEHYARAFDWRGIEFTKRAFRFSNTRVGFLTFLRWLQELQGKCRKEEVIVGCEPTGCYWLTFQKFLQDHGVKLVTVNPYSVKRSKELDDNSPEKSDLKDPKTIAGLVRAGRFSTSYLPEGIYAEIREASVCRDMLMKDHVRLSNQIQGWLQKYFPEYLEVYKDWDSTSGLMVLQEAPLPEDIIKLGAGGINSIWRKAKVRAAGIKRATTLVEAAQESVGLQGGEAARLEIWILVNDYMAKAEQMKRLDEYLEQKVMEVPNVEKLLAIKGVGLSTVIGFVAEVGDIGRFTDARQVQKLAGLEITKASSGKKKGQPCISKRGRRKLRRTMYESARALINWNPAFLEVFLYYRNRQRRPLGSMQAKIAVACKAIRVFFVIMQTGCDFDEERFRKDILRPEAA

SEQ ID NO: 164715 - protein, 428 aa, unidentified
MSNQDIIRHELFCQIVKEIHKSNEYLIVGIDVAKDKHHAFMGTTTGKLLLRKLIFGNNINGFSRLMKTVEAIKVQNGLSKIVYGLEPTGNYHKPLARHLISCDCNVVLVAGQAVKYNRQILDGRWDKNDTKDAANVADLVSRGKCLYYDCPSQSIIDIRVLLSLRKRLKKEEHSLRMRIRNNLLAKYFPELDTFYSACESETLSIVGWCLTPDTIASMEFSKFFQLVTKTRRGTAQTLRLRKIHGLAMESIGCPMGPASEYEAELLVEKLKQVRNQIKETNDLIEDFCLKFPEYNYLLTIPGFGPYISARVLASIGDPFRFKNQKQLIKMSGYDLCANRSGKTSDTAIPVISKKGNSELRYALYQAAKVATAKVDLFRAYFTRLLTGRERERGIKTKMCVKLAAKMLVIAWTLMKKREVFNPDYITIE

SEQ ID NO: 164716 - protein, 458 aa, unidentified
MKKEQTISLPVVNAHAAAIDVGSRLHYVAVGQGPEDVSTFKVYTKDHALLVKHLQQKDIKTVAMESTGSYWQTLYSCLQSAGFEVVLSNNYIKDPQRKTDAKDARWLQRLHSLGLLKAAFIPSEDIEQIRTYHRHRTAILVQAASSIQKMQKALRLMNIRLDVALSDITGLSGMKILEAIVGGQRNGEVLASLVHYSVKKSKEEIAASLQGNWKRENLFILADELDAYKTFQKRVMNCDKQIEELLEKMVAKIPAVTPAAGLKEPKKRKKKNNPLYDVYKLSMAYFGVNLLSVEGVGESTVMTFLSEVGTDITKFKTKKHFTSWLRLAPNNKITGSKIISSRTPKGKNIMANAFRLAANTIAQRKSGVLKKIFSRVAFKKGRPAAITALARRLAEIFWIMTVKKVPYLPRNEKEYELKAKENVIKNIRNKMKRLGLTTDDIQNLTVPQRLHLQQAANG

SEQ ID NO: 164717 - protein, 316 aa, unidentified
MKNYIGIDISKSTIDVYDGKKSYKFENNEMGFKQVVSLTKEIKNTILIFEPTGVYSYALTKFCSTHKIKIVMVGPKESRDFARSLKVRSKTDKIDAKVLYKYQSHVELNMVHVPTINHHAVKMQEMLNVYEGILSAKQKFKNQIESTSKEHKDLVRTLKRMIDNLDLEAQKLFNKIELLLLKDENIKSKYDAISTIPSIGQKSALYLAAFFLKYPLANAKELTALMGLDPVMRDSGMFRGKQRISKHGGQQLRNLLYLPTLCAIQHNDRIKAFYEGLTSRAKTKKLAVIASMRKLILMAFSIFKSEEVYQPLFVKI

SEQ ID NO: 164718 - protein, 429 aa, unidentified
MSAEKPLELRVSVDVGYRRHSVAMGLSSGEVLEEFEIDHRIEGFQEFFSRIEKHRKEKNCAVAIAMEGYNGHARPLDSLVRERGYRLYNLNNLKFARFKEIFPGAAKSDRIDARKGLELFQLSDHLPLAKEVLQEVRGTPPENEVLKRLTRRRRRLVNERVRVVNNLQADLQAVCPGLLEITGEASNQWFLNFLLSADTLPQLARLKRSTLLKIPSVGVKSAAIIAGWQKRSHFSQEVDWVGEMIQEDAKRCLELDEKIKRLETQIAEIAKDSKIAKTLRSIPGFGAVCTSELAGEIGTIERFGSEGSLSLYLGMSTLENSSGKYQGTKAPKHVNTRAKAAMMIGVDRHRKYVPQSQKYYEKKRSEGKKHNQAIRALGRHLSRIIYKMLKEERDYEIRPEKGNTKTQVSPRSLVKTQIRRPKISIKENK

SEQ ID NO: 164719 - protein, 403 aa, unidentified
MNNVAGIDVSKGKSMVSVLRPFGEVVAKPFSIGHTGSELKELADYLKSLDGETRVVMEHTGRYYEPVARFLHDEGVFVSAVNPKLIKDYGNNTLRKVKTDKADSRKIARYGIDNWAELRQHTPMDTIRMQLKTLNRQQSLYTKTKTMMKNNLIALLDQTYPGVNALFDSPVREDGSQKWVDFATAFWHVDCVRNMSLTAFAERYRKWCKRHGYNFSQSKAVEVHAGAQDLIAMLPRDALTKTMVRQAIDALNAISASMERLKAEMQALAAQLPEYPVVMAMHGVGDSLGPQLMAELGDVARFTHRNAITAFAGVDPGADQSGTHEAKSTRVSKSGAPELRRALFLVMDCLLKTQPQDDPVYRFMDKKRAEGKPYLVYMTAGANKFLRIYYGRVKEYLASLEGN

SEQ ID NO: 164720 - protein, 334 aa, unidentified
MIQKYVIGIDVSKSKLDCAIMDFNLLLFNEKSIANNQKSIGSFISTLIKKLAIDKNQLVICCENTGIYNRPLELVCSVLGITLWVEHALKIKRASIDMRGKDDKKDALRIAEYCIRYIDKLVPFKEPSKIVQEISHLSKSRETLLTQRVAIENQLKEAETHDNFEYKILSKTYRATLRTLTKSIKKIEALIETLIDQDDEIKETRNLLVSIPGIGKQCAIHLIITTDNFTRFDNANHLACYAGVAPFKNESGKIVKRARVSKMANKNIKRLLHMAAMAAIKSNPQLKTYFKRKVEEGKNKMSVLNAVRNKLVHRIMAVISRKTPYLPQEVFLLK

SEQ ID NO: 164721 - protein, 223 aa, unidentified
MKRVEFVGLDVHAETIAIAVAEPGGEVRSLEVIPNREDSVRKLVRKLGPLEELRFCYEAGPTGYALYWQLARIGAKFEVVAPTLVPVKAGDRMKTDRRDALKLARNYRAGELTPVWVPDAAHEALLREVEHTAARIMRLDGAIAEAVKCAPPKMRAVTEGLQALRGIAHVAAVTVVAELGELSRFARAKQLMGYGGIVASEDSSGERTRRGGITEGASTAGSC

SEQ ID NO: 164722 - protein, 464 aa, unidentified
MTPGKMLWRNRKERKEWGRRLQSEDPGLEVVHPHAAGIDVGNSAHYVAVRPDRDPKPVRRFECFTADLHRLADWLQSCGVKTVAMQSTGVYWIPLYEILEERGLEVYLVNARHTKNLPGRKSDVQESQWLLKLHTYGLLNNSFQPVSEIRVLRTYWRQRAEHVREAATCIQRMQKALTQMNVQLANVISDISGLTGQAIVRAIVAGQHDPRELAALSDPRVHASQEEIAKSLEGNWRPELLFVLQQEVDMYDTYQKRITECDQRLQKHLGSFKNARSLQTPKEKSKTKKPAAKNAPCFDLSSELQRVTGVDLTRIDGIDVMVAQTLLSEVGLDMTRWKTESHFASWLGLCPDNRITGDKVQSRGTRRVVNRAATALRQAANTLMRSRSYLGAQYRRLRTKLGAPKAITAMAHRLARLVYRMLKYGQAYVDKGTEYYEERFRQQQIQLLRKRAAKLGFQIAAIHP

SEQ ID NO: 164723 - protein, 378 aa, unidentified
MSNCTRYLGLDVHAETISAAVAEGRGRIRSLGKFPNRPDAVRKLIEKLGVPRRLKVCYEAGPTGYALYWQLTKLGVDCEVIAPSLIPKKAGDKVKTDRRDAEKLAQSYQAGDLTPVWVPSPEHEALRDLVRQRAAAKADESRAKHRLVKHLLRRGLRSPDEDGAWTHPWWRWVQSLKFDHEAQQVALADCIAEVLHMGERLARLDKAIDRLVESAPAHMRAVIEALQALRGVAKLTAVTIVTEVGTFKRFRLPTEMMGYTGFVPSEYSSGGRESKGRCTRAGNAHLRHVLGEAAWHARHRPWLNLRMKKVLPTLPAGVAEIAWKAQERLHRKFTKMTYCRKPAGKVAAAVARELVGFIWAIGTLVESQQTNKTHSRAA

SEQ ID NO: 164724 - protein, 399 aa, unidentified
MRGRFRESELLEAPPHRAEIWFSLGACCPCNSHGRDSDSLGAAVMGGCPLRPGSLKTVGELGAPPVILSNPNSRQGRKARSPIRQGRVDMESIIVGIDVSKDRLDVAVRPSGEVFVAERNAAGLELLVARLRELSPRIVALEATGGFETVVAATLGAAGLPIVIVNPAQIRDFAKAIGQRAKTDPIDAAVIAHFAEATKPEPRPLPDQATRLLADLVARRRQIIEMIVAERQRERRITIPRLKKSILRLLKALEKELATVDTDIDDAVRGSPAWREMEDLLASVPGVGPAIARTLIAELPELGRLGRKEIAALAGLAPFTRQSGQWRGRSFIGGGRKTVRSAVFMGAMVAKKYNPVLKAFFDRLVAAGKPKMVALIAVARKLLTILNAILRDRRPWQIA

SEQ ID NO: 164725 - protein, 412 aa, unidentified
MSYKVAGIDVHKKVLMVVVVEVEANTPEWKTERRRFGTTTSELGHLAAWLREQGVEEAVMESTAQYWKPVWSELEGQMRLQLAQAFSNRAPRGRKHDFRDAERLVRRLVADELILSFVPGPEQRGWRTMTRMEVQLGRDRVRLHNQVECLLEEMRIKLSSVLSDLFGASGLRILRALAEGERDPKKLAALADDRLKCTHKGLLEALTGNPEAMHQQLLGLYLERLQVIDEQIKKLKGMIAQALEAHHEAVVRLAEVPGFGADSAQQMIAEVGAQASTFPSAAHLTSWVGTCPGQNESAEQNHSSRSAKGNKYARRLLTEAAQAAVKTKGSHFQVVFRRLLPRLGYKQALWAVAHRLCRLVWKILHEGVRFVEQGTQRDPKARKKRAQALAHALRELGYRVELTPLTPAPARG

SEQ ID NO: 164726 - protein, 314 aa, unidentified
MDETKHFVGIDVSKAALDVHVLPVGKSQRFPNDGDGHAALAGWLSSHPVERVVLEATGGYERKAVQALQQQGYHVCVVNPARPRDFAKAGSRLAKTDRLDAAVLAHYAQVFDPPSAPRPGDVEAKLARYASARDSFVAEKTRLRNQLGLNDDADLERMHRDILETIEAKLAELDRMIQSCIREKAEVSQRYDQLRAVPGIGPVAAVSLLAFLPELGRVSRRAIAALVGVAPFARDSGMMRGQRRIAGGRAKVRRMLFMASLSAARHNPIIKTFYERLIKGGTGKKQAIIACSRKLLTILNAMVRDNKEWQPMST

SEQ ID NO: 164727 - protein, 361 aa, unidentified
MSTCYYIGADVHSNSTDLAIEKRNKIIARYTVPTTIPAISNVLDSLQGKKYLATEEGPMAGWLYRNLNKKVDKFIVSDPRRNKLISSDGDSDDKIDSAKLASLLRSGYLRAVYHSDDDQRAELKHWVSLYHDRIRDAVRNINKIRARCRMHGISIRRIVLRDPSRRSEWLLKIKHPALARQLNMLWIGYDATAKQVKVAKRQLSTLAKKYDIIRFWSRLPGIGLIRATTLFACLDTPWRFKQKNKLWKYCGVGLQRSASGTDKKGRSKPARLKLPWAVNRTLKNVVLGAAISAINHKSNVFKDYYERMLKDGVITSNARHSVARKMLTVMWGMWKTNSRFNENLLSVFPEPNTTTASALSR

SEQ ID NO: 164728 - protein, 318 aa, unidentified
MNTNTLQNINVGVDTGKSQLDIYIRPLDIYFTAPNTEKGISHAIKTIKKHKPQRVVIEATGRLEMPFILACDKAKLPYVIANPLRIKRFAGAIGQRAKNDRLDAALIAHYAERVQPELTKIKSENIPLMSDLVTRRNQLLTMQTMEKNRLQILPKNISSTITPILTALKNQIEKVEAKIAKLIDSCPEYQAKNTLLQSMPGVGKVLAASLISNVPELGYITNKQASSLIGVAPITRESGRFKGKRMIQGGRAQVRTVMYMAMMSAIQCNPVFKAAYERLLAAGKPEKVAIVACMRKRVVILNSMLRDGVMWDKDSVKN

SEQ ID NO: 164729 - protein, 350 aa, unidentified
MSSASVRTTISTIGLDLGKNTFHLVGLDRRGAIVLQQKLSRGQLERRLANVPRCLIGMEACSGSHYIGRRLTELGHDVRLIPAQYVKPFLKGHKNDYRDAEAIAEAVQRPTMRFVSIKTPEQMDLLALHRVRSRLVGQRTGLINQIRGFLIERGITVRQGVLPLRKALPDILSSSTGTLSPRVVHLIADLALDWRRLDERIETVSTEIEALAQQDDSCQRLMTVPGVGPIISSAVVAAIGNGVGFKQGRDFGAWLGLVPKQESTGDRTILGKISKRGNKYLRTLFVQAAHVVLVRRPATARRGLWPWIEPASRRLHRNLLAIALANKLARIAWAVLARGHAYEPRVSSHA

SEQ ID NO: 164730 - protein, 365 aa, unidentified
MKKISTVARKQIRNFSEQKLTIGLDLGDRSSWYCVLNESGAVLLEQKLSTTPQAMREVFGGMPRSRIALETGMHSPWVSRLLSELGHEVIVAHARNVRLIGESRKKDDRLDAQTLARLARIDPQLLCPVKHRSARAQADLTVIRARAGLVRARTALVNTARGLAKSYGERLRGCNVRNMNPEKAEVLSPELQKALEPLLAGIESLSERIREYNEGIEQLAEQSYPQVARLKQVKGVGTLIALTYVLTLEDAHRFGKSRDVGCYLGLQPGRRNSGQSEPQMHISKEGDPYLRTLLVQGAHHILGPFGVDSDLRRWGLKLAERGGKSGKKRAIIAVARKLAVLLHRLWVSGEVYEPLRNQRAMPAAA

SEQ ID NO: 164731 - protein, 394 aa, unidentified
MMKLKYSICCGLDVHKNVIVATIVTTNKDGISEYLQKSFSTINSDIQRFHNWLIENNCYHVCMESTGKYWIPIFNYLENDIDVCLTHPKYVKAIKGKKTDKKDSKWIADLYKFDLVRCSFIPPKDFRQLRELSRYRFKLVCMKSSEKNRIQNCMTISNVGIASVLSDPFGKTATEIISYLLEHTADSMDEKAVRKLIKKGAKSKSDEIIEAIKGYTIETDQAKKLELARGHLEYLDDMITQTEVELYVRIKPYYEFVEFVSTMPGMTELSSTIVLAETGVDMDIFDDAKHLCSWCGLSPANNESAGKKKSVRIAKAGDYLKPMMVQCALAAIKSKKQPYFAIKYGRIKKRRGHKKAIIAIARMMMVCIYHMVSEKKPFTPVSYTHLTLPTTSRV

SEQ ID NO: 164732 - protein, 416 aa, unidentified
MVDDHQWFVGIDWATRSHSVCLLDAGGRRVGEREFAHGGTGLTELRDWLLEKTKAASRQIAVAIETPHGPVVEMLLEHGFVVFAINPKQLDRFRDRFTVAGAKDDRRDAQVLAGSLRTDRQAFRRLASNNPTVIELREWSRIADELQQERTRLANRVRQQLWRYYPQAAELTDDVADDWFLALWQEVPTPDRAAKAAEKTITAILKHHRIRRLDAATVLKTLRKTPLFVAPGTAEAACAHIRSLAARLGLINHQVKEAQQSLDRLCIKLEEEESPSGQSFEQCDVMILRSWPGIGRIVLATLLAEATEALHRRDYHALRALAGVAPVTRRSGKQRFVIRRLACNGRLQLAVYHWSRVAIQHDAAARRRYDALRQRGHGHARALRSVGDRLLYALCTTLKRQTPYDAGYNNAQMMKG

SEQ ID NO: 164733 - protein, 326 aa, unidentified
MEHELHYIGIDTAKEKLDVDVLRPDGRHRTKKFANTTKGHDELVSWLKGHKIDHAHICIEATGTYMEPVAECLYDAGYIVSVINPALGKAFAQSEGLRNKTDTVDARMLAEFCRQKRPAAWEAPHPLERALRALVVRHHALTDMHTQELNRTETAREVQRPSIDAHLLWLEAELKRLEKQIKDLTDDDPDMKHRRKLLESIPGIGEKTSAVLLAYIGLKDRFAHARQFAAFAGLTPRRYESGSSVRGASRMSKAGHVSLRRALYMPAMVATSKTEWERAFRDRLAANGKKGKVILGAMMRKLAQVAYGVLKSGVPFDASRHNPVAA

SEQ ID NO: 164734 - protein, 327 aa, unidentified
MRYIGIDVSKATFMVAYPLNEKEYKTREFGNNAKGIHQFIHTLKEGDHCVMEATGNYSYLLLYLLNQANITTSMENALKVKNFARTMLSVTKTDKADAQLLSLYGERMRPAPFKMPPDSILLLKQKRAAMRQFQKQLHATNNLRKSLEVLPQRDAATFKSIDKIIETLEKQIRKIEEDLVALTQKEFDRQMQKLTSIKGIGASLAAALIIATGGFTYFDNAKQVSRYLGICPTYQQSGTSVNVKGHINRNGDSHLRSQLYVASWSMSLYNKECRNLYLRMKEKGKPGKLIMIAVANKVLRQCFAVVKHDTDYIDGFVSRKPNSSIEG

SEQ ID NO: 164735 - protein, 408 aa, unidentified
MKTLHRRCAALDVHSDSVVVCARIAVKGKVSREVCRVGTATRDLLELADWLGARQITHVAMEASGVYWKPVWHILEDRFTLILANAADVRNVPGRKSDVNDATWIADLLAHGLIRASFVPPAPVQELRDLTRTRKQLTREVVQHTQRIQKTLETANLKLTTVITDVVGMSGRRILRAIVAGETDAAKLAELGSTRLQCSRCELVAALTGRITAHHRFMIGQHLDLIEELERRIAAFDARITELLRPFRDVVERLITIPGVSEHTAQVVLAEIGFDMSKFPTAGHLLSWAGLVPRLDESAGKRRSTRVRKGAPWLKPVLVQCAFAAARKKNSYLQAQFYRLKARRGPKKAAIAVAASILTAAYHMLKDGTFYCDLGAQHLVKRNTAKTVAKLAQRIKDLGYEVHYQAAA

SEQ ID NO: 164736 - protein, 428 aa, unidentified
MSYRIAGIDVHKKMLAVVVSDVEIESEYQFERRMFSSNPEQLRSLAAWLVEQKADEIVMESTAQYWKPVWGTLERYWKPLCEKREGARRRSGTLHLAQALSNRGRRGRKRDFVDAERLVKRLVARELTLSFVPDAEQRLWRTITRKKYQLRRDLVRIHNQLEALLEEAHIKLSSLVSDLLGVSARRMLKALADGETNPAALAALAHERLRATPEQLCDALGACTELNPVYRRLLKMTLEHLQILEQQIGQLDQELATLLHPHQDAVERLAEVPGFAVDSAQQIIAEVGPAAATFPSEKCLSSWVGACPGEEESAGVNYSHRSPKGNRHMRRLLNQTANAAVKAKGSIFEIIYRRCVPRLGHNQAIGVIAHRQCRLIWLILHQGTRYEERGPAVTKRSRYQRTWRMIRQLRNLGYRIELPNPQASQAQA

SEQ ID NO: 164737 - protein, 352 aa, unidentified
MLIIGCDFHPGFQQVAIFDNLTGEIEGKRLQHRAEAEQFYRSLAGQEVLVGMEACGHYPWFERLLEELGMELWWGDAARVRAAEVRKQKTDRRDAEHLLQLLRENRFPRIWVPSLEVRDVRQLLVHRHKQVQARTRTKNQLQAIALSNGVQKKYKLWTKAGRAELEQLPLLPYAAQRRKRLLEALDGLEAEISELDRRVAEEAHQRPEAVRLMTHPGVGSVTALAMVLTLGPAERFASAKQVGSYFGLIPSEESSGGKQRLGRISKQGSSFLRFLLVEAGQTAARLDPQLKRFYRRLAARKNRSVAKVAVARKLATRLYLMLREDWTYAQLSQAVMQVGPSHSVAGKQEPSV

SEQ ID NO: 164738 - protein, 350 aa, unidentified
MTTMTETRRQITGGVDTHRDVHVVAALDERGGLLDTNEFPATAAGYHDLLVWLRWFGPIEKVGVEGTGTYGAGLTRHLLDNDVEVIEVDRPNRQRRRRAGKSDTTDAISAARGALSGEASTTAKTRDGNVEKLRVLRVARRSIRQDRIRALNQLRSLVVTAPDELRTQLSDLTSIGVSQAVAKFRVTDPTTSLGAVKYAMRSLGRRAEALRWEAKEIDKIMRTIIEDAAPALIDQGGIGVDAAGALLVAAGDNPQRLHSEAAFVRLCGAAPLEASSGMVTRHRLSRAGNREANAALYRIIINRMSNDERTRTYAKRRRAEGKSNLEIIRALKRYVAREVYPLLANNPLTT

SEQ ID NO: 164739 - protein, 356 aa, unidentified
MERYIGLDAHAASCTLAVISRAGRRLKDFPVETNGQALVEAIRMIPGRKHLVFEEGLQSAWLYETLRPHVDEVAVAGVTESRGQKSDQRDAYGLAEKLRTGSLDKRIFKAPREFTLLRELSRAHITATRDLVRVQSRLKSLYRSRGIQTPGSSVYSLAQRDAWEKRLAASARGRARRLYEQLDFFREQKKQAEADLLRESRKHKIVRILETAPGIGPIRAARLVPIVVTPHRFRTKRQFWSYCGFGIVTRSSSDWVQTADGGWIRARVPQTRGLSRQYNHVLKDIFKGAATLVITQRNKGPLYPRYERMLAGGTKPSLAKLTLARIIAATVLRMWKDEEEYRPERDRRAMESDRSA

SEQ ID NO: 164740 - protein, 344 aa, unidentified
MDNHTQYLGFAGVDLAKKVMQIHFVTEDGEITDKSAKRAEFLDFFRNRSKCLIGMEACGSSQDWARKLEAMGHEVHLLPPKAVKPFVSGQKNDHNDAIGIYKAMFNGVRRVPVKSTEIRDLQTLRRIRSQVTKDKVKEINHVRGLLAEYGIVMGKSLNAFNKDISSALEILTERGDVSPLVAEELRTTVQAIKAKIERQKKLDQEIEQLARGCKNYENFLKTPGVGPFTAAMLCVLLCDPSIFANGRQFAAYIGLAPRSRGSGGKNYVTGIPSKFNCDSESRAVLVECAQAIARCKNKSLWVEEILRRKPKKVALIAIANKLARQVWAMANKGESFKQMAVLTA

SEQ ID NO: 164741 - protein, 413 aa, unidentified
MDVLHARCCGLDVHKSSISACILLREAGRVQKHQRRFGAMTQDLRELAEWLRQLGVTQVAMESSGVYWKPVWNILERQFTVVLANAQHIKNVPGRKTDQKDAEWIAQLLQYGLLRPSYIPCEIIRDLRDLTRMRASLSQEASRLSSRIQKVLEDANIKLASVATNALGKSGRAMLEDIISGEDDPEHLASLALGHLRVKIPQLRLALEGNIRSHHRFLLRRLLDQMQFVEHEIALLEERLEDIGRQRPELLQAVARWDTIPGIDRVAAWALLAEVGDNMAQFPTAEHLASWAALCPGNHESAGKRLRGATRQGSPWLRRMACQCAWAAARTKNTYLSSQFRRLAARRGKKRAIIAVAHTLIVIGYHLQKNQSNYDDLGGNYFDRIHSDGLKRYLVKRLQQLGHKVTLEPIEAA

SEQ ID NO: 164742 - protein, 299 aa, unidentified
MSKTKTETNNPKGIAHTIEYLKKHKVALVVTESTGGLEIPAAKAIRRAGIAVIIANPRQTHQFAQSQPLTKTDAKDAKMPAFFAQMTAQKEDSQTMPYQPPTEAEEVLEALVNRRNQPADMRTAEKNRLHQVHETQVGSVKQLIAHFDRLIDELDKQIDDHTHTHFDGKAQVAEQIKGIGSITTATLMAMLPELGRLSHKRIASLVGIAPHPRESGETKFKSRCFGGRSAVLKALYMATVAATRFEPLIRDFYQRLPSEGKPYKVAVTACMRKLLTISNARMRDYFAENDTAENGIRTA

SEQ ID NO: 164743 - protein, 368 aa, unidentified
MDTEYYTTIGMDASDRTTKVCVMAKERGARRILEETTIPTTRDGLRAYLSGKRADWPVVFETGTHCRWMKREVESLGMKAIVANPSKLRMVTESNTKNDRNDARELARFALADVELLHPVRLRGERCQQVLRLMKARDMLVKVRTMHVNELRGFAKSMGFRLPSCPAGRMHALDKSGWPDDFEAVAWPMMDVLETVDLKIRAYESQIRSLAESRELKEKVDRVREVYGIGLLSGVALVASIDADPGRFRKARDAGAYFGLVPKQRQSGEMDAQCHITRAGSDFVRRLMIEAAQIAMRESARDTDVKLKGLRICARGGKIAKKRALVAVARCLVVTAVALLKKPDADYVPLSERARLEFEAMRSAETAA

SEQ ID NO: 164744 - protein, 345 aa, unidentified
MKDIKVLGIDLAKNVFQLHGVNVKAKCVLKKRVNREKLIEFMSQLPPCLVGIEACGGAHYWARMFIGMGHTVKMMAPQFVKPYVKSNKNDANDAEGICEAVTRPNMKFVPVKKIEQQDVLLSHRAREQVIKQRTAQANQIRGLLAEYGIVVALGISQIREMAAILENNKSKLTVKSEAIFRRLYEQFKAYDEQVTIYDKEIQQQADSDPMCLEIQKIEGIGPLTASAMVASIGDASVFNNGREVSAWLGLVPKQHSSGNKVRLGGISKRGDRYLRTLLIHGARSVLSRCEGKEDKKNQWAAGMKQRCGFNKAAVAVANKNARTIWALMAHGQCYRASYIQESVAA

SEQ ID NO: 164745 - protein, 362 aa, unidentified
MAQVRSWAGLDVHRASVVAATMDRDTGELRVRRLAGETREVVAFCVALPGPTRVAYEAGPTGFALARALVAVGVQCVIAAPGKIERPSSDRVKTDQRDAERLLRLLMIDGLHAVRVPSSEEEALRDLVRAREDIRGDLMRARHRMSKLLLRHDVRFEGTAAAWTTAHRRWLGAVDLGDRGAQITLLDYLGAIDALIVRRDMLEAAIGELIPDSPWADTVARLRCLRGIDTLSAVGLCAEIGDWQRFPKAAHVMSYLGLVPSEDSSGQTRRQGSITKTGSGHGRRLLVEAAWHYRRAPTRGQALKRRQDGQPAHVIAISWQAQQRLHRTWRRLDAERGKRRTIVAVAVARELAGFCWATANAD

SEQ ID NO: 164746 - protein, 330 aa, unidentified
MKNYEEVVGIDVSKKTIDAYCYQAQVHKEFVNDLIGYKRLLKWVLKEKKTSKVFYCFENTGYYSLKLALYLHSQDIVYVEESPLKIKRSSGVVKEKTDKLDAKLIARYAWLYREELQPSTVKSMSHLELGRLLALRDQLVRNNAGLKGTLKEMKVLLSSPTTDFGCISLKRSIDYLEKQVKAIEARIKEIITADDSMNKNYELLSSLIGVGLVVACQLIYHTGNFTRFASWRAFSSYCGTAPFEHRSGTSIHRRKQCHYLGDRKMKSLLSMASVSAIQHDSELRLYYKRKLAEGKDKMLAINNVRNKLIARAFAVVKRGTPYVVLQQHAA

SEQ ID NO: 164747 - protein, 402 aa, unidentified
MNCVGIDVSKGKSTIAVMRPFGEVVVSPFEVCHTASELSELARLLKSLDGETRVVMESTGNYHAPVAWLLHGAGFYVSVVNAMLVHDYGNNSLRRGKTDKKDAVKLANYGLDHWLTLPRYVPEEDARLMLKTCYRQYQQYSKVQTMLKNNLISLLDTAFPDANRLFTSPPRADGSEKWVDFVAAFWHCECVCGLSKKAFTTKYQKWCRKHSYNFSEDKALDIYVSACGRFGVMPKTKTAKLLVEQAISQLQATSAALAALKQEMQSLAASLPEYPVVMGMFGVGPTLGPQLIAEIGDVRRFHSKKALVAFAGIDAPPYQSGQIDVRSRSISKRGSASLRRTLFLVMGVLLQCAPMDEPVYQFMNKKRSEGKPYRVYMMASANKFLRIYYASVKAYLDSLEHN

SEQ ID NO: 164748 - protein, 386 aa, unidentified
MFLLGIDIAKLNHVASCIDSSTNEVVFSNFKFKNDFKGFSALLNKIKSFDAKNLIIGLESTSHYGENLINFLFTHDFKVALINPLQTSHLRKANIRDAKNDNLDSLNIVKSLLFTKLNFVSKKNIECFSLKKLTRFRSNLIKQRSKAKIQLTSLLDLLFPELQYLFKSKIHSKAIYSLLKKYPSTEEIAALKDDEISNLLYASSKGHFKKEKAIELKSLAKTTVGIKDTSISLHLIQLIELIELYTKQIKDIEIKITDTVNNLDTTLLSVPGISIIACAIILGETNNFENFSSSKKLLAFAGLDPKIRQSGNFNASSCRMSTPYLRYALIFTAWNIVRHSEKFNKYYSLKRSQGKLHYNALGHVAHKLVRILFTLIKKTFLIKKKD

SEQ ID NO: 164749 - protein, 423 aa, unidentified
MKGEIFFMKIVRPICCGMDVHKNIIVATIGITNKKTRITEYIQETFSTLNPDLLNLKQWLINHKCFDACMESTGKYWIPIFNILEDEINIYLTHPKYVKAIKGKKTDKKDSKWICDLFKHDLIKFSFIPPKEIRALREISRYRYKLVGMRSSERNRYQNCMTVSNIGIGSVFSDPFGKSAQAIMKEVLESDIIEDEKILKCIHGSCKNKDKILDSIKHCNIETDQRFKMNESMTHMEELQVHIDNCEIEMMKRAAPMFDQFMHITQLPGISTLSAILIISEIGVDMKQFESDKQLTCWAGLAPANNESANKKKSVRISKAGQYLKPLLVQCALGAIKDKEGYFGIKYSRIKKRRGHKKAIIAIARMMLVSIYHMILTGETFNPSDYESFRNPKPPIKQQDLTEESAIEFLKKSGFDVSKLTKP

SEQ ID NO: 164750 - protein, 339 aa, unidentified
MSQHNLISIDLAKNVFQVCGMTDRQSIVFNRQLKRKDLVAFMINQAPVEVAMEACYSSHYWGRHFEAMGHQVKLIPAQHVTPFVRGNKSDHNDAIAIGEAARRPNLIPVPIKTIEQSDIQCIHRMRERYVRDKTGLTNQTRGLLSEYGVIGATGHKAFSKLIREVSAPEYEGLSPLLKDQLNSVADEYCYQNLRIQEYNRILSETAHQHPLCQILLSIPGIGPINATAIYSAIGNGAQFNSGRQFAVWMGLTLRQSGSGDKFTSGGITKRGNRYLRKQLVHGARAVLFRSKGKKDLLNRWAHAVAERRGVPKASVALAARLARLAWTLMQKNTMYQSRF

SEQ ID NO: 164751 - protein, 320 aa, unidentified
MKIEGSSEKYVGIDVSKASLDIAIGQEGERLKAANTGKAIQSVVKRLNEYQPELVVVESTGGLERKVVQAMQEAGLAVAVINPRKVRKFADAIGRLAKTDEIDARLLAYYGFTARPHAKPKPTPAVEKLSGLVRRRAQITEMITAERNRRSSCPESLRQGLEEHIAWLEAEEEMLTNEIKRQLVEEEEFKEKNEILQSVKGVGPIMSATLLAEVPELGTYSHKQIAALAGVAPFSRDSGKHHGKRKIKGGRSKVRCPLYLSTLSAIRHNPVIRPYYQHLLEQGKQKKVAIVACMRKLLTILNAMVRDMQPWHSPSVLVTP

SEQ ID NO: 164752 - protein, 410 aa, unidentified
MVKENFIYVGIDLHKETHTVVMIDCYNQKLGEITFPNRPAAFPKLVTKVKKCNTDGKEVVYGLENAYGYGRALAVWLIDKGYLVKDVNTAISHRQAKHRGAMYRKSDSDDAKAIALATLNMLDKLPDACPNDAYWSLGQLVHRRDNIMKQRTRLVNQLHEQLCIAYPSYKQFFNDISRPTALYFWEHYPSRKYLKGKSVEDLRAELVPVSHNKCSTKTCEKILDAVASDKVKNNNFQDARDMVTLSIVSDIQHYDKQLVEVDKMLEQMYKMLGCTLTTIPGVNVITAVKILAEIGDIKRFSNANKLAQFAGIAPLHLSSSGKGKDVATKQGNRRLQATIYFLAIQMVQGSSNGTPRNSVVRAYYEKRKAQGKTSQQALICISRRLISIIYGMLKHGTEYRMPVVESAGEK

SEQ ID NO: 164753 - protein, 346 aa, unidentified
MKHDNPKGELTVLGIDLAKLSFQLHGVDDEGNNILKKKLNRNKLCEFVAKLPPCVIGLEACGGAHYWTRVFEQFGHKVKIIAPQFVKPFVKSNKNDSVDAEAICEAIQRPSMRFVPAKSIEQQDIQSLHRIRSQIVARRTAQANQIRGLLMEYGVIIPKGISYIRKEIPMILEDAENELSFLFRELLSGLYDEMVHMDNRVDVIECKLEEICKQNEDCQRLLTIPGVGLLSATAMIAAIGDINVFKNGRELAAWLGLVPRQHSTGGKPTLLGISKRGDTYLRTLLIHGGRTVVRVSEKYRDKRNKWISDLSQRRGNNISAVAVANKNARIAWALLSNKTTYQISVA

SEQ ID NO: 164754 - protein, 362 aa, unidentified
MANVRSWAGLDVHAGKTLAATMDRESGETRVRRLAGRTSEVVEFCAGLPGPTRVAYEAGPTGFALARALGAAGVECVIAAPGKIERPSSDRVKTDERDAQRLLRLLMIDALHAVRVPSTEEEALRDLVRAREDVRGDLMRARHRMSKLLLRHDVRFEGTVSAWTTHHRAWLSKVDLGDRGAQVTLLDYLGAIDALLVRRDALESSIGELVPSSPWAQSIARLRALRGIDTLSAVGLCAEIGDWERFPRPGQLMSYLGLVPSEHSSGETRRQGAITKSGSGHGRRLLVEASWHYRRAPAKGQALKRRQENQPPQVLAISWAAQQRLHRTWRRLDSERGKRRTIVAVAVARELAGFCWAITNAD

SEQ ID NO: 164755 - protein, 375 aa, unidentified
MNNNNTLYVGLDVHKESITVAYAINSESVELMGKIGTSPTDIQNLCKRLRSKSSQVSIVYEAGPCGYGLYRRLVKSGFDCMVCAPSLIPKKPGERVKTDRRDAIRLVRSLRAGDLSAVYVPGIEDEAFRDLARAWASARDDLRHARQRLKSFLLVHGVHYVGRADWGPAHRRWLSKYSFESPWRQLAFDEHRRTIEDRQAQCERLESALKEAVTEWRLYPVVEALQAMRGIQFITAVGLISELGDLTRFEHPRQLMSWFGITPSEYSSGGSRHQGSITKAGNSYARKLLVEAAWSYRHPARISPAIQKRQENLPRPVIDRVWDAQLRLCKRYRKLQAKGKNVNITIVAVARELAGFIWDMGRIAMSVAQQPQCHK

SEQ ID NO: 164756 - protein, 343 aa, unidentified
MQAITTVGLDIAKSVFQVHCIDAHGSVVVRRQLKRRYVLAFFKKVPPCLVGIEACATLHYWSRELQALGHTVRLIPPAYVKPYVKRQKNDAADAEAICEAVQRPSMRFVPTKTPEQQSCLMLHRTRHLFIRQQTAVINTIRAHLAELGIVAPVGRNGVEELLYAVADTKDDRIPDVARACLEALGALLGKLKAQILEFDRQINAWHRSNETSRRLDELPGVGPALATALVASVADPKAFRSGRDFSAWIGLVPKQNSSGGREKLGSITKQGDRYLRSLFTAGALAVIRYAKIHGTRYRPWLAKLLERRPTKVAAIALANKIARMAWAIMAKGERYREPVALAR

SEQ ID NO: 164757 - protein, 298 aa, unidentified
MKEQLVYLGVDIAKYYLDAAIGSEKRRFPNEAVGHRQLIRWINQMESAVQVICEPSGGYERALVRALVGAQLKVSLVPANRVRQFARAAGILAKTDRIDANVLCAFAQAMQPGTVSASQLEQEHLRELESQRRHLTHLMVMEQNRGARVSDICVRRLNRTLIQQIKKQIEESAELSAKAQKLTAISGVGARTAALLLAQMPELGQLNRREVAALVGVAPFNRDSGKMRGKGAIYGGRRFVRHGLYMAALVAARHNPILRNFYLRLRAAGKPAKLALTATMRKLLIVLNSDLKRDLRYA

SEQ ID NO: 164758 - protein, 411 aa, unidentified
MHPKMRKIYVGVDTHKSTHTAVVINCFNEKLGEITFENKPSAFDSLLQEVKKYTTKGMSMVFGLEDTGSSGRALAVFLKSNKKMVKKVNATYTHSERKKLPIMHKTDSFDAWCIAKVLLDNYDTLPEANPDDIYWTLAMLVSRRSALVKSNVALKQQLHSYVVQHYPSYRSFFSVFDCKAGLEFWEKYPSPTSLKDVTISELGKFLHTPSSGFFGEKRASKILELVEKDGDTKTEYQESRDFLVSTCIRQVKQNNGEMEKIEVEMQKLMSRLGYRLETFPGIDLVTASGFTSQIGDIERFSSADKLAKYAGISPVTFSSGESDKKFSNRQGDRTLYHLFHSLAARNVNRGRNKNRPINDIFYEYYQKKISEGKTEHQAIICVMRRLVNILYGIMRNKKEYIYPTLPKKVIE

SEQ ID NO: 164759 - protein, 411 aa, unidentified
MIKENYIYVGIDLHKETHTAVMIDCYNQKLGEITFPNRPADFPKLVAKVKKCNTDGKTIVFGLENAYGYGRPLAVWLIDKGYFVKDVNTAISHRQAKHRGAMYRKSDSDDAEAIALATLNMLDKLPDACPNDAYWSLGQLVHRRDNIMKQRTRLVNQLHEQLCIAYPSYKQFFNDISRPTALYFWEHYPSRKYLKGKSVEDLRAELVPVSHNKCSTRTCEKILDAIAGDKVKNNAYQDARDMVTLSIVSDLQHYDSQLAEVDKMLEQMYKMLGCTLTTIPGVNVITAVKILAEIGDIKRLSNANKLAQFAGIAPLHLSSSGKGKDLATKQGNRRLQATIYFLAIQMVQVSSKGTPRNSVVRAYYEKRKAEGKTSQQALICISRRLISIIYGMLKNGTEYRMPVVENAGENV

SEQ ID NO: 164760 - protein, 318 aa, unidentified
MKYYTSTTEFNCGIDLHARQMYVCLMDRQGKKLVHTNIKNNDFEYFLKRMEPYNHDLTVCAECMFGWYWLADACQAAGLKFVLAHALYLKAIHGGKNKNDRIDSEKLAHLLRTNLIPPAYVYPAALRPLRALVRQRILYVWRRSDLLARIHSHQLAHNRPTLRQSRSNRDPWEAQLLAAEDSPLRQFALQNDMSMIRHYDDQISALETHLKKTTRAVAGRDYTLLQTVPGIGENLGLTILYEIGDIERFATVKDFLSYCRLVKGTVASAGKIKGLRGAKLGNPYRNERGRQDRLYASCFLRSKRGKQMPGDDSASVGR

SEQ ID NO: 164761 - protein, 354 aa, unidentified
MKTLTFSNFHFFIGIDAHLKQWKVTIRNSGLELKTFSMNPSADDLYRYLTKHYPDGKFFIVYEAGFCGFWPQRRFTELGLTCIVVNPADVPSSNKEKVIKSDPVDSRKLARELENGSLKAIYVPELYAEQLRSLMRLRFRLVQQQTRIKNRIKMLLYNYGIIIPKEHLTNSRWSGYFIHWLNSVKLSSAAGQFTLDNLLLQLHQTREHLKEVLRQLRLEAKTDNIAPVINSLISVPGVAFITAMSLYTEIIDIKRFNTFEQLCSFVGLVPSTYSSGETEYTRGISFRHNKFLRPLLIEAAWTAVRKDPAITLRFNELIKQMPKQKAIIRIAKKLLRRIRHVWLYQDSYVKALVA

SEQ ID NO: 164762 - protein, 402 aa, unidentified
MNKTIVHHQGAAALTAAGHHTKTRPATIKLGVDIHSRFFVVAAQYDYAAIKPPRRFTPEQFVPWVESLLAAGHEVHVVYEACGFGFGLYRRLSAAGAHCYVIAPQKLDEARTGVKTDPRDAIMLCQWLSRYLEGNTRELAVIRVPSEAEERARHLPRQREQLVRARKKLQAQGRGLLVNHGLPAPAHWWQEQTWDRLGRLLPGWILPHLEIYRPILLALDAQIAALSAQLEAAAPADLPRGLGALTSVVLSREVCDWTRFKNRRQIGSYTGLCPGEQSSGAKRVQGSVTKHGNARLRAILVECAWRLVRFQPQYPPVKKRLHVLATGAKATGAARKKAIVAVARRLAVDLWRLHTGRGSAAQLGLAGCESTRRLTPAAETDGLGSGGEQLRHLPGSGPAGSQ

SEQ ID NO: 164763 - protein, 326 aa, unidentified
MTEPILQAATSLFVGIDVAKDQLDLARSDSNALLTVDNSVDGICRIVALLRTSGVRLIVVEATGGLERPLLDALLQADLPVARVNPGHVRYFARGLGILAKTDKIDAHVLVKFAQLASPRLAAKLSANQNELKALVICRRQLTHVATEQTNRRHSTSSKPAVKAIDAVLKAVEKQVEELDRQIRKLIDSDDDFNSIDKLLQSVPGVGSVLSSTLLAELDELGTTDRRRIGALVGVAPFNHDSGKLKGKRTIRGGRASVRSVLYMAALAAMRFNPLIRVFAERLKKTGKLNKVVIVACMRKLLALLNAMIRDNLSWTQLNLVKALAF

SEQ ID NO: 164764 - protein, 351 aa, unidentified
MWIIGVDYHPSVQQIAWVDTDTGEIEEQRLKHSGGEAERFYRDLKEKGFSVRVGMEATGHARWFERLLRELGFELWVGDAARIRAKQVKKQKNDRQDAQHLLKLLLKDDFPRIWVPTPENRDRRQLLLHRHRLVQMRTRVMNQLQAVAMNEGIRRKRGLWTRQGRAELESLWLPTWTSRRRQELLELVDQLDPSIDQLSQAIEQEAEQQPEVQRLMTHPGVGPITALAFVLVLGTPQRFSCGKQVASYLGLVPSEDSSGNRRRLGHITKQGNTLLRHLLGQAAQSVANSDEEWRRQYAQLAMRRNRSIAKVAMARKLAVRLYWMWRQGYDYQQWASSVRTWGKLEIAHGVK

SEQ ID NO: 164765 - protein, 310 aa, unidentified
MTQQDVIAGIDVSKDRLDVCLWPTGETMAFANDPAGCARLARRLAGRAVTAVALEASGGYEREAMAALRAAGLRLHRLNALRVRRFAQGCGVMAKTDRIDAAVIARYLAAVPQRAAIDEPAAEAVAELVTARRQLVEEMTRCTNQAAQSRQAVLQRLARRRIARIKADILALDQAIATAVEADADMARKSRLMRSVPGVGPVLTHSLLALMPELGRLSGRQAAALVGVAPFACESGRYKGQRRISGGRKPLRDTAYMAALVAARHNPVMAAFKQRLVDAGKPPKLIIVAIIRKLVVALNAIIRDEQPWKA

SEQ ID NO: 164766 - protein, 348 aa, unidentified
MVAESSGVVVGVDTHKHTHTAAAVSSTGAVIDHLTVSADRRGYRRLIDFAERHGVAEWAIEGTGSFGAGLTTALLENGHKVVEVDRPERPARRAGAKSDEIDAVRAARQALAGIGVSEPRCRGDREAIRVLLTTRAQAIEFRTRAIAALHAMVTSAPESIRDRLRTMSLGELLHACAAMRGSSRQSSEEFATTTSLRATARRALACEAEAAELAEQIALLVRRVAPQLLEQTGVGPVVAAQLIISWSHPGRVRSEAAFAKLAGVAPIEASSGTVTRHRLSRLGDRQLNRALHTIVLVRMRQDPRTQQYAARRLSEGKSVREVKRCLKRYVARQLFRELEATATPLDRT

SEQ ID NO: 164767 - protein, 403 aa, unidentified
MTSCSYFAGIDWASQSHSACVLDAAGRVELRLDSPHNKEGIERLIRQLKSFAGLLIAIERPSGLLVDALVEAGLQVVPIHPNVLKASRPRYRGAGKSDPGDAYMLADILRTDGHRFRTLEPQSDEIRALRALVRTRDDLVAERIALANQLRSLLESFWPGAAEIFADIDSPIALAFIARYPTAQSAAHLAEKRLAGFLAQHSYSGRRPVAALLERLRSAPAGCTGELEAEAKGELVRSLACILERLVAELAKLTARIEHTVANLADGQIIMSFPRSGRICAAQILAELGSVRERFPTEAQLAAEAGVTPVTYESGKHRSVVFRFACNHRLRRALTCLADQTRHAHPWAADVYHRARSRGCDHPHAIRILARAWVRVLWRAWYSRTPYQPHLHRAAAAFNIATG

SEQ ID NO: 164768 - protein, 338 aa, unidentified
METYAGIDLHSSNNYIGIIDGNDKRLYSKRHENRMETVLKALAPFKKTLRGVVVESTYNWYWLVDGLQEQGFKVHLANPSAIQTYSGLKHTDDKWDSFWLTHLLRLGILAQGYIYPKEIRPVRDLLRRRLLFVKQRTAQILSLQSMISRTLGLDFSGNSIKGFDIDFIERLFDCYHQRFTAEKNLSTIHFLGGIITEIETEVKSQIQLRKDFQMLLTTPGIGNILGLTIMLEVGDIGRFAKVGNYSSYCRCVESKRTSNKKKKGENNRKNGNRYLAWAYVEAAHHAARVCQKAQRFFQRKMAKCNRALASKALANKLSKATYYIMRDQVAYNADMLFR

SEQ ID NO: 164769 - protein, 346 aa, unidentified
MMIIGCDFHPSWQQVSWLDTGTGETGEKKLVHASGDGKRFYEQLAAPVLIGMEATGNSQWFIELVEDLGHEIWIGDAAQIRASYVRKQKTDKRDAAHILKLVVEGRFPKLWTPDREQRDLRQLVLHRHKLVEIRSRVKNELQHLSMNKGMQRKAKLWSRAGQKMLRELPLKPWAACRREDLLGLLAMLDQQVGKLDQAVQQAADQHPQARLLMTQPGVGPNTALAYVLTIGDVSRFPRGKQVASYLGLIPREESSGGRQKLGAISKQGNGLLRSLLVEAAQTAVRLDPGFRKQYLHRCHQKPKGVAKVAAARKLAVRLYWMLRTQTPYPEIVRIESSPRVPLVGAS

SEQ ID NO: 164770 - protein, 320 aa, unidentified
MTEAQCYVGIDVSKGYVDVAVRPTGQQWRASSTEEGLGALVEWLWGLSPALVVLEATGGLEVPVTAALAAGGLPVAVVNPRQVRDFARALGKLAKTDRLDAQVLALFAERVRPVPRPLPDPQTQELNALLARRRQIVAMLVTEQNRLSIALPSVRPGIQEHVAWLEEQLEGLNKGIATLLRQSPLWREREDLLRGVPGIGPTVAATLLAELPELGTLNRRQIAALVGVAPLNRDSGTLRGKRTVWGGRATVRAALYMAALVATRFNPVIRAFYQRLLAAGKPKKVALTACMRKFLTILNAMIKHRSPWQPVPFQVLGACS

SEQ ID NO: 164771 - protein, 348 aa, unidentified
MLIIGCDYHPGFQQIACVDTETGEADERRLTHREEAEQFYRALKTRRVRIGMEASGHARWFERLLNDLQFELWIGDAAEIRTKRVRKQKTDRQDAQLLLKLLMEDRFPKIWVPDAENRDLRQLLWHRHRLVQMRTRIMNQLHVVALNEGVRRKKALWRPAGRSELESLVLAPWALRRRRDLLDLFDQLTPKIHDLTRALEEEVEKRPIARRLMTHPGVGVLTALAFELVIGTPARFGCGKQIASYVGLVPTEESSGDRRRLGHISKQGNALLRFLLVEAAQVTVRSQPQWRSKFFHLALRRGRKIAKIAMARKLAVHLYWMWRQGMDYGQFEKLGSHAGEPGNRHGAQ

SEQ ID NO: 164772 - protein, 319 aa, unidentified
MAQNDLVVAGIDVAKDKVDVCIRALSLRRTFAATAEGRRELASWLRRQKAAKAVMEASGGYERDWAKALRGAKIEVRIVDPKRVRSFAQSAGRLAKNDTIDAEMIAWFAETFDEARGQAYDETREQLHQMVNARQALKGMQAKLESQGEHGLPAAVQRMHARILKTITVELVKFEAAIAAMIQATPRFTELAEIIESVPGIGRTTSAAIIAAMPELGQANNKIVAALLGVAPYDDDSGRRRGERHIQGGRRRTRNVFYMACLGAATRHNPALKAFYDRLVAKGKEKKVALVACMRKLISILNIMIERRQKWDASRYVVS

SEQ ID NO: 164773 - protein, 349 aa, unidentified
MRNYRAEDVITVVGIDLAKQVFHLYGVNKQGKAVLRKQIRRNKLMEFIALLPTCLIGMEACGGAHDWARKFKAAGHHVRLMNPKFVKGYVKSNKNDMIDAEAICEAVQRPNMRFVPIKSIEQQDIQSLHRAREQAVHNRTALSNQIRGLLMEYGVVIPRGITHLHAAIPQILEDADNGISDMFRELLATLAEDFNQMEQRIAAYSLQIQQLSEQSDVCKRLMTIPGIGPMGATAIAATAGDAGVFKNGREMAAWLGVVPRQYSTGGKVRLMGISKRGDCYLRKLIIHGARSVVRFADKKDDRVSKWVSSVKSRRGQNIATVALANKMMRIAWVIMSRPDETYRTCATAR

SEQ ID NO: 164774 - protein, 391 aa, unidentified
MIYIGIDVAKDKHDCFITNSDSEVLFKAFTILNNLDGFNDLYQKIESVMDDVTKVKVGLEATGHYSYNLLGYLIDKGLPTYVINPLHTNLYRKSLSLRQTKTDKVDARTIASMLMSDVNLKSYSDISYHNEELKSLTRYRFDKVKERAKLKTSVSRLVCILFPELEKLVPTLHMASVYALLSEFPSAKHVATAHLTRLTNLLSESSKGRYGKDTAITFRDSARASIGSNMPAKSLELKHTIKLIQELDSEIDEIENEIKIIMDEINSPILSIPGINYRMGAMIIAEIGDFNRFDSPDKILAYAGFSPSTYQSGQLNGAYAHIEKRGSRYLRYALYNATKYVCHWDPTFAAYLAKKRAEGKHYNVAISHAVKKLVRVIYHLEKTKQQYIKAA

SEQ ID NO: 164775 - protein, 345 aa, unidentified
MEQLIRIGMDTSKRVFQLHGVNAAEDVVLRKKLRRKEMVALFADLAPSVVGIEACGGAHHWARLLRSFGHEVKLLPPEYVKAYRKRGKNDAADAAALCEAMSRPTMRFVPVKSAEAQAALMLAGLRERLVRQRTQLSNAIRGYAAEFGHVAAKGLDKIEPLLARLAADEDLPELAHELFALHAKEHAELQAKLAAIEAKLMAWHRTNACSQRLDKIPGIGPVSAAMLTMKVPQPQLFRSGRDFAAWIGLTPKNHSTAGRTRLGVITRAGDETLRSLLVVGATAVIQQVQRGRGRPSPWLAALLKRKPPKLVAVALANKLARIAWKLMVSGESYRAAPIPAMPVAA

SEQ ID NO: 164776 - protein, 432 aa, unidentified
MVVLGIDAHKRTHTVVAVDEVGRQLGVRVTQATSTAAHLELVAWADRFGTGRRWAVEDCRHLSRRLERDLLGAGERIVRVPPKLMAHARDAARTYGKSDPIDALAVARAALREPGLPTARLEGPERELRLLADHREDLVAERTRATGRLRWHLHELDPSWDPKPRSLSRRTHITAVEARLAGLEGMVARLAADLTARIAALTQDANALEREITIRVRALAPALLALPGVAALTAAKIVAETAGADRFKSKDAYARHNGTAPLPAWSANPNRHRLSRTGNRQLNCALHRIAVTQKRCHPPAQAYLQRRTTAGDTPPKRCAPSNGACPTSSTGRSWPTPRTPPRRQARQLDIGASHGYFGAAGAGDRRDERPGPGDGRRPGRGGRAGRADRPVRRGGGRGRRGPAGRGRGCDGRAGGVLGGGGGRRGAGATGRH

SEQ ID NO: 164777 - protein, 337 aa, unidentified
MEAQQQYVGIDLHRRRSVIVRKDAGGEAIETVQIVNDPLALAEVVARAGEAPEVVLEATYGWYWAADVVAETGAKVHLAHPLGNHWGNRRVKNDERDAADLVDLLRLGRLAEAYIAPPGQRELRELVRHRAKMVAIRTGLKAQVHAVLAKEGVTVTVSDLFCVAGRMLLAQVPLGDAYRLRVDSLLGLIDGFDVEVDRFAAMVADVLADHPGYRAVQTIPGVGPVLAAVFVAEIGDVARFAGAAQLSSWAGLTPRHRESDTHVTRGHITKQGSRLVRWAAVEAVGRQRGATAVAVHHHRVADRRGNGIGRVAAARKLLTLVYYGLRDGQIRCLAETG

SEQ ID NO: 164778 - protein, 332 aa, unidentified
MVAGTHGSLNKAGSTKMTQISTTAGIDTSKAKLDVAVHGRVEHWQVENTLVGWRRLAAELSGAGITRVGIEASGGYECGVVGYLRDKGFIVLVLQPVQVKAYARLHLRRAKNDKLDAVLIAACAAVIDQERIEPDRRLAALAQHLTFVEQIEEDIARLKVRLEHVGDPRHRRMVVTDIARLKARRAEELSRIVTVLRAHDDLARRLDLVLSIPGIGERTAIALIVRMPELGRVSREQAAALAGLAPYDDDSGKHKGERHIAGGRRRLRRSLFAAALPAAFRWNKALVELYARLTARGKAHNEALIACARKLLIYANTVVQRGTPWTERPLHV

SEQ ID NO: 164779 - protein, 353 aa, unidentified
MVVVGVDAHKRTHTCSAVDGIGRRLGVKTVPATTTGNATMLRWALSTFGPELTWGIEDVRNVSRRLEEELIRSGQRVVRVPTYLMARTRASARTRGKSDAIDATAVARAVLREPDLPVACHDSVSRELELLTERRETLVDQRTATVNRVQWRIHELDPIRSAELKPLIFAKHRAPVAAWLADQPGLVAELARDELDDIARLTQTINAVEKRIVQQVRAHATHLLGIPGCGELTAAKIIAETANVTRFKSEAAFARYIGVAPLPYSSGSTDGHMRFTRSGNRQLNAAVHRIAVTQIRMAGPGRQYYDKRRTKGNSSSAALRLLKRRITRAVFSRLKADEADRRSQATAGSPERR

SEQ ID NO: 164780 - protein, 374 aa, unidentified
MDQNSTIIAVIEMSRSNWLVAGVIPGVDRQPLKKLEPDEEGLLHLLRRWQDEAARAGRTISRIAVAFEAGRDGFWLARWLRARGIEAYVIHPASIPVSREHRRAKTDRLDTELLKRAFLGWLRGEPNHCGMAAVPTLEQEDAKRPNREREVLVGERTRIVNRMKGTLARLGIRGFKPALPRAPERLETLRTPEGATLPPNTRAELQRDMARLRFVTDQIRELEAARAERLEHAPETGPNAMIRLLARVVGVGIETADMLVQEVLSRNLRDRRAVARYAGLTGAPDESGAKRREKGLAKAGNARVRRGMIQLAWRFLLFQKDSALSQWYRARTTDARGATRKTLIVALARKLLIALWRFGATGEVPQGVVLRPAA

SEQ ID NO: 164781 - protein, 351 aa, unidentified
MVYQNYWVGLDAGHLETAVCLVDADGQIIFEGICETKSGPIRDILRRHGVEAVQRVTIEAGNGTQMVRELMCFGFPVQVVDVRKSSKFLAIRRQKTDVHDARGLAELGRIARTMGSSVYLKPLEHQNIRSLMNVRRTLLKNRTRTDAVIQSIIRLHGGDIKLLTGQGALLAEVKNQTRLMKRKGLEIGIDLYPIVEIAEALRVQISVLDRQLRDLASSIPACANFMTVPGVGTIVALSFYSAIGDPYRFKHNRDVGAYLGLTPTLHQSGITSRRGRISRHGNKLTRMHLITAATVILCRIETESHLRAWGLRLARRIGLLKARVAVARKLAVIMLNMWKSGLAFRPYGSSS

SEQ ID NO: 164782 - protein, 364 aa, unidentified
MKKISKKQRAFAAESKPEKIVGLDLGDRYSHYCMLTASGELMEEGRIRSTVAALEKQFANEPRMRIALETGTHSPWVSRLLECHGHQVIVANARKIPVITASESKNDRNDAEQLARMAAFDPKLLHPVEHRSLERQQDLNLVHTRSVLVRARTMLINSVRGLVKSGGGRLPACSSAAFPGKAREVIPEVLKMACEPLLEQIAQMNRGIGEMDRQVEGLDKKYPEISILRTAPGVGPVVAACYVLTLDRAEAMETNRQAGAYLGLRPRQQQSGDSNPQRGIAKTGNNYLRSLLVQSAQYILGRFGPDSELRRWGLKLAASGGKRGKKRAIVAVARKLAVLLLSMWRNRRKFEPFPQAAAGLTVAA

SEQ ID NO: 164783 - protein, 420 aa, unidentified
MPNIEIGVDFMVKENFIYVGIDLHKETHTAVMIDCYNQKLGEITFPNRPADFPKLVTKVKKCNTDAKEVVYGLENAYGYGRPLAVWLIDKGYLVKDVNTAISHRQAKHRGAMYRKSDSDDAEAIALATINMLDKLPDACPNDAYWSLGQLVHRRDNIMKQRTRLVNQLHEQLCIAYPSYKSFFNDISRPTALYFWEHYPSRKYLRGKSVEDLRKELVPVSHNRCSTKNCEKILDAVASDKVKNNAYQDARDMVTLSIVSDLQHYDSQLAEVDKMLEQMYKMLGCTLTTIPGVNVITAVKILAEIGDIKRFSNANKLAQFAGIAPLHLSSSGKGKDVATKQGNRRLQATIYFLAIQMVQISSKGTPRNPVVRAYYEKCKAEGKTSQQALICISRRLISVIYGMLKNGTEYRMPVVENAGEK

SEQ ID NO: 164784 - protein, 421 aa, unidentified
MGAERSYSRAAGIDLGKRGLSVCIRTVGGRGAVKLEEAVYTTMTSQILALRDRLEAARVQIVVMEATGDYWRPVFWILSGTLPGVQVLLVNPAHVRILKGRKTDRRDAAFLARQAAAGNLAGSFIPPEPVREVRDLTRRRTGFTTARASEINRLEKTLEDTGIKITSVISDITGATGRRILAALIAGKRDPRALAALADARIRASAAELAEALTGRFTSHHGYLVADHLEEIDHYTGKILALDARIAELLDSDDQRRDIANLSTIPGIDTLGAQIIVSELGHDMAAFPSPGHLASWLGTTGGHNESAGVKRKTRPADGNTAMRRILGVAAFSVMGHKGTYLNARYHRLRGRMDSRKAQVAIMHDMAIAIWFILHDKVPYRELGADYFIRRDPAKIRRRIAALAHSIGATVDIHDQPTPATT

SEQ ID NO: 164785 - protein, 323 aa, unidentified
MDEVRGEDEVFVGIDVAKARLDVGVHPSGETWAVDHDEAGIMAVVERLGARRPRLVIVEAIGGLELALGAALVAAAVAVQVVNPRQARDFAKATGHLAKTDRLDALVLARFGAALRPTPRPLPDAALQEVRALVARRRQLQAMVVAEKNRRASAPKRLHAQLDEHLAWLKRAVADLDREIGRTIRGTPAWQAQVTRWRTVPGVGPVVGATLLADLPELGTLDRQQLAALVGVAPLNHDSGAHRGTRSCWGGRAPVRTALFMATLVATRCNPVIRAYYQRLLAVGKPKKLALVACLHKLLTILNAITRHGTTWQAAPASPAVAA

SEQ ID NO: 164786 - protein, 342 aa, unidentified
MDEYDGRQFVGIDLHRRRSVIVRQSESGEQLSAVRIVNDPVALGLQLEQAGSDPEVVLEATYGWYWAVDVLQACGAHVHLAHPLGVKGFRYRRVKNDVRDASDLADLLRMGRLPQAWIAPPQTRELRELVRYRAKLVAIRSGLKAQIHAVLAKAGVVIAASDLFGVTGRHRLANVPLGSAYAQRIGSLLQLIDIFDSHEARFAAMIAEQLDTHTGYHAIQQVPGIGPVLAAVFVAEIGGVDRFTDPAHLCSWAGLTPTHRESDTVVHRGHITKQGSKAVRWAAIEAVQRHPTTAKIAADKHRIEARRGKNIAKVAAARKLLTLVYYGLRDGHIRALDRTRAA

SEQ ID NO: 164787 - protein, 384 aa, unidentified
MYKHNILFIGLDTHKVSTEVAHVEDQRGAKPTHYGKVKTTKTAITKLARQYQSKYPHATLHFVYEAGPCGYWIYRLLTSLGHCCYVVAPSLIPKKPGERIKTDKRDALKLAKLLKDEELTPIYVPEPEDEAIRDLSRARETAMKDLKDAKYQLKALFLRNNITCKVNDNWSGQHLRWLTELILPHPSQQIVLQEMIQIITERIGREKRLANELFHQVKLWRFYPVVKALQAIRGIKLLIATGVIAELGDLRRFDHPRKLMSYLGLVSKEHSSGDNRRLGSITKCGNGRARRLLVQGAHTYKHKANISTELQKRQEDLPKGITDIAWQAQLRLCRRYSRLMSRGKHRNVVVIAIAREMAAYIWAIAREVVISPVNPRLRVSRVPA

SEQ ID NO: 164788 - protein, 360 aa, unidentified
MKDEIAEIIESKQKLFVGIDVHLKSWTVTILTENIVHKTFTQSAVASVLADYLIKNFPDCEYHSAYEAGYSGFRSHYELLDLGINNIVINAADIPTTQKEMFQKNDPVDSRKIARALRAGQLQPIHVLKIQTLEDRSLVRTRDMLVKDLVRLKCRVKAFLHFYGIDIPIQFKSPYTHWTKRFIKWLREDVQLSSPYGKDALGFLISEVESMRKLLLEVNRKIRDLSEEERYKKEFDLLVSVPGIGRISAITLLTQIENIERFKNTDSLASYIGLIPNSYSSGEKERIGEITFRGQKILKRILVECAWMTIRFDPALSISFNEYCRRMQPNKAIIRIARKLLNRIYYVLKNEKLYTCGIKN

SEQ ID NO: 164789 - protein, 467 aa, unidentified
MALTLGIDVAVRAAHQATLARDGKTVWRGHKFMTRPDELERVWAGVGVEGPAELTVVLEPTRNAWIVIAEWFRRRGAKVVMVPTTQSADLRKYYSKHAKNDRIDSELLARLPLLHPEGLRPYAGQGPADPLRRLVKQRSTMVKRRTAVYARLDALIELLGPTWYAVLGSNYGNAALELLARYADPHAVIRLGQARLARFLAARSRGNWRDEHAAGLIAAATETLVLWNVEGTDGVNFAELSADIAHEAEQALFLTRQIKDIDERIANLYADADPQGIVASAPGVGPTISAVIAGRIGDPHRFTSLAAIRAYTGLVPKVSQSGVVKTESSITKAGDPLLREMLYTAADQARKVDPQFAAKYQRLMAGDRHHDSAICHLAAMLVTRIATCMRAGQPYELRDTDSTAITESEGRAIIKQRYQLDPRQRDHVRHKLMRDRRNKAGQESQKSPSAPTSQPAKPKPMTSAQVA

SEQ ID NO: 164790 - protein, 435 aa, unidentified
MGNESHYVAVPPGRDARPVREFGSWTAALEEMAQWLKSCGVETVVMQSTGVYWIAVHDVLERHGLEVNLVDARGTKSVPGRKSDVQECQWLLKLHTYGLLRSCFLPAPEIHGVRTVWRLRDQHVKDAGRCIQHMQKALIEMNVQLHIAISDLSGVTGQAIIRVLLSGQRDPRKLAALRDRRIQATEEEIIHSLQGNWKEDVLFELQQAVEAYDFYQKQLAACDTQLKSYMAALPTREALPTTAAASEPTAAANGRKKRRPRKPTGNQPAFALAEELQRILGVNATRIDGIDVMTIQTVLAEVGPDLSAWKTEDQWSSWLNLAPKRDISGGRVIRHRREYHTNRAGNAFRMAAESLVRSQSYLGARYRYLRAKLGGLKAVKAMARVLACLYYRLVTKGQVWIDRGSVEFEQRKQQRDLASLQRKARSLGMQLVPAA

SEQ ID NO: 164791 - protein, 345 aa, unidentified
MNIASVGIDLGKTTFHLVALGERNKVLIRKKFSRAQLLAHTANLPASLIGLEACAGAHFLGAALQGQGHQVRLIPAQFVKPYRKSNKNDFLDAEAIAEAVTKQNMRLVQIKTQEQLDWQAMHRVRDRLVQRRTALINEIRGFLLERGLTFAAQPIHLRKSLPTVIEDAEQNLSPRLRWLLDRLWQEWKQTEIDIKAITQEIERISNEDARCRRLRQIPGFGPLVSTATVAAIGNGAAFRRGRDFAAWVGVVPRQYSTGGKQKLYGISKRGNIYLRRMLIHGARSVLFRVKYDTGGFGQWVHRLAQRAPRNKVVVAIANKLARIAWAVLSSGQDYCHQPLLQPAAA

SEQ ID NO: 164792 - protein, 516 aa, unidentified
MRVLAVAESSSGSSMAKAKPTRTSKEENAAATPASRVAAKGKKRKPERKAKQVHGRRRKRANIADRAVLEPNAAGIDIGAREMYVAVPADRDEDPVRVFDTFTADLNQLADWLVACGVTTVAMESTGVYWIPLFEILEARGIRPCVVNARHMKNVPGRRTDWHECQWIQFLHSVGLLRAAFRPEADVCALRTVIRHHGELVQMAGKHVQHMHKALTQMNLQIQHVITDMTGCTGLAIIDAILNGERDPVELTKLRDPRIKASREIIEKSLVGHWQPEHLFTLKQSRRLYAEYQHQLAECDAEIERLTGSFPPLVDPEVKPLPPDSKKNRNYAKNRKRAKMQQPNQDFDLRTEVYKLFGVDVTQIPGLEFLALQLFSEIGRDMSRWPTAAHFVSWLALCPDNDISGGRVLWRGARKAHNRAGQLFRMAAYSLDRSATPLGDYLRRMKAKLGPKAAHTATAHKTAVIFYTMVRNQVEYDQTIWEKRDEQRRQRHTARLKRQAERLGYQLIAIQEENAA

SEQ ID NO: 164793 - protein, 373 aa, unidentified
MSAAFKPTTKEWMKEVEMSVYVGIDVHKRSCQAALMNQDGTILHELKFENTIEGAHRLVNLARSVSPHVKAVLEPSANYWIKIYDRLEEEGIEVKLSNPSRTKAIAEARVKMDKIDAKILAYLLRGDLVAESYVPTKKNRERRSLIRHRASLMRMRTETKNRIHAILDKHDLTYDYTDLFGKQGVEWLRNLQLPTPDHQILQSNLQILETLNAEIQNADIQIAKDAVTEEQAKLLMSMPGVDYYAAMILLSEIGDVKRFASPEKLASWVGLAPQVHQSGGTHWTGHITRKGSKRARWILTQCAQSARQHDPRMREFYKRIEQKHGSSKAVVAVARKMLAIMHVMLTRNEPYRGENRQLTEQKHKRLERIADIA

SEQ ID NO: 164794 - protein, 313 aa, unidentified
MTKTTNTNPTDYIAIDVSKATLQIQDDQRTFAVDNDSEGHSKLLKHIKTRKNPLVVFEATGGYERGLCEFLREETIPLTMVNPARVRDFARSEGVRAKTDPIDTKMILAFAKSKALCAMETPSETCTKLAALLDRRGHLVEQLAREKNRLQNSEKLILRSIQRMIKILEKEISALDKAIDELVSSEPGLQSRSKLIQSIQGVGKITAWTLLAYLTEIEHLNRNRLVALAGIAPFNRDSGKFSGKRSIIGGRAKVRRCLYMATQSAANCNPIISAYVKRLRERGKPYKCAIVAAMRKLLLHIQSLIKNPKLSTC

SEQ ID NO: 164795 - protein, 322 aa, unidentified
MAMLSFGGIDVSKDRLDVMVLPEERCSSVDNDATGWAELVEQLRGCSIAAIGIEASGGYERGVMRALLAADLPVRQVNPFKLRQFARASGVLAKNDPLDARMIASFVAIMPTRPAQRQAPAAERLTEMLAVRRQLSAEKVAAENASRLLEDAMLQRLSRRRIARLAADLDLLDQRMVEILATDAALAHRYHLLSSMPGVGPVLACTLIASLPELGRMSRKQVAALVGVAPYAFESGTLKGRRCIWGGRAHVRQVLYMAAMSASNWNPLLKTFHDRLKAAGKLPKVAIVAVMRKMITTLNAMVRDDVIWADRLTGRHNVPTAR

SEQ ID NO: 164796 - protein, 480 aa, unidentified
MSRQKKHPKKPGKQKSAVGQGKRGGKRKGMCLEDRPILEPNAAGIDIGAREIYVAVPPDRDEHPVRVFSTFTEDLHKMAQWLVSCGITTAAMESTGVYWIPPHDVLEQHGVKPCLVDARGMKNVPGRRTDWHECQWLQFLHSVGLLRAAFRPNAEVCAVRSLMRHRGDQVMMANQHIQHMHKALTQMNLQIQHVISDITGLTGLAIVDAIIGGERDPTVLAELRDPRIKASEETIRKSLEGNWRPEHLFTLQQSRKSYQHYQEQIRACDEEIEKLLLAFESRVDPKERPLPPDRKRKQRGRKKKNVNPKTGFDVRTESYKLFGVDLTQIPGLMAMVLTLFSEVGRDMTRWPTAGQFASWLGLCPDNDISAARVWRGMRRVHNRAGELFRIAAYTLHHDQTPLGDYLRRMKSKLGPAGATTATAHKIAVIFYTMVKKQVEYDASIWAERDAEREKRFEAKLHRQARQRGYKLVPIEEKPAA

SEQ ID NO: 164797 - protein, 411 aa, unidentified
MDVLIERCAGLDVHRDTVVATVRRPGPGGVRRSETRTFTTMTGQLETLAEWLTAEKVTLVGMESTGIYWKPVYYVLEDMFPVWVINAEHLRNVPGRKTDVADSMWIAQLIEHGLVSPSFVPPRNVRLLRDVTRHGRRLTEERTRAIQRLEKVLQDAGIKLTSVASTILGKTGRAILAALLAGEEDPVVLAELAKGRLRPKIPALREALTHRFRLEHHGALIAQMLAHIDFLESAILETHQRIEVLLRPVADLVELVMTIPGVGRRTAEVLIAEVGLDMTVFPTAGHLASWAGICPGNNSSGGKRRPGRTRHGSMWLRIALTEAAQVAARGKGTYLAAHHAQIRGRRGTQKAIGATRHDILVAYYHIVRDGVAYQDLGPDWNNRRRSTEQQTRRLVRQLERLGVNVTIEPNA

SEQ ID NO: 164798 - protein, 353 aa, unidentified
MDKYIGFDIDCKKTVACVLQTGKKDFYATIGADIEAMKNFLIQQKHDSGKTHLVFEISGQAGLIYDSLMDVVDTITVANPTKMTWIYRTAKKNDRIDARKMAVLLSIGEVPSVHMPSKEVRQWRETILHRKKIISRVVQVKNRIRATFKSQGYKPLESGSWWKKTNLLWMRSVCQESIDACGLWQMHICNLLDEFDLLRNQLKRVTLYLDGYLAKNPGGKLLMSIPGIGPRTTEAVLAYTDNVHRFGNYKQYCSYFGLTPKLDESGSCRRLGHISKHGPSVVRWLICESSWIAIRKSKGLRAFFDRVKCGQDGRKKIAIVAVARKLLSIMRAMLLTGELFNEELVNKTINQVA

SEQ ID NO: 164799 - protein, 355 aa, unidentified
MERYIGMDVHAASCTLAVISEKGRKLRDFPVETNGQALVEAIRMIPGHKHLVFEEGLQSAWLYETLSPHADEVVVAGITESRGNKSDKHDAYGLAEKLRVGNLDKPVFKAPRQFTHLRELARIHMTLVGDVVRGQSRIKSLYRSRGIFVSGVNVYGVRHREEWQKQLCSSAQTRATRLYDHLDFLLDQKKQAEVDLLREAKKHPIVRVLETAPGFGPIRAARLVPIVVTPHRFRTKRQFWSYCGLGIVTRSSSDWIQAADGGWIRARVPQTRGLSRQHNHFLKSLFKGAATTVITQVNKDPIHARYERLLDGGTKPTLAKLSLARMIAATVLRMWKDEKEYDPERAGPSTVTREG

SEQ ID NO: 164800 - protein, 386 aa, unidentified
MPKPNDLSRSFTAFEQDSTLVAIIEMSLTSWLVGGIIPGIERHPLKKLDVDEEALLQLLHRWRDEAINAGRKITRIVLAFEAGRDGFWLARWLRARNIEAYVIHPNSVAVCREHRRAKTDRLDTELLKRVFLGWLRGESNHCSMAAIPTLGEEDARRPNRERENLLGERTRIVNRVKACLVRFGVRNFKPTLRKAPERLEALRTPEGGPLPPNSFAELRRDMVRLRFVMGQIKEIEETRLQRLENTPNEGSHAMVRLLARVIGVGIETADMLVHEILSRNLRDQRAVARYAGLTGSPDESGKRRREKGLARAGNARVRRGMIQLAWRFLMFQKESALAQWYRSVTNESRGAIRKTMIVALARKLLIALWRMVRTGEIAQGIALRTA

SEQ ID NO: 164801 - protein, 397 aa, unidentified
MYIVGIDIAKRKHEAAVIDGDGAVIIKPFSFTNNCSGYNRLLAMLTKAKLPLDEVSFAMEATGHYWLALFTRLQKEGFRVQVINPVQTNSIRSFYIRQAKTDPRDALLIAEVIRFGHFSESTLHPENIYELRELCRGRHAIVSMQADVKRKAVALLDQVFPEYETAFTNMFSDTSMAILQTCPTPKELSEMPLEELCHLIEVSSHKRFRMAKAQELQELARNSFGFAMAGDVFSTMIRLYAKHLDFLKQQVREMDRKIAEIMETLDTPITTITGIGPTLGAYILSEIGDINRFSSAAKLAAYAGIDPTMRQSGEYNGVRNRMSKRGSPYLRHAIWLAASSAVLHDPALKLYFQKKRDEGKPYMASVGHACRKMVSIIYAVMRDNKAYTPYIPNEISA

SEQ ID NO: 164802 - protein, 369 aa, unidentified
MKNGSTLRVGLDVHKESIAVAYAGEEGTEAVYVGEIGTRQCDIDAVIRKLQSKGAELMFVYEAGPCGYWLYRYLTGKGLTCFVVAPSLIPRKAGDRVKTDRRDAVMLARLARSGDLTPVYVPAVGDEAIRDLSRAREDALHDLNAARFRLKAFLLRNDIRYSGRANWSAEHVRWLARLVLPTPAQQIVFQEYVRTVSERTELLRRLESALLEQAKTWRLAPVVEALQALRGVQFTVAITTVAELGDLTRFDSPRQVMNYLGLTPSEYSSGERRRQGGITKMGNGHARRVLVEAAKAYRHRAKVSEQIQARQQHLPKEICDIAWRAQVRLCGRYKKLALRGKHANTIAAAIARELAGFMWAIAKAQATAA

SEQ ID NO: 164803 - protein, 344 aa, unidentified
MGEVITIGLDIAKSVFQVHGVDGVGAVVIRKRVRRAKMLEFFAELPRCLIGIEACPAAHHWARELQALGHTVRLMPPSYVKAYLKRSKNDANDAAAICEAVTRPSMRFVAVKTKEQQAALMLHRARQLLVRQRTMLSNAIRGHLSELGIVSAKGRNGADELLEIIGNDADNRIPLAARTVLKVLAAQYSAISAEIALISKSILAWHRSCGPSRRLEEIPGIGPIVATALVAEISDWKAFSSGRGLAAWIGLVPKQHTTGGKDKLGSITKQGNRYLRWLLVNGAMAVIRYAQKHGTKKHPWLGRLMARRPTKVAAVALANKIARIAWAIMVRGERYREPALLPAA

SEQ ID NO: 164804 - protein, 429 aa, unidentified
MIMGFTKPIEHSNLITKEVDFMNPLYVGIDVSSKSNVVYFMLPNGDKHSNFSVANSHDGSTQLVKRICSVLSSESLDTVSIGLEATSVYGDNLVYFLREDASLASFNRKIHVLNPKQVNKFKESYNDLPKNDWVDSFVIADCLRFGRINKEVYIGDYHYKALQNLTRARYFAVCNLTKEKQRFMNVLFKKYSTMTQEKVFSDTFSTTALAVYDEFESAEALAYMDLQELTAFIIEKGKNRFPDPDAVAKAIQKAARSSYRLPKTVNDSVNQVLSISITSMKALESQIKEFDKAIAAQMELLPNVLISIPGIGPVYSAGIMAEIGDINRFDNQASLAKYAGLAWTQHQSGNFEAQNTRLIHSGNRFLKYYLCEATFSLVRCDKEYKAFYHQKYKEVNRYQHKRALALTARKFVRLVFTLLKDNRLYRPAE

SEQ ID NO: 164805 - protein, 487 aa, unidentified
MRPRTTNSSTRTFDVHRVSFESVGALAFVNEYSGFAVQPARYIAFAECKLARPGSPIYHCRRCRVKPRSDPRFTAHVGIDWADAKHDVCLQAADSEQREFDRFAHQVGSIDHWAKSLHQRFGGPIAVALELAKGPLVYALQKYDFFVLFPINPATLAKYREAFKPSGAKDDPTDAELALDLLLRHPERFPPLKPQSVAMRTLLSLIEQRRELVDDKTRVTNRLGNALKQYYPQALDWFEQRDTILFCDFLRRWPTLAAVKRARNAGLKAFFYAHNGRRPTLIDERIEAIRAATPLTDDMGVIAPYRLQVLVLVEQLRVTLQAIDRFDRQIATVAATLPDYALFSPLPGAGPHLAPRLLAAFGEQRERFRSADELQKYSGIAPVTERSGKKHWVHWRWQCPTFVRQTFVEWAAQTVNKSFWAGVYYRQQRAKGSSHQAAVRALAFKWIRILYRCWQARTPYDESTYLNALRQRGSPLLKPLHPTAQNA

SEQ ID NO: 164806 - protein, 391 aa, unidentified
MFYVGIDVAKNEHYCVIVNEEKEVVCPGFAFPNSAAGFNLLVEKITAVEPDLTNVKVGLEATGHYSQNLLGFLVEKSFQAILLNPLQTKLYRNSLSLRKAKTDKIDAKAIAELLKDHKYLKTYSETSYHITELKSLTRFRFKLVAERSRLKADVKRFVVLLFPELEKLVSDIHGAAVYAMLKEMPGADMIAHCNLNHLTALLRKASRGAISADKAAEIREAAKASIGKKASTVSFQLTLILQQIELYNKQIEEVEANIQTYMETLNPPILSIPGLGFQMAAVLLAEIGDFLRFDSPNRIMAFAGLCPTTSDSGEVEDNHGHLEKRGSRYLRYALLQAARCVSLWDETFKRYLAKKKAQGKHYYVALIHVAKKLTRVMYSLMKTGQRYVAEV

SEQ ID NO: 164807 - protein, 345 aa, unidentified
MSMVSGVVGGVDTHADVHVAAALDLNGAVLGIESFPTDTAGYRLLADWLTAFGSVVKVGVEGTGSYGVGLARFLHANGVEVVEVDRPNRQKRRRLGKSDPIDAEAAARAALSGEASVTPKWRDGTVEQMRVLMIARRSARMQRNQTLNQLRQIVFCSPDEVRARFKDRFKTGLVSEAAAMRPRKGSDPVTYTTCVVMRGLARRIRDLNDEMRTIDDALTELIGATAPSLLECHGVGVVTAATLLVTAGDNPDRLHTERSWAHLCGVAPVPAGSGKTTGRVRLSYGGNRHANAALYQIVLTRMSSDPETRNYVRRRRAEGLSTREIMRCLKRYVARQTFKHLPRAA

SEQ ID NO: 164808 - protein, 345 aa, unidentified
MEIHTIGIDLGKTVFHLVGINAAGETVMRKKCSRQQLLHFTANLHVRLIGMEACCGAHFLGRALREQGHEVRLMPAQYVKPYVKTNKNDYIDADAIAEAVGRPKMRFVPIKSDAQLEMQSLHRVRESWVGRRTSVINQIRGLLLERGITIRKGRRHAESTLPQILEDADANLSGRLRMLLAQLQQELRQLQSQIDEIDVDIVQACGEQEACQRLMAIPGIGPITATAIVSAIGNGADFKKGRGFSAWLGLIPGQYSTGGKQRLLGISKRGNSYLRKLLVNGARAVLQSREKQSSGLRVWLGKLVSRAHSSVVTVALANKLARMAWAVLAKGETYRPPLLAEAVAV

SEQ ID NO: 164809 - protein, 463 aa, unidentified
MARNNKSKKQKMPVRSLKTIQPDAAGIDLGSREHWVACPPLEDNTPNVQRFGTTTPELVRLADWLKEQKVKTVAMESTGVYWIPLFEILDSRGFEVILANARQISHVPGRKTDMLDCQWIQLLHACGLLRGSFRPSDDICRLRALFRERNTMTEQRSDWVRRMQKSLDQMNVCVHHAVSDITGATGMAIIRAIVDGERDPRTLAKMRDRRCKKSEEQIAEELTGNWRPEHLFNLRQALKMYDQFCQIITEYDAEIFAYIKTLQPGADDDQCVPPPASKSKARNIAKKGQEPMRQALYQLTGFDMTIIDGIGVDTASVLISELGFDYSAFPDENHFVSYLRLAPNLSISAGKKVPSKLKGTTTSRVATALRMAALSLRNSKTALGAFYRRISRRKGASVAVFATARKLAQIIYRFVCHGQAYIDIGAKAYEAQFNNRRLKYYTKALKDMGYKIKPLAAAQAKAA

SEQ ID NO: 164810 - protein, 338 aa, unidentified
MRQLYTGIDLHSNNNYLGILDQDEKRIYHKRLPNQEDVTLAELEPFKQELVSIAIESTFNWYWLVDCLTTSGYTVHLANPAAMQQYKGLKHLDDKHDAFWLAHMDKLGILPQGYIYPKEVRPVRDLLRKRGHLVSLRTSLINSLQGILSRNCGHTLNSNKIKQTIENHVAPLLADNEDLALSGEVSKQSIDYLRGQIARIERICLKRMKIDPQYTKLLTIPGIGKTLALTISLETGPINRFETVGDYSSYCRKVPTKWLSNKKRKGNSKNGNKYLSWAFAEAAEYARRYNDQARTFFNRKSAKTKAAVAYAALAHKLARAAYYIMRDNVEFDGNKLFT

SEQ ID NO: 164811 - protein, 457 aa, unidentified
MTRQKHSRPARDIAPVHPHAAAVDIGATLHVAAVRPGSDPEPVRTFGTFTTDLHRLADWFEQCGVETVAMESTGVYWIPLYEILDQRGFEVVIVNARDAKNVPGRKTDVSDAAWLQRLHEYGLLRASFRPKGEIATLRSYLRQRERLLDQAAAHIQHMQKALTEMNLQLHHVVADVTGVTGLRILRALVAGERDPDTLAAYSDPRCKAPAETLRAALVGNDREEHVFALAQALELYDIYQAKVAACDQRIEAVLERLKAANPPPAAALPPARPRRRQANEPGFAVREALHAILGADPTQIDGIGPSLALTLVGECGTDLSAWPSAKHFTSWLSLAPHNKISGGKVLSARTRRSGSRAAALLRLAAVAVGRTATALGAFYRRLAARVGKAKAVTATARKIGVLFYNMLRHGMDYADPGASAYEARYRQRVLSNLRRRAKSLGYVLQKADPASAAIAVS

SEQ ID NO: 164812 - protein, 394 aa, unidentified
MILVGIDIGKNKHTFSIIDKNSGEILLSPSDFSNNLKGFLFLIQKLSSYTKSELLIGMEDTGHYHFALLKYLLDRRYTVALINPTTTDLTRKLQGGITKNDPLDSLTICDVISSNHRNKPYRVTTLNRFDLYEQKQLTRHHHNLKEELNTYKNRLQKCIDIVFPEFNSLFHSKYGIVYMNILKAFSSAKAIANADIRSIRKCFEFKGQGKRISLSAEQLKLTAKSSIGIPSVAEEIQIRHLVSQIELLEKQLSEIDKRIEEFSLKNNSPILTIPGISHFSGTSIISELGDICNYTKASQIIKFAGVAPYHYESSQFTAQHTAITKKGSKYLRKTLYQIILPVISNNEVFYAYYTKKLNEGKGHRCAQDHCIRKLLRVIYHLLSTRQPFNPKLLV

SEQ ID NO: 164813 - protein, 388 aa, unidentified
MQVVTGQAAAPTAIQTNLRAIFVSLELSRSTWLITSLSPGAAEKMSKHSVQAGDIAGLLRRLAQIKEKARARTGRDFPIITIQEAGLDGFWIHRVLQSEGIESHVVDPASIATSRRRRRAKTDKIDGETLVRTLLAYKRGEPRVCAMIKVPTPEEEDSRRLCRERKVLTAERVLHVNRIKGLLFCQGISGYEPLRRDRHERLEELQTGDGRPLPPHLKAQVNRELDRLELLLKQIKAVEAERDALLVAAHTPAAVPASMLLNIRGIGPEFAAVLWSEGLFRHFDNRRQVAAYAGLAPTPWQSGAVDREQGVSKAGNTRLRTTLIQLAWLWLRNQPHSALTLWFHERVSRNGGRLRKTTIVALARKLLVALWKYVTAGVVIEGAAMTAA

SEQ ID NO: 164814 - protein, 355 aa, unidentified
MDSVKYIGMDVHKEAISIAVLNSSGKLVMECTIETKAITILEFFKGLRGSLHVTFEEGTWAAWLYDLIKPHVTELVVCNPRRNALLKEGSKSDRIDARKLAELLRSNMVRSVYHGEHGVRTLKELARSYLAISKDVGRVMSRLKAIYRSWGIPCAGKQIYALRYRAEWLGKIAEAGVRRRAEFYFEEFDALRSLRQGARRELLVEAQKHDAWKLLRQIPFIGPIRAALLIALIQTPHRFRTKRQLWTYSGFGIETHSSAEHRCVQGELRRSKKPASIRGLNRNHNHDLKSLYKSAATVAAAKPGPFQEFYNSLVAKGIRPEMARLTLARKIAAITLIIWKKGVHFDAKHLKPQTA

SEQ ID NO: 164815 - protein, 352 aa, unidentified
MERYVGLDSHARSCTLGVMSAAGQRLKSLVVETNGSALIEAVRGIPGRVHLCLEEGTQSAWLYELLRPHVAEVVVAVAPERKGAKDDQRDAWARANELRTGSIETRVYKAPEHLAGLRNAVRAYGFAVTDVVRAKNRLKSVFLSRGMSADTSVYDVKKRPEWLKKLSSPHRELAEWLGRQLDQVVPLRDEAERWLLTEAKRHPIIRKLATAPGMGPIRTAQVVAIVATPERFRTRRQFWSYSGLGIVTRSSADWVQDRNGKWVRSQLTQTRGLNRKRHPRLKSVFKGAATTVIAQLPGDPLHGDYERMLQSGIKPPLAKLTLARKIAAMVLSMWKHQEVYDPKRHHPSPDQP

SEQ ID NO: 164816 - protein, 411 aa, unidentified
MLKIVYPICCGLDVHRDFVYACIASTNEHGVTMYKSDRFSTYTRGLKKLSAWLADKNCSDVCMESTGKYWIPVYNVLEITCKVVLAHPKYVKSIRGKKTDKKDAKWIADIFKHDLVNGSFIPPPAIRQLRDLIRYRFKLTSYSTGEKNRAQNCLTVSNLKLDDAFSDVFGKSASIIIEKILENPNEPFDVSPFIHKGCKTPVEEIQAAVDGVICPEQAEKLRIIRSHLDDLDKAKANLESAILTLAKQFAPQINLVSTVPGIKSFAAVAIIGEIGVDMSVFPSAKHLCSWAGLVPQNNESAGKKKTTRIGRAGAYIKPLLVQCANAAVKSDKHPEIRNRYLKLKKRRGHKKAIIAIARMLLTAIYNILKKNEPYNSELYKKSDEQPKPSIFSVDLAIRMLLTQGYSVSPPV

SEQ ID NO: 164817 - protein, 345 aa, unidentified
MQDDLVLGVDTHKDLHVAAIVDAVGRLVATAEFPSSDSGGHQMLSWVRRYGRLRRAGLEGTGSYGYRLAKLLQANGVETIEVNRPDRSARRLRGKSDPIDAEAAAHAVLSGRATAIPKDREGPAGALRALMVARRSAVKARTQATNQIRALLVGCDDDLRGRLSELRGRTLARGCARLRSCEGTRSALRSLGRRWLNLDREAGELEDEIRLIVTRIAPRLLDRPGVGVLSAAQLLITAGDNPRRLRSEAAFTALCGASPVEASSGRTSRRRLSRGGDRTANAALWMMAHVRMVRDERTRTYAASRTQRGNNRKEIMRLLMRYIARELYPIILESLTPEPALDEVA

SEQ ID NO: 164818 - protein, 359 aa, unidentified
MLKYSVGLDISAKTIYACISVIDAAQKVTVKSSCKIDNTLSGFKQLDQWVNKHHRLKDVPLVVNMEATGVYYENCALYLFKQNYSVSVLLPNKAKKWLQSEGLKSKNDKIDAQGLSKMGAEKALELWQPAAEYYYELRAMTRQRQSLQEFKTAVGNQLHAEEHGMYKNKLVIKQLKQQISFIEKQITDLEPVIEAHIAADKEVAEKVENICKIKGLGIQTVAVIIAETNGFILFKNGPQLVSYSGYDVIENQSGDHKGKTKISKKGHSRIRRCLFMPAFNMIKFKQTPFVDLYNRTFEKHGLKMKSYVAVQKKLLVLIYALWKNNAAYDIDHKNKHTRELEQALPLGLASIEATLTNAV

SEQ ID NO: 164819 - protein, 369 aa, unidentified
MFQHTFIGLDVHAVNVAGHALNPATAEVSDHTMPADPALVLEWVRRFPPPVKVVYESGPTGFALARYLRSAGIDCVIAASSKLLRATGDRVKNDRRDARVLAGMLAVGSVTEVRIPEPDEEALRDLARLRSGTAKDVAHARQHVNAVLLRHGIRYPKESRWTQEHKLWLHRQHFDQPPLQFSYDADLEQAELLAGHLKRIDKQVAATATACRYGPVIDALMCLRGIQLTTAFGLAVEIGDWTRFTGSSIGSYLGLVPSEESSGQTRHQGPITKAGNTYARKLLIEAAWQHRRPYARPGDRLLRQLDLVAPATRIRALEGNHRLHRKWEHFDERHKMPVKANTAIARELAGWCWSLAAPLQQQGSPMNPA

SEQ ID NO: 164820 - protein, 349 aa, unidentified
MDFIAFDAHKHYTWARSETPQGELHREERIEHEKGSVKKFLSKCERGSPVAVETVGNYYWIVDEIEAAGFEPKLVHARKAKMMMACTNKTDKLDAKGLNRLQRVGTLPTVWIPPAEIRDKRELPRTRMMLVGLRTKLKNRVQSALAKYGLVVDGVSDVFGKKGRERLGRVLESLPRYTRQTTELLLTQIDSLDASILELEKEMQAVFEPTPEAAILQTLPGVGSILSVVIATEIGTVERFPSAENFASYSGTTPTEHSSGGKTRMGGLRKDVNQYLKWAFMEAANCVARYARARRDAHVSRLYLRIKSRQCHQKAVGAVARHLAEATFWMLKKKEDYRSPESPKSSKGR

SEQ ID NO: 164821 - protein, 390 aa, unidentified
MYIVGIDIGKRNHEASIMNAAGKQYGKPIRFANSHTGFNKLMDWVKNISGADDVVFGMEATGHYWLALYTHLCHEGYAVHVVNAVQSDALRGMYIRQAKNDSRDSFIIAEVIRFGRFCETAVSAPELHALRELCRHRFWIVDSVSDLKRKVIALLDQVFPEYENLFTNTFGKTSLQLLSEYTTPEELLAVDTDKLAETIYTASRGHHGIEKAQEIQNTARNSFGILLASDSIALLIRQYIEQIRFVEKQVDRIDTEIARLLSAFDNQLTTITGIGPTLAATILSEIGDIRKFASPGKLAAFAGIDPTMKQSGNFVGSHVHMSKRGSPYLRRAIWLAATIAAFKDPSISVYYQRKRSEGKSHLTALGHVSRKMVNIIFAVLRDNTPYSPAI

SEQ ID NO: 164822 - protein, 440 aa, unidentified
MSKRRNRVCGADVHRDLIVATILGEDEIPIREQFGTTHAELERFRDWLIANGCQQVAFEATGVYWIPIYDVLSPSIDTIVANPWMIKTIPNDKSDAKDSSRIASLCFNGQIKRSRVFSEDDRALRTMTRARTGDIKTRTQFRNRIHKYLASDGIKLSSCISSIFGKSGSHILNGLVEEKSIGEILDGIPSGKIRKKRDLIKAALGNGLDETNRLLIKDTLDVLDVLETKIAATSQRVLDKILTRKTDLAIVMSIPGIGFVAGSVILSEIGDYRDFKTPGQLAKWCGLSPGVNESAGKKRTCGITKQGSKYLRTVLVEIAHVVARMGDTRLSRSFRNMKGRKNYNVAITALARKIICLVHHLLVNQELYQEDDCDKRKSKPAKNECSSSSLPEENLEDKVAAIVDAFYRLNAHNRKGVPGDVLGGLPGPEFLSGKRFDGGG

SEQ ID NO: 164823 - protein, 363 aa, unidentified
MSNVTFVGLDVHNESITAAILSPGSDEPQVLKLPADLMKVRQLFCRLAEKAPVRACYEASGAGFVLQRSLAVGGFHCDVIAPSLIPRRAGDHRKTDRLDAIMLARLYRSGHLTPVHVPTEELEALRRLLRLRRSYHAQVTSTKHRISGTLRNHGHIFNGTKSAWTKKHYLWLGKLRQTLQGHLQTALSIDLEHLEYLESQIRAIDGELELAAHAMPYRPKVEALCCLRGVKSLTALTLLCEIDDIRRFAAPTGLMAYFGLVPSEHSSGNVERRGPITKAGNTHARRLLVEAAWNNRHGAAAELVLNRRRQGQPPAVVAIALKAQHRLHRRFVRLDQRKHRHVAITAVARELCGFVWAVLMAMN

SEQ ID NO: 164824 - protein, 351 aa, unidentified
MDRYVGVDGHSRSCTFGIVSASGRRLESKVVETNGRALVEAVRLIPGRVHVCLEEGTQSAWLYELFKPHVAEVVVSMPSKAKGAKDDKRDAWARAQELRLGAVETRVFKAPQHLAALRSAVRAYGFAVTDVVRAKNRLKAVFLGRGIVADAGVYDPERRDGWLAKLSGPYRQLAEVLSRQLDLVVPAWDEAESWLLTESKSHPIIRKLLTAPGMGPIRTAQVVAIVAVPDRFRTRQQFWSYCGLGIVTRSSADWRPGRKGGLERAQTLSTRGLTRKRHPLLKAVFKGAAMTVITQLPDDPLHAHYQRMIEKGIKPPLARLTVARRIAATVLSMWKNQEVYDSKRHAVVEQP

SEQ ID NO: 164825 - protein, 387 aa, unidentified
MQPPNDLSRSLAALDQDSTLIAVIEMSRSTWLVAGIVPGINRQPLKKLAADETALLQLLYRWRDEATKAGRTINRIAVAYEAGRDGFWLARWLRGRGIEAYVIHPTSVAVSREHRRAKTDRLDTELLKRAFLGWLRGEPRHCSMAKIPTPEEEDAKRPNRERENLVGERTRIVNRMKSTLARLGLRGFKPTLRKAAERLDRLRTAEGVLLPPNTLAERRRDMARLRFVLDQMREIEAARLIRLEQHPELASHAMVRLLARVIGVGIETADMLVHEILSRNLRDRKAVARYAGLTGSPDESGARRREKGLARAGNARVRRGMIQLAWRFLMFQKNSALAQWYRMQTTDHRGTTRKTMIVALARKLLVALWQLVTTGEVPEGVVLRPAV

SEQ ID NO: 164826 - protein, 379 aa, unidentified
MQKISTMQTSEENILNGQLTIGLDLGDRFSSYCILDEVGKILREQKVPTTPEEMQQTFGRMVRSRIAMETGTHSPWVSRLLTGLGHEVIVAHAQRARLIVKSRRKDDRLDARTLARLARIDPELLSPVQHRSAEAQIHLTEIRARAGLVSARTALVNAARGLVKSYGERLRKCGTQQFRQEITSGLSTELREALEPLVREVESLNERIKEYDRRIERMAKETYPEVELLKQVKGVGDLIALAYVLTIEDPHRFRKSRDAGCFVGLQPGRRDSGESAPQMHISKEGDEYLRKLLVQGAHYILGPFGEDSDLRRWGKKLAERGGKNAKKRAVVAVARKLAVLLHRLWVSGEAYEPLRNSQKAPEPGTEFVTEQPSLTAEFR

SEQ ID NO: 164827 - protein, 317 aa, unidentified
MFVGIDVGAKHLDVATTTTALALPRRVANTAAGIATLSAVLREVAPELVALEATGNDHRPLLAALLGAGLPVTVVSPAAVAAFRQSRLGRHQTDRADAALLARFAALHHDELRRAAPDEPELAQLRALVGYRDDLVARQTRLRNQRHAAEWAGAETVVAWLRVDLEELDARLQAVERAIRALLATRPETALLTAQAGVGLLVAAAVLAYLPAGVLGNPKAAAAYAGLHPRQEQSGQHDHSRLSKQGCPAVRRYLYLTALAAIRADPELAAWYQRLRARGKAAKSAVCAVAHKLLRRLMGRIRAVRQQQPVLLPGLAA

SEQ ID NO: 164828 - protein, 347 aa, unidentified
MIIIGCDLHTRCEQIAMLDTETGEIEERRLEHESGEARKFYAGLKEPALVGIEATGYTRWFAEMLAELGHELVVGEAGKIRAKETRKQKHDRRDAEHILNLLLRGDFPKIWLPSAEERDVRVLLEHRHQLVELRTRAQNGLQAIALSYGLRRRRRLWSERGQEELKKLPLREGMERRRADLLRLVRQLDTWVQELDRRIEPEAAQREEAQRLMTHPGVGPQTALATVLVLGPVERFPDDRHLTSYLGLIPQEDSSAGRQRFGHLTKQGNRLLRWLLVEAAQTASRYDPRLARAYRRLTFRKGRAIAKVAIARKLAIRLYIMLRDKIDYAEFCRRGSHAGMLEDVALV

SEQ ID NO: 164829 - protein, 350 aa, unidentified
MADRNKPREAAVFGVDIGKNLFHVVGLDVTGAPVQRASFRRDTLLQFFERATPTVVGMEACPGSQWLARKIRAFGHKVRIVPAKFVKPYIKSNKNDIIDAAAIAEAVSRPTMRFVEVRTPEQIHLQALHRVRDRLVAQRTRVICRMRAFCLEYGVAMHQGAGKFKADLPKVLASDENDLTPAMRRLLASLFEDVRQLEARIAEVSREIEAIAAADDTTRRLMTIPGIGPLAATALLAAAGKGRQFKKARDMAAWLGLTPREYSTGGKTTLLGISKRGNAYIRRLLIHGSRSCLLHLDRSRDRLGGWLDGLQARMHNNKAVVALAAKVARIAWVVITTPGATYEKRGPATA

SEQ ID NO: 164830 - protein, 465 aa, unidentified
MNVVLGVDLACRAAHQASLARADGTFLWSGRKFFTTPADLEALWVRIDLQPGQVLTVVMEPTRNAWAPVASWFRRRGARIVMVPTTQSADLRAYYSKHTKNDQLDSKLLARLPLLHPEGLREQTGDGPADPLRRAVKVRSTMVKRRTAVFSRLDAHLELLGPAWYDALGSRYGKAALAVLARYADPNALLRLGSARLTRFLIRYSRGAWREEHAGLLLAAARQSLELWGADGIDFAELAADIAVEAEQAQVITEQIEDLDERIASLYELADQKGIISSAPGVGPVIAAVIAGRIGDPHRFSSLAAIRAYSGLVPKVTQSGLSSSQHGLTKAGDVLLREAVFAAADGARKTDPRLAAKYVRLMATDRHHDSALCHIATALLTRIATCWRAGTPYVISDVDGTPITAEEGRRIVLDHHQVDPKMRNSAAQRRVSQRRKGRADRERKESQSAPASRPAANTLKPTAAA

SEQ ID NO: 164831 - protein, 429 aa, unidentified
MTERNDTPQRLTLVAIDIAKHCHDVLVEPPPPKRRSRLRLLNNREEFEHLTDYLCGLKSAVVVGFEATGNYHRPLAYFLHRQGFELRLIPTLALARTREAMHNSWDKNDPKDAQVILHLLKTGLTQTWHDPIVNGINDVQELSKTHFQVTLARVRIWNTLRNHYFALYFPEIDRFVRSDHSVWMIQLLASFPTPASITALSEEEFQTRAWHLVGRKVNKRALLAEIYAAAKHSIGVPVALDSAAIAMFRLVLEQYLSLHRLRERIAEQAAILLGDNPDSRRLMTVPGIGPANALTILAEAGDLRRFRHHRQFLNFCGLNLSTLQSGKSRGQSHISKYGNARLRTALWMAARTAVRMRENSFRRKFDNYVRGNPLDADLRRKAYTAVTAKLARVVFGLIKQQTDYRPFFEHQFQVEEPSRTSAVGAVSTP

SEQ ID NO: 164832 - protein, 343 aa, unidentified
MQMVTTVGFDIAKSVFQVHGVDAVGQVVVRRQLKRRHVLAFFEKLPPCLVGIEACASSHHWSRELQALGHTVRLMPPAYVKPYVKRQKNDMADAEAICEAVTRANMRFVPTKTPEQQSCLMLHRTRHMFIRQQTAVINSIRAHLAEFGIVAPVGRKGVTELLQIVADPNDKRVPEVARACLAALGNQLLRLKEQILGFDRLIMAWHRSNQTSKRLHYIPGVGPMLATALVASVADPRTFRSGRNFSAWIGLVPKQHSSGGRERLGSISKQGDRYLRSLFVAGALAVIRYAKIHGTGHRPWLTALLARRPTKVAAIALANKIARMAWAMMARGERYKQPAALAR

SEQ ID NO: 164833 - protein, 400 aa, unidentified
MLHWPRSYGVEAPLGGPEMEMVLRCCAGLDVHKKSVVACIRRITDRDHLEEKVSHFGTTTAELLALADWLAAPGVRQVAMESTGVYWKPVFNLLEPRFEVMLVNPQHITKVPGRKTDVTDSQWIAQLLQHGLLRPSFIPPLPIRQLRDLTRQRSQLVRHRATACNRIQKVLEDTNIKLASVAADILGVSGRLMLEALIRGVDDPVVLAELARGRMRSKIPALREALRGQVLDHHRFQLRELLDQVSDLDDRITRLSEQIATVIAPFSSAVERLQTIPGVDRRAAEVIIAEVGTDMTRFATAGHLCRWAGMSPGNNRSAGKRKSGRTTKGSCWLRSVLVQAAWAASHTKDTILGERYRRWVKRMGRKRALVALGHKILVLVYKLLSDETEYEERLKPEETA

SEQ ID NO: 164834 - protein, 432 aa, unidentified
MTFTKHKVINNLQVVNLNCAGIDIHRDTANVTLLSQDNNGDSVSEYLCFNTDRKSLLKMKEWLLENNCLVVGIESTGKYWIPVHNVLEDSITVKLYNARNVKNIPVKKTDKSDSQWLATITRYNLARASFIPEKQIRDARTLSRNRTATVQARTMMRQVVHGVLQSAGIKLSSNMSDIFGKSGTNLLDLITYNKPYTEATIKKLVYGPLKDKSKLLVDAMEGDIRPAHRYTLKHDMAIMNTLTTQKEDFERELEVLLLNSESHRQTFERLQEIPGFAKLSALLLLAEIGFDLDTFPTCRAFCSWAGVCPGNHESAGKKLHGKIQQKKNNVKTLLIEIAWVSVRMKETYYAAKFMSMRARKGPNVAIFIIAHKLAKAIFQVVKREQQYDELGFDHVVQDNISRSKRYVVNAIQKLGKEAVLEMIAQQEIAPII

SEQ ID NO: 164835 - protein, 341 aa, unidentified
MRYIGLDVHKDNITACVLTSTGKPKFEKDFLKESGNWILDELLDFKDKEGFCVMMESGTYAYAPFRFFSDRGIEVHVVHAKALKVITDSDKKTDRKDALTIAKMLRLWKKGDIDLQMAYMPTREQCELKDICRYREEISRKIGDETRRIKSHMSRNCEYLPEEFDNFQTEKAREFVKKTYPEDRTLMRRMDCLIDLFRERDLVKEDVGSRLPGSREVGLLCGIPGIGRQTAVQIMSMIVDVNRFADAEKLCAYFGMVPRVRDSGGKEHHGRMTKNGDRMMRMIMERVTESHVRNCNSSLTQYYKRKRDEMGTKKALITASRKMLSVIYAVLKSGRDFRIAA

SEQ ID NO: 164836 - protein, 357 aa, unidentified
MQPKSSEVDFRGQDIYVGIDVGKRSWKVCIVTEYVEHRVFTQPPTPAMLANYLHRTFPGARYHSAYEAGFSGFWAHEELQALGIDSRVVNPADVPTTQKEKSFKTDRIDARKLARSLRSGELKPIYVPPQEAQTYRSLVRLRSVLVRDQTRCKNQITSLLHYYGVPIDELCIRTHWSRAYLRVLETTSLHTEQGTMALRILLSRYYAIRDQVLALTKEIRTLAHEEPFRESIRVLVTVPGISVITAMVLLTELIDITRFASLDHLASYCGLVPGERSSGEREIITGITRRRNPFLRAILIESAWCAVRHDPALLAMFGSLSKRMNKNRAIVRIARKLLNRIRFVLLHHTEYQRSLAA

SEQ ID NO: 164837 - protein, 347 aa, unidentified
MNRYYGCDAHKRYSMFAAMTDGGRAGAPVRVEHTRAMFRGFLEGLPPGSPIAIESVGNWYWMIDEMERAGHIPKLAHAGKAKLMMGQINKTDKLDAQGLALLLRNGTLPSVWIPPGELRDQRELPRMRMGLVSIRTMLKNRIHATLAKYAVEIEEVRDLFGVKGREILAKRLEELPPYTRRSVQTQLELLDEVESHIQSCEEEIRTVVRTTPAMELLKTLPGVGPILAVVIALEIGDIDRFPGPDRLASYSGMVPRIRSSGGKTTFGKVRPDVNRYLKWALIEAANVIMMNRAHWPNRHVVRLYLRIRERRGHAKAIVAVGRHLAEAAYWVLKKNGPYREPISSTQK

SEQ ID NO: 164838 - protein, 327 aa, unidentified
MSAIVTIGIDLAKNVFAVHGVDATGKSALVRPSVARSKLLELIASRPPCLIGMEACSGAHHWAREFQNFGHTVLIMAPKFVIPYRLSGRRGKNDAADAAAICEAVTRPNMRFVPIKSIDQQGQLMVHRARQGFVEQRTATLNRIRGLLSELGIVLPLKAAVVRREAMARLEDLPGWANTVIGDLLSEVSHLDERITQYDHHIELMARHSTESKRLMQLSGVGPTTATALLSTIGNGHDFKCGRQLCAWLGLVPGQYSSGGKQLRSLLVLGARAVLAAAKYKSDPISRWAVSLEQRRGYWKAIVAIAAKNARMCWAVLSRGEAFRLPA

SEQ ID NO: 164839 - protein, 417 aa, unidentified
MKPWNEITHYAGFDWAKGHHQIVIVDRQGQIVAQWEFDHSLEGWKQWRERITSYPGLAVAIETNQGAAVDQLLQSGNTVYPINPRSAKAYRERKVSSSNKTDRLDAWSLADALRTDGHAWRALAPLDPLLQELRLLCRDELNLIGQRTALVNQLQAALSEYYPAALQAFDDWTMPASWKFLERFPTPQALARIGPRKWENFLHCHKLYRPQTHARRMEAFQQATQFCGSPAVTRAKSMLVLSLVKLLKVLEEQLEQYRAQIEQLFARHPDHDLFGSLPGSGPKLAPRLLSEIGDDRQLFPDAQSLQCYAGSAPVSYQSGQVHKVYMRRQCNKHLRCALHLWANLSRRSCQWAQVYYHQLRQRGKSHAQALRCLSHRWLKILWKMWQTRTVYDPELHSRNQTTHGSWVLQLLQAQPRQ

SEQ ID NO: 164840 - protein, 348 aa, unidentified
MLHAGLDLSRKKIDVCLLSEHAEIVEEFAAPPDADGLRALARRVAVHREPVRAVIESMTGARFVHDRLEELGWEVLIADAAKVKGLAPLACKTDKIDARVMAVLSHRDLVPEIWLPDPRVRREREQARFRMHLVKHKSSLKNRIHSTMITFGHPCPVTDLFGVAGRQLMDRLEVPQPWRGTIDASILLIDDLERQIDRVNRELRAGGADHPYVPLLLTVPGIGWVLAFTIAAEIGDISRFPTATKLVGYTGLCPRVNQSGDRDRRGPLTKQGPKYLRWAMLEATMHACRHDAYRDRYQRNKQRLGKQRGAKVAQIDIARRLTEAVWHMLTRNQPFTPSAGGSAFRLAA

SEQ ID NO: 164841 - protein, 330 aa, unidentified
MNAYIGIDIAKKTYAVAVRINGKSKHKEFDNKADGHRQMLSWAMKATSDNQRCFIMEATSTYHLDCALFLHQHGEIVCVVNPRFVHNFRKALGYENKTDITDAQVIAHFGEVKMPESWKPQSKNITLLRDLISRREELVKMIRQEKNRISVPLASNKRRQSVEKVLATLEEELDEIEKEIQKLTKNDEEIHKSVELLRSIKGIDWTIAVTIVAIIGDINLFNSKHDLISFFGVNPQNSYSGSSVHYSRMSKNGSPTARKHLFIAAKVGSIHDDIFRKYKESLMEQGKLWKTAICALMRKLVGIIYAILKSQTPFSHEIYQRTAEKFQLST

SEQ ID NO: 164842 - protein, 325 aa, unidentified
MDDIILKTFSQPADAETLYRYLTKNYPGGSYHTAYESGFCGFWPHYKLSALGIHSIVVNAADVPTNQKQKTQKDDKRDSRKIAHALRSGVLTAIHVPDMSTLSDRSLVRTRWTLVKDMVRNKLRIKAFLYFFGIDYPEEFSRSTTHWSKRFMKWLRGITLPDLTAMQSLNTLIDQLEDQRKHLLEITRKIRALSKSEKYQRNIALLTTIPGIGGITSITIMTELASIDRFKDSDHLAAFIGLVPTCHSSGDKEHKGEMTFRHNDRLLQMLIECSWKAIKDDPALSLCYSKLRGRMNQNNAIIRIARKLVNRIYSVLKNQKEYQGG

SEQ ID NO: 164843 - protein, 347 aa, unidentified
MEHIAIDLGGRKSRICVRDDQGTIVEEHTCLTRQLGRYLEMRPFSRVVLETCSEAFAVADQAIQIGHEVRVVPATLVKSLGVGSRRVKTDKKDAQVLSEVSSRIDLPSVHIPSAQSREWKALCSARDSLVRSRTKLINHTRGWLRTQLAQVRSGGVQSFPERVEEKLLSRPEGMPAYIDRELHSIKTLNEQIAEADNELRQIAAQDARCRNLMTVPGVGPVTSLRFVATIDEVSRFRGAHGLQSYLGLTPGENSSSMRERKTSITKAGAPAMRWLLVQAAWCAWRTRPDDPMVRWAKQVGKRRGTQIGVIALSRKLGGILYAILRNGTHYQSKRAADSLPLPANSAA

SEQ ID NO: 164844 - protein, 452 aa, unidentified
MAQGSGLTRGDRNRNRKIAVLRQVVRRDRAVLAVDLGEDKQAAVLVDHEGRVLARKTVTAKAHRLGALLEWAAGQAARAGFAGLVVACEPTGHRWKALMGLADAAGAGFVCVQPLAVHREREKDDYTRDKTDHRDAYLIGRLAVRLDCYLPERAEEAWARLRHLGARRSALVADVVCCTQQVSDLLACAWPAALATAARPLESTTWLAAMGVVTDRCCGDPARLRTMGYEKFLAAVRRELPRWGAKRVYHKIVTGLWDALADRGGVAAQRRGALERVHLVMADWRSLLARQADTEGRMCAVLDELGLTGLVTSIDGLSAVGAAVILAETGELSRFATSRAVVKHAGLNPAENTSATLAGRTRISRRGRPGLRTAAWRAAWPGLRHNRVLAARYAHLTGRDSGTRLSDGQARAACAAALLRWLWAVVTRRQAWDARIAAGLIPARAVTAPAAA

SEQ ID NO: 164845 - protein, 282 aa, unidentified
MEATVNQYIGLDVSLKDTAISIREDGKRIWRGKCPSDPKLLVQIIRKKAPRAQRIVFETGPLSTWFYHALTGEGLPAICIEARHAQKVLNETLNKTDANDADGLAQLAEAGFYKAVRVKSFDAMRARTLVAAREQLLYISTQLGNQIRGLMKTFGLIIPKAKGRVFDGDVRKLLDGNSELAKIILPLLEAWHDIRKRAADLSRQLLIAARASQAAKLLMTIPGVGAVTAVSYVTAIENPENFRTSRSVGAWLGLTTRRYQSGEVDYDGHISRRGQSFTGAAL

SEQ ID NO: 164846 - protein, 342 aa, unidentified
MQVTTIGLDIAKNVFQVHGIDEAERVVVRKQLRRGQVLAFFKALQPCLIGLEACATAHYWARELRKLGHTVRLMPPRDVKAYVKRNKNDAADAEAICEAVRRPTVRSVQVKSAAQQSQLMLHRTRDLLMRQRTQVINALRAHLAELGITAEQGTTGLKELLRIIANDDDERLPVDAYASLVVLAAELQAMQTLIGSLEKRLKAQHRKSEASRRLETIPGIGFVGATAIAATVTDPSVFRSGRDFAAWIGLVPRQDSTGGKQKLGPISKQGDRYLRRILVVGAHSVLRLAKQKPEKYPWLTELLARKPFKVVAVALANKMARTAWALLAHGGTYQAPRLAAAA

SEQ ID NO: 164847 - protein, 369 aa, unidentified
MTSIIYVGMDVHTTNYTLCCYSIEKDEIFAQTTMMPDSRNIENYLRQVSLRYGDCHFLCGYEAGYLGYSLYNELIWKGIDCVILAPSTMPTTNRKGIKNDKRDAINIAKCLAYNTYSSVYVPTEEDNAVKEYIRMRNDARNALKTVKQQLLAFCARQGKRFTEGRSNWTLKHLAWLKKLDLGNAVLQETLREYLASYHQAADKVGVFDKRIAELAKSESYEEKVNRLSCFIGIKAHTALALIVETGDFKRFATAQHYASFLGLVPGEASSGDSIRRTGITKAGNTHLRSLLVEASNCYSRGAVGAKSKALKERQSGNDPTVIAYADRANERLKRKFYRIQFRSKRNIAVTAVARELACFVWGMMTDNVA

SEQ ID NO: 164848 - protein, 334 aa, unidentified
MKYQHVVGMDIAKDSVQASCFDGTTFFDFSFPNQEKSFLKKIQKSIPKSDPSHILFVMEATGVYHLKLATALDKEGYSVAVVNPFIIKKYAEMLLKRAKTDRNDARLIAQFGFYQEVTLFTPKESLAEEITQVLKGLDQLKKERTPLKNYQEALTHHNEINSVVRDIYQKQLKEVEKAIKTLEAEAKRLVCQYAPKEYQLLLSIKGIGKCSATALLGFLQKMDRFSRGKEVASFLGLAPQISQSGKDKGKAWLSKKGNGYLRRLLYLAALSASRSNVQCRELYQRLLAKGKPKKVALIAVANKLLRQAFAVLKSGCPYDPHYLKLKSNLEVVLT

SEQ ID NO: 164849 - protein, 512 aa, unidentified
MITIPAVRERCAGIDVGKRGIAVAVTTGPADKEAAIQTRWLGTTVPELEALREWLLQEGVTSVAMESTGSYWIPIKNVLEKSLEIVLVCSKKHHPKKGEKTDFRDAMQLAHLHRHGMLTGSYLPERGIVELRDLTRRRKKLLGNLGSEKNRIQKVLEVANVKIGNVMSNVFGVSGQEMLEALLTGREMEAEEIAGMAKTQLKTKIPQLTETLKGHQLNDHHRWLIQQSIDHIVLLDRQLEELEDRIIMKIEPYRKQFDLICTVPGFKEMNGAALLAEIGPDMSVFPDGDHLCSWAGRCSGNNRSAGKSKSGRVKKANKFLACALGQAAVSAVKKKGCIMRRKFQRWVKRMGGKKANAAVGHSLLKVVWCVLKKGEPYREPDAGVMHEMERQKLVRHHARRLRALGAEPEAVDAMVEQLLSPAQTAEGSQSSVAIEASCLAEQPVVAVTRKPRRPCPPKGRGEVCRGKLGFRVRQTRKPPSVITDQPGPLTNVSGNKGRTRSQRRKGSANDSA

SEQ ID NO: 164850 - protein, 351 aa, unidentified
MSNGRRWVGIDLHRSRSHVAVLDDDGRELLSRRIINDPQTFVELLAQLEGDSRIALEATYGWEWLADVLQDAGYELHLAHPLRTKAIASARVKNDAVDARTLAHLLRTGLLPEAYIAPRELRDLRDLLRHRVALTRMRSALKNRAGAILAKQGITRPYSDMFGPGGLQFLDALELPEGQRRRLDSTLALIGDFTREIDHAAREIDRRAQADPYVDVLCQIRGVGRYIAMLVIAEVGDVNRFATARQLCSWAGMTPTVRSSDQRTRLGHISHQGSPALRWALVEAAQHAARGGGPLRDSFERIAKRRGNQVAKVAVARKILTLCFYGLRDGEIRCLTPRAGARTVRTTAVTA

SEQ ID NO: 164851 - protein, 391 aa, unidentified
MVGIDVSKDFFATAGIDSEGKESFSRSYSMDSNGFDDFLKTCTSHCEDLSKVIVAMESTGCYHINLFSFLSSQGIRTIVVNPLLIANFAKLSLRKTKTDKKDAMTIARFLMNHHEEVSYLSLSQDHQDLRDLSRERESLCHLIAAIKVEIKRVLRITFPKLESIGNLYTGAMLRFLQQYPSARLVKAAKSKAITKALKQPYVGNKFTYSAKDILRAANTSIGTVSPAKEIILQGKIATLLPLQERLDEMTKLLTELCKATRIDDFKILRSIKGVGSKTAAPFLAEMGEVQNYASHKKLIAFTGIDPSLHESGNYIGMSKLSKRGNRHLRRAVYLMTVAVASKNPFFKAYFLRRKREGLPPQKALFATAHKLLRVIFAMLTHRTYFNPKDVI

SEQ ID NO: 164852 - protein, 365 aa, unidentified
MQKISTMQTTGKNILEGRLTIGLDLGDRSSAYCVLNEAGEIVLEHKLATTPEAMEQVFGSMPRCRIAMETGTHSPWVSRLLTALGYEVIVGHAQKVRLITKSRRKDDRLDARTLARLARIDPELLSPVKHRSAQAQLHLTEIRARAGLVSARTALVNAARGLVKSYGERLRKCGTQQFGRETTSALNAGLRQALEPLVQEIESLNERIQEYDRRIAKMAKEEYPETALLKQVKGVGDLIATAYVLTVEDPQRFRKSRDAGCFVGLQPGRRNSGESEPQMRISKEGDEYLRTLLVQGAHYILGPFGEDCDLRRWGQKLSARGGKNAKKRAVVAVARKLAVLLHRLWISGEVYEPLRNSQKAMSAAA

SEQ ID NO: 164853 - protein, 414 aa, unidentified
MEQIHDRVAGLDVHRDVVVACARVPGARGGTVTEKERFQTTTGALARLAGWLADRYVTLVAMEATGVYWKPVYYALEDSFEVWLCNAHHVKNVPGRKTDMSDAEWLADVAAHGMIRPSFVPPPAIRELRELTRYRKTQTDARVAEIQRLEKVLQDAGVKLTSVASKVLTQSGRLMVEALIDGQRDPAELANLAKGKLRPKIPELSEALNAHFGAHHAVAAARILAHVDFLDATIKALTEQIDVRTKPYQAARELLMHVPGFDRLTIDTVIAETGADMSKFPGPGHLAKWAGVCPGNHESAGKRRRVGVTPGNPWLRRALVEAARAAARTKGSYFGAQYRQIAKRRGPNKAAVAVAHSLSDLIWHMLSTGEVYHDVGDGYFQRRRDPERETRRLVAQLEQLGFQVALTTLQDPAA

SEQ ID NO: 164854 - protein, 328 aa, unidentified
MLFVGLDVSVAETSVCIMDRDGGLVREGKVQTDPEAIGRYLAKHARDAERIGLEAGGSSSWLCRELRSQGLRVVHMEARHAHRALSMHINKTDRNDARGLAELMRVGWYKAAHAKSVEAHRRGSLLLARQRLINMRRDLENQARNIMKTTGTMLGSTAGRGFSNRVRAACERNEVLAAMCMPLLKVVATIRDQIKEYDRLLLGIARRDETAKRLMTVPGVGALTSLAFMSAIDDPARFKRSTDVGAYLGLTPRRHQSGEMDWSGRISRLGDGLARTYLFEAASVLVGRIERWSALKAWGVRLTKRVGLKKGQDCRRTKDCGNPPLYLG

SEQ ID NO: 164855 - protein, 357 aa, unidentified
MSKSRLSVNNSSSSQVTVFCGIDVSAATLSVAVETDPEWKLQQRQFVNSAAGHRQLLAWLGKSKRPVRVTLEATGVYSVDVAIALEEAGSFAVQVLNPRKASDFARSLGRSKTDKTDAAALAEYSRRMEFVVWKRPSREVLELRALGRHIATLTEEHTRLLNRQHAAQASRTTPRCVREDLKRSMAGLEKRLLRLRREARMRIEKEADTHRKWLRLLAVPGIGETSAVHILAELVSLESGMTVRQWVARSGLDPAHETSGTSVHKPSHISRQGSRYLRRALYMPALTAARFDPHLKAFYLQLLARHKTKLQALTAVARKMLHAIYGIFKTDTPYDGAKLFPALDVSIITQPKPVPTY

SEQ ID NO: 164856 - protein, 347 aa, unidentified
MESIGIDLHKVNSQICIVGEDSAVMRECRIRTEAGRFAEVFGKRSRARVVIEASTESEWVARLLEGMGHEVIVADPNFAPMYASRTRRVKTDRRDARALAEACRLGAYRHAHRTSDEQRHVRAQLCVREALVGTRTKYISVIRAFLRREGLRVRSGETESFVDRVRELELGEKLLGEIAPLMSLMEELTEQIAKLDEQLAVLAQADATTRRLCTVPGVGPVTSVTFRAAVDRVERFSGAHHLESYLGLVPGERSSGEKQHRGHITKSGNRRARWLLVEVAWSIMRSKNPHTRPLADWATRIALRRGKRIAAVALARRLAGILYAMWRDDTVFEPRKIRTPKVALKAA

SEQ ID NO: 164857 - protein, 339 aa, unidentified
MEYYAGIDVSLKESSVCLVDAAGKVAREVKVGSEPECLVGYFDQLDLPVERIGLEAGPLSQWLHAALVAAGREVVLLETRHVKAALSAMTVKTDRKDARGIAQLLRMGWYRPVHAKSSSAQDTRALLVGRKLLQSKLLDVELSIRGILRGYGLNSRGRFEARIRELIAGHAALSMVIDAMLTARAALWSEFTKLHREMLKIARADKVCQRLMTTPGVGALVALTYRSAVDDPARFGKSSTVGAYFGLTPKKYQSGETDRDGGVSKVGDAMVRTALFEAAHIMLTRATRFSSLKRWALGVAQRRGMKRAKVALARKLGVLLHRMWMDATDFRWGIAPTAA

SEQ ID NO: 164858 - protein, 412 aa, unidentified
MKKNISAVAGKKPETVRVNTEEGAKRLRGNVRTFLHRLEAGAAAARERRKAVAAKSKSVAYYIGIDLGDKRSQHCFVDASGEIMVEGSLATTAVEFRAHFSRIKRSRIGLEVGTHSPWVSALLEELGHEVYVANPRKMETIRKNRRKNDKVDAQMLARSVRSNLKALHPIRHRGVEARKDLILLRARDAVVSTRTKLINTMRGMVKSVGGRLPVCSSRSFHKTDIEKIPGEIRETLQPLLEEIEALTKVIDEYDKRVSALARKRYPETELLEQVKGVGDLTALAYVLTLEKPERFEKSRDVGPYTGLVPKQYDSGDSSPQLRITKTGDRMLRRLLVGSAQYILGPFGEDSDLRRHGLKLAARGGKNAKKRAVVAIARKLAVLLHSLWRSGEVYEPLRQAALKQEALPEAVNR

SEQ ID NO: 164859 - protein, 376 aa, unidentified
MSKIRFIGLDVHADTISVAIAEPDNGDVRSLGVISSQPEQIVKLIRKLGPVEHLQACYEAGPTGYGLYWQLIGLGVNCAVIAPTLTPTKPGDRVKTNRRDAEKLARCHRAGDLTPVWVPDAAHEALRDLVRGREDAREDQQRARQRLGKFLLRHGRQRPKDIKESWTQKHMAWIKSQVRFEQPASQAAFLDYVHEVEHAADRLQRVEKDIDDVVAAAPTEIQAVVQALQALRGVGKLVAVTVVAELGSLSRFPNPRQLMGYSGMVSSEYSTGNHVRRGGITKTGNAHLRRVIVEAAWAYQHKPWIGGWLAKRQQGLDEETKAIAWKAQWRLCTRYKKLAARGKEKPEIVVAIGRELLGFIWAIAVRTEARVAGRTA

SEQ ID NO: 164860 - protein, 341 aa, unidentified
MTDVKYIGMDVHQASISIAVLDGRGALLMQSTIATQACTLLEFLGGLKGILHVTFEEGTWSAWLYDLLSPQVAQVVACDPRHNALLKSGNKSDKIDARKLAELLRAGMLKAVYHGPHNSHRLKELSRSYLTLVHDGTRVMNRLKAIYRGQGIGCAGQRVYSLRYRAEWLKQLREPGLRQRADLLYQQLDGVQTLRKQARHALLAESRKHPAHRLLLSVPGLGLIRVALLLALLQTPHRFRSKRQLWAYAGLALVTRTSADYRLVQGSLQRSHKPIAIRGLNQNHNHDLKEIFKSAALRACRLPGPWRDCFSKRVEQGMKPELARLTMARKLAAVALFRAPC

SEQ ID NO: 164861 - protein, 314 aa, unidentified
MKMAMLSFCGIDVSKDRLDVVVLPEGWFFSVSNDTAGWTELVARLRPLAVCAIGLEPSGGYERGIIRALLAARLSVRRIDPNKLRQFARARGVLAKNDRLDARLMAEYVAIMPTRAVQRDDAVDRLAEVVTMRRQLCDEHVTVENQTAHLEDAMLRRLSKRRLVRLEADIRLLDKRLAEMVATNAAFARLYELLTSMPGVGPVLAFTLIALLPELGKMGRKQIAALVGLAPYDFDSGKLRGHRSIYGGRMPIRNVLYMAALSASRYNPALKTFSNRLAHANKKSKVIIVAVMRKMITTLNAMLRDNAVWQPQSN

SEQ ID NO: 164862 - protein, 398 aa, unidentified
MIPRFFGLDTHKQFVMAAAVDHQQTLLQPPLRINMPQLESWAANTLTREDTVVIEVTTNTWQLHKLLSQYAGEVVVANPYKTKLIAEARIKSDKVDAIALAQLLASRFIAEVWVPDPETQQHRHLAAHRATLVRQRTQIKNRLQALLTRHNLPCPHKSLFTQEGRQWLTQQPFPLVAQLECQHWLRQLQVLDEDIHETERLIALLAVADDRVPRLMQLTGIGVFTAFAILAQIGDIHRFPSPKKLASFAGLVPSLHQSGNRSYNGHITKAGSPMLRWLLVEAARIAVRFDPHWQAIYDRLKAQRGANIAAVAVARKLLVVIWHLLHDQSTYRFLCPQTYVTKLQQWARLIGRKHLPVASSREFVEQQLQRVQLAQLTQSIISTQKGNLKVQFRNFHQT

SEQ ID NO: 164863 - protein, 345 aa, unidentified
MKNLFIGIDFSKEKIDATIITASGLEELSARVYESFATTTSGYNKFIKWVKKNSSDIEESAWLFCGENTGDYSKPLCNHLYCKGYDIWLENAKCIKDASGLRRLKSDKADSAMIAEYAMRNYDRAELYVCLNESLSQLRELFLYRQMLVRQKHGFQVRRSEKKLTMEKSPIKTTISQIGRHMVNECDKQIEKIEKKIKEIIDADEDIKRTYELITTIPGIGTQNAVCLLTFTNNFTRFGYNARKIACYYGIAPFGRDSGTSVHSDPHVHYMANKMLKSMLTQAALASIRCCATITNYYHRLISIGKKKQVALNNVKNKLIHIITAMVKKNVPFNPEYININNVMA

SEQ ID NO: 164864 - protein, 321 aa, unidentified
MQKISFLAIDISKHNITAYDGKKSFNFPNERFLPQFNTFLSKNFNKNFLVIIYEPTGPYSAFLEEFCALEKIKVVLLNPRKVPRLLEVLGHRAKTDGLDAKALYEYRKLISHKDIKTLELNENLQKLASLLSEYHFLKKQRVNFLNYLETLKFNPWGDKESEKTIENMIFEINKRLKEIEEKIKKLIKKEADTKNKVEAIKNIEGIGFLTAVNLFLFFERKKIRNRKEAVALVGLDPIIYESGKRKIGCRISKQGDSYLRNLLYMAAMCAIRINERIKKFFVRLVHRGKPRKLALVACMRKLLIIALAYYKNCSQNLAITS

SEQ ID NO: 164865 - protein, 340 aa, unidentified
MHATTYGLDVAKRVFQMYWVDGDTGEVVNRRFGRDDLIQYLSRRPPGRVALEACGSAHWWARKIKALGHEVVLLHAKFIRPFVQTNKTDAADARAIWTAVQQPGMRTVAAKTEEQQSMLSLHRIRSLLVKFRTMQVNQLRGLLYEFGASFRAGRVAGLAEVRARMVELEEALPGAMMCCLQDQLKRIDRLQTEIDQIEHRIAAWQKQDAACSAIAAVPGIGKLTATALVATMGDAATFKSGREFAAFLGLVPRQSGTGGKVRLGSISKRGDPYLRTLLIHGARSVLYHTKVPTAWASAIKERRPANVAAVAIASKMARTAWAILARGQAYERDHISVRPA

SEQ ID NO: 164866 - protein, 386 aa, unidentified
MLQTHFTVKPLEFDLFCGMDVDKKSISITFVSHEGFVKSFKIPYDSANLISYVRRRYPHQRIAFVYEAGPTGFGLYDDLVAAGFVCLVIAPTQISRSAADRVKTNRIDSRKLAEDLRGGKIKSIHVPDRTYRDLRHLVHLREILVRNQAATKVRIKLLLLLEGIKFPAFTAKERWSAAVLSRIQSLQTGFEVRFKLDHYLAALQFYKDQLRTINKELFRFCKETSDLWHCLKLLCTIPGIGPVVSLYVLARIGDWRYLTSSRQIAHLLGMVPVEHSTGDRIRKGAISRMGDATTRSKLVESAWMAVRKDPELMDFYQRIKARNPSDFGSRKAAVAVARKLTTRIYAVLKYQRPYLIRDLSASGVDPTVNSTPGVQLPVVRARKRIP

SEQ ID NO: 164867 - protein, 345 aa, unidentified
MPIVGGLDIHRKQITFDYLDTATGEVQRGQVRPAGRLHLRAWLARFRGREDVAFAVEGCAGWRYVAEELAAAGITAHLAEPAGTAFARGRKRHAKTGKTDARHLRMLLADGRLPECWIPPAHVLECRALLELYNDLRRERTAWAQRIHAVLFHQGAPALGEGALRTEQGVAGLRAAAAAHLSPAGQLQVAIALEVIDALEARLHVVRHQLLDAARHLAGAKALAARLYGVGPVTALAITCWLGGAGRFSSSRQAVRFAGLDITVSSSDRKGPPGKLSRQGPPVLRWAVYEAGKAHARTSAPDHGYYAQVKDRKNSKRACLSEARKILRQAHHILAELGDDALAAA

SEQ ID NO: 164868 - protein, 356 aa, unidentified
MVIVAIESHQGALHMQISTIGLDIAKNVFQVHGIDAAEKVVVRKRLRRRQVLEFFKALPPCLIGMEACATAHYWARELTKLGHEVRLMPAKDVKAYVKRNKNDAADAEAICEAVRRPTMRFVRIKSAEQQGQLMQHRTRDVLIRQRTQIINALRAHLAELGLVAAQGNAGVNELRAIVTDEQDTRLPIDARASVIVLAAQLEALESVIGAIEKRIKMQHRSSEASQRVEAIPGIGVIGATAIVATVADPTIFRSGRDFAAWIGLVPRQDSTGGKQKLGPISKQGDRYLRRILVVGAIAVLRRAKENPGKYPWLTQLLARRPFKVVAVALANKMARMAWALLAHGGTYRGPELAETA

SEQ ID NO: 164869 - protein, 367 aa, unidentified
MDKNSTAFVGLDLGDKRSNVFILDQEGELIEETRIPTSEPAFRRKFASLPPCRVAMEAGTHSRWASRLLEQLGHEVLVANPRRLRLIYESSRKTDEADAEHLARLARLDPQLLSPIRHRGPEAQAHLTVIRSRDSLVRARTLLINHVRGSVKSSGARLLACSADSFHHRVEPSIPAELQPALLPIVQTIASLTAQIHAYNRQIEQLCQEHYPETQGLRAVGGVGPIVSLAYVLTLDDPDRFRKSREVAPALGLVPKRDQSGSRDPQLRITKTGDSYLRRLLVGSAQYILGPFGPDCDLRRWGLKLAERGGKNAKKRAVVAVARKLAILLHRLWVTGDIYDPFYHSRPDQTSLTETNLLVRQPETVCA

SEQ ID NO: 164870 - protein, 344 aa, unidentified
MKYFAGLDVSLDETAICVVDEDGIVITEGKATSEPEDLVRWLVATGLTITRVGLEAGPLSPWLHTELRAAGLPAICIETRRMKGASAAMAVKTDRNDARAIAHAMRVGWFTVVHVKTAESQELRLLLNNRRTLLEKRVAIDNEIRGTLKAFGLKLGAVTVAAFEVRVLELLAKRPRLLAMVRPMLGARAALQQQCDVLHRMVLKAVRASAVCRRLLSVPGVGPIVALTYATGVDDPERFIHSRDIGPHFGLTPRKYASGEIDRNGSITKGGDGAVREVLVQAALTLLTRVQRWSALKAWGMAVAKRRGLRRAIVAVARKLAIILHRMWADSTTFNWKRETVTLA

SEQ ID NO: 164871 - protein, 472 aa, unidentified
MRYIGLDLAQTTSHKAVVIDAGGQVITPVLSVKTSAISLAQLFERAREGAPADEPLIVVMEPTGMAWFPIAVFCQRQGVKVYLVNSQQVADLRRFYRKHAKSDRIDARVLARLPIVNPEKLHALQLIGARQMACQRGCKELDRLTNLMVAIQNRLRAIDRFAWPGLEQVLSENIAPLARWFRENWYDPGAVLAAGAAGLLADWQKNGPKSAEMPESDEWATALVQLADEVVALYGLEAAFLDYGYLQAEVSREQALLATLENEYQQLQLGTVRPLYRQLHPSRNLETLYGVGQDGAAVYFSFVGDPERFPDHASFRGWSGMIPRSSQSGGSEAKGLSISQAGPGLVKKFSFLGAETARQWDPQIAAIYYDQVANRGKHHTQAICTCATHLLDRIWTILKEDRAYELRDVDGTPVTTEQARQIIATRYTVPKEVRQRNNQRTRRARQEQLAEKNQKRESHPDWVRGESETPSR

SEQ ID NO: 164872 - protein, 349 aa, unidentified
MTEQRISYTGERVYVGIDVHKETYTVTCVCHKQIVKTATVPAEPASLAASLLRWFPGATLTSAYEAGFSAFVLHRALTQVGITNLVVNPASIAVAANDKVKTDRRDSKRLARDLADGRLRGIYVPTEAEELARLLPRTRAQIVQHRATIARQIKAKLHQFGLIAPSNRRLISSRYLREIATWPLPLELGVSLRLLAEQWRFATRQLIEMRRLLRDQAKAQEEIEKVYRSVPGIGEVVARTLATELGDMTRFANERALFSYTGLTPSEYSSGTSVRRGHMSRQGSSRVRHLLVETAWRAIPRDAVLKEIFDRIAATRGKKRAIVAIARRLTGRIRACFRQGTAYAVGTYA

SEQ ID NO: 164873 - protein, 338 aa, unidentified
MALYCGIDLHSTNCWITIIDKERKVIREMKVGNDLETILRFLAPDRAEIEGIAVESTFNWYWLVDGLMDAGYQLHLTNTWAIKQYEGLKYTDDRHDARWLAHLLSLGILPEGFIYPKQERVVRDLLRRRTFLVHKRTSFLLSMRGAFECRTGMRITSDDVKKWTPADVEQHIDDPLAALGITCLLEPMAVLSDQIKILEKEALKRAKVRNEFRRLQSVWGIGKILGLTIMYEVGDVGRFAKVGNFASYCRLVKSDRFSNGKRKGSGNSKNGNPYLSWAFSEAAHFAVRYYEPAKKFVQRKRAKTNSIVAIRALAHKLARASYYVMKDQVDFDPDKTFS

SEQ ID NO: 164874 - protein, 353 aa, unidentified
MSVYVGIDVHRKRSQVAVVTGDGKVQLNRNVVNGSEPMLRLIGDLPTGTPVAFEAAYGWGWLVELLEDYGFDPHLVHPLRCKAIASARLKNDRADAAILAQLLRALLRHRASLVRLGTGLRNRIHAVVADFGYDRTGSYWSGPGRGWLAELGLPAVSREIVTDCLAFIDALAPAVDRIDGELRQHARADPRVKVLTALPGVGQFTALVMLAEIGDITRFPSARKLASWAGLTPTVRGSDLAVRHGHISKQGSAWLRWVLNQAAQTAKRSPEFAATYAAITKRRGKKIATTAIARKLLTRAYHLLATAHATQTSTPAGSASRAAATAPQTGRVTKPRARSPLRHEPATRPRSII

SEQ ID NO: 164875 - protein, 354 aa, unidentified
MQEHFVGLDVHKQVIAYCVKKLDGTIIREGTIKATRAALDEWVMTLPRPWHGAMEATLFSHWIYQHLRPHAARLEMGHAARMKAISARKKKSDKLDARTIADLLRCNLFPACYVIEPELGVLRRQMRFRRRLVQEQVSFRNNTAGLLMSAGVEYEKRRLHGKRYFDSLMKDNEWIDREMRPLLEFNRAQIVSLQAMDRRLLGMLERHPVLRKRVEALMQIDGVGPVTALSWALEAATPERFRSAKKAMSYCGLTSAFHESAGKQQRGPISKQRNAHLQSVLIETAKLAPMYNEKLKEIHRRETEKGANRNQASLEVARKLVTYLLAADRAYFASQREQSEAGTKPAHAPGPAAA

SEQ ID NO: 164876 - protein, 347 aa, unidentified
MSHTKKGDRIMQVERIGLDLAKSSFQVHGVDARGKVIIRKQLSRSKVLPYFAQLPPCLIGLEACGGAHYWARELQKLGHGVRLMAVAMIQPYRSGQKNDQNDAEAICEAVSRPRTRFVPVKSEAQQAVLTVHRARELLVTERTALANQIRGLLMEYGVVIAQGIQRLRRELPALLAAAETLPTLVRDVVEELRERLLELDRRIGEYDHRIEQLAKQNEATRRLMQVEGVGPITATAVVATIGNGQAVQHGRQFAAGVGLVPKQHSTGGKTVLGRITKHGNVYLRTLLIHGARAVLQFSTKRSDRKSRWVEAVRQRRGNNIAAVALAAKHARILWALLAHGQEYQLAA

SEQ ID NO: 164877 - protein, 471 aa, unidentified
MPGTFKGKVYQKGKHMQTYYLGIDVSKGYADFVILDVCKKTVEPNFQLDDTFDGHSKLYEILSRFLQEHPEGMLSAAVESTGGYENNWLHSLMKFQATLSIRSARLNPLGVNANSKASLNRLITDKISARNVAEYMIAHPEKISYRQEDYFGSMRKLWGFFNMLTKQKTQLLNQLEFLLYSANPEVMVYCKEKIPYWMLEILKRYPTAQKLSEAMPESLAAIPYVSSRRAQGLIDNAKRSVASTSDTVTEELIVDTVGQIAHLKKILQMQEKKMSALCSLPEVALLKSFKGIGITSAIGLLIEIQAIERFASVKKLAAFFGLHPVFKSSGDSAGGFHMSKQGRKEPRRILFMVAMACISSNSHIRGIYEEHTQKGMKGMAALGLCMHKILRIIYGMLKHNRPYDPLIDLTNRAKMSREEKATAKDKNRRYQELDIKAPISRRQRKNRMEKEPSHSDNLTKCGIMAPSPSHS

SEQ ID NO: 164878 - protein, 420 aa, unidentified
MTSQNSIPADAVLVAIDIAKVRNEVLIEAPGHKRRRRLSVLNTRAEHDHLIAILQSYDRPVVCAFEATGNYHRPIAWRLVEAGFETRLVSSLALARTREALHNSWDKNDPKDAQVILHMLRIHSTQVYHDPLRAGINDVQELSKTHEAIANAKTEIQHRILTHYLPLYFPEIERFRGNSRSDWFFAFLDAFPTPSSITTLTKEKFVEAAWDVVGSKVSKSQILMDIYETARTSIGLPLPLDAPAIRMFRMVVAEARSLIRQRNEIEAQADDLLRNSRDYQILRQIPGIGPINALTIIAEAGDLRRFHHHRQFLKFCGLDLSTQQSGQYRGQTRLSKFGNARLRRTLWIAGQVAIRQRENGFRHKFERYIARDRDNPDLRRKAMTAITAKMARVVHAVVKSGSDYRPFVEGRVPGGRTSVS

SEQ ID NO: 164879 - protein, 417 aa, unidentified
MQMELSAFTAVIGIDWADKKHDVCVQAAGSDERQFSRIPHQVDKIDEWAQTMYLRHGGQMAVALELAKGPIVSALQKYHFFVIYPINPTTLAKYRQTFNPSGAKDDPTDAELALDLLFNHPHHFKPLNPQSVEMRTLMALVEQRRRLMNDRVRITNRLRNALKQYYPQALDWFDHIDSPLFCAFIRQWPSLTQAKRARRTTLEKFFHQHNLYRKPLVERRIKAIKSAMPLTRDEAVIVPHRLQTLVLVNQLEVALQSIGRYDNEIAALAPRHPDYALFSGLPGAGPHLAPRLLVAFGEQRERFASAAEVQKYAGIAPVTERSGQKSWIHWRWQCPTFLRQTFVEWAAQTINKSYWAGLYYYQQRAKGCSYQAAVRSLAFKWIRILYRCWVTRTPYDEAKYLNVLKQRGSPLLSAESA

SEQ ID NO: 164880 - protein, 332 aa, unidentified
MLAIDLAKGCFQVCAVGSDGTVLYNRALSRSRLAALLAEQPSCIVAMEACATSRHWGRVARRHGHEVRLVPAACVKPFVKRQKNDPADAEAIAEAALRPTMRFVAVKSAETQGRAVAFRTHQCLVRQRTQLINALRGHLAEFGLVAPKGPASLKLLENALADEAGDLPDPVREMGAVYVEQIARLTEVIERLAGELEAATKTDACLRRLCTIPGIGPVTAGAVAAFAPDLDTFESGRNFAAWLGLVPRQRSTGGKARLGAVSNLGQTDIRRLLIVGAMSVIRWVVRKGGSENRWLAARVARKPKMVAAVALATKMARMTWAVTTKQEDYRMA

SEQ ID NO: 164881 - protein, 422 aa, unidentified
MYSKANRGAVIKPEVLVVGIDVAKRRHVATIRLGDGTKKKAFSFSNDRRGFEKLLARAESVRTSSGLRAIVFAIESSGHYGHALMHFLTWGGYSVVGINPAHTKKAKEIEDNSPEKNDSKDSRIISDLAAHGRGREVIIPRGVYADLRRLGKLRERLSVERTRIMNRYKGLVDLVFPELNIILRDVGCASIRRLMARYPSAVAVSRLGLKKLASQLWRWSMGHIRDEQCRLIHTAAGESVGIKEGLDAARLEMRQTLEALKVVEGRIREVETAQEQALLQIPYAGYLLSIPQMGVVTVATILGETGPLPHYRNADAVIKLAGLNLYTISSGTFRGKTRITKRGRPLLRRYLYLAALRLSKPGSPLAEFHDRLLPIKAKPQIAVAACRKLVRVMVAVVRDGADYEAGRLAVAPRLEGVVEKAA

SEQ ID NO: 164882 - protein, 349 aa, unidentified
METVIKQTAGIDCGCKELVVSFGQLYINGNFYCRNTKAFANTTKGFDELVQWITTMHDEDTLVHYVMEATGVYHERLAYHLVANGYYVSIALPNKVNAFAKTCSSKKQDDCQASKVLAEFGCLKQLDAWQPPHVLYVSLKQLTREKQQLQQELTLIHNQLHAEETKAITSLSSIRRMKARSKLLEKQILEVEKEITVLLNKEESIKERIDNVCTIPGVGLQTVVTVIAETNGFNLVRNSRQLVSYAGLDIIQKTSGISVRGRAHISKRGNPHLRHCLYFPAFTAVKYNLPLQNLHNRIVEKQAIKMKGYVAVQRKLLMLIYTLWKKNEPYQLPIKFLEQPVEAALTELD

SEQ ID NO: 164883 - protein, 399 aa, unidentified
MNDGYGVYLGLDVGKGDHHAVGLAPDGRRLHDAALPNTEARLRQLFDTLARHGRVLVVVDQPASIGALPVAVARACGHQVAYLPGLAMRRIADLHPGSAKTDARDAYVIADAARTLPHTLRRVDTGDEALAELEVLVGFDDDLAGEATRVSNRIRGLLTQIHPALERVLGPKVHHKAVLELLSRCGGPAGLRKAGRRKLLSIAVAHAPRMGQRLVAQIMTALDEQTVTVPGTQAAETILPRLADSLRDVLRQRDQVATQVEGMLDAHPLAPVLTSMPGIGVRTAARILLEVGDGSSFATPGHLAAYAGLAPVTRRSGSSIRGEHPPRGGNKNLKRAFFLAAFAALTDPVSRAYYDRKRAEGKRHNAALICLTRRRCDVLFALLRDKIPYQPRPTSPIPA

SEQ ID NO: 164884 - protein, 343 aa, unidentified
MGEVSTIGLDIAKSVFQIHGVDVDGAVVMRKRISRAKLLEFFATLPACLVGVEACPTAHYWSRRLGALGHTVRLLPPSYVKAYLKRSKNDANDAAAICEAVTRPSMRFVATKSEQQQSGLMLHRSRQLLVCQRTMLSNAIRGHMAELGIISAKGRNGTAELLEIIADEHDDRIPSAARFSLDVLARQYAVVRAQVVAIEKRIHAWHRSSEESRRLEEIPGVGPIVATALVAEVGDWKEFTSGRSLAAWIGLVPRQHSTGGKERLGRISKQGNRHLRWLLVAGAMAVIRYARQHGTKRPWLARLMDRRPLKVAAVALANKIARMAWAMMVRGERFKEPKLLPAA

SEQ ID NO: 164885 - protein, 430 aa, unidentified
MAREIDMPNSTVNAESPSGKILKCLLDMFVLSVTPLPTRDVIKTVSSGIGIESMLDKQIRSLTGETAMTLYIGVDFHPHQQTAAWCETLTGETETVDLPHEVERVRQFYTSLPGPAIVGIEASVRAEWFENMLKEIGHKLLVGNPVLIRKRATSRHKNDRRDAELILELLMRGEFPALWRRPRESNEVLEIVRLRSNMVRQRTQVYNRLQCLAHNAGLRKGRMKTDAYQLVIKQLDLGEADSLARTHLFCLLESLTRQIGELEIWLKKRAVADASVQLLLTQKGVGYLTALTTVHTLGDVSRFARLSKEVASFAGLDPLEKSSAGKVRFGRVSKAGSPLLRFQLGQAAQLAARSDVKLKSFYRRLSKKKPKAVAKTAAARRLLVKLSIMLRDGITADEFDRRGRTVDDARRSPRSANDRRVIGPVNLLEH

SEQ ID NO: 164886 - protein, 470 aa, unidentified
MKRHNKTKAKSKEPKVLHEPRPDAAAADIGANEIWVAVGPDRCELPVRRFGAFTEDLQAILQWLLACGIRTLAMESTGLYWVGLYQLLADAGIEVCLVNARHVKNVPGRKSDVRDCQWLQYLHSVGLLRASYRPKQAICAVRSIHRYRQNLLTQSGQHMQHMHGALDQMNMKLHHVIDDLSGQTGQAIIEAILQGQRDPLVLAKHRHRCIKASEETIVKSLQGDWRAEHLFVLRLAWENWEQTQQQIQKCDQQLLDWARQLEASVVIAKPMRIVRLDPDPTAPSPVVVQRKRPREKTSKNQPAGPWRQELERFFGVDLTAIPGISVLTGLTLMSELGNDLSAFKSPQQFSSWLCLCPDNDTSASRVLRRATRKNGHRLRQALRTAASTLHHNKSVLGDKYRRLRAKLGAPKAITAMAHQLARIIWHLLTHRVPFDLSIFAAQEKAHQKRRLKNLTLSARQMGYQLVPIAA

SEQ ID NO: 164887 - protein, 381 aa, unidentified
MASPQTLQERALDQACQTVLFVALELSDKKWKLAFSDGNKRRIITITAGDLVTLGEAVAKAKARFGMHGVVPIVSCYEAGRDGFWLHRYLVHCGVANVVVDASSIEVNRRARRAKTDRVDVEHLLRLLIRYHHGEQRVWSVVHVPSVEEEDARRLHRELERLKKERTGHRNRIQALLVSQGVRLQPRHDLLERLEAARLWDGSALPPDLQAEVRREDARLRLVDEQLRALEAEQVRRLEAAVTPGHQQIAHLMHLRGIGLTSAWVFIMEYFGWRQFHNRKEVAALAGLTPMPYASGDSSRDQGISKAGNRRIRTLMIQIAWGWLRYQPHSALSVWFNTRFALGGKRMRRIGIVALARRLLIALWRYVQSGAIPEGASLKPL

SEQ ID NO: 164888 - protein, 413 aa, unidentified
MSIDPRATRVRISAGVDWAKDDHAICVVGGEGEVLGRFVVRHDAAGLKSMVIQLLGAGVGQVGIERPDGPVVTALAQAGLSVFVIPPGQVKNLRSRYGSAGNKDDRFDAYVLADVVRTDIRRLRPLVCDSPQTTALRSTVRARKDLVTHRVAVANQLRAHLQIVFPAATTLFAGIDSAITLTFLERFATQERADWLSPKRLGAWLRSVSYSGGTDPAVLHARLLAAPRGVAGEHATIHATVTGTYVVLLRALNAQIRVLAASIGEQLAIHPDAPVFTSLPRSGTVRAARLLAEIGDARARFPTADSLACLAGVAPSTRQSGKVRAVTFRWGADKQLRDALCDFAGDSRHASPWAADLYRKAITRGHDHPHAVRILARAWAHIIWRCWQDNVPYNPAAHGSLQALLKQDQPLAA

SEQ ID NO: 164889 - protein, 328 aa, unidentified
MDQISVGIDVSKTFFVVGLAPTGERWTSETTPVAIDALVTRLRGLAPAIIVVEATGGYERTLVAACGVAGLPVAVVNPRQVRAFAQALGLTAKTDDIDAGVLATFGDRVQPAPRPLADAATQALAALVARRRQLIEMIGMERQRLEQAPPTGRITRDLRNHIRWLERRVSDVDDEIGTAIQASPIWRVQDNLLRSVPGVGPITARTLLADLPELGTLDRRAIAALVGVAPFNCDSGQHRGQRHIWGGRASVRTTLYMAAVSAARHNPVLATFYRRLRDAGKPAKVALVATMRKLITILNAMLKHHTPWTGDGASTPAAIARRAPAATV

SEQ ID NO: 164890 - protein, 319 aa, unidentified
MDAIRECCAGLDVHQETVVACLLSGPLHKKPKSVIETFGTTTRELLRLQDWLVKHECTEVAMESTGVYWKPVWNILEGTCTLTLANSQHIKNVPGKKTDVNDAEWIAGLHRCGLIDGSFVPDESIRDLRDLTRYRRKLIQNLTQEKNRIHKILQDANIKLTTFISDLFGVSGRALLGSIVNGEVLDVHEVRKMVHTRLKMKVPLLVEALNGRLRLHHRNMIKRHLEHIHYLEKQIQELEAEIESAVEPHMREIQLLDTIPGIDFDAAASIVAEIGTDMAHFPSEAHLASWAGVCPANHESAGKKKEKRTTAETEPLPVK

SEQ ID NO: 164891 - protein, 463 aa, unidentified
MQKNRDKNSKPSKEVGIEGLPVIRPDVAGVDLGSEIHWVCAPNVERTGLEVETFGATTPELERMAEWLKARKIESVAMESTGVYWIAPHEVLERHGLEIVLVNTRELARVPGRKKTDRVDCRWTQRLHSCGLLKGSFRPNEPVCMLRTLVRDKGNLVAEAGDWLRRMQKSLDQMNVRVHRAVSDIDGVTVMRIVRAIVAGERDAHELAKLRDRRCGKSEEEIVEQLSGHWREDHLFSLRQALKMYDAIQERIADYEREILRKLAEMERAECHGQEPAKLKNPQKAKAIQKRGEEPLRQALYRLSGVDLTGIDAIGVETVQVVLSEYGPDLSRFPSEKQFVSHVTLAPRQAMSGGKPVKKKKRGSASTRVAAALRMAALSLRHSETALGAYYRRISRRIGGDVAVFATARKLATLIYRLLRWGQPYVDVGAAAYENRYRQARIQHLAAIVKDLGYQLTPTPTNA

SEQ ID NO: 164892 - protein, 355 aa, unidentified
MISLIAAGVDTHKDFHILALTDELGRELSVHRVCATKAGYEEVVRILGDVRDVIIVGMEGTGSYGSGLCAHLTRKGYPVSEVCRPKRERRRPGQAKTDGADALRAARDALRDLDEGRIPKERDGWIEAARVIKVAHDSAVKARSAHMVTLKNLIVTAPDPIRERLRHLGDADLIATCARKRSCQDEIMQALWDALRTLALLWRSADDEAHTTEDALSHLISRHAPALLSTFGIGPLVAATLATTAGENIDRLTKGEASFAALCGVNPVPAESGKTQGRHRLNRGGDRKANAALHTIAIVRMRFDEDTKAYVAKKMGEGKTKRDAIRCLKRHIAREVYKLLRDPFGKHREPYKKRA

SEQ ID NO: 164893 - protein, 338 aa, unidentified
MWYAGADLSRRSVMVAMVDDRSRRVQPRRLECREPERIVKLMLDHRPFKVVIEASGSYRWLYDLLAPHGEVVLAHPLRLKAIWSGRAKTDKLDAKVLADLLRGDLIPESYVPPERYQTLRDITRARSRLVCGRTDAGNSIHAILARANIEPRYKTCLGPRGLKWISSLEFGRVSAFIRDELVERLAHFNAAIKRTDSLLGEIAADYPEIEAIIDIRGIGLYSALLIVAEIGEPDRFTNPGQVSASTGLTPRVRQSGQCDFHGPVSKQGSRWFRWILVEAAMKVIKGDRKLNNLYLRVKRRAGFARARVAVARKLSEICWKRLRDWHKANEAKKANQAK

SEQ ID NO: 164894 - protein, 389 aa, unidentified
MPCHRLGWLSNERTAHRISASAWLETGTRIRPSSGMPAAALHVGSFWRRYSVFIIGIDPHKGSHHAAVLNGNEVVIDELGVQADRTQRDRLLAFGEGFEPHIWAVEGANGTGALLAQQLVAAGEVVLDIPPKLSARVRLLDTECADKSDSHDARSAAIVALRHPRLRVVGPEDHTAVLRLLAKRHHDLIALRTQAICRLHALLCALVAGGLPPRLSAARAARELRRIRPTGAAGTQRRQIAVQLLGEVRRLDAELFALKTRIIDAVTAADTTVTDLHGVGAIVAAYLIGYTGNIARFPSAGHYARYNATAPIEASSGPRPRHRLNPKGNRMLNHAVHMAAVTQIANDTDGRAYYLRKQREGKTKKEAMRALKRRISDAVYRQLVSDADR

SEQ ID NO: 164895 - protein, 345 aa, unidentified
MNNGKVTHGDRKGKGLRDESFDHFLALDWSKKVMAIAHMTKRRKEPEVFERTSDLKELKRYLASLKGRKILALEETTTAQWLYLELVDHLDRILICDPYRNRLLSDGPKTDKIDAGKLCRLLRAGLLKEVFHSANDLYELRRLVSAYEDLIKAGVRAQNQKSSLEQGHGDTANHAAFILDHLTKSIELYRSSKQDYERKFCEFAKRIRFARNLTEVTGVGVIGAVKIVAVVVDAHRFPRAGKYLCYCGLVEHEKLSGQRTYGRRRPRFNHTLKTVYKLAAMSAISSKNNPMRAYYDYLLANGVAEHNARHAVARYIARVTYGMLKTGKRYQPYQHRDQATAQQAA

SEQ ID NO: 164896 - protein, 270 aa, unidentified
MDHHSEPVRFVGIDVAKRHVTVHVRPDAITFSCTTDTQGLADLLTRLQPLEPTLIVLEATGGYEAIVAATLAQAGLPVAVVNPRQTRKFAGAIGRLAKTDTIDAADIAHFAEAIRPTPRPMPDQQTVQLRALLARRHQLVVMAGAEQQRHDRADNPLTRRSCAAMLRSLKAEITRIERAIDTLITASPIFCAKQDLLKTIPGVGDIVARIFIAELPELGAVDRHKIAALVGLAPMNQPRQRPDARRATYQGRATTDPHAAVRRLSVRHPA

SEQ ID NO: 164897 - protein, 397 aa, unidentified
MTQAYAVFCGIDVGKGEHHAVGLDPNGKRLFDKALPNDESRLRAVFDQLATRGRLLIVVDQPNTIGALPVTVARACGHDIAYLPGLSMRRIADLYPGQSKTDARDAHIIAGAARTMPHTLRRVDTGDETLTELGVLVGFDDDLAGEATRTSNRIRGLLTSIHPALERVLGPRVAHPAVLEILSRCGGPEGIRAAGRRKLTTIATKHAPRMGARLVEEILAALPAQTVVVPGSRSAESVLPKLADSLKTVLLQRQQVAVDIEEMLADHPLSQVLTSMPGIGVRTGARILLEVGDGTAFASAGHLASYAGIAPITHRSGSSIRGEFPSRSGNHKLKRALFLSAFAALHDPTSRAYYDRKRAEGKKHNAALICLARRRCDVLYAMLKTKQPYRTPTPIPA

SEQ ID NO: 164898 - protein, 315 aa, unidentified
MHQHTEQSRAVAGIDVSKNELHVAMGNEVVTLPRTPQGLRKLTKHVAHAKLVVMEASGGWEQSVFKALHAQGIAVAVINPRQAREFAKALGRLAKTDRVDAKMLAAFAERMDPRQTALKSKELEHLCDLLTRRQQLLDMRTAEKSRLGHGRWDESIGAHLGWLEEQLQQLSGDLEQCTQQTHAIRQRVGRMQTIPCVGPILSMELTGFAPELGTLSGKQISALVGVAPLSCDSGTRQGKRRIWGGRARVRRVLYMAAVVGTRFNPVLKIFYQRLLAAGKPKKLAIVACMRRLLVWINAMERDQCDWNPALFSAPV

SEQ ID NO: 164899 - protein, 407 aa, unidentified
MSFFVGLDWGGATHAVCVLDATGAVVDRFQLAHDREGLAALTSRLRKSCAPGDLPIAIERPSGLLVDTLVEAGFAVTPIHPNVVKACRPRYRAVAAKSDPGDAYILADILRTDGHRLTALKPQSDAIKSLRALVRGRDDLVATKLVLANQLRALLDSFWPGAAALFADIASPIALAFIDRYPTPESAQRLGEKRMAAFLAQHQYSGRRAPGDVLARLHAAATGCVKDAEMEARGELARALARSLETIVAQIAKLSSRIEHDVAQLPEGRIVMSFPRAGKICAAQITAELGDVRARFASEDQLAAEAGVAPVTYASGKSRGVGWRWACNKRLRAALTCFADNSRHASQWAADVYKRARARGANHAHATRILARAWIRILWRAWQDDALYDPAKHPAARALNAVSPQPG

SEQ ID NO: 164900 - protein, 412 aa, unidentified
MARVIGMDVHRDFAQVVVLDGDQLRHFGRVRLDKDSLTTFADRLMADDEVVLEATGNTFAIVRVLRHKVRRVAVANPLQVRLIAHAKIKTDKIDAAALAQLHASGFLPEIWVPDPETEALRRQFTRRSQLVRHRTRLKNEVHAILNANLIGRCPVTDLFAATGRKWLAEQALPIADRDAIDRGFREIDRVGNDLAALDRGLAAQSIDDKRLHHLMTITGIDVVSGLGLLATIGDHTRFASSEKLVSYLGLNPSVRQSGSGPARHGRITKRGANQARALLVEAAWAAARVPGPLRSFFMRVMSRRGSQVAAVATARKLAAIIWHVLNRQEDYVFARPSLVARKRRSAELRAGKPRQRGRRGIAAGYYCAETRAEERERLENAERAYERVVSGWRQAGPGFRPTNPSPESNTST

SEQ ID NO: 164901 - protein, 406 aa, unidentified
MWKLSQLLNLLKVGVLHMYSYFVGIDIAKNTHWAYCISSDNEIIFEPFSFSNDATGFQKLVSKFNSLDKEKILIGLESTAHYGENIISYLFNLNFKIGLINPIQTANLRRSNIRKTKNDKVDTKIIIKALTLGNYSLITSRDINNLKLKGLCRSRRNLVTMRSKAKIQLVSYMDQLFPELSEFFKGNLHLNVSYQLLKEYSSPNEIKNIHLTKLANILHDNSQGHYNKDDAIQLRNLAKSSVGIDNPSLSLQVKHAILQIELYDEQIKEVESLYKQILDDMNSPILTIPGMSYNQAAVILGCIGDIQRFKHPCQLLAFAGLDPSVIQSGNFQARSTRMSKRGSGMLRYSLVYSAHNVVKNNQTFKEYYDLKRSQGKSHYCALGHVAHKLVRIIFKILKDNVEFNLD

SEQ ID NO: 164902 - protein, 415 aa, unidentified
MGRVFEAVFERVAGLDVHKAQVTACVRVPDEAGQRVAHLAEFATTVAGLLALADWLRVHEVTHVAMEATGVYWWPVWAILEEDFECTLCNARHVKNVPGRKTDVCDAQWLCQLMEAGLLRGSFVAPKPQRRLRALTRYRKTQIAERQREANRLHKALEDTGIKLDCVATDILGASGRAMLDALVAGTTDPVVLADLAKGKLRAKIPALREALQGRFEAHHALLIGAILTHLDFLDEQIDSLSQAIEELLGPTGLAGVKLASTMTGVAARTAEVMVAEIGTDMTVFPSAGHLASWAGRCPGNDQSAGKRRSGRTRKGSKFLGIALQEAALAATRVKGSYLQAQYQRLRPRIGHRRALGAVMHSMLVAYWHMFTNGETYRELGGDYYQRRDPERLTRRLVASLEPLGNTVTLKQQAA

SEQ ID NO: 164903 - protein, 346 aa, unidentified
MEHLYVGIDCGKKLSELFGFTDQGEVVVTGALGMYDLEPWRKKFSVLRSQYQLHVAFEVGPHYDWLYDLLTEYCAEVVVVNPANFALISRSQRKTDRIDAQLLAEGVRRGDLPAVHVPDKQTRADRRLVAFVHWHGQQLGAVKTKLRSLLQQHRLECPFTNILGKGGRRWLGEKMPEFDPQAQVFVKLLVEQAEWLVKQRCELDQRVEARAATYAQAKVLQTIPGFGPLVILATLSAIAGIPRFARPERLSSYFGVCGSVYQSGQTLRLGSLTKRGNVHVRWLLSQALHHLHRKDPRARRRYQRLRRKKPCGVARGAQVRWLTEIIWHMLTKNEAYRLGGKAKLAA

SEQ ID NO: 164904 - protein, 485 aa, unidentified
MKQTKSSPCGRAIPAHGGQLSRKERRELARQVQSEQVTLQIVHSNAAGIDVGKNTHYVAVPPDRDAESVRYFDSCTDGLQQMVAWLKKCGITSVALQSTGVYWIALYDLLQEADFEVYLVNARYTKSLPGRKSDVQESQWLMKLHTYGLLPNSFRPPQEIRWLRSYWRQRQNHVRSAASCIHRMDKVLTEMNVRLSSAVTDLSGATGLAIIQAIVDGERDPHELAAYRDPRVKATQEEIARQLHGNWQADLLFRLKQELQGYRFYQTLIAECDQELAQLLRAFPDRSAGVALPEETRKNRRKKKRGNSPQFDLRQLLYLMSGVDLARIDGIDVITAMTVVAEAGYDMSPWPTADHFVSWLRLAPDNRISGDKIIGKGRTPTQNRLSQALKMAASSLKASKTYLGAQFRRLRARRGPAIAVKAMAAKLARLVYNMLRHGMEYVDRGTEFYEQQQRERRLHALTKNAAQLGFQLVPTELSLAGTGTI

SEQ ID NO: 164905 - protein, 342 aa, unidentified
MRLFVGLDVSLAKTAICVVNAHGEIIKEAEAASEPEALARRLSDLDGRIAAIGLEAGPLSQWLHHSLTEAGLDAVLMETRQVKGALKAMPIKTDRRDAEGIARLLHLGWFRPVHCKSISAQETRAVLGARKSIQQNMIALEMSLRGLLRNFGLKVGAISRGKFETRIRELADGNPMLEAATLPMLRARASLRRELAILEKQVRHLAQVDPVCHRLMTMPGIGPVVALTFRAAVDDPARFRSSKRIGPRVGLTPSRNQSGERDVSGGITKAGDVNLRRALCQAATVMMNRGRSTWLRTWGAQLAQRRGRKIAMVALARRIAVILHRIWIDGTEFQSDAAPKVA

SEQ ID NO: 164906 - protein, 414 aa, unidentified
MSLPAAQFFVGLDWAADSHAVCVIDTEGRPLARFSVEHSADGIALLIRRLAKFGDPLDLPVGIERPDGRLVDLLLEAGHPVVPVSPNAIKTWREGEVLSGAKSDAADAAVIAEYLRLRQHRLTAATPYSGETKAVRTVVRTRDDLVAMRVAAVNQLAGLLDAHWPGAKAIFADLESPIALAFLTRYPTPTAAMHLGEKRIAGFCKAHGYSGRRSGPELLTRLRSAPSGTTDPHLTTAVKDAVLAMVGVIGAVNAAIKTLDASVAARLGEHPDGEIFTSLPRSGQINAAQMLAEWGDCRQAYERPDSVAALAGCTPVTQASGRHKSVHFRWACNKRFRRAMTTFADNSRHTSPWAAAIYNHAREPGKDHPHAVRILARAWIRVIWRCWHNNTPYDPAKHGAACAFRQATSPNLAA

SEQ ID NO: 164907 - protein, 343 aa, unidentified
MQAVTTIGLDIAKSVFQIHGVDAAGNVIIRRQLKRRYVLPFFQKLSPCLVGIEACASSHHWSRELQALGHTVRLMPPAYVKPYVKRHKNDAADAEAICEAVTRANMRFVPTKTLEQQSCLMLHRTRHLFIRQQTAVINAIRAHLAEFGIVAPVGRNGVEQLLDVVADASDKRLPEIARACLLALGAQLRSLKVQILNFDRQIMAWHRSNEASKRLDEIPGVGPALATALVASVADPNAFRSGRNFSAWIGLVPKQRSSGGKDKLGSISKQGDRYLRSLFTAGALAVIRYAKIHGTKHRPWLTALLARRPTKVAAIALANKIARMAWAMMARGDRYKEPVALAA

SEQ ID NO: 164908 - protein, 347 aa, unidentified
MNVYIGFDISLQSTHICVVDDEGNLVREGVARSEIADMDCWLRKHGQEWAIQRIVFETGQLSAHLYHGLRPSWPVVCIDARHAHGTLKAQRIKNDRNDARGLAQIARTRWYKAVHVKSEECQALRALVGGRKELVMLRLGLENHIRGRLKALGIKLGTVTTAAFSTKVKAVIEDRNPLFAQTVLTLLQARDDLLARQRELDRQCVSIARSDPVCKRLMTVPGVGSITALSFRAEIDDPLRFRKSRDVGVHLGLTPKRYASGETDRPGGISKCGNRALRTLLFEASVTMLTRSGRWNRLKAWAVRLKQRTSFKAASVALARKIAIVMHRMWVDGTDFAYGEPPALQAA

SEQ ID NO: 164909 - protein, 392 aa, unidentified
MIYVGIDMAKNKHDCCILGSTGETLYEAFTFANTRQGFAKLWSAIKAVSDKHKVLQIKAGLEATGHYSENLVAFLRTSGIEPVVFNPLQVKLFRTALSLRKTKTDKVDAKCIAGLLMSDDSSPVPVSYQIQELKSLTRHRFRLVSLRSRSKISLSRLVDVLFPELPAACWSSSQKSILALLDELPGAHRIANCRIDRLTNLLHLHSRGRYSREKAEEIKSLAQQSIGRKSEALSFELVQVVEEIQFYQKQIEILDKKLKSLVNDLQSPLLTIPGIGFRLTAIILAEIGDITRFSSPDQLLAFAGLEPSTYQSGKFKADKTPMVKHGSTYLRWALMQAARLAARRCPDFRAYMDRKLAQGKHYFVALGHLAKKLVRVIFHILTVNEPFVSQVA

SEQ ID NO: 164910 - protein, 343 aa, unidentified
MQVSTVGLDIAKNVFQVHGVDQEGKVVITRQLRRGQVIVFFKKLAPCLIGMEACATAHHWGRELTELGHTVRLMPASYVKAYVKRSKNDAVDAAASCEAVTRPSMRFVPIKTIDQQAALMLHRSRSLLIRQRTQLINALRAHLAELGLIAAKGKDGVKGLVTIVIDGANSSQLPEPMRQALQPLVMQLAALQEQIGQIERGIHARHRASDDSRRLETVPGIGVIGATALAATITDPSVFKSGRECAAWIGLVPRQNSTGGKERLGGISKQGDRYLRRLLVNGAMAVIRQARLHPDKYPWVTKLLAKKPAKVVAVALANKMARIAWAILAKGETYRAPALAAAA

SEQ ID NO: 164911 - protein, 414 aa, unidentified
MDIVHPRCAGLDVSKRDVKVCVRLHLRGRVKATSTVTTWGSVTSQILALRDHLVAEQVTLVVMEATGDFWKPFYYLLEEGPFDIMLVNPRHVKNLPGRKTDVSDAAWLAQLGAHGLVRGSFVPPEPIRKLRDLTRTRATIVRERAREIQRLEKLLEDAGIKLSSVATDLHGVSGRAMLDALVAGERDPAVLANMAKQRLRSKIPELTEALTGRLSEHHAFLVRVQLDLIDQRARIVDELTARIEEEMVPFRAARDLMITIPGISTRVADVIIAETGADMSRFPSAGHLASWAGTCPGSNESAGRVKSTHTRPGNPYLKGALGIAAMAAARSHDTYYSVKYRRIASRRGPIKAVVALEHAMLVAIWNMLQTGTTYNDPGDDFYSRRSPDKTKRRALDQLRSLGYTVTLEPTGEVA

SEQ ID NO: 164912 - protein, 370 aa, unidentified
MSIKRILVNQIDTNLEYEVIGIDLAKNCVSAILLTTDGEIFGIDRLDYQELEKSAQELSPTIFAMEPCTEMNYMVQKLEDWGHQCIVISGKNVKDYGESHFSNQKTDLNDAQALAFLTKDTQLRTVKAKDPEQLKYASLTTLREQYVKQYRQTMVSLKGICQVWGLNISKGISGKARLKDMIENHADFPAELRTALVGMVAHAQAVQKDLKSVTKILEELAKKDKACQLIQTVPGLGTICSCRLRATVGDIKRFKHPKDFPAYYGLVPRSMATGHNEKKGKITHRGDKTMRSLMVQGAGIVINQATKGNLNSKQLTKWILKKQKEKMPWGKLVCAVAAKLLRIVRAILISGKPYNPKIAGVAKCSLPKAS

SEQ ID NO: 164913 - protein, 412 aa, unidentified
MTGKIAGIDVHKRVLMVAVEEETGEGEKEGFGLRRFGTTVAELEHLRAWLQNQGVEEIVMESTAQYWKPVWFTLEGQFRLFLAQAWSNRAPRGRKTDFKDAQRLARRHRAGELTLSFVPDEVQRQMRSLTRRRFQLTRDRVRIQNQVESLLEETRIKLSSVVSDLFGGSGLRILEALSQGQCDPHALASLADARVQCGEEVLREALAANLGPMHRSLLQQHLEMLRLVETQIEQTAGLMAESMRSQVSEIERLTAIPGIRVLAAQQLIAEIGPRAAAFASAPQFCSWGGLAPGRNESAGHNSSSRCPKGNSFLRRTLCQIAQAAVRTKNSSFEQKFRRLLPRLGYPKAIWAIARSIAVVVWKILHDGVTYIERGTPSTPGAIKRRVQRLRKELRALGYSDDLKPLAPEVIVS

SEQ ID NO: 164914 - protein, 343 aa, unidentified
MELHAIGIDLGKTVFHLVGLDSSGKVVVRKRCSRAQLLAYTANVCVHVIGMEACSGSHFLGRALRAQGHDVRLKPAQYVKPYIKRNKSDYIDAEAIAEAVQRPTMRFVPIKTEEHLDLQAVHRVRERWVMRRTAVVNQIRGLLLERGLTLPKGRSHVDHALPEILTDPALRLSGSFRVLLGQLQLELEQLTMRIEQMDAVIQQTARENEACQRLTAIPGVGPVTATALVAAIGNGAGFRRGKDLAAWVGMVPREYSTGGKQKLLGISKRGNSYLRRLFVQGARVVMQYRTKQAPGLSVWLSQLMARTHQHVAVVALANKLLRMAWAVLCKNETYRVPLLATAP

SEQ ID NO: 164915 - protein, 425 aa, unidentified
MSCLLHPTRVIDLPESSRKAVPIMTAPARPAPVVVGGSDTHADTVHVAAISTLGREVADREFPTTAAGYRAAVAFLTSHGPVDQVGIEGTSSYGAGLARAVTNAGLQVIEVNRPSRADRRRQGKSDPLDAYHAARAVLSGRATSDPKDQSTEAIRSLHNTRRSAVKARTAATNQITAMLITAQDGIRSKYRALQGQPLITALAKCRTAVVDPVDAAVLTALKALAHRHQFLTAQAEELSTLIDALVTTANPALRAAFGVGPDTAAQLLITAGANPDRLRSEASFAALCGVSPVPASSGKTTRHRLSRGGDRHANNALYRIALSRMAHEPRTKQYVARHVAAGRSTKEILRMLKRAIAREIHRLLTHKVALPEYADLRPARQAKNITVTAAANAFNIWPTVISRIERGLQRDDDLANRYRTWLQAA

SEQ ID NO: 164916 - protein, 468 aa, unidentified
MVKSTKSVAQHLGGIKGNLFTERLESANLEKTMVVPIDIGKNSHKAMIANYFGSVLHSPFEFDNSMPGVSLFHKRLSSLAAHLGTERILVAMEATGHYYQNLSLHLQGLGYETYILNPISTKRCREAGLTWSKTDEKDLVAIGQALISAYATPLHLQEPVWASLKIIERQRRYQIKHQTALKNKVHAILDSLCPGISEVDIFKEGHLWDNASMDFFMNYSTPTQIIRLGSQRALNFFRRRGRRLNKLHADQLIQWARNALSHKQPETPTMQYILSLLLHQLCRVNEDIRLLEIEVIKNLVQIPPVLLLTIDYIGPVTAGEFGGEISPLSQYRCARSVIKGAGLDPVSYQSSKYEAPEHPISRKGSSPLRYISIDIGDRLMKNNEHFRFFANRLIGRGKSENCACVAVTGKFIRIAYSMLKELKPFRPSTGLGIAKNPLRKIEQFLIQRKAPELIDSCIQSAKRYLKGA

SEQ ID NO: 164917 - protein, 418 aa, unidentified
MKTLASFEFTAYIGIDWADTKHDICIQPADGAEREFERIAHQPEAIAQWAQSMHQRFGGPIAVALELVKGPLVSALQNYDFFVLFPVNPAMLAKYREAFKPSRAKDDPSDAELAVDLVVRHPERFRPLQPQSIEMRTLVHLVEKRRRLVEDRRRFANRLISALKVYFPQAVAWFSHKETFVFCAFITRWPTLKQVKRARRSTLERFFREHHVRRPRIVEARIQAIKAAVPLTEDPAVIAPYTLEVLALAEQLRTTLELIRRFDDAIAELAPSLPDYAVFASLPGAGPVHTARLVAAFGEDRERFQSAAEVQRYAGIAPVTERSGNSSWVHWRWACPHFVRQTFVEWAEKTIYYSFWAGAYYRQQRLKGASHNTAVRALAFKWIRILYRCWQSRAPYNESLYLKALQRRGSNLVPQESA

SEQ ID NO: 164918 - protein, 356 aa, unidentified
MSDGSWVGVDLHARSAVAAVLAGASGELRTERVPAASGPLVGWLQTLPWPVRVAYEAGPTGFELSRACTRAGIACLVAAPGKIPRAPAERVKTDRRDAERLARLLRLGELTAVRVPSELEEQTRDLVRAREDARADLTRARHRLSKLLLRHGLLWERSAWTREHERWLRGLRFAGPLALCFDESCGAVLEARARRDRLDRAIVEAAAAPAYADTVARLCCLRGISTLSALALTVELGDWRRFEPARLGAFLGLVPSETSSGERRRQGPITKAGNVHARRLLVEAAWHQRRPPRPSGALAARRAGQPAAVRAEAEAVARRLHRRWWDLERRGKRRTVVAVAVARELAGHCWRLATME

SEQ ID NO: 164919 - protein, 426 aa, unidentified
MGMGKFTKTLCISERKEYSIMEGPIITVDVSKGSCHYQPFIENGHPMRKPKQLSATIDGFQKLGQTIKDLEAKTEREDIPVIFEATGVYHRPLQKYLEDHKIRYYIISPLLSATYRKTDLHSNKTDALDCAHIAKAYYCEKELRQYQAQPQEYKRLYQLSRIYESELVHLRKRKVSLRSMLDIIYPRIDKTFKGNQNLYDPIPMEILKRYPHPSLLLSHREDTIVKTVGHRTGHLKGYTERIVHKIYEKAKECYSGCEINDIEVINLPRLIENVQEQKKKCDSLLKEMIEIARTCPYFASVVSIVGIGENLAARIIAELGDVNRFDNRAAIVAYAGLNPKIQQSGDIDGLHLKISKKGNKHLRCLLYLGAQCNYRLRKEDPLYEFTKKKRQQTQCPLSSKAAYTASAHKLLVIIYSLCKNGTLYHS

SEQ ID NO: 164920 - protein, 342 aa, unidentified
MNEVSIIGLDLAKNVFQAHGARVDGSVAFRTKLTRAKLLDFFSSVPKCTVAMEACASAHHWAREIGRLGHEVRLIAPIYVKPFVKRQKNDMADAEAIAEAALRPTMRFVAVKSVEKQASAMIFKTRDLLVRQRTQTINALRGHMAEYGIVAANGPVHIQRLAETLDDPDGGLPADVIALCQMLFAHIALLNERIGSLDKELRDRSRRDDTAKRLMTIPGIGVICATAIEALAPPIESFQKGRDFSAWLGLTPKQNSSGGKTRLGSTSKMGQRDLRRLLISGAMTVVRWADRKGAPEGSWLARMLTRKPRMVVAVALANRIARIAWALIQKGGIYRVPGAVAA

SEQ ID NO: 164921 - protein, 422 aa, unidentified
MNPQTPSIPIERFLAVDLHKYYVVVGGVSAQQQVILPPRRMDLSAWPTWARKNLRPTDALVVEATTNAWDFYDQVQPLVGRAVVANAGKVKLIAAARVKTDKIDVFALAKLLAAGWMPEVWVPPVEVRELRGLIAHRRQLVKQRTRLKNHLHSLLHRHQLAVVDGDPFADKNRAWWDGLKVSPVERLHLRHDLKALEEADEQIAEVEAELQRLSATAPWAEQMTYLIQLPGFGLLTAMTILAAIGDVSRFETAKQLVGYAGLGASVHDSGNTHRTGRITKSGRREMRWALVEAAWAAVEGFSYWKERYERLSQRMHPNQAIVAIAHQLLIAVWHVLTERAADAHADPKRVAVKLMRWSWDLTDEQRGGLTSRQFIRYHLMRLQLGEDLTHITYGNMPRRIASVEEVLALKPELAAEVEPSSS

SEQ ID NO: 164922 - protein, 368 aa, unidentified
MNNPTANAQATTVGLDVHKASIRLAAVADGAILHEQTIPHDLAIVDTVLARFPAARCCYEAGPTGFGLYRHLTERGIDCDVVAPGLVPSKPGDRVKTDARDARKLALLHENGLLTAIEVPDPELEALRDLVRAREAARIDRMRDRHRLSKFCLRQSREMPGKSWGVARRGWLAQQHFPFATQQCAFDLYLHALDLVDRRIAALDARIQEAADQDRFRELVGRLRCLRGVDTLTAIGLVAEVGDFSRFERAEQFMAFVGLVPAEHSSGEQRRRGSITKAGNAHVRRLLIESAWHARRRPMVSYELQRRQRDQSAATIEHAYRCQARLHKRFSRMAARGKPQQKIVVACARELAGFVWAIATEQPLVTVN

SEQ ID NO: 164923 - protein, 356 aa, unidentified
MSKIPVNVGLDYHQHPVQVVVMDEQGKRLLNRPCPNDWQRIVQLVEPLGIVKRAAIEACCGAADLAEELIEKANWPIELGHPTYIAKLKGSADKSDFSDAELIADLARVGYLPRVYLASSYERDLRHLVNHRQSLVDQRRAVKLRVGGVLREHRAMAPKQLSRWSKAWIAWAGSAPQLSDHARWILNDLMEELKHLNEKVMAVEARLSEATAGDTKVQKLMTEAGIGEVTAWVLRAYIGRFDRFNSGKQLSRYCGLSPCNASTGKKQADAGLIDGCNRLLRGTLIQAAHRLARSEPRWIKLYGSLKARGKPASVAVAAVGNRWMRGLWHRMKEQTVDEKQQSDIGKQTASSASSRK

SEQ ID NO: 164924 - protein, 416 aa, unidentified
MTFKIVRFICGGMDVHKNLIVATIGTTDKQTLTTEYIQQSFSTFYSDLIRLKEWFISHDCYDVCMESTGKYWIPIYNVLETELNICLTHPKYVKAIKGKKTDKRDSKWICDLYKCDLVKHSFIPEKEIREMREIARYRCKLVYMRSSERNRYQNCLTVSNIGLASAVSDSFGKTATNIMKELMQSEVIEDDKILKLIHKNCKDKDKILDSLQGYHIESDQRFKMDTVMNHIEYLDKQIQACEAELIKRAYPLRDYFQHITHIKGISALSAILIVSEIGTDMNQFESDKQLVNWAGLSPANNESANKKKSVRISKAGQYLKPLLVQCALSSIKDKNSYFGIKYCRIKKRRGHKKAIIAIARMMLVCIYHMILTGEEFNPCDYESLTNPKPKKEPIMTVESALQFLKDSNFDFSSIQL

SEQ ID NO: 164925 - protein, 369 aa, unidentified
MADRIRYVGLDVHKEGIVVAVADGGLRGEVREYGRIANTAAALDRLTRKLGGAGVRLRFCYEAGPCGYGIHRQLSARGHECIVVAPSLIPKRAGDRVKTDRRDAASLARLHRAGELTAVWVPDAGHEAMRDLVRARLDAVHALRRARQQLSGFLLRQRCHYGRPAWTRLHRRWLAGLRFEQAAHHLVLEDYIQAVESAEARRNRLTAQIKAMLPDWTLAPVVVALQTMRGMALVNAASLIAELGDLSRFANPRQLMAYLGLVPSEHSSGASVRRGGITKAGNRAARRLLIEAAWSYRFPARLSRELLLRQENQPKPIREIAWNGQTRLCARYRRLARAGKPANVVTTAIARELAGFVWAIARQVMAAAG

SEQ ID NO: 164926 - protein, 402 aa, unidentified
MSFGISSIATILCRSGEKQQQRFDRDEDGILSLRNWVTLEKCDVVACESTSDFWVPIHDSLIKHLSFIVGNARDMKAFTHKKTDKIDSEVIAKLALNGMVQPSRVFPISHREYRSYIRLRRKLVQKRTDIKNEAHAILAPEMFNLKDVLTDIFGKNGREILSGICSGKNVNQILQNLSPNVRKKSAQIRELLDKEISQSAAIRLKICLKLIKDFDDSIEHLEKEIFNHAYENHKREMEILMSVPGIGELGAATLIAEIGNFKDFASGDKLASWLGLVPNVYQSADKYHNGRITKRGPKGARWILTQIAQAAARTRNSKLKEFFNRKKKSIGHAKAIIALARKIATIIWHLITNDEMYEDETGYVKGEGQRRKIVETEIFSVDERISIISEIFAIVEKKKPDI

SEQ ID NO: 164927 - protein, 348 aa, unidentified
MTLTIVETRAVTGGVDTHADTHVAAALDSIGGMLGVREFPATPVGYAGLLGWLGGFGTVHLVGVEGTGSYGAGLARHLGAAGVRVVEVDRCDRQDRRRQGKSDSLDAVSAARAALSGRALGVPKGRDGAVEAIRALMVAKRSARGERTQTINQARALIVTGPDELRARFARHSPAALVAELAALRPRAGDVPGYATQIALRELARRVEFFDAQLQRLDALIVPLVTTHAPGLLAVYGVGPDTAAMLLVAAGDEPARLRSEAAWAHLCAVAPIPASSGKVTRRRFNPGGDRQANHALWRIVITRMSAHPPTRAYVARRTAEGLSKKEIIRCLKRYIAREVYPHLRPAGG

SEQ ID NO: 164928 - protein, 340 aa, unidentified
MEYGAIDLHTRRSQVRIVTADGTPVLERRIDTRADEFSRLFDGRPRMRILVESSTESEWVARCLEGLGHEVIVADPTYAAMYGSRTRRIKTDRRDVAALAEACRRGVYRRAHRVSTEMLRRRQQLRTREHLIRMRTQTINALRAMLRQAGVRLPSGTAATLRSRVAQVPLSPELQGAITPLLETLESLAPIIARADAWVRATAAHDRVAQRLMTVPGVGGVVALTYQAALDTPARFAGQAGRASAYLGLVPGERSSGERQRKGAITKAGPRAPRALLVQAAWTFWRTGRRHAPALHAWVDQLAARRGRRIAVTALARRLSRILYALWRDGTVFARSPVAA

SEQ ID NO: 164929 - protein, 392 aa, unidentified
MRKPKRRKPLNDLSRSPTVFNVNETLIAVVELSQKAWLVAGIIPGIERQPLKKLEPCEEGLLSLLTRWRKEAEKAGYKTKRIVVAFEAGRDGFWLARWLRARDIETHVIHASSVAVPREHRRAKTDRLDTELLKRAFLGWLRGEREHCKMAAVPTIAEEDARRPSRERESLVGEQTRIINRMKAALARLGIRDFNPKLAKAADRLQDLRTPEGEPIPANTLSELRRDLERRRLVVHQIRQIEAARLERLRQAPKAGPHAMVRLLAGVKSISIETADMLVHEALSRNLRDRRAVARYAGLTGSPQESGSKRREKGLARSGNVRVRRGMIQLAWRFLQFQKDSALARWYRARTDNVPRSRKKMIVALARKLLIALWHFVHDGVVPQGIVLRPAP

SEQ ID NO: 164930 - protein, 338 aa, unidentified
MKLYGGIDLHSNNSVLVLIDEEDRVIYEKRLKNDLTLILHELLPFRKKLAGLVVESTYNWYWLVDGLMQSGFGVHLANTAAIKQYEGLKHTDDRHDARWLAHLLRLDILPEGYIYPREARAVRDLLRRRHRLVQQRVGNVLSIQNQFARLGMSGFSAERLKRLHDDDLDGLIADGNVRSAIVANLALVRCLNLQIERLEREVLAQVKLAAQFAPLLSITGIGKILALTIMLETGEIGRFAKVGQFASYARCVDAQRFSNEKKKGSNNAKCGNPYLAWAFVEAANFAIRYSPRIKRFFEKKCARTNKIVAFKACAHKLARAAFHVMRDRAVFDETRAFA

SEQ ID NO: 164931 - protein, 409 aa, unidentified
MEVIHEVCCGLDVHKKSVTACVLRTNGRRRETRAFGTFTRELLELGDWLRACGVTHVAMESTGVYWKPVWNLLEGQFEVLLVNAQHIKAVPGRKTDQRDSEWIADLLQHGLLRASFVPPTPIRELRDLTRYRASLAQEINRIANRIQKVLEDANIKLASVATDTLGASGRAMLEAIVQGEQDSQRLAEMSRGLLRNKIPELREALQGRVTAHHRFLLRELLDHLYFVQSKMQRIEQEVAERLGPFQSEVARLCTIPGVDRVTAWGLLAEIGMSMKQFPDAQHLASWAGLCPDSHESAGKRKSGKIRKGSLWLRRCLCQGAWAVSTKKNNYLSALYRRLAVRRGSKRATIAVAHKLLVIAYYILRDGTCYNDLGADYFDRLNPEGLRRRLTRRLEGLGFKVTLEPSAQVA

SEQ ID NO: 164932 - protein, 366 aa, unidentified
MKEISIMQANGNDIFKSGQLTIGLDLGDRFSSYCVLDEAGEILREQKLPTAQEAMKQTFGRMARSRIAMETSTHSPWVSRLLTALGHEVIVAHAQKVHLITKSRRKDDRLDARTLARLARIDPQLLSPVRHRSAQAQLHLTEIRARAELVRARTALVNTTRGLAKSYGERLRKCGTQQVGRDLAMGLSAELRAALEPLLCEIESLNESIQECDQRIEKMAKETYPETALLKQVKGVGDLIALAYVLTIEDPHRFGRSRDAGCFVGLQPGRRNSGESEPQMHISKEGDRYLRTLLVQGAHYILGPFGEDSDLRRWGKKLAERGGKNAKKRAVVAVARKLAVLLHRLWVSGEVYEPLRNSQKAMSTAA

SEQ ID NO: 164933 - protein, 342 aa, unidentified
MSVYVGIDVHRKRSQVAVIDAEGGVLANRNVPNGAEPILKVIGGLPPGTPAAFEACYGTSWLVELLEDYGFAPHLVHPSRCKAIASARLKNDKVDAAILGQLLRADLLPEAWIAPPPVRALRALLRHRVALVRLRTRLRNRIHAIVADYGYDRPAGGYWTGPGRAWLASLQLPAVSRELVEDDLGLIDALQERIDRLDGEIRQRARPDPRVKVLTQLPGVGPFTALVIVAEAGDISRFASARKLASWAGLTPTVRGSDRAAHYGHISKQGSVWLRWALCEAAQTAKRSPEFAPALQRIAQRRGKKIATTAIARKLATRAWHLLTDAGHAAAPHPAAPPTAAR

SEQ ID NO: 164934 - protein, 412 aa, unidentified
MYYVGIDIAKRTHVAVIMNEDNSLKIKPFSFNNDKAGFKKLLIHLQTLCCDISDIVIGMEATGLLFENLYRYLQSLDYNVVLLNPYQTAKFREMDTMKRVKNDNIDSVMIAALLKSGRFSEGYVSQEQLQSLRELYRNRNTIENQLKALKRQTSAILTVVFPELETIIRDPFSVTGLALIEKYPTAKHYHHASVERILKTFRGIKGNNFNRNKAQALLDASKNSIYSGIASEARALNIRMNITQMRLLQAQLDEILLTMQSLFAGTQVKQEDQEVMEELIDNLRTIPGVADKTILALLAECGNLDRFYAPKALIGFLGLYPTLSQSGDSTRNGRLAKRGASLAKKAIYLASIAAIRHNDEMRTIYMNYRSKGRAKKEAIIIVARKLLTIMYIIYTRNVPYDPQRVFVAKPNQ

SEQ ID NO: 164935 - protein, 487 aa, unidentified
MSVVTGHVCDIGEAAKAVIPFERVSITTYPNRCGIPNEMMEEDMAQRKRTVLELAHPNAAGIDIGSASHFVAVSPDRDDEPVREFKSFTEDLEELADWLVCCGVDTVAMESTGVYWIPLYEILEARGFAVNLVNARHVKNVSGRKSDVLDCQWLQQLMSYGLLSGAFRPADEICMLRAVSRQRDMLLASQGRHIQHMQKALTQMNVQLANVISDIVGETGQKIVRGIIAGERDGHVLAKMKNARIRASEEEIAKSLQGNWREEHLFALKQAMALYDNYGTLLAECDTKLESMLATLVGDNDSDPGRGRRASNSKNAPQFDVRTYLFRLCGVDLTRINGINPATALKVIAEVGPDMSRFKSAKHFASWLGLCPGTKISGGKVLSGASKRTTNRAAQSLRLAAAALHKSQSALGAYFRRFAARLDRAKAITAVAHKLARLIYTMLTKGAEYTDQGQDYYEERYRQRVMHHLAKRAEKLGMQLVPAPQST

SEQ ID NO: 164936 - protein, 406 aa, unidentified
MLYVGDDWAEDHHDVEIQDQTGRRLSKARLPEGLAGVARLHELIAEQVGSELGPEQVLIGIETDRGPWVQALVAAGYRVYPINPRQVARYRERHANAGAKSDTRDAHTLADMVRTDGHQLRPMAGDSPGAAAVKLLARAHQTLIAERVRHQLRLRSALREYFPAALAAFDDLAAADALELLGKAPDPASAARLTRAQITAALRRARRRDVEPKAAAIAQALRTPGLAQPAPVVAAFAAITRSLVAVIAAISVQIDRLAAQLTAAFDAHPDAPIYRSQPGLAAVLGPRVLGEFGDDPGRYADARARRNFAGTSPITRQSGKKKTVHARFVHNDRLIDALGRQAQGALSGSPGARAYYDRQRARGQGHHAALRQLANRLVGILHGCLRTRTLYDEATAWSHTAQPALA

SEQ ID NO: 164937 - protein, 342 aa, unidentified
MYYIGLDVHKKTISYCVKDASGQVHQEGKVGATRWELDDWIKTLPQPWTVAMEATIFAGWIYDHLLPHAQQVKVAHPLMLRAIAAAKKKNDRIDAGKIADCLRCDFLPECHMASTAIRDRRRTLRYRHLLVRQMVQMKNRISGLLMETGVSHNKRRLHKVGYFRELLASNEEVNESIRPLLRVSRDTIVRLQKTEYALVSSLQRDPLLAERIKRLRTVPGVGPITALTWALEMGEVSRFPSIRQAISYCGLCGDEKSSADKVTRTPLSKQRNKHIQRVLVEAAKLAPGQDHNLALVYEREKQKGNANRATLAVARKMVAYLLAVDRGQRDFVPFADSQSAAA

SEQ ID NO: 164938 - protein, 368 aa, unidentified
MLYLGIDQHARQITISLRDEHGDVVQARQVSTQPEKVHAFFQKLTRERLHGGESFVAVLEVCGFNDWLIRMLHEYRCHKVILIQPEERKLRKTDRRDAAALSELLWVKRDRLLQGKPVRGLRQVDIASNTDQESRRLTTLRKDAGQARTRLVNQIRHILRRHNLQWQMPTKRFPTKAAIAWLKQLALPEIDRLEMDHLLADLEQVQGRRQELEQVIARRCGVSAEAMLLASMPGVSYFTAVALACRVGRVERFPRAHSLANYWGLTPGCRNSGERNQRLGSITKAGSSMARWLLAEVTIKVLRRDARLREWFKRLKRRRGASIARVAVMRKLATVIWHMLSRRMTYAACRAAGEAGTKARQEQGCGRE

SEQ ID NO: 164939 - protein, 370 aa, unidentified
MSQSSTLFIGMDVHKDTMAVAYVAQDQGAEVTSIGTIGTRQCDIDQLIRKMQSKATHLIFVYEAGPCGYWLYRYLGKKDYDCWVVAPSLIPKKAGDRVKTDRRDAIQLARLARSGDLTVVYVPQVQDEAMRDLTRAREDAISDCKDAKFRLKAFLLRHDIRYTGRANWGPAHLRWLSEVVCPTPTQQMVFQEYVRAVQEHTERLQRLEQALHEHVQAWRLYPVVEALQALRGVQCTVAVTLIAAMGDLTRFDTPRELMQFLGLTPSEYSSGAHRRQGAMTKAGNTHARRVLVEGAWAYRYPAKVSRHVQLRLETQPKIIQDISWKAQVRLCNRYRRLVARGKHANIVTVAIARELAGFMWAIAREVPIIP

SEQ ID NO: 164940 - protein, 340 aa, unidentified
MDEYDGRQYVGVDLHRRRSVIVRMTPEGDRLGPAVRIDNDPFTLAEQVASWGENPEVVLEATYGWYWAADVLAEAGAVVHLAHPLGVKGFAYRRVKNDERDAADLADLLRMGRLPQAWIAPPAVRGLREAVRHRCKLVAIRSGLKAQVHSVLAKQGVRVPVSDLFGVGGQQLLDQLDLDAPYAARVASLRRLIDAFTFEIDVLGRRTAADLRGHAGWRAIQAIDGVGPVLAAVFVAEIGDVHRFSRPQQLCSWAGMTPRHRESDTKVHRGRITKQGNHLVRWAAVEAVQRLHGGPLGYTRARVAERRGANIAKVAAARKLLTLVYWGLRDGHIRCLARPA

SEQ ID NO: 164941 - protein, 343 aa, unidentified
MYYIGLDVHKKTISYCVKDAAGHVHREGRIGSTRQELDAWMRTLPQPRMIAMEATIFTGWIYDHLLPHAQSVKVAHPLMLRAIAVAKRKNDRIDASKIADCLRCDFLPKCHMASTAIRDRRRILRYRNLLVKQKVQMMNRVSGLLMETGVSYNKGRLHKVGYFHDLMATNGEICDCVRPLLRLSREHIERAQKLDYALVSSLERDPLLEERLRRLRTVPGVGPITALTWALEIGDFTRFRSIKEAISYCGLCGDENSSADKVMRMPLSKQRNKHLQRVLVEAAKLATRYSHELAVLYDKERMRGNPNRATLAVARKIVCYLLAVERGQRDFVPAEQFPRTAAA

SEQ ID NO: 164942 - protein, 338 aa, unidentified
MKLYGGIDLHSNNSVVVLIDEEDRVVYEKRLPNALDVILFELSRYRKKIAGVVVESTFNWYWLVDGLEEAGYKVHLANTAGVKQYEGLKYTDDKSDARWLAHILRLGILPEGYIYPKEERAVRDLLRKRSQLVRQRSTHILSIQNLMSRNTGKGMSGAKIKALKEEDLETLFSNEDVAMAARCNLRACKFLAKEILLLEKAVLAKVNLRPEYENLQSVDGIGKILALTIMLEAGDISRFEKVGNFVSYCRCVDSRRISNDKKKGENNGKNGNKYLAWAFIEAANFAIRFNQMIRRFYERKKAKKNGPVAIKAVAHKIARACYHMLKDGTTFQTELAFG

SEQ ID NO: 164943 - protein, 415 aa, unidentified
MALKIVYKICCGIDVHKTFVVACIASTNDKGITSYESHRFSTYTSGLKTLLQWLLDRNCKDVCMESTGKYWIPVYNILESDCSIVLAHPKYVKAIRGKKTDKKDAKWIAGLFKHDLVAGSFMPPADIRQLRDLMRYRFKLTCFKSSEKNRLQNCLTVSNIQLGNVVSDTFGKSAQAILDKLLENPADTSFDLEPLVYKSLKKKLPELRDAIDGYITPEQAGKLKVIKAHYENLESRKAELEELILALATPYQQELTILQTAPGISSPFTAIGIISEIGTNMEAFPSAKHLCSWAGLTPTNNESAGKKKSVRVSKAGCYIKPLLVQCANAVVKSTKHPEMRNRYLRLKKRRGHKKAIIAIARMLLTALYHMLKNGENYNAELYQKSDLLPVDREITVEQALMIARNQGYKIKSATA

SEQ ID NO: 164944 - protein, 387 aa, unidentified
MPQLNDLSRSLVALDQDSTIIAVVELSQSSWLVAGVLPGIERQPQKKLEPSAERLLGLLHRWRDEAVRAGKKITRIALAFEAGRDGFWLARWLNARGVEAHVIHPSSVAVSREHRRAKTDRLDTELLKRGFLGWLRGERGHCTMARVPTIAEEDAKRPNRERECLVGERTRIVNRIKATLARMGIRNFKPTLRKAAERLATVRTPEGMPLPPNTLAELQRDMARLGFVVSQIREIEQARQKRLEQETETGPHAMVRQVARVIGIGIETADMLVHEVLSRPMRDRKAVARYAGLTGSPDESGARRREQGLARAGNARVRRGMIQLAWRFLRFQNQSALAQWYRARTADSRLGMRKTMIVALARKLLIALWRFVTTGETLDGVILRPAG

SEQ ID NO: 164945 - protein, 339 aa, unidentified
MLIIGCDFHPGFQQVAIFDNQTGEISERRLQHREEAEQFYGGLGGQQVRVGMEACGHYPWFERWLEKCGIELWVGDAARIRATEVRRQKTDRRDAGQLLRLLLENRFPRIWVPSLEERDVRQLLVHRHKQVQARTRTKNQLQALALSQGVQKKYKLWTAAGRVELEKLELLPYAAVRRQRLLVTLDALEAEILALNQQVEQEVKRRPAAVRLRTHPGVGPMTALAMVLTLGPVERFPSAKQVGSYFGLIPSEHSSGGRQQLGRISKQGNSFLRFLLVEAGQTAVRYDAELGRFYRRLAVRKHRALAKVAVARKLAMRLYLMLREDWDYAQLCKAVCRQA

SEQ ID NO: 164946 - protein, 405 aa, unidentified
MEVIIERVCGMDVHKDNITACIMTPEGKEIQTFSTKTIFLIKLMDWIRSHGCTHVAMESTGVYWKPIVNLIEAEEMEFFVVNAQHMKAVPGRKTDVKDAEWIAQLLRHGLLTASFVPDRNQRELRELVRYRRSIIEERSRQLNRIQKVLEGANIKLGSVVSDIMGVSAKEMLNAIADGEEDPTKLAGMARRSLKRKKDELELALRGYVNPHQRMMLKTILTHIDFLTEQIEKLDLEVAQRVSSYQEDIERLDSIPGIATRMAEQILAEIGTDVENQFGSAPRLCSWAAIVPGHNESAGKRKSTKSKKGNKYLKSALTEAAHSVGASKNYLGAMYRRTAARKGRKRAGIVVAHAMLRIVYYLLTRKEMYRDLGEDYYDKQKEVSMVRHSVRRLEKLGYSVSIEEVS

SEQ ID NO: 164947 - protein, 339 aa, unidentified
MEVSTIGLDLAKNVFQAHGADASGAVAFRKQLRRDKVLSFFAGQPRCVVAMEACSGAHYWARAIGDLGHTVRLIPPAYVKPFVKRQKNDMADAEAICEAAQRPTMRFVAVKSEEQQASSAVFRVRDILVRQRTQLINALRGHLAEYGLIVAQGPAHVAKLVEKLGDPESDLPEPARTVLLMLIEALGSLEEKIKQLDREIIRRTREDKDARRLTTIPGIGPITATALVALAPDATTFKKGRDFAAWLGLTPLQRSTGGKQKLGATSKMGERTLRRLLIIGASAVIQQACKRGSQQQTWLARMLARKPRMLVIVALANKLARIAWALMASGGTYRTPAAA

SEQ ID NO: 164948 - protein, 318 aa, unidentified
MPPAASVFVGIDVAKAELVMAIRPSGERWTATNDDAGIQRLLPRLREAAPALVVLEATGGYERAAVAALAAAGLPLVVANPRQVRDFARATGQLAKTDRIDADTLALFAERVRPDPRALPNESAQALDALLTRRRQILGMVSAERNRLEHAVPAVRRGIVQHIRWLERQLHDVDDDLDRTIQASPVWRAKENLLRSVPGVGPVVSRTLIGDLPELGTLPGKQIAALVGVAPLARDSGTLRGKRLVWGGRAPVRAALYMAALVATRRNPVIRAFYQRLLTAGKPKKVALTACMRKLLTILNAMLHANTVWRPPAQTATT

SEQ ID NO: 164949 - protein, 366 aa, unidentified
MQKLSTRRVMGKRILRGHQLTIGLDLGDRWSFYCVLNELGEVLREEKLPTTPEAMKRTFEKFPASRIVLETGTHSPWISRLLTELKHEVIVAHAQKVQLITKSSRKDDRHDAQTLARLARIDPQLLGPVRHRSAKAQIHLTVIRARAELVSARTALINAARGLAKSYGERLPKRGTQQAGRELAAALSTALREVLEPLLREVESLNERIGEYDQRLEQIAKEVYPEVALLKQVKGVGTQIALTYLLTIEDPHRFAKSRDVGCFLGLRPGRRNSGQSEPQKSISKEGDRYLRTMLVQGAHYILGPFGEDSDLRRWGLKLAERGGKNAKKRAVVAVARKLAVLLHRLWVGGEVYQPLRNTNRAMSAAA

SEQ ID NO: 164950 - protein, 424 aa, unidentified
MQNTAARKRKQVPEGYLVIGVDPHKKRHAAVAITQDFTTQAKFKFDNTREGLEMMLERARVEMVKSGCQGVIFAIETGGHYWRNIAYYLDERGIPFRFINQYTLKRRREGKDLNRRKNDYRDSEVAAQLLCTGEFVESVIPQGVYAELRTSHNAYQRLVKERTRITNLVKGLLDALFPEFTGVFKDPGGLTALSVLSTCPIPRVIAGMTEDEFEATIEARHKGRRLMRKKLKALHYSAKTSIGIDAGARSLSSEIAFLVDKFELIRRQICIMEGTLVRLVDETEEGKYLLSIRGLNYIAVAGLLAELGCFKLYRSAKQMIKMAGSNPTESESAGKNMSKTPMSKQGRPLLRYCAWTSVIPMLRFNSDFRAWAKQRRERPAHANPLSGREVVGAALNRLLRLAFALVKNQTYYQDVKPARTPVAV

SEQ ID NO: 164951 - protein, 360 aa, unidentified
MMKNSVAAAVHAALNAERPVILDNPPAALAEEPRPRQEPTTEAVPLPAECWVGIDVAKAHLDGATWPEIERLRVARDDAGLVALTAWLRARAPRLIVLEATGGLEVPVVTALVEAGLPVAVINPRQARDFAKATGRLAKTDALDAAVLAHFGHAIGPEPRPWKDAEAQALTAVIQRRRQVVEMLAAEKNRLASAHPHVKPDLEATIAWLEQRLKDHDRDLQQRLRASPVWRERDDLLRGVPGIGPVTAATLLAALPELGTLDRRQISALVGVCPFNRDSGRSRGRRMIFGGRAGVRAVLYMATVTASRCNPVIKAFYQRLRQAGKPAKVALTACMRKLLTILNAMLKAKTPWQPPAECRS

SEQ ID NO: 164952 - protein, 341 aa, unidentified
MDKPKFYIGIDIAADDFAVSFMTNPQEQILTKERVPNNFPGFDELLVWLSASGVVAGESVVCLEATGVYAEALCHFLHSHQFPVCIESPLKVKRAFETSGHKTDALDSRQIAEYAYRFFDELKPWAPPQVIVDKIKQLLSAREQLVRQSTASKNALKIIGRSVVQDATALEVFQCHLNQIKEHIRTIEKEIQKYLKSDPDLHQKTLLLSSVPGIGFLLIAHLAVFSNAFSKPLNYKSMAAFFGICPLKYQSGSSVYRPPKSRRYGPSIVRKVLYLASLSIATHNKMFRTYYLRKVAEGKNKKLIFNNVANKLLRLICALLKNNQPFIKNYQSINPLCLINT

SEQ ID NO: 164953 - protein, 356 aa, unidentified
MTTQITKPDFTGQELFVGIDVSKNSWKVCILTQHIEHKTFTQPPKPEVLVGYLQRHFPGAHYHCAYEAGYCGFWIHDGLMALGVDCIVVNPADVPTIHKERTFKTDRIDARKLARALRNGELTPIYVPNRAALEDRSLVRTRYSLVRKQTRCKNQIKGLLSFYGIPLPQEPSTVNWSKRFIVWLEQLTMQSPNGTLALKALIQELKYLRQMIAESTKQIRTLANEPPYRSYTVFLITIPGISTLAAMILLTELITLSRFATLDKLSSFVGLVPGEYSSGEREITTGISQRRNPFLRGLIIECAWVAVRKDPALVLAFSKLCARMPKHQAIIRIAHKLLNRIRFVLKNQTPYVPAVV

SEQ ID NO: 164954 - protein, 378 aa, unidentified
MRLYTQQHQFYCGIDVHARTMYLCILNRDGEILVHRNMPAGPAPFLKASAPYREDVVVCVACLFTWYWLADLCAREGLPFVLGHALSMKAIHGGTATNDKIDAQKIAVLRRGGMLPQASVSPAEMRATRDLLRRRLPLTRKRAELLAHIQHTNSQDNLPEMGKKIASKANRAGVAARFPEPAVQKSVEMDLALIEFYAQLLRDVALTIVQTAKQHDAQTFYRLQSVPGIGKILRCVLLYEMHEITRFPRVQDFVSSCRLVKCAKESAGKRYGTSGAKIGNSYLKWAVSEAAVLFLRHNPVGQQSLARLEKKHGQGKALTVLAHTLARAVYDMLRRDTACDMHKFLNGERSGVSEPTASLDLSGICLRMMLWKALTLRR

SEQ ID NO: 164955 - protein, 345 aa, unidentified
MQSNIISVDLAKNVFEVAVANHLHRIVSRHRLSRAKFSEFLTQHPPATVLVESCGTAHFWARQAIAVGHKPFIVPAQYVKPYRRRHKSDRIDTEALLEAHRCAGIRPVPVRSVDQQQLQQLHRIREQWKKTRTARINALRGFLRELGYPIAEGAANAKRQVRIILDDGALPEPLRAAFSTLLDDVLQLEQRIKRVEQQLHQLTKDRDDVRVLRQVHGIGLLTSTAMVASAGSPHHFPSGRHFSSWLGITPREFSSGERRYLGRISKQGDKYLRTLIVHGARSVLTRAKQLQKTHQPLSRLHRWALQLEQRVGHNKATVALANKLARICWAVWKYNTDFNPEHIGA

SEQ ID NO: 164956 - protein, 332 aa, unidentified
MYIGIDLHKKYSFVTIMDMNGNIINQKRIEHNSKDFDDFISSIDENDQIAMEATTNWYYFYELLESKTKNIVLAHPAKTRAIAEAKVKNDKVDSKMLAHLLRTDLLPKAYIPSRETRDLRELLRYRASLVRFRTQIKNKIYAILSKNGITSPYSDLFGKAGMAFLKHIKLRESYRQSVDGYLNIIQQINTQINDVSKEIDQIAKLDDKAQILMSISGIGAYSALLILSEIGDISRFPRENSIVSYAGLAPSVHSSGGRTYHGHTTKQGSRWLRWILIEAVPHVVDSSPSYRCLYNNLVAKKGKGTAKVAIARKLLVAIYYMLQRGERFDKWK

SEQ ID NO: 164957 - protein, 352 aa, unidentified
MMIIGCDYHPSWQQISWLDTLTGETGERKLEHASGEAERFYRQLPAPALIGMESTGNCQWFVELAARLEHDLWTGDAAKIRACDVRAQKHDRRDAALILKLLLEGRFPRIWTPSGEEKDLRQLLIHRYKLVRIRAQVKNELQHLAMNQGVTKKRKLWSKAGERVLRELPLAPWASQRRKDLFRVREMLNGEIDPLDQAVVEVAEKNEKARLLMTQPGVGPITALAFVLTMGDVKRFQRGKQVASYLGLIPREYSSGEHRRYGSISKQGNRFMRMLLVEAAQCAVRCDPQMRSEYLHRCHRKAKGVAKVAAARKLAIRLYWMLRTNTGYPGVVRVESSSRVPLVSASLPGQAS

SEQ ID NO: 164958 - protein, 431 aa, unidentified
MPPTAGPTPLVPLAALIGIDWADQHHDVALQVAGTVTVEHSRLTHEPNALAAWLTGLAQRFAGQRVGIALETSRGPLVHARLEAPFVVLYPVNPRSLQCFRETFTPSGAKDDAPDARLLLELLVKHRDQLAPWVPADAATRTLRALVERRRTAVELRTQLTLQLQATLKDYFPQALTWAGTDLTSPLACAFLTQWPTLAALQRARPSAVRRFYLTHRCRRPALIATRLAEIATATPLTHDPTIVEPNALFVQLLARQLAALGPSLAALDAEIAACFAAHPDAELFRALPGAGAALAPRLLVAFGTDRTRFPSAADVQQCAGIAPVTVRSGRSCQVHWRWSVSTFLRQTFHEFAHHSILHTPWARAFYHAQRARGKTHHVAVRALAFKWIRILWRCWQDHTPYDDARYTRALILRGSPIAAHLQLAATEAAA

SEQ ID NO: 164959 - protein, 411 aa, unidentified
MDVLYPVCCGLDVHKKTITACLRFPSARARAEEVRTFGTTTRELLRLADWLTAAGCTHVAMESTGVYWRPVYHILEASFEVLLVNAQHVKAVPGRKTDVKDCQWLAQLLEHGLLRGSFVPPAPLRELRELTRYRRQLVQEHAREANRVQKVLETANIKLGDVATDVLGVSGRAMLHALIAGERDPERLADLARGALRQKAEALREALVGRFTLHHAFMLQGLLDHIEFLDQQIARFDERIEEQTRPFGPAIERLDTIPGVGRRSAEQILAELGDDMRRFPTAAQAASWSGICPGNHESAGKRRNGRTRKGNAWLRSTLVESARAAVRNRGCYLSAQYHALARRRGDKKAVVAVAHSILVAAWHILRDGVEYHDLGPDHFERLNRERLVQYHTRRLAELGLTVQLPGAQATA

SEQ ID NO: 164960 - protein, 337 aa, unidentified
MKRYLGVDLHRRQFVVCTRLEDGKSWLRQWAMEALPQWVEQLQAEDEIAVEATSGTARFYEAVVGKVRRVVVVNPHQFKVISESAKKTDCRDAEALALYLSKDLLPEVRMKPQKHRELAHLAETRDLLVKQRSALKSKINNLLAMQGIELKREGLSSQVALQRVLRVEASAGVKIELRVLVEQIRSLNASIRELEDLIEEEGEPLPGHKNLTSIKGIGTLSATVLLTTIGEIRDFADENKLAAYLGLVPRVQNSNESQRSGHITKMGNKLARTALVQCGLVAKRYSPYLQNFYERVKQRRGGGKAKIALARKLVKIVYDTLKNDWVFQDLPSFTLAA

SEQ ID NO: 164961 - protein, 367 aa, unidentified
MKKVSTTAAKQSKNFSKQKLTIGLDLGDRSSWYCVLEEAGEIVLEQKLGTTPKAMKEVFGGMPRSRIALETGMHSPWVSRLLSELGHEVIVAHARNVRLIGESRKKDDRLDAQTLARLARIDPQLLCPVKHRSAKAQADLTVIRARAGLVRARTALVNTARGLAKSYGERLRGCNVRNMNPEKAEGLSPELQRALEPLLAAIESLSERIHEYNEGIEKLAQESYPQVALLKQVKGVGTLIALTFLLTLEDAHRFRKSRDVGCYLGLQPGRRNSGQSEPQMHISKEGDPYLRTLLVQGAQHILGPFGADSDLRRWGLKLAERGGRNGKKRAIIAVARKLAVLLHRLWVSGEVYEPLRNSSRMMMPAAA

SEQ ID NO: 164962 - protein, 404 aa, unidentified
MATRPQIWVGIDVGKHAHHACGVDDTGKTVFSQKFGNDQAAIEALIARAGQAVDRVRWAIDLTSPMALLLITVLLAADQTVTYVPGRVVNSMTGSFRGEAKTDAKDARVIAQSARLREDLNQVVMPDELVVGLTQLTSYRTDLMADWVAGINRLRGLLGSIFPALEAAFDFANRTPLILVAGMCTPSEIRAAGIDGVTTHLTEHGAWKPGIGKTAASAVDAAGRQSLALPGEADTAMLVKRIATKLLDLDREIKDTDKLITTRFREHPWARIIESLPGMGPGLGAEFLVGTGGDLANFASAGRLASYAGLVPVPRDSGRVSGNLHRPKRYNRRMRRVFYMAALSSLRYDNGPSRRFYDRKRGERLLHTQALLALARRLVDVLWALLRDGREFSLDTPTPATATA

SEQ ID NO: 164963 - protein, 331 aa, unidentified
MKYSGIDLHSNNSVVSVIDETDRVVAEKRLPNDLTKIVALLAPWQAELAGVVVESTFNWYWLVDGLQAAGFTVHLAHTTAIKKYDGLKHSGDETDARFLAHLLRLDILPTGTILPPEHRAVRDLARKRMQLVRSRTSHILAVENITARQYGNRITSNQVKRLDKESINQMYLPDDVALAVRANVAVIATLSSQIDVVEKRLHEKVASNSDHALLRTVPGIGQTLATVIVLEVGPIQRFANPGNFASYARCVDSQRMSNGKKKGEGNTKNGNPYLSWAFVEAANFALRYCDQARRFYERKKARTNPVVARKALAHKLARACFHILKEQKPLM

SEQ ID NO: 164964 - protein, 345 aa, unidentified
MLNCNVIAIDLAKNLFQVCKTDKNGKVIYNKAMTRAKLKALLMKEKPSLVAMESCGGTHYWARFARKTGHRVKAINARQVKAFRQGQKTDANDALAISVAARQPHIKESRLLSVQEQCLQGIECMRDLLVKQKVSVSNQLRALLLELGYPIAQGDARLLQAIPEILEDGENDLTHSFRFSIHIIYRRFIETIKEVKLIESKLAEIIKQDQTCKRLQALEGVGPVCAILMKIALGKATHFRNGREAAACFGLTPVQHSSGGKEKIGSISKVIGNKKLRSALYKGALAVVCQLEKRENRSQKDVWLKALTARRGKKVAAIALANKTLRTAFALLKHDKEYQPQLLVA

SEQ ID NO: 164965 - protein, 347 aa, unidentified
MNFYTQQHKHYCGIDLHARAMYVGILDQSGTILVHKNLPTTPEAFLRIIAPYREDLVVGVECIFTWYWLADLCSKEGIAFVLGHALYMKAIHGGKAKNDKIDAHKIAVLLRGGMLPQAYVYPAAMRATRDLLRRRCHLVRKRAELLAHIHTTNSQYNLPEIGKKLAYKANREGVEDHFPDPSVRKTIEVDVSLIDHYDQLLGEVELYITRSAKAHDGQTFSRLQSVPGIGQILALVILYEIQDIARFPRVQDFVSYCRLVKCAKESGGKRLGTSGKKIGNVHLRWAFAEAAVLFLRHNQPGKAYFTKLEHKHGKAKALTVLAHKLGRAVYYMLTREQAFDLQRFVTA

SEQ ID NO: 164966 - protein, 438 aa, unidentified
MSNKFIFNLDELFISVGIDVGADFSWMSIALPNQQFVGKPYKILHNSIDSLTTAVSKIKEAEELYSLESRIFLESTGIYHYPLFCYLRDKGFNCSVINPIITKNSTNINIRKVHNDRFDSKKAALVGLKPDLKVSLMPSDLALNCRNLCREYYDLIDNRSAYVNKLQGELRMAFPQYLGIFSKVTINTSLTLLETYTSPSAFLKADKQEIIDIIKSTARFGLTYAQNKYNAIIQAATDANQFGYIIDSNIKRIRLYIRFIRKYDEEINSILESLHELVDANEDSDFVKQIHLIETFKGAGFLSAVSIMGEIGDFSAFSKPKQLFAYFGLDPAVKQSGKFEGTKVQMSKRGSAIARRVIHTLTLQSISISRNREAKNPVLREYYLKKCDSKPKLVAMGAVSHKVCNMIFAILRDNKPFKIIAPQEHIKQYNSAKCDIAA

SEQ ID NO: 164967 - protein, 343 aa, unidentified
MEAKRYIGIDLHRNCFTACLRLESGREYLKEWKLEDMAKFTAKLRRTDQVAVEVTGNTRLFHDAVAPHVERVVAVNPRQFKVITDSVKKTDPNDARNLALYLAKDLLPEVRMKDKTQAQIASLTQTRDTMVKLRTALKNKMNNICSAYGVNLKKESLGTEKGLQAVLVIPFEVLVHLELKIIADQIRSLNKSIAELEETIRGEGQKLEGHKHLTSIKGIGGLSGSILLSIIGDVGDFADEGKLAAYFGIVPRVSNSNETDRSGRITKRGTKLGRTTLIQCALIAQRFSPYLKTYYEKMKGRRGTGKAIVALARKFLGIIYRTLKNKWVFKDFPNFVLAEEAAA

SEQ ID NO: 164968 - protein, 317 aa, unidentified
MTESVKVNVGIDVSKDFLDVHVGNLALRRVPNRSSGLSVLKRILSRYTVSLVLLESTGGYENLAVTYLQSLGYDVCVINPRQARDFARSMGRLAKTDRIDAQILCRLADVIDVSPERTRFVKPLTDERRQRLVSMVRRRRQLCDLMISERNRRAKTDSYGSESINTVLDFLTAEVARIDCDISAHVGACFSDISSLLQSFTGIGPVTASTLLGELPELGKLNRRQITALVGVAPFNRDSGYMRGRRRISGGRSGVRNVLFMAVLSAVRFNPVLKAFFVRLVAAGKPKKVALVACMRRMVCILNAMLRDGSRFDMAPG

SEQ ID NO: 164969 - protein, 430 aa, unidentified
MKSNTQNAKIEAITEKTLVLGIDVGSEMHYARAFDHRGIEYTKKPFKFSNTEAGFMALQAWILDLKEKHEKDKVVPGMEPTGHYWFNLGKFLQDNEMKPVLVNPHHVKKSKELDDNNPTKNDRKDPKVIAGLVREGRYMIPYLPDGVYADLRTASNIRFQLQAELTRIQNRISRWFNIYFPEYKTVYGKPDAKSGMLILKAAPLPEDILTLGIDGVNQIWRDAKLRAVGKARAKTLIEAAEHSVGSKEGAVAARMEIRMLLEDYESRSIRLQEVMTLIEGLVKQIPMAEKLLEIKGVGIRTVSGFLAEVGDISRFNNPKELQKLAGLALVENSSGKHKGETTISRRGRKRLRYLLFEVAMSLVAKNPEFRELHNYYTTRRLNPLKKMQSLMAIAAKLIRVFYVMLTKGVNYDPKKMVNDIKRPAVYLQTA

SEQ ID NO: 164970 - protein, 419 aa, unidentified
MNKIETKKQRIVNDKTLIVAIDIGKATDTGYCRCPSGKDIKPFEFTNNSEGFRKLWDRICWEKTSNHLEEVVVGFESTGAYGEPLVHYLRQKPVKLVQVNPMHTKRMKELQGNSPGKTDRKDPKIIADIIGLGHALSVVIPEGAAAELRRLTLARERSIQRRTALYNQLQDLVFIVFPEFLQVMKDVKTQSARYLLRHYPTPQDMAACGSEALAVILKRVSRGKLGKAHAQMLYDAAAQSVGLQEGRMGILLEMEEILSGLEACNCFIEKLEEEMLPYLGQIPYSDLLLSVKGIGVITVAGLIGEVGDFRQFHTLREVMKLAGLNLFEISSGKHRGNRHISKRGRPLLRKLLYFAAINTIRKGGVMHACYQRYLKRGMPKTKALIAIARKLLRILFALVRDHSQYIENYFPKEALNLAA

SEQ ID NO: 164971 - protein, 459 aa, unidentified
MNRKQRREVMRKIQAEDLSLEVVHRDAAGIDIGNESHYVAVPSTRDSAPVRCFGCTTAELRQMADWLKQCGIRTVALQSTGVYWIAVYDILEEAGLEVYLVNARETKNLPGRKSDVQESQWLMKLHTYGLLRNSFRPSEEIRRLRTYWRLRNDLVQAAGRHIQRMQKALTQMNIQLANALSDISGKSGQAIIHAILEGERDPYELAAMCDVRVQASEEEVARALEGNWQEDLLFMLKQEQDGYEFCQKQMAECDERLYQYLQRRSDRSAGASLPEEKRKGRREKHKKNKPQFDVREQLFRVTGTDLTRIDGIDVLTAMTVISEAGWDMSKWPTEDHFVSWLRLCPDNRVSGDRVIGKGRLPTNNRLSVALRMAANSLRESKTYLGAQFRRLRRRLEAPVAIKAMAAKLARLIYRMLRFGMQFVDQGAEVYEAAHRQREIHNLKRRAAHLGFQIIQAPAA

SEQ ID NO: 164972 - protein, 318 aa, unidentified
MTNITYQFNIGVDIAKQKLDVSFSDQRVVSFENNLAGFKLLLKEIENKSQTRVVMEATGGYEKPLAHFLQGQGFAVSIVNAKRVRDYAKALGLLAKNDVIDAKVIRLFADAVNPKLLSAASDTQQALDAQVHRREQLVKQRAMEKQHLETVGNKDAVRSIKRTIAFLDKEIERIEKAIKALIRADSILTEKVERLSAIKGVGDITALTLIADLPELGQLSNKEISALVGVAPFCHDSGTQKGKRTTWGGRTQVRSILYMAVLSAVQYNPPLKAFYNRLLMKGKTKKVALVACMRKLLTVANSMLRNNTEWNPNHGKLA

SEQ ID NO: 164973 - protein, 426 aa, unidentified
MGMGKFTKTLCISERKEYSIMEGPIITVDVSKGSCHYQPFIENGHPMRKPKSLSATIDGFQKLGQTIKDLEAKTEREDIPVIFEATGVYHRPLQKYLEDHKRRYYIISPLLSATYRKTDLHSNKTDALDCAHIAKAYYCEKELRQYQAQPQEYKRLYQLSRIYESELVHLRKRKVSLRSMLDIIYPRIDKTFKGNQNLYDPIPMEILKRYPHPSLLLSHREDTIVKTVRHRTGHLKGYTERIVHKIYEKAKECYSGCDIDDIEVVKLPSLIENVQEQKKKCDSLLKEMIEIARTCPYFASIVSIVGIGENLAARIIAELGDVNRFDNRAAIVAYAGLNPKIQQSGDIDGLHLKISKKGNKHLRCLLYLGAQCNYRLRKEDPLYEFTKKKRQQTQCPLSSKAAYTASAHKLLVIIYSLCKNGTLYHS

SEQ ID NO: 164974 - protein, 360 aa, unidentified
MRYSTIVGIDTHSKKNAVCAIVPATGEMREAVLSEDPEQLLAWIVEQDFPKPVGCVYESGPTGFGLARSLVAGGVACTVAATSKLSYRVDRQKNDRVDAKWLARQMIAGGVREVRVPTPEEESLCHLSRLRGEVAADLRKAKQRVSSFLLLTGTEYTLTKKKWSKTFRKWAASCEFDQPADTFAFRCKMSAVLRLEERLAEVEAEILRIVASSPKLSERMSRLTCIHGVGKVSAFSLVCEVHDFDRFNNGASFASYLGLVPSENSSGKKVSRGAIAKQGNSHLRRILVEAASCYSKPFKAVRSEDAAVPEAVRAKAEKCAARLRKRRAALKKRGVSANKAKVAVARELAEWIYHIAVMPA

SEQ ID NO: 164975 - protein, 396 aa, unidentified
MVMVGIDVGGRSHAVARCRDGHGKADREVFRVSQSRAGFAALDSWLERQAEPVSLVTMESSGHYWMPLASHLRRRDVPVAVVNPLAAKYFARSRLARTKSDPADARSLAEMAMRDTPAARDPLAGAELRQAARFAMTLVEEQARVCQRLIRLVELGFPELGELFDDPTCLTAREVLRIAPTARAASRRRTSSLANANAGPGHRRLGSARAERLHAAAAASIAVPELDAEVAFEVGLLLDQFDLLERQIEAADARVASLIDSATARRLQTIPGVGPAIAATLLAEIGDIGRFTDFDQLLAFAGVHPAERSSGRKGANPETAWHMSKAGNSHLRAAAYRMAVVGIQHNPLIAAHYARKRAAGKSKMNALGHCMRKALSLVWGVWRNGQDFDPTWGTET

SEQ ID NO: 164976 - protein, 315 aa, unidentified
MSSPVFVGIDVSKAELQVAVRPGDEQRTFANDPSGLGQVVAYLGPQPPTLIVLEATGGYETAVAGALAGAHLPVAVVNPRQVRHFAQAVGTLAKTDRIDAGVLAQFAEAVRPEPRPLPDALTQALQALVTRRHQLVNMMTAEKNRLAGTSPPIRRQIKAHLAWLQKQLAQVNQDLDQAIRESPVWREREQLLRTAKGVGPVLASTLVADLPELGALNRKQIAALVGVAPLNRDSGTHQGRRSIWGGRRRVRAILYMATLNAIQHNPLIRPFYERLVAAGKRAKVAIVACMRKFLVILNAMVKTNTPWNPKATTGP

SEQ ID NO: 164977 - protein, 341 aa, unidentified
MKQQHQDSEVTIGLDLGERRHRFCALDGRGEVVEEGSLLNDRASLARLTARYPGALAVMEAGTHSPWVSRYLEGLGWEVIVSNPRKVRAIYQHERKSDQRDALMLARIGRMDRALLYPVRHGSEQAQQDLLRIKLRDSLVRARVALINSVRFSLKSLGYAVCNPSSERFHKVAMERLPERVQQMIAPSVQALAELSTRIAVLEREINVVARTKYPQTLWLQQVPGVGVLTALYFVLKIEDPQRFENVRDVGAYAGLCPRRDQSGQSDPQLRISKRGDPYLRRLLVSAAQYILGPFGPQSALRGYGLMLAADGSARQETGCRGSGAQTGRSALKPVEKPQSL

SEQ ID NO: 164978 - protein, 351 aa, unidentified
MTIEHYIGFDVHKKSISFCIKRADGSIFDEGRFRATRHEIKGWVGRQTASWHGAMEATLFSGWIYDEMKPYAARLDMGNPSMMKAISAAKKKNDRLDARKIADLVRCDLLPKCYVGPREMREWRRMLRYRNAMVGHAVQIKCRMSGLLMESGAEYNGKQLHGKQYFSELMEGLEEVPASVKELLQMSRGMLEMFEKTQRQLVERLNEAPLLKKRLALLRTIGGVGEITSLTWALEMMDPRRFSSIGDALSYCGLTSALNVSADKAQRGPLSKQRNGHLQTVLIEAAKVAPRWNAQLAEVHEKELSRGHKNQATLEVARKLVAYLLAVDKSGRPFELRKPVQQPAEEVLAVG

SEQ ID NO: 164979 - protein, 435 aa, unidentified
MKKIRTNVGGIDIGAKKVFTSIEGQPVVSHFTFTEDFYKLRDYLLGHNIESIAMEATGVYWVILYEILEEAGIDVWLVDGRQTKQVPGRKTDVKDCQWIQELHSYGLLNRCLVVDADIKELRSYLRLREDHIESSSRHINQMQKALILMNIRLKEVLSQIHGASGMAIIKAILKGERDRQVLVSLCHRSVLKNKKELVLKALEGKYTTAGLFALKQAYEGYKFYQQQIAECDKKLNDVINRIGNSGDGQELKQKRKAIRHHKPNVEKLGPNLLNIFDSKDATLISGITDYTWMQLLAETGPDLTRWPSEKHYTSWLGLSPGQHSSGKMRKNARKKGKPKAGQIFRIIAQGLINSKDVAIGSFGRRLRGRKGPKVAIKAMARKVAVLYWRVMVKGLDYAEKGIQQYEEQLIVNKMKAFGRLAKDLNIEITGNLHVT

SEQ ID NO: 164980 - protein, 355 aa, unidentified
MTSWKYVGMDVNTATISVAVRDAAGKLIMESVIETKSSTILQFIQGLRGDLYVTFEEGTWAAWLYDLLRPHVTNIVVCDPRRNALLNEGSKSDRIDARKLSELLRANLLRSVYHGENGLRTVKELSRAYLTIGKDLTRVMNRVKAIYRGWGIPCAGKSVYHPRHREEWLRKITQASVRRRAELYYEQLDVLVVLRKQARQELLAESKKHKAWKLLRSIPALGPIRVAVLMAIVQTPHRFRAKRPLWKYSGFGVVTHTSADHRYVNGQLERSKRPVSVRGLDPGHNHQLKYLFKSAAIQASTAKGPFQEFYEALVAKGMRPEMARLTLARKIAVITLTVWEKGAAFDAKYLKSQTA

SEQ ID NO: 164981 - protein, 362 aa, unidentified
MKQTLATAPVCSPSTTAREVIGIDLGDRWSHYCVLDQVGTVVEEDRVRTTPEALAAKFGQLPPTRMVIEVGAHSPWVNRLLQAQGHDVVVANPRMVRLIYESNRKNDRLDACMLARLGRVDVSLLSPVQHRSREVQADLAVVRSRDALVAARTQLINSMRGMVKSMGGRLPRSTTSAFAGKVKLLIPAEMKTALEPLVRCIHSLSEQIRHYDERVEQLADKKYPETRLLRQVKGVGPLIALTYVLTIEDPNRFRRSRQMGSFLGLRPRQCESGNSAPQLGISKCGNNHLRWLLVQAAHYILSRLAPDSRLRRWGLQLASHGGKNGKRRAVVAVARKLAVLLHRLWVSGEVYEPLYGLATEVV

SEQ ID NO: 164982 - protein, 375 aa, unidentified
MPFMIAGIDVHKRVLMVAVADASGSEDDLEFQYRRFGTTVGELQHLAAWLGDSGVREVVMESTAQYWKPVWLALEGHFEQHLAQAWSNRAPKGRKTDFKDAQRLVRRQMAGELTLSFVPEAEQRQMRTLTRRRVQLSRDRVRLQNQLEALLEEMRIKLSSVVTDLLGASGRRILKALAAGEQDPEKLAALGDARLKCTRPQMQDALASAPPAVLCKLLRMLVEQVEFLDRQMEELAQLIAETMRGWQDAVARLAEIPGIRMVAAQQILAETGPQAAAFPSAGQFVSWMGACPGREESAGVNRSGRCPKGNRYLRRSLCQAAQAAVRTKDSHFQAVFRRLVPRLGYTKAIWAIVRRMAVELTFGLSRRHKEFRFQP

SEQ ID NO: 164983 - protein, 360 aa, unidentified
MTATMTYVGLDVHARSTHAAAIDVASGELCRARFGGGSEEVIGWLAALPQPLRGCYEAGPTGFALYRAASAVGLRVDVIAPSKTPRAPGDRIKSDRKDAELLARLLLAGQLKIVTVPSPSVEAARHLCRAREQVRSDLMRCRHRVSKLLLLHGRVYPEPSTWTQRHRQWLARQQFDEPATELAYLDTLAAVDGLVGRKAALDERLSRLALDHEWWPTVARLRCFRGIDTLTALVLCLEIGDFARFESPRKLSSWLGLVPALDQSGEHRRQGAITKTGSSYARRLLVEAAWHYLRQPRIGATVANRQQGQPAHVLQIAWRAQHRLHRLHTRLRAHGKPPNVATVAVARELACFLWAAAVTE

SEQ ID NO: 164984 - protein, 432 aa, unidentified
MWLINRSLRSRLQSKRRALYGDGMRGPASSGMQYIAPMKNALDGAETETGHMKQDSSTKVKNDSSAKGKVVSAQTRNSKRALYKRAAEERLTIGLDLGDRKCAYCILDAAGDVLSCDTLPTTKTGLLSLFERMPRSRVALEVGTHSPWVSRLLTEAGHEVIVANARRVALIGQSTRKNDKVDAATLARLARVDPRLLAPIRHRSEQAQKDLLVIRARDALVEARTKLINAARGLVKPLGERLPSCDSEQFDEDLSKGLSDEMRVTLQPLLRSVAQLSEQIAEYDVRIRDLAGRYPETKLLQQVHGVGPLISLAFVLTIEDPGRFAHSRDVGPYLGLVRKTRDSGESEPQLGITKEGDGCLRRLLVQGAHCLLRNNAPDSDLRRWGLEKIRQRGKKEKKRVVVAVARKLAVLLHHLWVSGEAYEPLRNRTAAA

SEQ ID NO: 164985 - protein, 422 aa, unidentified
MLAETQDSEEIIPRVAALDIGKAELVCCARVPDEDRPGRRLQEVQTYSTMTRSLLGMADRLRCLGVTRVVMEATSDYWKCAFYLLEAAGFEAWLVNAKDVKHLPGRPKTDKLDAVWLCKVAERQMIRPSFVPPPEFRRLRDVTRYRADLVAVRTAEKQRAEKLLEDAQIKLSVVASDIFGVSGRQMLAAMIAGERDPKVLAQMARAAMRGKITALQEAFTGFFTDHHAFLLQRMLARVDAIDADIAALDARIEEMTAPFTAAAGRLDEIPGINVTIASVILAEIGTDMGRFPTAGHLVSWAKFAPGVKESAGKKKGTNATGHGNSYLARVLGNAAVAAGRSDTFPAERYRRIARRRGKNKAVVAIGRSLLVIIWHLLADPDARYTDLGSDFYATRISPERRKRGHIRQLEALGYKVTLEPAA

SEQ ID NO: 164986 - protein, 347 aa, unidentified
MGYFAGLDVSLEETAICIVDDAGLIVREARAVSEPEALVTFFRGCGLVMERVGLEACSLTAWLHQGLTEAGIAAICIEARQAKAAMGAMPNKTDRNDARGIAQIMRTGWYRAVHVKNPSCRSWRALLTARRMVLNKRRDVENGVRALLREAGLKIGTPSRKNFAARVGELVTDDPVLAGLAESLLSVIDVMTREVDRLTKRVLDEVRVEPTCRRLMTVQGVGPLTALAFRATIDRPDRFRRSRDVGAHLGLTPRRYQSGETDVQGRISRCGDELARTALYEAAHSLLIRSTKWSVLRAWGMNVAKRRGMARARVAVARKLAVILHRVWSDGSKFRWGKQIATPAAAA

SEQ ID NO: 164987 - protein, 371 aa, unidentified
MKKKILYVGLDVHKKSIDVALANGRANGKVRSYGKIDGSLDALDKLIGKLQSKDCVLEFVYEAGPCGYPIYRHLESKGHKCCVVAPSMIPKRSGDRIKTDRRDAINLVRLYRAGELSCIYVPSQEDETMRDLVRSRDDFKRFERKARQRLLAFLLRHGLEFAGKKNWTKTHMNWLAGLKLSHRSQQIVLQEYVDAVKDCTQRVERTTEQIRQLVPDWSRADLVKAYQALRGVSLIVAVTVVAEIGDMGRFKNPKELMAYLGLVPSEHSSGSRLRRGSITKTGNSHVRRVLTEAAWTYRMRARKTTTILKRHQGLPKSICEISWKAQTRLCTRYQRLFAKGKSKQTIITAIARELSAFIWAIDKELQQKTTT

SEQ ID NO: 164988 - protein, 350 aa, unidentified
MEAAYDGPQIVGMDLHRRRSVLVRMTEDGTHLGTSKITNSAAELRREIARAGRRPKVVLEATYGWYWAADALAAAGAEVHLAHPLGVKAFSYRRVKNDKRDAADLADLLRMGRLPEAWIAPPEIRELRELTRYRIKVVRLRASCKDQVHAVLAKLGIPVTCSDLFGTWGNAWLDGLALPQPYAGKTASLRQLISELSAEITVLDAVIASLLEHHDGYHVIQALPGIGPVLAAVIVAEIGEITRFGHPARLCSWAGLTPRHRESDTKVSRGHITKQGSPILRWALIEAIQRLPADTPVRQVKDRIIARRGKEARNIAKVAAARYLLTCIYYAMRDGHVRSLAARATAQATA

SEQ ID NO: 164989 - protein, 368 aa, unidentified
MINKFHGIDRHKQYSTIAVLNRKGEEIDFQLRCSDLKGYVDRLGPEDAVIIEACTGAFYWADRVESKGALCYVIDPHKFRIIRDSWNKTDRQDSRNMVKALWVYILTGEFGIPTVYKPDAVTRELRKLFSQYQLLNRQIRMLKNNIQAILADSGIHLTQEGKNHFLSSKNGIEKVKEHALSAASEISVRSSLELLWRIEEEKEKIHQEILLAGEPLKDAVKLLITIKGIAPLVALAFLTDVGDIKRFRTLRKMNAYLGLVPRVKNSGGKTKPGHITRESRKLTRTLLTQSIYHVSNASPSFRKFYVDLVEKRGAGRARIALIRKLCGVMRRMLLTGECYRWMDGKLFEKKLRHYEKDLEIIKMERKAA

SEQ ID NO: 164990 - protein, 405 aa, unidentified
MNKMTHVGLDVHQDTIAIAQLTPGHEAPLVWQIPNAATSIRKTFCKLVREARELRCCYEAGPCGFEVQRQLESLGIECVVVAPSLIPRKPGERIKTDRRDAIKLARLDRAGDLTVVHIPTPEGEAVRDLVRAREDVRKDLVAARQRLTKFLLRHGRVFRKGKNWTQQYRAWLHSQTFEHTGEKLTFDHYVTAVEHQEACRDHLEKEIGAAAETVPYADAVERLSCLRGIATLSAMVLITEIQDFRRFTHPRQLMAYVGLSGWFPASARAARPNAEAGSPRQGTRRQDESSSRRPGTTAIRRRGKDVCTTPCEGNRRRGSPSRAKPRRDCTSALFDFWALASPDRLQLSLLLASSAGSSGRPHYRLKDEECEGARAVDVTGPRKENPRLIFAVASPDTNPRSIRPR

SEQ ID NO: 164991 - protein, 338 aa, unidentified
MIHVGADLHERFCYMTALDATGRAVKSGPVPNRPPELRRWLKELPRPVNVAVEACSFWPAFQEAIGRQVDAIRLVHPQRVKAIAWAKLKNDRVDSATLAHLLRCDLLPEAWMADRRTRERRQQVRLRISLGQHRAALKNQVHAILHQHGKRTPVSDTFGCKGRAWLRKITLPPVAREAVDTYSGLIDQVGQHIQKQDLRLKEMARGDARAKWLATIPGVGTYSAMIILSEIGDIGRFPTAKALFSYAGLVPWVRESAGHQSRGGISRCGSPRLRWVMVEAAHTALRCSPAARSYFDGLRRRNKHAHVARVALARKLLAAVFALLRDGTCFDETIFAAV

SEQ ID NO: 164992 - protein, 320 aa, unidentified
MAMTVSQSIIGVDVAKAEVVVYRSETAETTIVPNNKPELKTWLKSLPTGSAIAIEATNIYHLDTVNLAHSMGHKVYVIDGYRLNHYRKGTGGRAKTDLSDAQLLARYLRNEQADLRVWNPPPKIYTKLQSLLRRRAALVKMRVALNQSWAGEPLLKASSKSISACLDRHEALIEKRILAAVTEAGVLHQVRRCQAVEGIGFLTAVALTMAFQRGEFESADAYIAFLGMDLRVSDSGQMNGRRSLSKKGDSEIRRLLHNAASAGIRSEAWKPLYEGYLARGLKTTQALVIIARKLARIAFSLMKNQSEYQSKAGLGASPQP

SEQ ID NO: 164993 - protein, 451 aa, unidentified
MSRRKRSKESRKAALPLLSPNAAGVDIGAREIFVSVPPDRDPEPVRSYATFTEDLHRLADWLKSCGIETVAMESTGVYWIPLFQILEARGFEVCLVNARYYQNVPGRRTDVSDCQWLQYLHSVGLLRASFRPEQQVCVLRSLLRHRQNLIETASQQVLRMQKALDQMNLQIHHVISDVTGLTGLSILDAILAGERDPAVLAKLKDPRVKASDETIVQSLVGDYRPEHLFTLRQSLAAYRYFQQLIAECDRAIEKHLDQFAAKVDVNARPLSSPKLRRRKPYRNEPNFDLRQHLYRILGVDLTAVPGMNILTAHTLLAEVGPDLSKFRSASAFASWLGLCPDNDISGGKVLSVRTRKVTSRAALAFRIAAQALFKSKSWLGNFFRRMRARLGATKAITAAAHKLARIVYHLLTTRQPYDETVFAKHEQASRVRTEARLRVQAKVLGLQLVPA

SEQ ID NO: 164994 - protein, 420 aa, unidentified
MKAKKKAKLDLIDESTLIAGIDVGKKKHFARFINVRGYEIGKVFSFSNNRDGMEKVIAKIEEAKKQNNLIKAVIGLEPSGHYWRPAAHYLSRSGYGIALVNPYHIKRIKEIDDNCQTKTDTKDCLLIAKLVRDGDFFDPNLASGTYAELRRMYRLRLKVKKSLVREKTKLKVLLDEYFPEYEDLFCDTLGKTSEYIIDNYFLPEVIAKENILSLAGKIKMISRGRIGALKVQKLIEYAKDSIGITTGIDAAVLEKTYILEEISNLKLKLSCLNKKLKYYLDKIQCSKYLLSIPGVGIVTAAGFLGEVGDISKYKSAKEIIKLSGLNLVEISSGIKKGKKKISKRGNSILRCILYQCAIVAISKNSQIKRYFSYQTETKNKMKMVVAVQCKLARIMFALLKYKKYYNPEEVLKSMVAEAVA

SEQ ID NO: 164995 - protein, 341 aa, unidentified
MNEIGIIGLDLAKQVFQIHGASPDGGVVLRKKLGRGRMLEFFAKLPSCIVAMEACASAHYWGREIGKLGHEVRLINPSYVKPFVKRQKNDAADAEAIAEAALRPTMRFVPIKSAEKQASSMTFKVRDLLVRQRTQTINALRGHLMEYGLVAAQGMQNLPRLRQMIETHPDLPEIARSLSFGLLQHIDSLTDKINVVEQDLRTRARQDEVASRLTTIPGIGAICATAMEALAPSAAAFSKGRDFAAWIGLTPRQNSSGGKERLGRTSKMGQRDLRRLLIIGATTVLRWARRRGAPAGTWLARMLLTKPPKLIAVALANKLARIAWALMARGGVYKAPAPGSA

SEQ ID NO: 164996 - protein, 467 aa, unidentified
MKSFYLGIDVSKGYADFVIINQQKQPVVKSFQLDDTFDGHSRLHEIVSRFLTDHPQAVMYAAVESTGGYENNWYNTLIRLQASLNIKTARLNPLGVMHNSKADLQKNKTDKISAQNIAEYLIAHPEKVVYQQQDQLASLRKQWGFVQMLTKQCTQLLNQLHSLLYTANPELLSYCRDGMPAWMLKLLLKYPTAATLKKARDKTVAKIPYVSMTRAKQLIAGAKHSVASATDSVTAQLITATAGQILQLKKTIAAQTDLMAAQCDVSETKLLKTFTGIGDISAIGLILEIQSVARFKTVKKLASFWGLHPVYKISGDGSGAFKMSKQGRVNPRKILYTVTLSAIEHNPVIKPIYQYHLQQGKHKMDAIGICMHKILRIIYGMLKNNTAFDPKIDAANRQRSLPDITAYPKKTKDRRFQSYDSKAPVSRRQRKKRLEREQSHSVITDTKSGISAPVPIGDIISDMLSNI

SEQ ID NO: 164997 - protein, 404 aa, unidentified
MKGPIVSIDVSKGKSDYQAFKEMNVKYTGSRSIKHTKEGFDEIVSLVREMEKKLETEVCVVYEATGVYHRVLKKVLEDNNIKQFIINPLLSAKTRKNDSLRSPKTDKLDPKSIAKTYYSHSLHNSHKPETIYHELRELSRYYEDILVHLRKDKVAFRAQLDVVFPGYDTLYDDLYGPVALAVIEKYPHPEMLQKKKINTVSKVIQSKTCHRQAMSDTMADKAIEYSKTIYSGCDKDDIEVLILQRFIKKLKEDMAEAERTIGEMIKLAQELPDFSIIKSIPGIGDNLAARIIAELGDMTRFKKKNELVAFAGLDPRISESGQNDGDHMHITKKGNKRLRCLLYLAVTCSIRLKRDDNSIKDFYIKKKQQSNPMCSKAAKTACASKLVRIIYSMCKTGELYQYNK

SEQ ID NO: 164998 - protein, 433 aa, unidentified
MEPEFAAFVAIDWADQKHAWALEVNTSSDRESGNIDHTPESVEIWAAELGLRFAGRPIAVALEQSRGPLVFMLTKYEHLVIFPIHPSTLANYRKSFRPSGAKDDPNDAGLLLDILVRHRDKLRRLDPDTPETRTLQFMVEERRKLVHEKTRCSNRITAHLKLYFPQAIGWFDEIGSHIVADFLERWPNSERLQKARPATIERFFIEHNSRNAERIAERLEQIRKIVPATKDTAVLRSCSAAVIAWAGLLRQLLNAIKAYDEQIDTLARQHQDYALLKSFPGAGPALTPRLIAALGSQRDRYQTAHEIQCYSGIAPVVASSGKQRWVHWRWSCPKFLRQTFHEWALHSVAYSEWARRYYDEQRAKGKRRNTVIRALAFKWIRILFRCWKDHKPYNEQAYQQALALRRQKQTAGQLVEVKWKNVAGFMKITAPGA

SEQ ID NO: 164999 - protein, 330 aa, unidentified
MAQFVLGIDVSKDKLDVALSNSDGFIQAVFSNDPLGHRRLIRWLSRHTRQQPVHACLEATGLYAFPVAEHLHACGHRISLVNPARTAAFAKSELQRNKTDRTDARMIAEFCRSRNPAAWTPPGPAFTQLQALVRHLEDLQTMQQAEQSRLSSGVRVQSVVAKLHQHIAFLDAQSMAVRAEIQQHISQHPKLKRQQELLASIKGIGDLTAAYLLGEIPDFHLFENAKQLAAFAGLNPSQRQSGKWRGRSSLSKIGNAHLRRALFMPALVAKQHNPIVRTFCCRLEQNGKSRAQTNGAAMRKLLHIAFGVIKNDRLFDPHYSSQRDSALSPA

SEQ ID NO: 165000 - protein, 309 aa, unidentified
MDRKYVGIDVSKDRLDVHVRPSGEAFAVARDGEGLAALLERLRPLAPSLVAVEATGGFEVVVAAAVGGAGLPLAVVNPAQVRYYAHALGKRAKTDKVDAEVIARFAEATKPEPRPLPDEAMRLLADLVVRRRQIVVMMVAERQRATRLPKRLKKSCERVIRVLEKELAELDHEIDTTVRGTPAWRAKEDLLASVPGVGSVVARTLIAELPELGTLDRRRIASLVGVAPFTRQSGQWRGKSFIGGGRSSVRAALFVAAMAAVRHNPAIRAFRQRLLAAGKPKMLAMVACMRKLLTILNAVLRDQKPWQSA

SEQ ID NO: 165001 - protein, 425 aa, unidentified
MSIIQNTGSETSGFAAFVGIDWSDEKHDICLLAVGASQPEASVIASTPEAIQEWVQRIQKRFENRPVAICLEQSRGPLVYALMGHAFITLFPINPNQSAKYREAFAPSGTKDDPVDAGLLLDMLCRHRERLTPWKPDDVQTRTIRGLSEERRHAVNLRTTCAQRLTARLKGYFPQVVAWFDNDLTSLMACDFLLRWPTVANTKKAKPAALRAFFHSHNCRSEALIDQRLDAIAKAVPLTEDLGVVTPAVLTVQTLARMIRELTCAIAIFDQQLAEAFAAHPDAHIFNSFPGAGAVMAPRLLAAFGSDRKRWRDAGSLQSFSGIAPVTERSGKSAWVHRRWKCPKFYLQTFFEYAQHSIPFSVWAGAYYRQEIAKGKGRNAVIRSLAFKWIRIQLACWQQKVPYDESRYLQSLIQRGSPLAKLIQT

SEQ ID NO: 165002 - protein, 351 aa, unidentified
MSQKADALVAHTIGIDAGKNTLHLIGLNAEGAIVLREKVSRGRIGTRLANVPPCLIGIEAGMATHYVARELLALGHDVRQVPWIYAKAFRQAHKNDFRDAYAIAEAVQRPSTRCVPVKTDDQLDLQALHRVRSRLVGQRTAVINQIRSFLLERSITVRQGLRFLRQQLPEILAKRVDVLSPRMIRIVEDLSSDWRRLDERINHVTEEIEVLAHGSESCRQLMTVPGIGPMIASAMVAAIANGAAFAKGRDFAAWLGLVPKQRSTGDRTILGRISKHGNRYLRMLFIQGARVILLRPANWSKHSFGPWLSAAAKRMHHNILATALANKLARITWTVLAQRRNYEMRVMTEAA

SEQ ID NO: 165003 - protein, 339 aa, unidentified
MQVTTVGLDLAKNVFQVHGVADNGDVVFNRALRRGQLLTFFERLEPCLVGIEACGTGHHWARELIRLGHDVKLIPPVYVKPYVKRGKTDAADAAAICEAVTRPTMRFVEIKTPDQQAILALHRTRDLVVRQRTQTINMLRGQLAEFGIVFPQGVGHATQFARGVIDGECPDLPEVAGGVVTELCEQLLFLHGKIAGYTREMTRVAQSEERVALLQTIPGVGPITASAIVATVGTGRQFSNGRDFAAWLGLTPLNRSSGGKERLGRISKMGDQYIRRLLVIGMMSRMRQIIKNPERYDPWFASILARKPGKVAAVAMANKTARMVWAVLTRNEPYRVRTI

SEQ ID NO: 165004 - protein, 357 aa, unidentified
MEPILISCAGMDVHEKKVDVCIAHGPLDKPPIFEIRTFSTMTSDLEVLKLWLKKYEVTTIAMESTGVYWKPIFNIMEDEFDVVLANPQHIKALRMNKTDIKDCKRIANLLRHGLVPRSFIPPREIRELRELNRTRRKLVGIMASEKNRVVKILEDANIKLSSVVTKIYGVSSLSMIYALLEKDKLSRAEICEMAKGKLKKKVDLLEKALDGKLTGHHRFLLRMHLENIQYLAGQIKKLDDEINQKMVPFHEESKLIQTLPGISEVSASAILAEVGINMSQFPDESHLCSWAGVCPGNSESGGKRKSGKTRKGNSFLKGALTEVSWAASRTKGSAYFIMELVSKLFILRPITTCEGVA

SEQ ID NO: 165005 - protein, 345 aa, unidentified
MKKSTTIAIDLAKHSFQVCKLQGSSDEFNKVFTREKLKAWLIQQPPTTVVMEACSTAHYWGRFCCNHGHSVCLIAPKYVTAYRTGQKTDKNDATAIAVASQQANARFVALKSIDEQALQSIDRIRQHLTDSMTATSNMVRSLLSEFGFNIPKGHSAFKRHIIEILEDGQNSLPDILREHIANAFHLHETLAKKRADLETSLTQHLKHHDACRKLEALEGVGPVNALGLYLSLGANGGNFKNGREASACIGLTPKQHSTGGRVTLLGISKKVGQKKLRSSLIQGALAVAKVVNKREPRNVKETWLKSLIQRAGLMKAAVALANKTTRTAWALLHYGSEYQVPLTYE

SEQ ID NO: 165006 - protein, 437 aa, unidentified
MNPSPTPSRVKYVGLDVHAETVAVAIADSAGELRGHGTVPAHSHSLDRLHRKLSEDGSEVRYAYEAGPTGFWLARHFAAKGILCHVVPPSLVPRKPGDRVKTDRRDALALARLFRAGELPFVHLPDEADEAIRDLVRTRLRAVEDLRRCRSRIKGFLLRYGRRYDGSSSWTAEHLNYLSRQKFDHPGQQIAFEELVGAVQEPAGRIERLTKAIEAQVKSWKRRPLVEAFMCLRGMALINSVTWVAEIGDFGRFDHPSQLMSYIGITPSEDSSGLKRRQGSITRTGNEACRRAAIEAAWQYRLPARVTPHIRKRHHGRPKEVLALAWKAQTRLCERYQTLVRNRKKAVVTVTAVARELVGFLWAVARQVEGRAPAAGAEKVPPEKTALKEGTSPGTPPEAIRAVRQYRLDGAKKYEHGKRPAERNRSVKETVKKASGK

SEQ ID NO: 165007 - protein, 355 aa, unidentified
MNDAKYIGLDVHQATISVAVLDSAGKLVMEAVLETKAETILQFIHGLRGSLHVTFEEGTCAAWLHDLLKPHVAQVLVCDPRKNALIKAGNKSDRIDARKLAELLYLNKLSPVYHGETGIRALKELARSYLALTRDTTRVMNRLKALYRSWAIPCAGQRVYAPRYRSQWLAKITEAGVHRRAEIYYQQLDALRSLREHVRRDLLAEGRKHSAMSLLRQVPSIGPIRAVLLIALMQTPHRFRTKRQLWAYCGLALKTSTSGEYRIVEGQLKRAKKFLAIRGLNTNHNHDLKNIFKGAATRAAAVPGPFQEFHAALVARGMKPTMARLTLARKIAAITLVVWKKGARFDAEHLKQQAA

SEQ ID NO: 165008 - protein, 467 aa, unidentified
MKLLYRCCAGLDVHRDTVSACIRRRVRGQAEATIEEQVFGTFTQDLECLRTWLKKNKVRQVAMESTGVYWIPIWNVLERHSRFTLTLANPATVRALQGQKTDRIDARRIAEYLQYGLLRGSFIPPKPIRELRELTRMRVHIQQDRNRVINRIARLLETVNLKLASVASNIAGTSGMAMLRLLASGMRDPERLAQCAQGQMRIKIPALLLALDGRPDAHFRWMLSEFLTQLARLDEQRARVDARIEQLALPDEDRLRRLSTIPGVDRTTALVLLAEFGTDMTQFPTPGHLASWAGLCPGNAESAGKRFSGRTRKGDRYVRRILVQSAWAASRCHDCFLAALFFRTAQRRGMKKAAVAVAHRILIIAWHILAEAGVEYYERGGDHFDRRHPERTARKLTRRLEAIGYKVTLIAPPKPPRPCSKPRVGTPPTPPVHPSVCARCARWGMPPCICLVKRNRTPSPPQSERPL

SEQ ID NO: 165009 - protein, 346 aa, unidentified
MERYVGLDVSLKLTAICIVDRTGKIEHEGVVRSDPEAIAAFIKSNAPHVARIGLETGATSTWLWTELNKLGLPVICIDAKHAKAVLKMQINKSDRNDAVGIARIMQCEWYKEVCVKGLESDAVKALLVSRALLVKIKRDLENQIRGLLKNLGLVIGPAKMNVFALRAAELTKERPELALAVTPLLTARMAIEQQIAELDRKVMKLARNNAQVRQFMTAPGIGPVTALCFLATIDDPTRFKRSRSVGAYVGLTTRRYASGEIDWTGRISKCGDKMLRSYLYEAANVLLTRVAKWSALKAWGIRLAKRTGLRKAKVAVARKLAVILHRMWIDGTEFRWSSKQTAVQTA

SEQ ID NO: 165010 - protein, 410 aa, unidentified
MERIVARAGGLDVHKDVIVAETHLPGGVLKRGRFATTTSGLLVLRDWLVELGVTRVGIESTGVYWKAPYYLLEDAMEVWLLNARHMRNIPGRKTDVSDASWICQLIEFGLVRPSFVPPKPIRELRNLTRYRKAQIEERTRETQRLDKILQDAGVKLSSVASDLLGKSSRAMLDALVAGTTDTTVLADLARGKLRKKIPALREALTSRFSGHHAVIVTSILSKLDFLDELITSLSTEIEHAITPFAHQIHLLDTIPGIDQRTAQGLLAEIGADMSVFATAARLASWAGVCPGNHESGGRSRSGATRKGPKWLGIYLHDAAMGALRAKNTYLAAQYARLRPRLGHAQALVAVEHSILVSIFYMLQRNQPYHDLGADYFIRREDPTRRARKLIRQLEAIGYTIQAQPPPPAAA

SEQ ID NO: 165011 - protein, 343 aa, unidentified
MVVIGVDAHKRTHTMVAVDELGRTLGERTVAATSDGHLQAVQWAARWPGARFALEDCRHLTRRLEGDLLRAGFAVVRVHTRLMAAARRGGRQRGKSDPIDALAVAHAALREPDLPVACLDGPARTVKLLSDHRQDLVAERTRLCNRLRWHLHELDPGLDVPSRGLRRYHVLDGLAARLAVMDGVVARIAAGLVARCRELTGQVNALERELGTLVRRLAPALLAIPGCGVLSAAVIIGETATASRFRSRDAYARFTGTAPIPVWSGNTVRVRLNRGGNRAVNCALHMIAVTQARGIGPGKDSIAKQLAAGKTTTEALRLLRRQLSDTVFRALLADEHRQAHRTA

SEQ ID NO: 165012 - protein, 404 aa, unidentified
MNAVGIDVSKGKSTVAVLRAYGEVVASPFDVAHTESELKELANFIKKLRGETKVVMEATGNYYEPIAHYLHEQNIFVSVVNPVLISDFGGNTLRKPKTDKKDSLKIASYALSYWVDLKEYIPQEDLRKSLKLLNRQHQQASKLKTMMNNNLISLLDLTFPGINKLFTSPSRESDGHEKWVDFVIAFPHCDMISKLTFKAFSKNYKKWCTGNSYYFTEASCEKIYDFSKECISSVSSAESTVFTVIQAAKMLNSAAENCQAIQYEMNRAAAQLPEYDTVMSMYGVGKAVGPQLIAEIGDPRRFHSRKAITAYFGYDSENNDSGQKVSISNSMTKKGAGALRRTLFIIMQVLLQTKPIDNPVYDFLIKKQCEGKHYYSYMNAAANKFLRIYYARVKEVLTAAEVKT

SEQ ID NO: 165013 - protein, 349 aa, unidentified
MIVIGVDAHKSTHTLVAVDDIGRQVGQRTVKATTEGHLSAIEWAAQWPQVQFALEDCRHVTRRLESDLLSRGHAVVRVKTQLMALHRRSARQPGKSDPIDAHAVAMAALREENLPIARLDESTREVKLLSDHRRNLVCERTKLINRLRWHLHELDPELVIPVRGIRRYRVMDELAERLTAFTGVVAQIAGELLDRCRQLTEQVNDLERQIRDRVRRIAPSLLAIPGCGVLSAAVIIGETADARRFHSKDAYAKFNGTAPIPVWSAHERVRLNRGGNRAVNAALHAIATTQVARGGPGKDYVAKLQAAGKTKREAVRLLRRRVSDRVFQVLRVHESATGNASESSLSAAA

SEQ ID NO: 165014 - protein, 412 aa, unidentified
MTDETRCWFAGVDWGSEQHQVCLLDATGKVVGERAFAHDGAGLVAMCDWLVSLAGHPSTVAVAIEVPHGPVVDVLLDRGFAVHAINPKQIDRLRDRFSMAGAKDDRRDARVAAAGLRTDPHLFRPLQVGDPGVIELREWSRLAEDLQQERVRLTNRIRQQLWRYYPQLLALSDDLTAEWILELWRLAPTPAKAARLREATVARLLKQRRIRRIDAATALGILRAPAIKVAAGVTEAAVLHLRSLVARLRLANTEFCQAEQKLDELCARLSQNAAAATQGPCDAEILRSMPGIGTVILAILITEAGDPLARRDYAALRTLSGVAPVTKRSGKTCIVVMRYAAHIRLRQAVFHWGRVAIIHDPKSRSRYEALRARGHSFGRALRGVADRLLGVACVLLRRQVLFDPGHGKPAAA

SEQ ID NO: 165015 - protein, 449 aa, unidentified
MREPEEIQDEEYEQVLERVCAIDVAKASGTVCTRVPHESRPGKRRTRVWDVDATTNAILELGEHLAGEEIEKVTLESTSDYWRIWFYLLEAAGLDVQLVNARDIKNAPGRPKTDKLDSVWQAKMTERGMLRPSFVPPVEIRRLRDYTRLRVDLTRERTRYWQRLEKLLEDSLIKVSAVASTLDTLSVRDMLEALIAGERDPKVLAGLARGRMKAKRAALIEALTGRFDDHHAELARMLLDQIDALTAQIGKLTTRIEDLIAAIPAAQGADADGSTGPGAGRGTDAAVLPAVDRLDEITGIGREGAQSIIAEIGLDIDRFPTAGHLVSWAKLSPRTIQSGSKHRGGKTGKGNPYLKGVLGEAAAAAARTNTFLGERYRRIVKRRGKLKALVAVARSILVIVWQLLADPTARYRDLGADYHNTRIDTTRKIRNHVSQLAALGYRVTLEPAA

SEQ ID NO: 165016 - protein, 342 aa, unidentified
MKQFVWVDVGKLSLYIYDAMTSTDVKIKNDFTEIKKFFNKYSGKKEVTVVLEPTWIYFQKLVKVLNDLTIDYFLIPLDVIHNLNKILGEANKNDTIDARKIANYWALIKEHEEKWSYKIRTVKKIPNEVMIIKTTYSQIFSLEKVLTRIKQLKHNTENNAFQKELWYIRDGYDYQIEMMENMIKKLYEEVEHMIEKLWYKAQMETLETCPWVGKKVALIMTVFFIELEHKWLRRWDGKQVRKYSWLSPQQMQSGEVLHKTKISKRGNKFVRYAIMFSAMNWKTHLDYEKRANTTIGKFWLRMKEKFENWNKKWGLSTNCAIASKLVTTLWVMFCDNRAYQRI

SEQ ID NO: 165017 - protein, 400 aa, unidentified
MRTVFGIDVSKASSEVAILVNGERVHSYTMPNDIIGFSHLLKDLKTVSNPEIIFEATGVYSRRLQAFLEENNYDYTRLNPLEAKKQLDSLRVRKTDKIDAEKLASSQFVLNRKPTYVQEEVYQNLHDLSRFYQNLTEDIVRTKNRLHKVLQVAFPEIENLLSTPTGEQYWNLVSIFPTKHWVLELSEVELKETIRNSTSKRISENRVGNLAEKLVGLAKQSYSAISKTSPIIEEVKYNAQELIRLTNRREQILEQLIELAKPLPEYEILLSIPGIAETTATSVIGELGDIRRFKSANQINAFIGIDLKHYESGDFLGQEHITKRGNPYARKIMYKCIHNIASASHTNPCHIADFYEKRKRQSQTTSTKPHTIASIHRLIRTMYYLIMHNKLYDYTLAKSH

SEQ ID NO: 165018 - protein, 388 aa, unidentified
MNAAAPFSAGKTAIRTQLGAIFVSLEMSRSTWLVTSLLPGGGEKMSKHSVRAGDVAGLLERFSSFTEKARARTGETFPIIVIQEAGLDGFWLHRVLMDEGIESWIVDPASIATSRRRRRAKTDKIDGEALVRALLAFKRGEPRVCAMLRVPTPEEEDRRRIGRERKTLIAERIEHVNRIKGLLFSQGIFDYEPIRRDRRTRLDELRTGDGRPLPHHLKAQVSRELDRLELLIEQIKAVEAARNALVTPGQPGHPISPQVAMLVGLRGIGQEFANVLYSEGLFRHFDNRRQVAAYSGLAPTPWQSGSIDREQGVSKAGNPRLRSAMVELAWLWTRHQPASALSKWFRERTKIDGRRKATIVALARKLLVALWKYVTAGVVIEGAVMKAA

SEQ ID NO: 165019 - protein, 477 aa, unidentified
MTPRKQKNGRVRSTPEPLRVANPHAAGIDVHAAVHWVAVPPDHAPPRKGADRGDADNLPPHVRKFGACTADLELLADWLQQCGITSVAMESTGVYWIPLFELLERRGFQVYLVDPRQTKHAPGRPKTDVLDCQWIQRLHSYGLLTASFRPEDQVIVLRAYLRQRQMLIRYAGQHVQHMQKALEQMNVKLPEVVSDITGVTGLAIIEAILAGERDPRKLAKLRHERCKKTEAQIARALHGNWREEHLFALKQALELYQDYRQLLRDCDAKLEAHLATFTDKSDGRKLPPKPRRCGRKHNEPGFGVRAALHRLSGHDLTVLEGIEESTALVILSEIGTDMSKWPTEKHFTSWPGLCPQHQGSAGKIKSRRVRRGSNLAARAFRMAAQGCYHAQNALGAFYRRIQARCGGIKAVFATARKIAERVYRLLKYGAEYVRQGVEAYESAYRERLVKGLTQRAKSLGFTLVALPEAPSATSATL

SEQ ID NO: 165020 - protein, 393 aa, unidentified
MIYVGIDAASKKHDCFIISDAQPKSGQLITIDNGNKGFEKLKSSILDWMEQTNDDNVRIGLESTGHYSHNILHYLVGNGFDTMLINPLLTNMERKASSVRKTKTDTIDAKSICTFLMRNQEFKPYTLGSYHSRSLKSLSRRRFSLVKQMTKYKQELHALVTIVFPEFLSVFSRLHINVSLEILHKYGTPANIAKARIDGLTNMIKKHSKGHHGKDTAILIKELAKTTIGDKDELYAFQIKLCVEMIRTLRNQIKTYEAQICKIIDAYCPIILSIPGISYVTGASIVGEIGDMSRFKSSDKLLAFAGLDPAVYQSGNYDANKLTVSKRGSSYLRWSFHTAASIIIHHDSTFGSYYAKKRKEGKHHLVALGHVSKKLVRVVFSILKYNRTFVPQN

SEQ ID NO: 165021 - protein, 423 aa, unidentified
MMKLKYSICCGLDVHKNVIVATIVTTNKDGISEYLQKSFSTINSDIQRFHNWLIENNCYHVCMESTGKYWIPIFNYLENDIDVCLTHPKYVKAIKGKKTDKKDSKWIADLYKFDLVRCSFIPPKDFRQLRELSRYRFKLVCMKSSEKNRIQNCMTISNVGIASVLSDPFGKTATEIISYLLEHTADSMDEKAVRKLIKKGAKSKSDEIIEAIKGYTIETDQAKKLELARGHLEYLDDMITQTEVELYVRIKPYYEFVEFVSTMPGMTELSSTIVLAETGVDMDIFDDAKHLCSWCGLSPANNESAGKKKSVRIAKAGDYLKPMMVQCALAAIKSKKQPYFAIKYGRIKKRRGHKKAIIAIARMMMVCIYHMVSEKKPFTPTDYEELMDPQNHVESVVLNENNVFAYLESLGYDSSKLVKHNDN

SEQ ID NO: 165022 - protein, 318 aa, unidentified
MTPDAPAAYVGIDVAKDSLDVHARPTGLAFRVANDEAGIATLLARLQGLRPAAIVLEATGGYEVPVVAALAAAGLTPAVVNPRQARRFAEGTGRLAKTDPLDAAVLAHFAEAVRPEPRPVPDAEARALGDLLARRRQLVQMRVGEQHRLPTASGAIRKGIQRHIDYLDRQLRGLEAELTAAVRASPAWRERDELLQSVPGVGPQVSRTLLAELPELGTASGRQLASLCGLAPFNRDSGRRSAPRSIHGGRAHVRAALYQAALVAMRFNAPLRGVYQGLLARGKAKKVALIAVARRLLVILNALVRKGTPWQEKLAIGT

SEQ ID NO: 165023 - protein, 350 aa, unidentified
MLIIGCDYHPSFQQIALVDTETGEMQERRLGHREEAEQFYRALATVGAKVRVGMEASGHAGWFERLLAELNFELWTGDAAKIAAKRVRKQKTDRRDAQHILTLMVKDDFPKIWVPSWENRDLRQLLWHRHRMVQTRTRIMNQLQAAALNEGLRYKKKLWRESGRQQLESLPMAPWASRRRRDLLEVLDRINPTIAELTREIEQQAEKCPEAQRLMTHPGVGALTAIAFVLIIGKADRFGCGKQIASYLGLVPEEDSSGERRRLGHISKQGNSLLRFLLVEAAQVTVRSDTRWRNRFFHLAQRRGRKIAKVAMARRLGIRLYWMWRRGWSYAQLESIGSHVGQLGNRHGVQ

SEQ ID NO: 165024 - protein, 406 aa, unidentified
MLFVGDDWAEDHHDVELMDSAGRRLAKARLPEGVAGIARLHALIGAQLGEDVDGPEVAVGIETDRGPWVAALVAAGYTVYAVNPLQAARYRERHSVSGAKSDAADAHILADMVRTDAHQLRPVAVDSPDAEGIKVVSRVHKTLIWERTRHTQRLRHTLREYFPAALEAFEDLDAADTLELLGKAPDPASAAKLTLGQIRGALKRARRRDIDAKAIRMLAVLRGEQLGRESVITTAYAAATRSAVAVLITLTEQVTVLQGQVEASFGRHPDAEIIVSQPGMGPILGARVLAEFGDAPGRYADAKARKNYAATSPITRASGKKKVVHARFVHNDRLVDALMSQAFSSLQASPGARAYYDKQRDRGVGHNPALRQLANRLVGILHGCLKTRTHYNEATAWSHQTEKAAA

SEQ ID NO: 165025 - protein, 363 aa, unidentified
MYDSTTTVTVGLDVHARSIRLAAVRAEELLEERTLPYDEEAVERALRRWPVVRCCYEAGPTGFGLHRFLVERGIDCQVVAPGLVPQRPGDKVKTDSRDARKLARLLAGGLLEPIHVPAPTLEAARDLVRAREDARLDRMRDRHRLSKFCLRHGRRLPGLSWGVVRRKWLSEQRFEFAAQQQTFDTYLHAVDLVDARIEQLERAIRETADEQPWSGLVARLRCLRGVETLTALALVAEIGDFGRFKRAEEFMAFVGLVPSERSSGEQRRRGSITKVGNAHVRRLLVESAWHARRRQSVGYRLARRQRGQDAVVIERAWRCQGRLHARWQRMAGRGKPQQKIVVACARELAGFVWAIANDQPLRS

SEQ ID NO: 165026 - protein, 419 aa, unidentified
MSFKVFRFNCCGLDVHKTWIYACIGITDSIGRTEYKQTRFSSFSKGLQELSDWLAKYHCSDVCMESTGKYWIPVFNILEKNNFFVTLSHPKYTKPRKGNKTDRKDAKWICDLYMCDMVRPSFIPPADIRHLRDLVRYRFKLTCMIVGEKNRAQNCLTVSNLKLDDVFSDVFGKSARSITEFMLTHPGELFDVTPFVDSRCKTPVEEIQAAVDGAISPEQAVKLRQCLSHIDELENHLKEIEREILRLSDKYQDALNLIRTVPGFDKNPMTAIQVLSEIGGDMSVFPTAKHLVSWARCCPRNDQSNNKIKSTRISRAGTYFKPILVQVANALLRSRKHPEITDRYKRIKARRGHKKAIIAICRMLLTAIWHILSDLKPYTPEGFLESRPVNGSKVLTTSQALNLLKQRGYTIKDDVIPAS

SEQ ID NO: 165027 - protein, 419 aa, unidentified
MVQEDDNSLVSVVHPICCGLDVHKETLAACLLITGADGRIQSEIKEFATFTDDLLRLREWLAVNDCPVMAMESTGVYWRPVHNVLEGQVTVILVNARHIKNVPGRKTDVADSQWLAGLLRLGLLKGSFLPPQEVRQWRELARLRKHYQESIADFKRQVHKLLESSNIKLAAVLSDIFGARGRLILERLAHQDGIPDLSDLERGAGRPLRHKTQELRRAVGGFFTAHHRFQLCLLLRSIRQLEGQLGEVLARLEEQLTSHQELRQRLQVVPGISQVASAGILAEVGPSLADFRSSDALSSWCGLCPGNNQSAGKRKSGRSPVRSHPLKTLMVQVAWAAVKKKGSYYKDKFHRLRYRLGPKKAIVAIAHRLLKAVYHIIKDGAAFRDLGEDYLQRRHHPGRLNHLKKQAQLLGYQLIPATA

SEQ ID NO: 165028 - protein, 337 aa, unidentified
MGEITTVGLDIAKRIFVAHGADAAGNEVLRKKLRREEVRAFFASLPPCLVGMEACATAHYWAREIAALGHDARLIPPIYVKAYVVRQKNDFVDAAAICEAVTRPSVRQTPVKTVEQQAARVTQRTHELLSRQRVTLINALRGHMAEFGILAPAGPQHVGRLIEKLADPKAPIPSAARDALNVLVDQLVALGREIDHMEAQMRRSCRSEENAARLLTIPGVGPITASAIIAGVPNIRGFRSGRDFAAWLGLVPRQNSSGGKDRLGGITKMGDRTIRRLLVTGALSVIRWGRREPGFSESWIGRLIARKPIKLAAVALANKMARIAWALLTRGEVYRTA

SEQ ID NO: 165029 - protein, 348 aa, unidentified
MRFYTQQHKHYCGIDLHARMMYLCILDGAGAVLLSRNIECTPKAFLATVKAFRDDLVVAVECMFSWYWLSDLCAREAIGFVLGHALYMRAIHGGKAKNDRIDAHKIALLLRGGMIPQAYVYPAEMRATRDLLRRRNHLMRKRSELITHIQNTVSQYNLAPFETRRIQKPSERTDVLAHFPDPQVRNSVALDLAVIEQYDALLPKLERHIRACAKQHDRKSFVLLRSIHGADLIIPLVILYEVQDIGRFPRVQEFLSYCRLVKPARESAGKIQGHAGGKIGNAHLKWAFSELATTFLRANPPAQQLHERLKKKHGKGKALSVLAAKLARAVYFMLKRGQVFDPHKFYQD

SEQ ID NO: 165030 - protein, 397 aa, unidentified
MDTSYAVFCGIEVGKGEHHAAGLTAAGKKIYDKALPNDETKLRAVFDGLAAHGPVLVIVDQPNTIGALPVTIARACGHDVAYLPGLSMRRIADLYPGQAKTDARDAFIIADTARTMPHTLRRVDTGDEALAELEVLVGFDDDLAGEATRISNRIRGLLTSIHPALERALGPRVTHPAVLEILSRCGGPAGIRQAGKRKLTTLAVKHAPRMGARLATEILTALETQSVTVPGSKAAEIVLPKLADSLKEVLLQRKTIGDDVERMLDDHPLSRVLTSMPGIGVRTAARILLEVGDGSAFKSAGHLAAYAGIAPVTHRSGSSIRGEHPARSGNRKLKRALFLSAFAALGDPTSRGYYDRKRAEGKKHNAALICLARRRCDVLYAMLKNKTLYQPPVTAAA

SEQ ID NO: 165031 - protein, 394 aa, unidentified
MVYLGIDIGKNTHVASMIGEDGKPVFRALSFSNTTEGGESLLAKLSSIAPAELVIGLEATGHYWLAVYSFLRDRGYKLHVINPIQTDGWRKGVEIRRRKTDAIDSVLIAELIRYGDFIEAQLSEEAVLSLKNLTRFRSYLVDSIGDLKRKVICVLDQVFPEYQNVFSNVFGKTSKEILLQFSSPADLEDVSADTLAELLAALSRKKLGVEAAEKLSAAASKSFGVTFCRDSFTFQLRMLIEQTKYIESQVKDTEAEIESIMTSLASPITTIPGVGKTTGAVILGEIGSIERFDNPAKLVAFAGIDATVLQSGEFEGTNNRMSKRGSPYLRRALYQASLIAATGRNPDPILRAFYLKKISEGKHHSTSIGAVSRKLCYIIYSVLKENRPFEVRNP

SEQ ID NO: 165032 - protein, 341 aa, unidentified
MSVIAPVFSFGLNGYTGFEARMTRRGREKIMQSVIGIDISKDTLDAYRLSDGRHLQVNNDKLGHNALIRWIEQTNISLIVFEATGAYHRQLEARLTAADLPFTKINPRQARRFAEVTGRLAKTDRVDAIMLAKMGAVLGLERQKPPNEDIIDLREFLTARRALMKDKVAQKTRLQTTTQNLLKQQISARLRQIEAQIAQIDAATSKKVMQNDALSQKLAILVSIPGIAEVTAISMIVEMPELGTLDGKKAASLAGLAPMSQQSGKWRGKEHIQGGRTFLRRAIYMPALVAVQRNVDLRAKYEQLIKAGKPPKLALTAIMRRLVVLANALIRDGRKWSETRT

SEQ ID NO: 165033 - protein, 459 aa, unidentified
MSAAPHPLADGVAFVRGAYVPIAEAAIPITDWGFLRSDATYDVVTVWEGAFFRLDAHLERFMRSCERFRLDPGLSPAQITEVLSECNGMDAPTRNGINVPKWKCHQPLEPRGASTMKITTVGIDLAKNVFQVHGIDERGQVVLKKQLRRDQMAAFFVNLPQCLVGMEACGGAHHWARKLQGMGHTVRLMAPQFVKPYVKTNKNDAADAEAICEAVARPNMRFVPVKNVEQQAVLALHRVRQGFVRARTAQANQIRGLLGEFGIIIPQGIGYIATRVPELIEDGANELPGAFRLLVQRLLDHLKELDRQVEELEAKIQAWHRGNEVSRKLAQVPGIGPITASALVASIGNAKNFDSGRQVAAWLGLVPRQHSSGGKANLLGMSKRGDTYLRTLLIHGARSVIYRVSQNADACSWISAVVNRRNKNVAAVALANKNARIVWALLAHDRHFDADYVRSESLA

SEQ ID NO: 165034 - protein, 331 aa, unidentified
MEIKEIIGIDVSKLTLDCCHHSSGSHKEFDNNLDTIASMVKWSLQVSGVSKKKLLFVFEHTGLYSDQLVQFLGGGDYLFNVVPGLEIKRSLGIARGKDDKADAKRIALYGYRVKDELKPFQIPSKTLEVLKRLMSVRKKLVTQRAGYIATLKEQARILSKQHNKVLFKVQGKMILTLDKQITIVEQEMNQLIEEDPELLNLYQLITSVKGIGGVTARFLIVYTVGFTTFESWRKFASYCGIAPFPFRSGTSIRGRTKVSHLANKEGKSLLSMCAVSAIQSNPEMKAYYNRRIDQGKNKMSTINIIRNKLLARAFAVVQRRTPYVNTMKFAC

SEQ ID NO: 165035 - protein, 338 aa, unidentified
MKLYAGVDLHSNNNYLGIIDQKDKRVHKKKLPNELPAVLEELEPYREELEGIVVESTFNWYWLVDGLMENGYKVHLANPCAIKQYDGLKHSDDTKESFHLAHLLKLGILPEGYIYPKEERPVRDLLRKRSLLVRQKTAHILSFQNLVSRTIGTKMDGDEVIKLCEEDVERIFGEKHLVLSGKANIAAIRFLLEKIKEIEKAVLKVARLKGEYKKLLTVPGIGKILALTIMYETGDTERFPGVGNYASYCRCVRSTRLSNGKQKGKGNRKNGNKYLSWAYVEAANFAVWAYPYIKKYYQKKMSKTNKIVAIKTIAHKLARASYYIMKDQEVFIPRKAFR

SEQ ID NO: 165036 - protein, 309 aa, unidentified
MTITTSESPATASEVILEIDTHLDVHVAVALDGLGRRLGELNVPTTVKGYQKLLHWAEGFGPVCCAGVEGTGSYGAGLARYLKAAGISVMEVERPKRRHLRRNGKSDPIDAEAAARAVLADDTAGEPKSGDGQAEMIRTLRSVRQSAVKARTQAANQLQALLVTAPENLRHRLRKLPTKNLVDTCARLRPGGAPSDVQTATKFALRSVAWRYQQLSEEIAQLDEQLDRLVADAAPELTALPGIGTDHAATLLSVAGDNPQRLKSEASFASLCGVSPIEASSGKVVRHRLNRGGDRDANRCLHLTSAWYA

SEQ ID NO: 165037 - protein, 345 aa, unidentified
MDKIIRIGMDTSKHVFQLHCVNAGEKPVLRKKMRRKEMIDFFTTCPPTLVAIEACGGSHHWARLLASFGHEVKMIAPQLAKPYVKRNKNDAADAEGLCEAMSRPTMRFVPLKTVDEQAALMLISVRTRLIANRTQLANAIRGYANEFVVSAAKGLAHIPLLLERIQTDGTVPELAQELFMSQAEEYAQLEKKIADVEAKVKAWQRNDERSKRLNTIPGIGPIGSALLIMKTPAPELFKSGRQFAAWVGLTPKDHSTGGKLRLGGITRAGDEALRAVLVAGATAVIHHARRSGKASRWLAELLKRKPPKLAAVALANKMARVAWKLMVSGDTYSAQSGPALTGGAA

SEQ ID NO: 165038 - protein, 412 aa, unidentified
MNIVYERCAGIDVHKRNVVVCAITPDQWGQRHKEQCTFSTMMPDLLRMRQWFQNLGVTHVAMESTGSFWKPIFNVLEGYMEVLVVNAQHLKAVPGRKTDLKDAEWIADLLQHGLLRPSFVPPAFQRELRELTRYRTSVIEERSRTINRLQKILEDTNIKLAAVATDLMGQSARQMLAALLAGETNPTVVAELARGKMRAKRDLLVQALQGQFKPHHRVLISEQLAHIDTLDEEIERLSAEIAQRLRPYEAQIKRLETIPGIKRRLAEVILAEVGPDMQRFPSARHLASWAGMCPGNRESAGKRLSGKTRKGSPWLRTALVEAAHAAPHWKDSYLAAQYHRLVLRRGGKKATIALGHTLLVIVYHVLAEEKDYQELGGNYFDDHDRQAVQKRLVHRLEKLGYEVTLAPSPPAA

SEQ ID NO: 165039 - protein, 341 aa, unidentified
MTLYIGVDIHARQQTLSFLDTEDGTTGQVELQHERDDVKGFYRQFQGEVIVGIEACGYTNWFEELIEQLGHKLLVGDAAEIRRLARRRQKNDRRDADLLLDLLVHNEFPALFRYSRESREMLRQLRYRHKLVKLRTMVANTLHALPINAGLSLRAKLLTKGGRQQLRTLQLSAISQQQRDELLSLADELTRRIQTVEQWLQTQARSDARVQRLQTHPGVGLLTSLCLVHTLGDLSRFSSTRKVAAYVGFDPMEDSSAERKAYGGISKAGSRLLRYLLVEAGQTAAKDDQHLKQFYRRLLPRRGKARAKVAVARKLLIRCFIMGRAEIDYAEFLRRGHKQAE

SEQ ID NO: 165040 - protein, 337 aa, unidentified
MKYCGIDLHGNNNWVVIIDEQDRVLYSRRHANDLPRLLAVLAAHRSELCGIVVESTFNWYWLVDGLQEAGYRVLLANTAAIKQYDGLKHRGDESDARQLAHLLRLGLLPEGHIMPKAARAVRDLARKRMQLVQQRTAQILSIESSLSRHSGWRLSSNRIKCLRQADLDEMRLGEMPMLGLKANVAVMQALQTQIDGLEKVLADYCRAEPGYRLLRTVTGIGEVLATVILLETGGIERFADAGNYASYCRCVGSAHLSNGKKKGQGNTKNGNRYLAWAFVEAANFAVRSCEAARRFYQRKKAARNNAVAIKAVAHKLARACYHMLKTQQPFCVERCFA

SEQ ID NO: 165041 - protein, 337 aa, unidentified
MKYIGMDIHKEFCVVAEMDKEGNLIRQGKIDTSKKAIQEYFSSIDEAKVAIESTGIWEWIYEIIDAIGLEVKLVNPVKARAIAEAKIKTDKVDSTILAHLLRSNLIPEVYVGNREMRELKRLVNERSFLKKQIVQIKNRIHSELLRRGIRTEINIFTKNGRKYLRELKINSIDRELNILESIEREIKSINEELMQYYEENEDAKILATISGIGYYTAVALSAMIGDINRFSSSEKLSSYFGLVPSTKQSGNKAYHGNITKEGPAEIRWLLIQCAWTHVNYCKNSFLTKFYERIARKKGKKKAIVATARKMTRVIYWMLKNKEPFHIEGYKPRRIHAK

SEQ ID NO: 165042 - protein, 511 aa, unidentified
MRYFGIDVHLEFCEIAVAEDGRVSQVGRIASTPEAIREFAAGLGSEDQVVLDASGSVMAIARILRESNVGRVVVSDAAQTRAISHARVKSDRFDAAMLARLLSSGMLSEVWVPDEATLALRRRVARRAALIRARTRIKNQVHGVVMRCLLGRPPVSDLFGKGRAWLLEQQLPEEEAETVQGCLRQIDFLNGEIAQLDQKIAEQALAWPGLGRLLTIPGVDIGTAAAVIAAVGDISRFSSAGQLVAYLGLDPKVRQSGSEAARYGHISKRGNAQARSMLVEAAWIAIRSPGPLRAFGERVRARRGAQVAAVAVARKLVVLCWQLLSKDEDYAFARPSLTRQKTRRLELTAGASRRPRRHDGPTVTPTAAQRAAERELQHQAELAYRRLVADWRAAAPKGGAGATPGRASSNRPSKGKAARQAQAPDACASLRQSPAPPQNHPTTKRSTRPHRSTRPPAPQRAPRHDKKLVQTRCTALRALCDRCALGTHPRASSSSLRNPEEKLAKPLTFHP

SEQ ID NO: 165043 - protein, 399 aa, unidentified
MLAVGIDISKSKSVAAILNQDGSMHTSPFEFHHTQPELDAFIKYILNSNQSATILMENTGHYHYPVLKAFREAGLPVCMVNAYQIKKFGDMDLRKAKTDKKDAVRIARYALEKSYSLVPYTSMEQKYEDLKFLARQYNQRMLTLKTNKVFLLNLLDETMPGITNILPLTTRTPETSLSVLFINRFKSYDRIKKMGKSRFLDAFEKIARKSRNRQTKTYGLAIYEAALRNITTRGENEYTLAAQDQCLELVCESQKAADSIILKMQTLAETLPEYAVLRSMAGVGDRLGPLILAEIGDIRRFHSGKALNAYAGNDAPPYQSGTFESHNRHISKRGNAALRKYCFEVMQALKLTQPQDDPVYLFLLKKEQEGKPYNVAKMAGVNKFLRIYYARAMETLKQQ

SEQ ID NO: 165044 - protein, 404 aa, unidentified
MKQFTAKLVEVKNSSALNTVLDHRNLDDYCAYIGLDVHKETIAIAVATRGRGKVSYRNEIPNRPKSIKKMVEKLSNEFHSELLLFSYEAGPCGYDVYHQLIALGQDCEVVAPSLIPQKAGDRVKTDRRDAMGLARLSRSGELTAVWVPEPEQEAMRDLTRSREDSKAIELKTKQQLGAFLLRHGKIYETGKSRWTKGHFNWLETIKFESSIQQIVFQEYINAVKDAVQRVAGIVNEMHKALQTWSLRPVVEGLIALRGVDIITAMTIMAELGDISRFDKPRQLMAFLGLVPSEYSSGGKRRLGGITKTGNGHVRRVLVESSWSYRFPARKTSHLRRKESKTSQRVQSIAWAAQKRLCGRYQHLLESGKIKQQACTAVARELTGFIWAIVCELMNKPHASRCIAM

SEQ ID NO: 165045 - protein, 410 aa, unidentified
MDVLHPDCAGLDVHKKVVVACVLHVEAGGSMRKEIRSFGTFQPQLERLRDWLLEEGCTLAAMEATGVYWKPVYNVLEEHLACIVVNAEHIKAVPGRKTDVKDSEWIAQLAQHGLVRASFIPERPQRELREMTRLRTALVQDRVRAVNRLQKTLEAANIKLAAVLSDVTGVSGQRLLEALLAGVEEPEELVGLTHGSLKAKHEALKLALIGRLSERLRFVVGQELQQIHNLDEQIEACDAAVAEETRPFEQQIQRLDEIPGIARRNAENILSEIGTDLSRWPTAAHFASWSGTCPSNKASGGKRKRASVRKGNPWLKGYVTETAWAISHTKKSYLGERYRSLAVRKGRKRALVAVAHEVLTIIYYMLTRDTHYQDLGVRYLEERNRRELQRQALRQLRRLGYEVQLQPAAA

SEQ ID NO: 165046 - protein, 346 aa, unidentified
MKIVGCDFHPGWQQVAIFDSDTGEIEQRKLINGDGEAERFYRALPAPALVGVEACGNSQWFLDLLERLGHQVWVGDAARIRASYVRKQKTDKRDAEHILTLLLEGRFPRLWMADAEQRNGRQLLIHRHKLVEIRARVKNGLQHLCLNRGMQQQHKLWTKDGRQRLQDLPLQGWAGVRRADLLALLGQLDGQIARLDEAVERAAYADPEARLLMSQPGVGPVTALAFVLTVGDVGRFQHSKQVASYLGLIPSEHSSGGKRRLGAITKQGNSFVRMLLVEAAQSATRHDPQFKREYLRRCHSKAKGVAKVAAARKLAVRLYWMLRTRKPYPEIAHIESSPRVPLVGVS

SEQ ID NO: 165047 - protein, 332 aa, unidentified
MFIGIDVHKRYSQIAVLDQNGEIVEEVRVENANLDDFAQQYAGSKAALEATSNYYHIHDTLSEYLDVTVANPGELKLISDSDKKTDRVDAKQLARMVRLGSIPESYVPTDEVRQARALVRGRQKLVENRTEYANKIHGLLSDHGITREVKPLSVKGREFLAELSLPAPWDALLESYLELIQVLTEQIESLEAEIEERAGSLKETQLLMTIPGVSYFTALTIYAELGEINRFDRAKEVVSYVGLNPIIRESGDSRFEGSISKRGSGRVRWLLVQASYSAVHTCEDEYLSRFYNRLARKKNSKTAIVATARKLLVSMYHMLDREEVYDPPGVST

SEQ ID NO: 165048 - protein, 388 aa, unidentified
MQAIIERCCGLDVHQETVVACLLVGAPGAQPTKEVRTFRTVTRDLEALRDWLREAGVTHVGMESTGVYWRPVYAVLEGHFELIVGNARHMRNVPGRKTDVKDSEWIADLVRHGLIAKSFVPPRPLRDLRELLRYRRKLVESQAAERNRLLRLLETANIKLASVASDVFGVSGRAMLRALIEGEASPEAMADLARGQLRRKRTDLILALDGRVEEHHRFLLAVQLRRLEAIEADIAALDLRIGERLEPYSAPHALLMQIPGVDWVVAAVLIAEIGVDMSVFLSIYHLSAWAGVCPGSYESAGRQKSGRARKGNIHLRAILVGAAMSAARTKGSYLKDKFHRLKARRGALRAALAIADRAYVLETGRITLSGTAAEIKADRRVQDAYLGL

SEQ ID NO: 165049 - protein, 401 aa, unidentified
MKYVLVLDVAKGKSMFMLSSNNGEVLLEPTEYIHNKSYFESLDSFINKLNIRDNLTIVMEATSIYHKAPERFFKENNYHVIVFNPLIGKEITNTIRKTKTDKQDCIKLTNLFWKGSIPDRNYTEDEIYTKLNELSRQYYHLDEGLNRHKNRYKELLHLCFPEFELCFKDGKTYDLTALNFIKEFPHAYIIKDKRVDALAYNMANTNNRHLNYYKRKANIIKEYAFTSYPGVNKNSKDVDNLKQLANIIINLTEQKDEVKNQMIELAKETKNFECINSLFGIGELSASLIIAELKDITRFNNIKQINASCGLDPTIVQSGKSINYHGPISKRGNRYARKILFNCSRNIITLSAKCDKENSIYVYYQKKKQEGKHFYACLTACSTKLIRIIYALCMNNSTKQD

SEQ ID NO: 165050 - protein, 435 aa, unidentified
MIVTSKIAKIDTTNKMTVAFDVSSGKMGYYSEITGKIAGNSCKEVVEVQDEIRNTTGAIRKTILELADLAAQRGYSGLHIVCEPTGSYSDALMRLARKTGHTTAYVSGESVHKAKVIENNDASKSDIKDPRVIFMLSKMGKELTYRTLPPLYKKLRELNRMYDEADKYRVEARCKIHHLIVRLFCDYPMKKDFIYSNSGHALLRHFGSNPYRIATFTYTDFRSIMVKEAPGIREKTLQSIYQNACSSSLHLVSEEEHLAIEQRLVYAWEDYIRADGRKEILRKQIEECYGPLWEQGEPLPQADAIFTPFQICRFAGETGPLSDFPHWRVLFKYAGVNLRVRESGRFKGQIKFSKKGRNDLRAVAGKCVFGLVRKKQLFGPYYHGRKQSNPGIPGTKVMANVERKLLRLFFALGIRRACFSMERFTRCESKYRMAA

SEQ ID NO: 165051 - protein, 364 aa, unidentified
MHEAKDIVLVVDYHSKNIEFRWFNEATGEERSGKYATGRAGILRHVGQAARELGPGGRVVWIMESTTGWARVKDLLGARARFVLANVLQMPLPPKARRRKTDRIDTGRLLREYLQGSLPTSFQPSAWWRQVRRVVDCRQDLVERQTAIKNWIGSLLHHETWEDRAHLWSGKGRRRLAGMKLPAGDGMLVELKLRQLDELVRQQRQVEDRMQQIYDGWPEAQWVDEVRGIGMVTAVSLLSHIGPIERFARAEDLISYAGLAPGMWQSDDTCHHGRIGGGGTDGHLRYLLIEATRWLCQIPRYRPAYERMRQKRGKKIARIVLARMLLRSIHKMLRDRVRFNPMARRAGRAMATPAGQTATAGCSR

SEQ ID NO: 165052 - protein, 374 aa, unidentified
MTIVEDRPVITGGVDTHADLHVAAALDPLGGLLGVQEFPATATGYAQLLGWLGGFGGIALVGVEGTGSYGAGLARHLAAAGVRVVEVDRADRQDRHRQGKSDPLDAVSAARAAQSGRASGAPKGRDGAVEAIRALMVAKRSARAGRTQAINQARALIVTGPDELRARFAGHRPAQLVEAIAALRPRPGDVPGYATRVALRELGRRAQFLDAQLDRLDEVIGPLVTARAPGLLRLHGVGPDTAALLLIAAGDHPERLRSESSWAHLCGVAPIPASSGKVSRNRLNRGGDRQANHALWRIVITRLGSRPGHPATRAYVTRRTKEGLPEKEIIRCLKRYVAREVCRQLRFRFSGALSSREHLPGKDSNSPAHAHRRC

SEQ ID NO: 165053 - protein, 427 aa, unidentified
MPYRIAGIDVHKKMLAVAVADVEVEGDVHFERLKVGTSPVQLRALAEWFVEREVEEVVMESTAQYWRPVWEALERYWRPKRRTRPDANAVAGTLHLAQAQSNRGAGGRKRDFPDAERLVKRLVAQELTLSFVPNAEQRLWRTVMRRKYQITRSRVQLHNRLEALLEEAHIKISSVVSDLLGTSARRMLQAVGDGETDPAALAALADQRLRATPEQLRDAFGACGDLHPVYRRLVKLTLDELRTIEDHLTQLDQQMAQLLAHHHDAVQRLAEVPGLGVDSAQQIIAEVGASATAFPSAKQLASWMGACPGNEESAGVNYSHRCPKGNRQMRRVLNQAANAAVKAKGTIFAIVYRRLVPRLGHAQAIGAIAHRLCRLIWKILHEGIRYEERGPAVSVEAKKVRTRKMIRELRTLGYRVELIPAPSSSPA

SEQ ID NO: 165054 - protein, 360 aa, unidentified
MEEREHERRHHVVGGVDTHKDLHVAAVVDEYDRVLGSECFASTRQGYKQMLAWMRSFGDVVRIGIECTGTYGAGLLRYMQQAGVVVLEVTTPDRTDRRKRGKDDTFDAENAAHAAFAGIRTVTPKSRDGMIEALRVLKVCRKTAISARRTALQLIQTTIIAAPDDLREMLRSMTRMQLIRTLAAWRPDLSDYRNLTSAYRIALKSLGRRYLELHDEVADLDTMIAALVDELAPDLVALNAVGYESASQLLLTAGDNVDRLHSEPGFAALCGVNPVPASSGKVSRHRLNRGGDRAANSALHIIALGRLRTDPRTKAYVARRLTEGHSKLEAIRCLKRYIAREVYHVIRRRNREVGQRQLAA

SEQ ID NO: 165055 - protein, 339 aa, unidentified
MSEISTVGLDIAKTVFQVHGVDAGGVVVVRRVLRRSQLVAWFGKLRPCLVGMEACGTAHYWARELRKVGHEVRLIPPAYAKAYVRRNKNDAADAAAICEAVSRPSMRFVAAKTERQQAAAGIHKVRDLLMKQRTMLSNQLHGLMAEFGIVAAKGRRGLSELLAVLADPEDQRLPSPLREGLAMVAETLRGLERKLEAIDRQIVVAGREDATYRHLITAPGYGPILSSAMSAMVTDPGAFRRSSDFAASLGLVPRQDGTGGKVRLGPISKRGNGYLRRLLVNGATSLINSKRAKQDPWLARLLATKPRKVAAVALANKLARIGWALMTRQEDFRTLPAAA

SEQ ID NO: 165056 - protein, 405 aa, unidentified
MAATDVVWVGIDAGKTSHHAAAIDATGKRLWSVKVGNGERQIEELIDRAAKTSGEVRWAVDLVSPPAALLLALLLTRGEKVVYVPGRVVHGMAGVFRGEGKTDAKDARIIADTARMRSDLTELTATDELVVELTRLTSYRADVMADWVRGVNRLRALLTSVFPALEAAFDYSTRSALILLTGFCTPAEIRRAGPGGVADYLREQGAWAKGIDKMADTAVQAAQEQTVALPGETTTALLVKRLARQLLDVDREIKDTDRLLTSRFRDHPQAHIIESLPGMGPILGAQFLVATDGRPLEAFASSGRLASYAGLVPVPRDSGRVTGNNHRPKRYHRPLRNVFYMMALSSLRTNGPSKVFYQRKRDENKIHTQALLALARRMVDVLWALLRDNRTFSPIPPSQVSAIAA

SEQ ID NO: 165057 - protein, 358 aa, unidentified
MNKLTKIDKFFNNVDFTADDQLFVGIDVHKRTYNVALYLNDAPALDFVMPAAKEKLSQKLKKTSSALKQVAYETGPTGYGLARHLHQDSLPVTVAATSRIPRSSGDDKTDKLDSRKLAEYAAKGLLKPVAVPTVKQEADRQLYRMRHRQARNRSKVKTQIKSFLLMHGIDEPAGLKSWSRNSVDQLRTLSLRKTLRLSLDELLEDLDYYSLRVKTLDRSLKEHLDKGLLARHISILKTHPGIGVVVSCQFAVELFHYRDFGSTRELSKYLGLSPRIHQSGDRSVCGGINKVSNSRIRSNLVQAAWQWIRVDIEAKKTYLRLLNNCGGIKQKAIIAMARKLSGHLWTMLVNDEPYDPNK

SEQ ID NO: 165058 - protein, 343 aa, unidentified
MKTTTVGIDLAKNVFQVCALNRAGKMVSNRSVKRASLTETVAQLHPARIAMESCAGAHHWGRTFQKLGHDVILVPPQHVKPFVRGGKSDPRDALAICEAAKRPGLHPVPIKSLTRQDLQSLHRVRQQHVEHSTGIANQIRGIAHEYGVCFLIGLKRLCRELPYALEDAENGLTTTARELLAQRLADLLAVREEIKRTSQRIVLLAEELPAWPRLLDLPGFGVMVTSSYLSSIGDGRQFKCGRQVSAWLGLVPRQHGTGGKVRLYGMTKSGDRYLRTMMLHGARAAIRWNRGKETPLGHWIDPIIERRGFNKAVVALANKNARIAWHIVANGAHYDPGKAFGSA

SEQ ID NO: 165059 - protein, 325 aa, unidentified
MNHVSQPVLGLDVSKATFDVARIRHSQIHHKQFVNRPTGFRALRAWLSKQPSSPLHACMEATGKYGQALAEFLDAQSSKVSVVNPLRIKAFARSELSRTKTDKQDAAVIARFCVAMRPPAGHPAPPEIRQLKADTRRLDALTARAQQEHNRLEGETGFVADDIRQHGKELQARIPRLKKVIAEHLQPHPMLCQQKALLLSMPGIGERTAAQLLTICGSIHQFSHAKQLAAFCGLSPRTHQSGSSVKGRGPLSKMGHASLRKALFFPALVAMKYNPQLKARRERLLAAGKPKMVVVGAVMRKLLHQIYGVWKSGVPFRPEIAARPA

SEQ ID NO: 165060 - protein, 372 aa, unidentified
MKVVYPICCGVDVHKSFLVGTIISTTDGVQPHYQKKRFSTYNGDIRAFKDWLLSNNCLDVCMESTGKYWIPVFNILEEYGVRVTIANPKWVKAVKGNKDDVKDSKWIGDLFRLGLVPGSFIPPKHIRLLREFTRYRSKLVSMKSSEKNRFQNAFTVCNVALDSVVSDMFGVSAAAITDYLMSDEEFRPEYCVSLLKRSLKKKSDLVLESIEGYSIAPEQKFRMRVIREHLRYIESAISSVDNMINSMVAQHDGAVTLMCTIPGIDRSSAITIISEIGTDMAQFDSSKRLCCWAGLTPGNNESAGKKKSVRITRAGVYLKPALVQVAHAAVLSNDSPYYRIKYEDFKTPRKETRHHRHCQNDSYRYLCHVVNG

SEQ ID NO: 165061 - protein, 404 aa, unidentified
MKVNVGVDLHKTQFTVCVKGLGGNKFEKYPTTEEGYEAFLNRAAIWQESGMEVKAAVESTGNTRYFKNRLEKAGIAVEAINTMKFKVVNESVKKTDRHDAETIAEFLEKDMLPHSHLCSQESEQMRRLLKARTTLVRAQVVMKNQIHALLTAEGFEDAKGSLQSKRGRKLTLDALKQCKNGLAAQTLMEIIDQLEGNVNLIEEELRDLTKGDKAVELLTSIPGCGEVCAWTIRAYTDDIKRFASAKKYASYAGLAPWVQNSNETVHHGKITKRGPEQLRTAVVQVVMGMRRMKEKTLRWRLMERHEMMKRNKGSGKTIIATARKVAVIIWHMLTEEANFEVEKMTARKLAKTSESMKRSVRTDEEIPAKEGTKNIEKTKPAVNRIEKKVIKKAGVARKKIEKAG

SEQ ID NO: 165062 - protein, 321 aa, unidentified
MFHSSQGGDAVFVGVDISKARFDVAVRPTGELFAQPNSPAGITEMVQHLQGLGPTLVVVEATGGLEELLVIALAECGLPVVVVNARQVRDFARATGRLAKTDKLDAMVLALFAEAVRPQLRPLPDAAQRALGALVARRAQLVEMTVAERNRLHASHDPAVRGDIQSHLAFLEGRLSQMDRELLEAIVANSALKTRFDLMVSAPGVGKVLAFTLLSDLPELGRLNRRQIAALVGVAPLNRDSGQLRGHRGIWGGRASVRRALYMAAVAALRWNPVVSRLYRRLVAAGKPAKVALVACMRKLLVILNAMLRSGTSWMPRAAVA

SEQ ID NO: 165063 - protein, 339 aa, unidentified
MPVYNPVLGPDPTNMMEVGMDGKRVIGVDIGKLWLDVAREDVAEVGRCRNEVAAIAALVETFDAARDVVVFERCGGYERQLEAALAAAGVPWAVVHSAGVKAFRQVQGIKAKTDTIDARLLRGFGRDRLNAGKLRLGRAEDVVLDALMARHRQLKSALHAEQCRIETAAIASVRASIERMIAQLEAELAAVAAELASHESNDPRLAFKETVLCRRKGVAQATARALLAELPELGRLDRKQITALGGLAPRVHQSGRTQLRRGLAPGRTSIKVILFNPARTAMRCDPEIRAFCNRLRARGKPGKVIMVAVMRKLLVRLNAAVRDALRQEEIASPATLVAA

SEQ ID NO: 165064 - protein, 349 aa, unidentified
MAIVAEQFEHVVGIDTHARTHTYCLITCASGAVVDTATFPTTKAGNARASSWITRRSGNVLAAVEGTSSYGTTIANALAEAGIDVAEVRPASRKTHAHHGKSDAIDAETAARSVLGRDYVTLARPRAAGQRAALRALLASRSLIDQQRTANRNALTALLRTADVGVDARKPVTDEQIRMIADWRTGRGTAPGNGRTILRREARRLALAILEQTDLLKQNHRELQHLAEEFAPGLQNLPGVGPVTAAIIVCAYSHHGRIRSEAAFAALGGIAPIPASSGNTSRHRLSRSGDRQLNRAFDVVARTRMSYDPATREYVERRRSEGRTTREIRRCLKRYVCRAIFRELQTIMA

SEQ ID NO: 165065 - protein, 347 aa, unidentified
MKFYTKTHQYYCGIDLHTKTQYLCVLDQTGEILLHKNFPTKPKTFINAVKPFREDLIVGVECMFSWYWLADLCAREKIAFILGHALYMKAIHGGKAKSDKIDSEKIARLIKGGTFPLAYTYPPELRPTRDLLRRRRMLVRHRSEVLAHIKLTHYQYNAQFFEKNINKKGNRQHVAELFDDPAIIKNINVDLSVADHLHDEIKFLENYIVRHVKKFDPRTYYRLQTVPGIGKILALTMLYEIGRIERFDTVQSFCPYCRLVKCSKESAGKLYGYGGQKIGNAHLKWAFSEATALFMRESQQAKNYVARLSNKHGKGKAMSILAHKLGRAVYCVIKRKDAFDVNYFFSN

SEQ ID NO: 165066 - protein, 399 aa, unidentified
MNDGYGVYLGLDVGKGDHHAVGLAPDGKRLHDAALPNTEARLRQLFDKLARHGRVLVVVDQPASIGALPVAVARACGHQVAYLPGLAMRRIADLHPGTAKTDARDAYVIADAARTLPHTLRRVDVNDEALAELEVLVGFDDDLAGEATRISNRIRGLLTQIHPALERILGPRAHHKAVLELLSRCGGPVGLRKAGRRKLLSIAAVHAPRMGERLVEQIMTALDEQTVTVPGTQAAETILPRLAGSLRDVLRQRDQVAKEVEGMLDTHPLASVLTSMPGIGVRTAARILLEVGDGTTFATPGHLAAYAGLAPVTRRSGSSIRGEHPPRGGNKNLKRAFFLAAFAALTDPVSRAYYDRKRAEGKRHNAALICLARRRCDVLYAMLRDKIPYQPRPVASIAT

SEQ ID NO: 165067 - protein, 370 aa, unidentified
MDENIKFFVGLDVHKDTIAVAVAEAGREPARLVGSIAHDVVKLRKLLTRYGEPARVLVVYEAGPTGYGLQRELARRGYQCQVIAPSLIPKRAGDRIKTDGRDGLRLAELSRAGELRAVWIPDPADEAIRDLARAREDVVNARTQARQQLKGFLLRHDVRYAGKTSWSKTYYRWLATLNFGLSGAQTAFTEYWQAVTAADERVARLTGALANSIQGWRFEAVVNALQALRGVDVVSAIGLVAEIGDIRRFAHPRQLMAYLGLVPSEHSSGERVTRGSITKTGNTHARRLLVEAAWNYRFQPRIGRRAQQRAEDLPQAIRDMAWKAQLRLSRRFARLRARGKEINKVCVAVARELAGFVWAIASTQAKLAQS

SEQ ID NO: 165068 - protein, 345 aa, unidentified
MSNPTIIAIDLAKDVLQVCKVTSKNKISYNKTVSRKALKELLSREKDCLVAMEACASSQYWSRFALKLGLSVKAMHARHVKPFRTTQKTDRNDALAIAVAATQLTIKPTRILTIDEQGLQSLERIRDLQKSQCIAISNQIRSLLGEFGITIAKGDKALREAMPYIFEDAENELPHSLRAVLFSQWENYRHQVEHLDSITEHLEVEVQKNHQCQKFMKLEGVGPLGAVGLVIALGDGKAFSNGRAASACIGVTPVQHSSGGKENIGSIAKKSSGQRLRSVLFNGAMSVVSFLSKRAARTVKEQWLKALIERRGKKVAAVALINKNIRTAYAILINGTQYKPQLLEA

SEQ ID NO: 165069 - protein, 372 aa, unidentified
MEEISALYIGLDVSKLKISVALADDGRNGEVRFFGDIDARPATIAAVAAKLAKRGSRLHFCYEAGPTGYDLYRQIVALGHDCVVVAPSLIPQRPGDRVKTNRRDALSLAKLHRAGELTPVWVPDAGHEAVRDLVRARECAMESLRRARQQLLSFLLRHGRVYTGRTPWSKAHSSWLCRQTFEHPAHQIVPAEYRHAIEEAEVRLKRLTEQVTETAASWSMAPVVKAYQAMRGVAFMIAVTFVAEIGDVRRFDNPRQLMAYLGLVPSESSTGERVRRSEITKAGNSRVRRVLIEGAWTYRFPARISRRIEERQDDLPKAVREIAWKGQVRLCGRYRKLIAAGKLKAVTVTAIAREMAAFLWAIGQEVVPVLQA

SEQ ID NO: 165070 - protein, 415 aa, unidentified
MDKIYDICCGIDVHKKLIVACLNHKRKKELREFGATTRELMELAEWLQKNNCEIVAMESTGSYWKPLYNIMESYGLHVIVVNPAHMKAVPGRKTDVKDAEWIADLLQHGLLQASYIPDKAQRELRELVGYRKSLVADRTRELNRLQKMLEGANIKLSGTVAEINGMSARIILNELLDGKTIDKTRLEEMKKQKIIAHNLRASFDQIADDLNGVMSPLQNKMMRELLKHIDELNVHIKNLDEDIDNHMNDEEKKATSAITEIGGIAGASAKAIISVIGTDMSRFPTDAHISSWAGLCPGNNESAKKRYSGKTNKGNRLLRTTLIVCAHAAAKMKNTYFSAQFHRISAHRGKKQAYVAVAHSMLIAIYHILKDGVKYQDLGADYYNQFNKERKINAYLKKLKELGWTEQNAMIVQPA

SEQ ID NO: 165071 - protein, 466 aa, unidentified
MKDNRRRAPDKRRVSPTVLERIQPDVAGIDCGSAEHYVAVPADRDPQPVQSFQTFTADLQRLAEWLTACRVKSVAMEATGVYWIPIYEILEARGVDVLLVNARHLKNVPGRKSDVSDCEWIRELHSVGLLRGSFRPTAAIVTLRAYLRHRQTLIESAGTYVHRMQKALVLMNLQLPLVVSDITGVTGLRILRDIVAGQRDPAHLAQHRDRRCRASKAELVAALTGHYRPEHLFVLQQNLELFDTCQTQLTACDRAIAAHIQTLTAQVAPPPTALPDPRVTTKPRDNEPRFDIRTPLHHLTGGRDLTQLDGIGPYNALKLITEIGTDMSRWPSAKHFTSWLTLAPKNKISGGRVLSARTQPSANRAAAILRMAAMSLTRTQTTLGAFYRRLAARLGKPQAITATARKLAVLVYRTLKGDLVYRDAGADVYDRQQRARTLRHLRQRAATLGYELVDRATGEVLSPALS

SEQ ID NO: 165072 - protein, 349 aa, unidentified
MLYLGIDQHKRFSQVAVMDESGRVVQQRRLEHGDREWMREFFRAYRGSRAVLEATRNWDWLWEMLEEERLEPVLSHPYKTRLIAEARIKTDKVDAKTLAQLLRTGFLPVSHVLPREQRDDREVHRLRIRLVRMQTRLKNQVHVILDRQGIGHPHADLFGKAGREFLASLRLGHPYDMEIEVLLGLLDEVGKRVKQVTGAIRKGLRQDDRAELLLSVPGIGEILGYLILHEVGDMGRFSSAKRFASYCALVPVTRQSADKTWQGRTSRQGNLYLKWAFVEAAHTARKKDPGLAHLYDRLCRKRGPQKAIVAVAHKLAISVYHVLTDKEMYRSSYARRQGSGKPGACLGRR

SEQ ID NO: 165073 - protein, 331 aa, unidentified
MKFTEVIGIDVSRDTLDVCFHSLNTFEKVDNTTKGFRTLIAWIKKQTKSSMGQILFCFEHTGLYSSMLARYLAEKQLNFAIVPGLEIKRSLGIQRGKNDKVDAEKIALYAYRRRDEIETYKIPESSLIKLKQLLSLREKLVRQRSGYQATLKEQSRFLKKSENKLLFSIPTKLIKELEKQENQIENEIDIILDDNLKLNNMYKLIISIKGVGRQTALHLIVITNGFLLFDNPRKLASYAGIAPFPYSSGTSIKGRTKVSNLANKKIKSLLSSCATSAIQHDPELKLYYNRKLKQGKNKMTVNNAVRNKLVHRIFAVVKRGTPYVSTYNYAA

SEQ ID NO: 165074 - protein, 376 aa, unidentified
MKKIVMCGADVHDNSITTRIAVNKEEPETRVFRYTTNGRRNLLKYLKMVGRKHGADRIVVAYEASSLGFGLCDECTDAGIECYVLAPTKMPKSEEDRKRKNDKWDAQKILEQLRAHLLAGNELAKVWIPDLETRDDREVVRMRLAVADKLTSAKTQVRTLLKRNGMEKPKDVGKAWTVSDRHWVKRLTEPESELAKGACVGLASLLRQIAFLEEEIEKLDNAVNALADTERYKAAAEALVEQLKGVGLLTAMVFLTELGDLRRFKTRKKVGAFIGLVPSSNETGEHNDRKGHITRQGPARVRKVLCQASWARIGSDEDESKVHARIVKKNPKKKKIATVACMRRLSVRMWHIGMHAQIEAGVYETRELPCSKRIAV

SEQ ID NO: 165075 - protein, 347 aa, unidentified
MRFYTQQHQYYCGIDLHARSIYLCILNQAGEVLLHRNMRANPDAFLKAVGPYREDLVVAVECMFTWYWLADLCRRESIHFVLGHALYMKAIHGGKAKNDRIDALKIATLLRGGMIPQAYVYPPEMRATRDLLRRRLHFRRKRAELLTHIQNTNSQYNLPEFKKQLTYASNRSGVVERFADPSVHKTIEVDLGLLAYYDQMLGELEHFILRTAKDHDHNTLYRLRTVPGIGKILSLVMLYEIHDINRFERPQELASYARLVKCAKESAGKITGSSGRKIGNVHLKWAFSEAAVGFLRKNEEGKKYYARLERKHGKGKALTVLAHKLARAVYYIWKKDNVFDQEKFLTA

SEQ ID NO: 165076 - protein, 377 aa, unidentified
MKEITTYVGVDAHKKDLFIAMLIGNERTPVAWTVPNEPNAVRRLVRKLEREAPGPVRMCYEAGPCGYALQRQVATARVSCQVIAPSLVPRKPGERIKTNRRDAKKLAELFRAGLLTEVRPPTPEEEAVRDLCRARDDAREDLQRSRHRLGKLLLRRGLHYSAGRNWTRGHRRWIASLQWAHPSERVVVDDYLLAIDHLEARLIELDARLVEIADTEPYRERVGWLRCFRGIDTLTAILMLAELHDFQRFPSAPALMAYVGLVPGEDSSGEKQRRGRITRMGNALVRRLLVETAWHYQHRPGTGVALRRRRKGQPSRVIAIADKAQQRLCRRFRRLAEHHKPAPKIAVAIARELAGFLWAALQPAPTSVREPHGQVNR

SEQ ID NO: 165077 - protein, 418 aa, unidentified
MKSIKAEKIKTINEKTLVVALDIGKKIHYGYFRTPKNQDMKPFPFYNSGQSFNKFWEKLCRFKEKHMLDEVVIGFESTGPYAEPIANYLRKKPVKLVQVNPMHTKRVKELTGNSPNKTDRKDPRVIADVISLGHSLTVVVPEGAAAQLRRLTHARERAMERRTAMNNQIQDLIFVIFPELGDIIKPSTKTGMYLIKNYPGPERIVSIGIETLCNIVRKISRGKFGIDRVEKLYNAAKESVGITEGKESILLETSHLVSNIETENRYIKSLEEQMIVYLDQIPYSHSILSIKGIGNITVAGLIGEVGDFNKFKTISEVMKLAGLDLFEVSSGKHKGRHHISKRGRALMRKLLFFAAINAVKSHGIMHARYHKMLNNGTPKIKALIAVSRKLLRIIFALARDNAQYEANYNRKHDFKLAA

SEQ ID NO: 165078 - protein, 370 aa, unidentified
MLDTTTFIGLDVHARSIKAVSLDVMTGEVRAATFGYDAGAVAEWVRSVDPGARCVYESGVTGFDLQKRLSGLGVDCVVGAVSKMIKPSADRRRKNDRNDAEFLARMLSVGNVVEVWVPDDECEAARDLTRALEDARDDLSRSKQRLSKFLLRHGLVFDERTPTGRRKGNWTRAHWSWIESIRFAEGADNDVLAYYVDAVRRAAEEKARLEGLVEAEARKPRWRRRVDSLRCLKGVDTASAADLVFEAGEFSRFGNARSFAAWVGLTPSEHSSGESDRRGAITKAGNKHLRKTLVEAAWHYLTCSGRPKDLAKGQAPDRGARRHAAKGVRRLVERREALLARGVHGNKANVATARELACWVWAVGLMAEEA

SEQ ID NO: 165079 - protein, 395 aa, unidentified
MTESISVSKRLEGNRDDDSAREFRTLIGEHRGPWYVGIDLGDKTSRVCVFDATSASPVTEGVIATRAADLAEWFSELGRLRIALEVGTHSPWISELLESFGHEVVIANPRKMESIHKNKRKNDRVDAKTLGRLLRADRELLHPVRHRGAEARQDLTLLRARDSLVTARTQLINSVRGLVKSGGGRLPACSADSFHKQAKKELPSRLETAILPLIKQIEAMTGQIREYDRSVRTLAEKKYGSETGGMRQIDGVGALTSLAYVLTLDNPGRFRKSRDVGPYLGLVPKQDDSGERRSQLGITKQGDTMVRRLLVTSAHYVLGPFGEDCDLRRWGLKIAARGGKNAKKRAVVAVARKIAVLLHHLWVTGELYEPLHNSKLETERKGAAANKELAAENGL

SEQ ID NO: 165080 - protein, 390 aa, unidentified
MRSTHDVVIGVDPHKASWTAAVMNTEQHVLGKIRVPTSQDGYQQLRTFTAAWPQATWAVEGAIGLGAPLTARLLDSGATVIDVPAKLSARVRMLDRGHSRKTDEADAVSTAAAAISNGSLRPVVLDPAAQAMRLLSDRRDDLIAARTLVINRLHAMLVHLIPGGAPTSLSAPVVAQLLASVRPRDQVNRTRRGLAKDLLADLRRLDSQISALDKDITEAVRDSGSTLTALFGLGPVLAARILGRVGDVDRFPTEAHFASYCGAAPIEASSGDKIRHRLSRAGDRTLNHALHMMAITQVRSHPEGRAYYQRKRAAGKSHNEAMRCLKRRLVSVIYRTMAADAQRRKVDPGGQVGASLTSSAAGSTLTASSSEKSLPEPTRHQTKTQTARGA

SEQ ID NO: 165081 - protein, 337 aa, unidentified
MVGAHAIFMSALVCGLDVHKDSTYATILNHEGKIISQMRMENEKVLSYLAHYKVNRVAMESSTAIAPLYRKLASKGFDVMVSHPKKTRYIAEAKIKSDRVDSKTIAELARLDALPLAYVPNEETAKLREKVRRRAFLVRQRAKLKVKIKIVLTYEGIKPPLDHGLFTLKGVEWLHSLSLESVDSYLRIMNTFSREIKLLSKQLVGLAEEDEDVKLLMTVPGIGYYSALLVKSEIGDINRFPFGERLCSYAGLVPSTYASGRVVRHGGVTKEGSRWLRWVMVQAAQTHVRSFDSTITRMYSRVAERRGHRVALTAAAHKLLLVCYSVLRNKRPYYDQA

SEQ ID NO: 165082 - protein, 422 aa, unidentified
MLAHTHDTEEIIERVAALDVGKATLVCCARVPDDKKPGRRLQEVQTYATMTRLLLSMSDRLHCLGITRVVMEATSDYWKPVFYLLEAQGFEVWLVNARDVKHLPGRPKTDKLDAVWLAKVAERQMLRPSFVPPPAIRLLRDLTRYRVDLVEARTAEKQRVEKLLEDAQIKLSVVASDIFGVSGRAMMAALIRGERNPKTLAQLARSSLRGKIPALEEAFTGRFSDHHAFLLATMLARVDAINTDIAALDQKITQQIAPFTAAVERLVEVPGIGLTAAHAIIAEIGLDMSRFPTAAHLTSWARFAPTVKESAGKRKGKNTTGHGNRYLARTLGEAAVVVGRTDTFLGERYRRIVRRKGKKRAIVAVGRSILVIIWHLLSDPDAHFVDLGADFYTRRTNPDRRKRNHIRELEALGYRVTLEPAA

SEQ ID NO: 165083 - protein, 338 aa, unidentified
MPLYASVDLHSNNSYATITDGKDKVIKERRLPNQIEEIERFFEPYKNRIDSVVTEATYNGYWLLDGLKRLGYEVKLANPSAIKQYEGLKHTDDKSDCLWLNRLNRLNVLPQAYIYPEKDRPVRDLLRRRMYLTQMRTSFITCLKIQFQSWNSTRIAPRAIYKLDHADISKLFKDKALRLSANSFLDSIQLLNQQITEIESHVERAAKKDPVVDRLQVLKGIGPILAWTIKYETGELSRFKSIKNYLSYAGLVESLKLSNFKVKGKGNRKNRNRFLRWAFQEAAIHSLLHNRAERYHDRLARRKGKFKAKAIMASKIARVAFMIMEDPNFIYDPNKLFR

SEQ ID NO: 165084 - protein, 489 aa, unidentified
MQEMIRFVGLDVHKRVVEACILDAGGKVVLRERFELDGTGLRRFARQCLASGDRVALEATTNTWAVAAVLRPHVAEVVVSNPLATKAIAQAKVKTDKVDAFVLAQLLRCDYLPLVWQPDEATQQLRELTGRRSAFVGQRTAVRNRIHSVLAMRLTSPPMEKLFSPAGVEWLKTVELDPQGRLLIDTDLRLAVAIEIEIAALDHELAVRGYRNPQVKLLMTLPGVDVTVAEALMAALGDVSRFTDGNHAASYLGLVPSTHQSAQHCYHGPITKRGRSHARWMLIEAAQHLDKHPGPLGCFFRRLTKKKNRNVAVVATARKLVTIAWQMLSTNEPYRYAIPRSTETKLSRLRVNATGQRRKSGSPKGTKCVARLPGGSRTIRALSGVFQSEGLPAPKPLSRGEKRTIARTGCGAFVEQVAEAKVVPRRSRTIPDVNHAEVTNSPTVCRASVRGFRRLHGGDQGDEAPPPGPPTLSSVPQRKRVGKKPLAAS

SEQ ID NO: 165085 - protein, 474 aa, unidentified
MKKYTKKDKSNANPKKAKRKITKRIKKGLEPIYQNVAGIDIGATLIHVAILNENGESEVREFGSMTPDLLEIAKWLLENKIRSAAMEATGIYWIPLFEILEDHKLKPALVDPSMVKNVPGRKTDFLDAEWIRKLYSCGLLRPAFRPAKEKEGFRSFLRHRANIVKARQKTILQMDKSLLLMNLKLDIAVSEITTLTGLKIIREIVKGERDPKILAAFRHPSCKNPEEVFVAALTGNYQETHLFSLKQSLETYEFLGRQLNECDEKILAELDKWETVKEGTPPVSEKDKRKKSPYKRGRKEDPNDFNFDIRTKLYQKVGVDLSAINSIGPICLAIIISELGGKEGINSFKTEKEWCSWLALCPGNNVSGGKQLGGKSRKSKNKIKGALLKSALVLTRAKCALGAYYRRMASRIGKAAAMKAVAHKLGRMIYRLLKNGEEYVEEGQKEYEDKYKEKRIKNLFKNAKELGFNLEQAA

SEQ ID NO: 165086 - protein, 412 aa, unidentified
MDVIVERPGALDVHKAQVTACVRVPDEQGVRVQHLAEFKTTVRGLLALRDWLKAHRVTQVAMEATGVYWKPVWHVLEDDFELLLVNARHVKQVPGRKTDVKDAEWLCRLTEAGLLRGSFVPPKPIRELRQLTRYRKAQIAERQREANRLHKALEDTGIKLDCVATDILGVSGRAMLNALINGTTDPVVLADLAKGRMRAKIPALREALEGRFDELHALLIGAILAHLDFLDQQIETLTGAIEVKLAPFAAAVDLLCTIPGIEVRTAQNVIAEIGTDMTQFPSADHLASWGGQCPGNHQSAGKRRSGKSRKGSKWLNQALKEAAMAALRTNDSYLQALYRRKKSQLGHARALGAVKHSMLCAIWHMLTTGELYNDLGGDYYARRDPERQTRRLVAQLERLGHTVTLQETPLAA

SEQ ID NO: 165087 - protein, 433 aa, unidentified
MKRAATKRGSSSVCVRVREVQSQHPPPRRKNPRATLQDNGERVKRFRALKATLRTNRQRRLVGIDVAQAEPVVPRRHAHTRVVVPTRTIPNTTRGFTQLGMRIEQAQRSTGCREVVVGLEPTGTYHQAVAAFLEAPGADVLLLSSRVAYWNRRTHDGTWDKSDAKDAANGVDLLEQGKVRFSSQPAGPLADLRRLVKILRRARAELGSCKARWRTSLRPALAPIGEALPHRRWAELPGVLQPWERAAPGRPAMPQGRLPLGLATACADLGAPVTTVPARLTTLEATLTPVAERLPASARLRTIPGIGPTVGAILVAEIGDLAWATKFSQLRKLAGLDIVRVQSGQDAGQHRISKGGRSLLRWALVPGGGGPGPDPGGARPPRGLPGQATRRSGWGVQAMVELAATPRRLVWGVWRSGQPYDPTRAGGVRRPRR

SEQ ID NO: 165088 - protein, 346 aa, unidentified
MEHYVGLDVSLKLTAICIVDRTGKIKREGVVSSDPEAIAEFIKSHASHVERIGLETGPTVTWLWTELSKLGLPVICIDARHAKAALKMQINKTDRNDAVGIARIMQCGWYKEVRVKDLASHAIKALLVSRALLVKIKRDLENQIRGLLKNLGLVIGRAKMNVFYLRAAQLTEGRPELAAAVGPLLKAREAIEQQIEDLNRKVMRLARNNAQVRRFMTVPGVGPITALCYLATIDDPTRFKRSSSVGAYAGLTTRRYASGEVDWTGRISKCGDKMLRGYLYEAANVLLTRVAKWSALKAWGIRLAKRSGLRKAKVAVARKLAVILHRMWIDGTEFKWSSKEATNQPA

SEQ ID NO: 165089 - protein, 355 aa, unidentified
MTNTKYIGMDVHKESISIAVLNSAGKVVMECVIETKASTILQFIHGLRGDLQVTFEEGTWAGWLYDLLKPHVTELVVCNPRKIALLKDGSKSDRIDAHKLAELLYMNKIKPVYHGEHGLRMLKELSRSYLTISKDLGRVMNRLKALYRSWAIPCAGTQVYAPRFRSEWLSKITEAGVRRRAELYYQQLDALRLVRQQARKELLAEARKHRATKLLRQIPGIGPLRAAHLVAVMQTPHRFRTKRQLWTYSGLGLETHDSAQYRVVEQQLQRSKKSVTLRGLNTNHNHDLKDIFKGAAMRASTAAGPLRDFYEALLAKGRKPTMARLTLARKIAAITLIVWKKEVRFDANYLKQQAA

SEQ ID NO: 165090 - protein, 360 aa, unidentified
MKVQRTSVGLDVHARSVVACALDGDTGEVFERRLTLDRGEILAWLGDLPGPVAVTYEAGPTGFGLARAVDAAGIACVVAAPSKLIRPAGDRVKTDACDAAHLARLLHLGQITEVTIPSVEQEAARDLVRAREDCRGDLMTARHRLSKLLLRQGIVYSGGKTWIREHERWLRAQRFDNPALQLSYDTAFEAMLSCVDRRNRLDEAIAAMASDSEFTAVARRLGCIRGIATLTGFGLAVEIGDWNRLTGRSIGAYLGLVPSEYSSGATRAQGGVTKTGNGHARRLLVEAAWHHRTPYRLSETLRRRWELAPAAAVARGQAANRRLHDRWLRFDERKKGSVIANVAVARELAGWCWSMAVLPD

SEQ ID NO: 165091 - protein, 500 aa, unidentified
MKTKGSKAKIRTGRKSISVACSEPAQELRILRPDAAGIDCGAQEHYVAVPPDRVSVGQPTVRRFSAFTEGLDAVVDWLKDCRVTTVAMESTGVYWIPLHQKLETAGIEVYLVNARHVRHVPGRKTDVQDSQWLRQLHRFGLLNASFRPEDIICRLRSLHRHRDNLVSSSAAEIQHMQKALQQMNLHLHHVVSDITGLTGLRIIDAILAGQRDPQQLVRLRDTRVYKSTPQEMQAALVGDYRGEHLFVLSQSLQAYRFYQARIEECDREMEPLLEKLAQQIEAASANLMLDALQPSGLKGESNRPEQLPEPKPTSGSKSKKKRKPRANEPKIQLAGLLERICGIDLTQVVGLNVLNVLLIVSEIGVDMSKWRSAKAFCSWLGLCPGNKISGGKLLDSRTRQVVNRVADALRLAAQSAGRTQTCLGIFYRRKQAHLGAPKATTATARKLACLIYHLLKNKQPYQEPDSASYQLRLQKSALSKLQRQAIALGYTLLPTAPVPA

SEQ ID NO: 165092 - protein, 397 aa, unidentified
MYIVGIDIAKRKHEAAVIDGEGAVIIKPFSFTNNCSGYNRLLAMLTKAKLPLDEVSFAMEATGHYWLALFTRLQKEGFRVQVINPVQTNSIRSFYIRQAKTDPRDALLIAEVIRFGHFSESTLHPENIYELRELCRGRHAIVSMQADVKRKVVALLDQVFPEYETAFTNLFSDTSMAILQTCPTPKELSEMPLEELCHLIEVSSHKRFRMAKAQELQALARNSFGFAMAGDVFSTMIRLYAKHLDFLKQQVREMDRKIAEIMETLDTPITTITGIGPTLGAYILSEIGDISRFSSAAKLAAYAGIDPTMRQSGEYNGVRNRMSKRGSPYLRHAIWLAASSAVLHDPALKLYFQKKRDEGKPYMASVGHACRKMVSIIYAVMRDNKAYTPYIPNEISA

SEQ ID NO: 165093 - protein, 344 aa, unidentified
MGKIIRIGIDTSKSVFQLHGVDEAEKPVLRKKLSRKQMLDFLSKLPPLKVGLEACGASHHWGREIRALGHEAVLLPPQYVKPYVKRGKTDAADAEAICEAMSRPTMRFVTVKTPEEQAAQMLIGLRDQFVRRRTQLSNAIRGYAAEFGYVAAKGLSHLPQLLDDIRADDMLPDLALEMIETLARDFERVDTQIATLDRKLQETHRSSEVSQRLAQMPGVGPVAGVMLSAKIGVARDFRSGRDFAAWIGLTPKNHSTAGKSRLGVITRAGDERLRSVLVVGATAVINQWRRTGRTGWPWLENLIAHKPPKLAAVALANKMARMAWKMMTSAEDYQSPWERASAAS

SEQ ID NO: 165094 - protein, 415 aa, unidentified
MEPIHKRVAGMDVHRMEHVVTILLEQEDGTVLNETRKFGGFKRDMRALVDWLRSHRIELVAMESTGIYWKSVFSHLEAAGIEALVVNAFHVKNVPGRKTDVSDSEWLAQLARFGLLRGSFIPPKDLRELRVVSRYRRKLVQSLTGEKNRLHKVLDDAGIKLGGVVSDIDGVCARKMVEGLIAGKTPAELSALGHGKLKSSDELLQASMDGDLSPRHRLVLSTALNHLRYLEQQVAQLDRYLIEAMKPYAWAWRLLQTIPGIDEMSAAMILIEIGVDMQRFGSASRLASWTALCPGNHETAGKRKSGKIRHGNPIVRYLLCEAANAARRTKTVFQAKYTSLVIRRGHKKTIIAIAHKLIRTIYFVLTRRKPYHDTTVDYEAAIVTRNAPRWIKALKKYGYWPKAAAANPATATAMV

SEQ ID NO: 165095 - protein, 372 aa, unidentified
MAQSSTLYVGMDVHKESIAVAYVAQAHGAEVVSLGTIGTRQCDIDKLIRQLRSKSKQLVFVYEAGPCGSWLYRSLMKQGYVCWVVAPSLIPQKAGDRVTTDRRDAMQLARLLRSGDLTPVDVPAVDDEAIRDLSRAREDTLRDLKAAKLRLKAFLLRQDIRYTGRANWSPAHRRWLSEVVCPTPAQHIVFQEYVQTVTEQTARLGRLELELHEQVQTWRLSPVVEALQALRGVQFTVAVTTVAELGDLTRFENPRQLMNYLGLTPSEYSSGGRRQQGSMTKTGNTHARRALVEGAWAYRYPAKVSRHLQLRLEKLPKAIQAISWKAQVRLCKRYRQLMAKGKHANQVVVAIARELSAFMWAIAKQVTVPPKA

SEQ ID NO: 165096 - protein, 423 aa, unidentified
MNPRVEIACGLDVHRSKIVGSIVHSDGGKETRTFTTGIDDAIALKNWILGNRCERVAMEATGIYWYPIYDLLEDHVTLQVVNPYFIKVMPGRKTDQMDAEWIAELCLNGMVKSSYVPSPQLRTRRDMIRTLDRLIRTRTRHKNRIHKIMIRSGIRIASHLSSLFGPSGLRILYGLLEGQSIDTILDEINNAKISRKRDELKGSICGNLDGNAVYLIRLELKAIRSLNNLIDDLKQRISVLMEPYTDDIEILMSIPGIGYDSAVNILSEIGDIHQFPSGKHLVSWAGLAPGMNESAGKRIPGHITKKGSKFLRTFLIEPSHSIAGMKRDNQLKRFFQKMRSKIGYKPAIIALARKLLMLVHHLLIHREMYHEEDFPMKKIRLPETIAPETLNPHDILNLVSDAVSSLNEPDRDHFIRNLNRITG

SEQ ID NO: 165097 - protein, 451 aa, unidentified
MFGGRYACQKETFPIPPPRVVRPNAAGIDVGSEAHVVAVPADRDAEPVRTFGVFTADLRALADWLKQCGVTSVVLESTGVYWMSLCDFLEAQGFEVLIVDPRTLARNLKKKTDVSDAAWLQELHAFGMLKSCFRPDQEVRGLRTLWRHRDHLVTEAAKLLQMMQKVLVQMNVYLHLAVADIAGVTGMRILRAIAQGQHDPQTLAAMRDANCKKTRAEIAKALEGTWDSAHLFELKQLLKAWDFYQGQLHRCDKEYDKAAGKMPDQTQGQALPESEKRPNKHRNAPTAFASDALIFKMTGVRITEVDGLGANTVLTVLSETGPNLAAKFATEKHFAAWTTLAPRKHQSGKRTKFPAQTASRVAKAFRLAARALLNCKSVLGNFLRRLRARLGIGSALRATACKLAKLFYRLITKGEAYRRDSTAAEEAKQRERQLKSLEAKARELGMQVLPA

SEQ ID NO: 165098 - protein, 361 aa, unidentified
MDQLIRIGVDTSKSVFVLHGVDAAEKPVLRKKLRRKQVTEFFGRLEPTKVGLEACGAAHYWARELQALGHEVVLLPPQHVKPYVRRNKNDAADAEAICEAMSRPRMRFVPGKTAEQQAALMLAGTRDALIRRRTQLTNTIRGYAAEFGLTAAKGLDKIEPLLGRIAAAEDLPELAKDLFAVYGQDYAELKRQIRAIEAKLMDWHKHNELSRRLAEAPSIGPIGASLLVMKVPDPHAFRSGRDFSAWIGLTPKDHSTANKKRLGGITRAGDEALRSVLVAGATAVIQQVKRGRGRPSPWLIELLKRKPPKLAAVALANKTARVAWKLMVGGERYNPAHRRAKAVAHQVSGDRRDAQPMMTQP

SEQ ID NO: 165099 - protein, 326 aa, unidentified
MTYVTEPSAVFGIDIGKREVVVERFDEPRLQRIPNTLKPLRVWLARVPADALLVMEATNTYHELLAALAYALGLQVVVLNPHRSWHYARAIGKRGKTDPVDAAMLAQFGANEWRKLVRWQPASSGNIRVARLLRRRTRLMSAKVAVTQSLGTMKELNRIRRDAKHALEALIKRIDELILKAIAQDAELAKLHRLLCSIVGVGPIVAAQLAQALTRFPWARDEAFIAYTGLDPRPDDSSTHRGRRKLTKHGPPMLRHLLHLAAMSASKTRLWKPAYLALRARGLHTTEAFVVIARRLARIAFAIFRSGQPFDPTRLVSMPCGILTKP

SEQ ID NO: 165100 - protein, 371 aa, unidentified
MTEFWVGLDVGSRETALCVTDESGSVVEERTVVTDVTAVHSALANYKHAIALVGAEAGADVHLIRKLREIGYPAVAFECHKVSKILAVRRNKTDANDARGLADVARLARNVVPQVHIRGMDCQRLRSLLNLREQLVRQRVAAEASLRSTVRFYGGTIKSIRSAQALRQHVAVEIARLATEEKIDLTDDLQPLVSLCESIRAYVSRIDRQLQEQANNNPICRRFMEIPGVGVICALSFFSAIEDPSRFARIANVGSYFGLVPKVRQSGQYSRSMRINKAGDERTRARLIMSARVILGKCRQDLRLKDWGLEVSARAGNKKAWVAVARKLAIVMLSIWKSDGEFQAYPETSPPRGGGKLGHRGMVPAIAIGAA

SEQ ID NO: 165101 - protein, 320 aa, unidentified
MDQEKVYVGIDVAKHNMDVAVYPSGHQWSFTNNDKGISQAVTRLQELSPALVVMEATGYIELPLTAALAVAGLPTVVVNPRQIRDFARAMGRLSKTDAIDAQVMAYFAATVQPKPRPMPNSQTRELSAVLARRRQVVEMIVAERNRHGIANAAVRESIQDHIRWLEEELTNVDNNLTRIIQKSPLWREKDELLRSVPCVGPVLSTTLLADLPELGSLNRRQIAALVGVAPLNRDSGTLRGKRRVWGGRAKVRAVLYMATLVATRHNAVIRAFYQRLNAAGKEKKVALTACMRKLLTILNAVIRYRTPWCYTSSQVLGSCS

SEQ ID NO: 165102 - protein, 343 aa, unidentified
MMQHTIYGLDLAKRVMQLHWVDWETGEIHRKQLRRGKLLEFFVNREPGIVAMEACGSAHYWARELRKLGHEVRLIAAQFVRPFVKTNKTDAADAAAIWEAVQRPDMRFVAVKSVDQQSVLALHRMREQLVKIRTMQINAIRGLLYEFGADIPQGRQNGEKIIPQVLEQLEDQISKVTLDAMRGQLERLKALDRDIADMEKSLALWKKDQEGVSRLMAIPGVGLLTATAIVATVGDMKIFRSGREFASFLGLVPQQSGTGGRVRLLGISKRGDTYLRSLLTHGARAVIGRQIRNRNPWIDRLLNRRPYNVAVVALANKMARMIWALLARNRSYDPRYQGTKAIA

SEQ ID NO: 165103 - protein, 349 aa, unidentified
MIRNKPRGATVYGIDLGKNIFHVVGTDPAGNVVQWVKFRRDTLRAFFERAERAVVGMEACPGSQWLARKLQAMGHTVRIIPAQFVKPYVKSHKNDTIDAAAIAEAVTRPTMRFVQVKQPEQVDLQSLHRIRDQMVGSRTRLICQMRAFCLEYGVAIRQGAGLFKSDLPRVIADECNDLTPTMRRLLNELFEDLMRLEKRIAQVTREIEALAARDEKARRLMTIPGIGPLGATALLAAAGNGQQFKKARDMAAWLGLVPQQYSTGGKTQMFGISKRGNRYLRRLLIHGARSCVMHLDRSRDRLGAWLRQLHSRMHVNKVTVALAAKIARIAWVVLNRPGAIYERRDPALA

SEQ ID NO: 165104 - protein, 387 aa, unidentified
MSHSTPYGLGMDISDRSMMACLRGPESTVIEETTLPLSPAVAEVYLRRLKELQPVVALETGTHSNWIYDLLQTLGFEKVIMADARKLKVIFQSDKKTDRFDAQILARLAQTCPELLHGVRPRGEQARQDRRLLSARQIAVETRTKLVTHMRGIVKSTGARLVDCDADRFADQKDSLPDALQEILAPLFESVFQVTEAIFTYDAAIQKRCANDPVIKQLIQVPGVGEITALAFVSAIEDPFRFKRNRDVASYFGVRPRVDKSGMIEKQLRITKAGDQYMRQLLVQCAHAVLRPRSQVTDLKRWGQKVAESGGKRGKRRAAVAVARKLAVLLLSLWKTGAKYEPFKERGDKNESATTVPPKGSASSISAQYTTRRKRIRSPRAMATNLK

SEQ ID NO: 165105 - protein, 428 aa, unidentified
MTDHKKINPAGSLVAIDVAKEWNLVLTTNGSGDRRTFKVANRRADHDRLVSFLKSLPGPVRLGLEPTGDFHRPLAYRLLSEGFDVVSISSVALARFREARYGTWDKNDPKDAQVIIAMMAQDMVQTYHDPLFHGTHDLQELANTYFQITLARTRLQHGLLTHHIPLYFPEFGRYWIATRSAWFIRFLLRFPTPASVRALTPEAFSSEAWDLLGRKVEKRKKIAEMYAMAAESIGLPVALDSPAIEMFRLQLRRYQQLNEDRAHLDARAQELLADNPDFQRLLTLPGIGAVMGLTILAEVGNLRRFGHHRQFLKYCGLDLSKNQSGQSRGRETLSKRGNKRLRMVFWLAGLRAVHMRENAFRDKYERYLTDNPFDADRKRKALTAVAAKMARVVYAVIKKDADYERFFEQRLPSGSIPLSSAVEAISTS

SEQ ID NO: 165106 - protein, 279 aa, unidentified
MKRNKKLTPTSHQQTEATAEVIKLGIDIHKTKYVVIRQIDNQAAQSPQKFSPDEFVVWVQRQRLLAKRVVSCYEAGCFGFVLHRKLAELGVENYVVRPRNWDEYGSSVKTDARDARELCGHLDRYLAGNERALCVVRVPSEEQEQARALSRQRETLAKERKRLQNVGTSSGLYHGVDVPANWWKPKVFAKLSTEIPEFMKLILDPFQQVLEIIDKQLRETTAREERKANRKIPVGLGALTTSILDQEFVDYTRFSNRGQVSSFTGLCPGESSSANKRQD

SEQ ID NO: 165107 - protein, 464 aa, unidentified
MIVNQNVPKVSTGSPQTAAFNAMYSSAIGIDVHSKLMVACFQNGEFGQSSFTEEFKETGSSLQALRILVDWCKSKNPEIIIMESTGIYWRTLYGELETNGFSRDRIVVVNPRIVKPLKGHKTDRGDASNLAKHARMGSFSRSFIPSADIRELRFLWSSYAQLTHQIRGDKRRLHGLLAGNGCRIASVATDIEGVTAQQLVEVILSGDKGDVLRGKIQKVLDAMKKRRGRKLTATVDAICEAAESRFSPEMLNVARNRVRALKELIARAEAEFQVIHMKVVLGFRDLYERLQTIPSVNEKSAVGIICELGDDLSSFTSIKQFASWTGLAPGNNISAGKSHSSKTTHGNKYLRRTLIEVAQGCANTKNNMSNLTKLYLRISERKGRNKAKVAVAHKLARIIYVIITRHVVYVDNPNDNSLIEHRMRQLKQSIARARSTEGITVVKHSSAGKFWDKLDISVRVSQNK

SEQ ID NO: 165108 - protein, 482 aa, unidentified
MTRSKRPGPSGPRPRPPRERPPALTVLRPDAAGIDVHADMHMVCVPADRAPPGPPPDPGGLPPNVRRFGANSCDLAAIADWLQACRVTTVAMESTGVYWVPLFELLEARGFDVWLVEPGQLSRCGARPKTDVLDCQWIQRLHAYGLLERSFRPPDSVMALRAYHRQRQMQVRYAASHVQHMQKALEQMNVKLTEVVSSVTGLTGQRIIAAILAGERDPRALAALRDPKCKSDRETIARALEGTWRPEHLFELRQAVALYEFHHRQIAECDDAIRAELTRLPSRAGDREPAARPRRCGRKPNDLGFDACGPLFRALGVDLTRIDGIDVGTALVVLAEIGVDVSRFPTERHFASWLGLCPRQHESNRTRKRRAPRKGKNRLAVALRMAAQGLGRTQSPLGLFYRRIQGRIGGKGAVTAAAHKLACLVYRMLRHGTEYVRRSLAEYEQKVRAQVERALRRKAAALGYELVRAAGPPAAAPAHAAP

SEQ ID NO: 165109 - protein, 374 aa, unidentified
MNKSSKFVGLDTHKDTIAVAVCEANRGKPRYYGEIPNTPQALEKLLRKLSPEGEVLSFCYEAGPCGYGIYRQLTASGHECEVVAPSLIPVKAGDRVKTDRRDSESLARLHRAGELTPVWVPGPEQEAIRDLTRAREDIKALERQAKQRLGAFLLRHGVSYDEGKSKWTNAYFRWLSGVKFEIQTQQIVFQEYTDSVKYLQSRVEGLEKEMEAALNDWSLAPVVRALMALRGCKLITAMTIMAELGDITRFDSPRQLMAYLGLVPGEYSSGNTTRRGGITKTGNGHVRRVLIESAWCYRFSARKTAHLQRRAAESSEEVQEIAWKAQKRLCRRYQHLLNRGKLKVQICTAVARELVGFIWAIACEVMNKKTPALN

SEQ ID NO: 165110 - protein, 337 aa, unidentified
MEYFAGLDVSMEETHVCVVDRDGVVTHQAKVASTPADIAQELAKAPACRRAVFETGRMAPMLFHGLADHGVPVVCVESRQAYQALKSLTTHKTDRNDARGLAHLARTGFFKPVHVKSLPAHAVRSLIIARKKLVGQRVTLENQIRGLAVVFGVRLPRALSPAFIEQALRSSEGIAGLSAAMRGLIGARAAVLAAVAAIDADIKRMVRASDACRRLMTIPGVGQLTALAFTAAVDDPERFRRSRDVGPYLGLVPRRYQSGEVDYTGSISKCGDRRVRTLLYEAANVMLTRCRQPLKLKAWALAIAKRSTMRKARIALARRLAIIMHAMLRQGTEFRPA

SEQ ID NO: 165111 - protein, 412 aa, unidentified
MKDLLEISCGLDVHKEKIVACILTGPLGKPTRSEIREFTTLIPDMIALRDWIVSQNCHHVAMESTGIYWMPIYEILEDAFSGDITLLVVNARHMKNVPGKKTDMRDSEWISTLLRAGLLNGSFIPEKRIREFRDLNRYRKSVIRDITSQKNRIEKFLQSSGFRLSSFISDIFGASGRNIILHLMEHGQIDKTALDSCLKTKTRNRIDEILMSVNGTLSEHQKTFLKILMTHYDSLKEHLTEVETSLEEDMAPFTLQVEQLNSIYGISTTASCAIIAEIGIDMEPFKTAEHICSWAGLCPGNNESAGKRKSASVTKGNPYIKSMLCEIAWVIAGKRNTYLSAWYWRIKQKKGAKKAIVALARKLLVIIYTMLKQGTLFDESCFETRRKNCEQKQLSRYIRELEKHGYHVEAQS

SEQ ID NO: 165112 - protein, 305 aa, unidentified
MKIYAGIDVSKSHLDLHYLDQDRQIPNTEKTIRRWLRSLPPEVVLICESSGGYESVLLSLAHEAGRSIIRINARQVRDFARAKGLLAKTDRLDARLLVDFARTFHPRPQPRPDPLQQDLSALVKHRAHLLRQVTQNNNLVETTADKKLLALIAKTVAFLQKQIDQLEALMAEKIKASAALQDKVDRLQQIQGVGTLTATALVALMPELGSLSDTQAASLAGVAPFNRDSGQFRGQRHIAGGRRNVRSTLYMAALVASRFNPVLKALYQRLLANGKAKKLALTVLMRKLIVLANLLLKKTDFTLAT

SEQ ID NO: 165113 - protein, 378 aa, unidentified
MSSTSMIWIGMDVHKDSVMVAVYADGAGEPEVVQPLPNDARKLRRYFERWSRRGEIRSCYEASGAGYVLHRQVREWGHHCDVVAPSLIPVRPGERRKNDRRDAIQLARLYRAGELVTIRIPSAAEERVRDLVRCRQCFQREILRSRHYVTKFLARRGFVYREGKNWTHRHRSWLLSLLREGGLEPEDRSVFGEYLALLDYKISRREDLDAQIERLAFSSAYKPAVERLRCFRGINTLAAMTLITEIGDWRRFERPGQLMAYLGLVPSEHSSGNREHRGPITKAGNSRCRHVLVQAAWTYRHRPVVGSELKARQRGQPPEVVGHAWKAQHHLHKLYHRIAIRKCSGIAAVAVARELVGFLWAVMQELEVELTPSLTEAA

SEQ ID NO: 165114 - protein, 343 aa, unidentified
MEQVSTIGLDIAKNVFQVHGIDETGEIVVRRQLRRRQVLAFFGRLSPCLIGMEACATSHHWARELEKLGHEVRLMPPRYVKPYVKRNKNDAADAEAICEAVQRPTMRFVPIKTREQQSVLMLHRTRQLFVRQRTALINAIRAHLAEFGIVAGVGRNGVEALLALIAKGEDERIPSAARECLMALAAQLELVKRQILGADRRVLAWHRSSQISKRLEAIPGVGPLIATALVASIPDPGAFRSGRDLSAWIGLVPKQNSTGGKERLGSISKAGNRYLRTLLVVGALSVIRRAKQLGYTRHPWLVKLMQRRPVRVAAIALANKIARIAWAMMARNESYRTPLPAPA

SEQ ID NO: 165115 - protein, 430 aa, unidentified
MNLKPIAGIDVSKYFSEMVVISPANEILSRLTIHHNNLSDFDRAIEILKKVEEDFAARPIIVMEATGHYHKILSRFFTSNGWDVAIINPIQSNSIKNAGVRKVKNDKIDALWIALTFRLTNSAIAQPSSETLDCLKNLCRQYYNLSDELTSYKYRLTSVVDQIMLNFKEVFPDICSKTSLAILENYPTPNDILSADSEKLISIIQQTSKKSYQWAKEKYELLIAKAKQFKPFSISNLANVTMLKVYINIVLTLQQNINKISESINQLVQQSSQTQPSISENINLLQSIPGIGFLTAATILAEIGDFEKFSKPNKLVAFFGIDPSVNQSGQFVGTKNKMSKRGSKILRRILFTIALANIRTKRNSEPCNPVLLEYYQKKCQQKPKKVALGAVMRKLICIIFAVMRDRKPFELRTPEKHIQKCFNKTAVYCV

SEQ ID NO: 165116 - protein, 435 aa, unidentified
MTIEDKDEVYYERCAGIDVHKSKLVVCLRKGRKAEVREFGTLTHEIREMVAWLKGNGCQMIAMESTGSYWKPLYNIFEQEEMPAMVCNAYHIKNVPGRKTDVNDAQWIAKCLSQGLLKPSFVPDREQRELRDMTRFRKSQVEERARNVNRLQKFLEGANIKLGDYVTEIEGKSATALLELVIGKPDFTVDEVAVRMVGNLKATPEELFKSLEGSITPMQRGFFSHVMQVIKEQTAQIEKTDEMIQGSLSENYKAAVAALDEIPGVGKVAAEQIIAETGTDMSRFQNQNSLCKWAGVCPGNNESAGKRKSGKTPPGNQALKTTLTQCAKSAVKKKIRSSPRSTQGSSHIAAKTGQPWPSPTPSSSPSTSCCPAMGSATSALTTTHTSTGIGRSTLTSSNSPSLASPSPMISSTMFSPDLPVDIFPNIPPPFLRHFP

SEQ ID NO: 165117 - protein, 342 aa, unidentified
MSEQYEGRQYVGMDLHRRRSVLVRMTEAGDRLETVRIVNDPERLAAVMSRAGEAPEVVLEATYGWYWAADALAGMGAQVHLAHPLGVKAFSYRRVKNDERDAADLADLLRMGRLPEAWIAPPAARELREMVRHRAKLVHLRSGLRCQVHAVLAGQGVAVPVSDLFGVGGTKLLKAAPLSPMARRRIDSLLRLINVFDIEIDAAAKTTAARLAEHPGYAAVQTLPGIGPILGAVFVVEIGDVTRFPGPTQLASWAGLTPKHHESDTTVRRGRITKQGSRLVRWAAVEAVQRTGKNTRIGAYRDRVAERRGRNIGAVAAARELIELVYYALRDGTVRRSLSASA

SEQ ID NO: 165118 - protein, 462 aa, unidentified
MPHPRRRALQPAAPPVVNPNAAGIDIGATTIYVCVPLERDPEPIRHFATFTEDLHALADWLAHCGVTSVAMEATGVYWIPLYQILETRGFAVCLVNARHVKHVPGRKSDVQDCQWLQYLHSVGLLRASFRPPEAVCAVRSLLRHRESLVQFAATHIQHMQKALTQMNLQLHHVLSDLTGVTGLAILEALLAGERDPQVLAAYRDPRVKAAPETIAKALVGDYRVEHLFTLRQALASYRHYQQLLAEVDAQIAALLATFPSSGAPGAPPLPPVRAKRQRHAPAFDFRSDLYRILGTDLTAVPGLATSPLALFAELGPHLPQFPSAKAFASWTSLCPANRISGGKVLSVKTRHVINRVANVLRLAAQSLSRSRSALGAYYRRLRARLGAPKAITATAHKLARILYHLLTTHEPYDETRVAAAEAQYHRRSESRLRAHARALGFQLVPVPAAAAPADGLRPGEVS

SEQ ID NO: 165119 - protein, 415 aa, unidentified
MEPVLDSCAGMDVHEKKVDVCIAHGPLEKSPKFEIRTFLTMTADLEDLKSWLKKYNVTTIGMESTGVYWKPIFNVMEGEFTIVLANAQRLKAIPRKKTDIMDCKRIAKLLRYGLLPNSFIPPREIRELRDLNRTRRKLVGMMTSEKNRMTKVLESSNIKLSSVVSKISGVSSMAMIRSLQEKDKLSKEEISQLAKGSLKKKVDLLEKGLDGKLTDHHRFLIKMHMENLDHLARQIEKIDEQIESKMIPFQKEANLIQSIPGISKVSASAILAEIGADMSQFPDEAHLSSWAGVCPGNNESAGKKKSGKTQKGNSFLKGTLTEAAWAASKVKRSTYNAFYHNIVRRRGKKRALVALAHRMLMDIYRVLKTGTPYQDTSAEEANERATKKKERSMIRLLEKAGYSVVKTSTAEIAVA

SEQ ID NO: 165120 - protein, 338 aa, unidentified
MQTYAAIDLHSNNGVLAIIDETDRVLKQRRIPNKLEEFLKELEPFRASLQGIAVESTFNWYWIVDGLRAQKFPVMLVNTAAVKQYEGLKRANDEYDAWFLAHLMRLGILPKGYIYPREERAIRDLLRKRATLVQQRTANILSVQNLEARNRGTKISSNEVKHLTNTRISELYDNEDLALAITTTLSVIDALTKQTSLLEKAVLKKARLRKEWKPLLTVWGIGEILGLTIMYEAGDMSRFAGPGNFASYCRCVDATRLSNGKKKGDNNAKNGNKYLAWAFVEAAHFAVRFYPEAKRFHDRKAAQVNTVVAIKAIAHKLARAAFHVLRDQQPFDPKKVFV

SEQ ID NO: 165121 - protein, 409 aa, unidentified
MDVLFDRVAGLDIGKKIVVVCVRTPGERGRRRSEVRTFRTMTRHIDVLGDWLIEEGVQVAAMESTATYWKPVFYGLEDRLECWLLNAAHMKAVPGRKTDVRDAEWIAQLLEHGLVKPSFVPPPSIRRLRNLTRYRVQLMADRTRAADRLEKVLEDASIKLTSVASNITGASSREMLAALVSGERDASMMADLAHSTLRRKIPDLTEALTGRFDDHHALLVGAMLRQLDLADEALARLDAQIVAEMAPWQHQLDLLQTIPGIGKVVSQVIIAETGADMARFGSPEALSAWAGVAPAVHESAGKRTPAGSRQGNKWLTSSLVEASHSAARTKDTYLAAQYARLASRRGAKRAAVAVAHSMLVSAYWMLVRDEPYQDLGPDWLNKRNDQAHARRLVAQLERLGHTVVLDPVA

SEQ ID NO: 165122 - protein, 350 aa, unidentified
MIIIGCDYHPGFQQIAFVDTETGDYGERRLEHSEGAEKFYRDLAAQGKKVRVGMEASGHARWFERLLTELTFELWIGDASEIRAKRVRKQKTDRQDAQHILQLLMENRFPKIWVPSGENRDLRQLLWHRHRMVQMRTRIMNQLQAVALNEGLRCKKRLWRQHGREQLESFRLAPWASRRREDLLQLLDRLNPTITDLTQVIEQEVEKCAEARRLRTHPGVGALTALAFVLIIGRAERFQCGKQIASYLGLVPLEDSSGNRRRLGHITKQGSSMLRFLLVEAAQVTARSIPEWRTKYFHLAMRRGRKIAKVAMARRLAIALYWMWRKGWNYEQSRKFGSHAGQLGTGDGVQ

SEQ ID NO: 165123 - protein, 307 aa, unidentified
MYVGIDVSQQYLDVAISGSRQVQRMTNDDGGLELLLKQLVRLNPEGIVMEASGGCERRPLAAMQAASLAVSVVNPRQVRDFARSLGRLAKTDAIDAQVLARFAEVLKPEPARVTDEAEEQLRALEQRRRQLVEMIVAERNRMRTSPRTAKNIEKHVRWLVGQVKKIEKELQDLIASDPGMRSKSAILQSVPGIGPALTFSILGGLPELGQLNRKEIAALVGVAPFNRDSGKLRGKRSVWGGRASIRSALYMAALVGTRCNPVIRALYQRLCALGKPKKVALVAAMRKLLVTINCMVRNQSRWLAPAI

SEQ ID NO: 165124 - protein, 466 aa, unidentified
MKPFYMGIDVSKGYADFMILNSKKQPVAQNFQLDDTFEGHQSLYKLLDRFLGEHPESVLFAGVESTGGYENNWYNSLIEFQGSLNIQTARLNPLGVMHNSKADLKKNKTDKISAQNIAEYLIAHPEKVVYQKDDQLAGLRKQWGFIKMLTKQSTQFLNQLNTLLYTANPELLSYCQDGVPGWMLTLLVHHPSAAGLKNAHVKTVANIPYVSQMRAQQLIANAKRSVASATDPTTEQLIVATTRQILHLKKTIAEQMKLMITECSLSEIELLKTFPGISDTSAIGLIIEIQTVKRFAGVKKLASFFGVHPVYKVSGDGVSGFKMSKQGRKEPRQILYMVALSAIRYNPLIKETYEKHQQQGKHNMAAIGICMHKILRILYGMLKHNKAFDPQIDIRNRQRKVRVKSDTPVKDMNRRFQDYDQNAPVTRRQRKKRLERERPHNVDDIKSGVTAPVPLADIIADILPQL

SEQ ID NO: 165125 - protein, 361 aa, unidentified
MQSTTIIAFDQHAATTVAAVLLPGHRTPALQTLASDSPTILKFVARVRRDGPLRCCYEAGPGGFELQRALQAHDIPCEVIAPALIPRRAGDRIKTDRRDAGQLAVLYRAEALTAIHIPTEQEEAARDLLRCREDIRADLLRTRHRLSKFLLRHGRRFTGTKKAWTKRHGDWLRAQTWALAALDQTHQAYLRGVDEAVARLRAVEDDLRALLTLEPLRDRVARLRCFRGINDLTALTIAAELGDPRRFATAPRTMAFVGLVPSERSSGTRQARGRITKTGNAHLRRVLVEAAWHYRHRPFVGATLRARQQGAPAEVIRRAWTAQQRLHRRYQRLAARGKPTQHVITAVARELTGFVWAALTR

SEQ ID NO: 165126 - protein, 416 aa, unidentified
MMKEENNKVKRYYLGVDWAEEFHQVWVSDPEGKKVIEMMVLQQPQAMSEFGAWLHQRKAEEIELWAAIEKPHGRIVDFLLDHGVVVYPVNPKALDRARDRFRMSQSKSDSFDAYVLAEFLRTDHAHLRALEPNSAQAQELKMLSRDHQRLMRQKTRLLNQIGITLKEYYPRPLEVFGDLESKIARDFLKAYPTPQALSKLNRQSWDRFAQRDHHLSEARSTELQDKLGKAQLPIPEHVIRAKAKLLLALVVQLEALLPEVESYSEEVERFFASMPAAELVKTLPGGKRGTTVAKLWAELGDANNRWQSFRHLQAEAGEVPVTQSSGKSRVVLFRFACNKHLRHAIYWFSFNSLRRCEWANKYYREQRAKGHSHPRALRALGAKWLKIIFVMWRDHKPYDENYHLANIARQRMRQAA

SEQ ID NO: 165127 - protein, 412 aa, unidentified
MLDVMFRQCAGLDVHKKSVTVCAVTEDEAGKVRRTIKTFGTTTQALREMAAWLGELGVTHVAMESTGVYWKPVYNILHESLEVWVVNAQHIKQVPGRKTDVKDAEWIATLMRLGLLNNSFIPDEAQRDLRDLTRYRMKLTNERSAAVNRVEKVLEDANIKLSSVVSDIQGVSARQMLEAIIAQKDDSQELAELAKGRLRNKIPALVEALTGQVRAHHRFMLRELLEHVDGLNHRLQQLNGRIEYLTLPHARLIERLDAVTGVGKHTAQIILAEVGASVAQFPTFNHLASWACMCPGNHISANKRTSGKTRKGQKWLRTALSEAAWAASRTKDTYLSAQFHRLRTKRGAKRAAIAVGHSILTIVYHLLKDPEATFEDLGGDYFIKRSKGDQERRAVKILTTLGYDVKLTPVAG

SEQ ID NO: 165128 - protein, 316 aa, unidentified
MRSIGLDVHRDFCEVAICEQGRVSFGGKIRTLVGPLEEFARGLHQEDQVAVESTQGAAAIKQLLEPHVARVVVVDSRKAAALAQARAKTDRLDARTLARLLEAGVLDEVWAPDDQSAALRRLLSRRQALVRARTRAKNEVHAGLARSLCPRPPVKDLFGRSGRRWLEAQPLSQEERLTTDGCLRQIDLLAGEVAALDRVLAVRAVAMPEVRQLLAVPGINLISAVTFMAWVGDIARFPSPRHLVGYLGLDPRVRQSGEASARHGRISKQGSPQARATCCARPPGCSSGPRGRCTPSMSACAHAAERRSRWWRAPES

SEQ ID NO: 165129 - protein, 351 aa, unidentified
MRKIAYLGMDVHSNHCVLGDMDARGNFRGAQTFCTSEQNIIQALQDVKATEKYLTFEEGNLAYWVARVAAPYVTEVIPCDPKENALIYKGSNKNDKVDTKKLCRLLRLGELKRVYHPETDERAIFKAAAQHYIDLRDQQISLKQKIKAMYRHWGVIDVAGEAVYSPKKRDNYLCRIKHLAIRNEISRLYYLMDQTESMQERALKAMKQLGRKYPEIKQFQKMPGIGEILAHIFDAFIQTPHRFPDKHKLWRYSRLGVTDRSSDGKPLGFKRLDRSGISELKSLTYQAWMSALRSDNEVKRFYKNSLQRTFSRVHARLNTQRKIIATMYGMWKRGEPYNPNLFLDSPQSDAV

SEQ ID NO: 165130 - protein, 391 aa, unidentified
MVCVGIDVAKDKHDCCILDSDGMVRADCFTIPNNMDGFKQLLQTIRNCTKKSDKIKVGLEATGHYSYNILGFLLDNGLPTYVINPLHTNLYRKSLSLRKTKTDRVDARTIATMLLSDVDLKSYTDIAYHNEELKSLTRYRFDKVQECAKLKQSVSRLATILFPELEGLVSSIHGTSIYALLGEYPGAKQISEVHLTKLTNLLTTASKGRYGKEKAIQIREAARASIGSVMPAKSLELKHTIKLIQELASEINEIEDSIQKIIDELNPPILSIPGMGVNSAAVILAEIGDFSNFSSPDKILAYAGCSPSTYQSGKLTNCYAHMEKRGSRYLRYALYNATKYVCYWNPVFAEYLAKKRAEGKHYNVALSHAMKKLVRLIYALQKSGKAYLAAA

SEQ ID NO: 165131 - protein, 339 aa, unidentified
MDGDTGEVFQQRLSPDHGEIVAWLGDLPGPVAVAYEAGPTGFGLARALAAAGITCEVAAPSKLIRPTGDRVKTDARDAAHLARLLHLGQITAVTIPSASQEAARDLVRAREDCRGDLMTARHRVSKLLLRQGIVYSGGTTWNRDHERWLRAQRFDNPALQLTFEAAFDAMLACRDRRTRLDDAITAMAADSEFTPVVHRLGCIRGIATLTAFGLAVEVGDWHRLTGRSIGAYVGLVPCEYSSGDSRSQGGVTKTGNGHARRLLVEAAWHHRSPYRPSEQLRGRWGLACPAARARGQAANRRLHARWRSFDARKKRSVVANVAIARELAGWCWSLAVMPD

SEQ ID NO: 165132 - protein, 387 aa, unidentified
MPKFDDLSRSLVALDQDSTLIAVIELSRSSWLVGAIVPGLEREPLKKLTADADALLGLLHRWRDQAVASGHPIARICVAYEAGRDGFWLARWLRARGIECHVIHPTSVSVSREHRRAKSDRLDLGLLKRSFLGWLRGEKRHCSMVAVPTREAEDGKRPLRERERVVGDATRLVNRIKGLLALHGIAKFDVRAKAAPQRLAALPTAEGEPLPPNTLAELLRAVERLQQIQAQIAAIEAAQRQRLKEAPDAGPHPMIRLLAKVKGVGIATAEALVREALSRPLRDRRAVARYAGVTGAPDESGSKRREQGLAKAGNARVRRALIQLAWRFLQHQPDSALAGWFRQRTQDGRSTTKKTMIVALARKLLIALWQLATTGAVPAGVRLHAAV

SEQ ID NO: 165133 - protein, 414 aa, unidentified
MLKIVYRICCGMDIHKSFVVACIASTNEQGVTTYKSKRFSTFTGDLRRCADWLSENNCKDVCMESTGKYWIPVYNILEPTCNIVLAHPKYVKAIRGKKTDKRDAKWIADIFKHDLVSGSFIPPADIRQLRDLFRYRWKLTNFTTGEKNRAQNCLTVSNFKLDDVFSDVFGKAASAITAWILEHPTEKITDISAFRTKGMKATDERVLSAVDGEMCEEQAEKLRIIRSHMSSLQLCKLDLESLILSTAEKYLPQLNLVMTAPGIQSFAAIGIISEIGVDMSVFPTSKHLCSWAGLTPQNNESAGKKKTTRISRAGAYIKPLLVQCALCAIRAKQFPEVRNRYLALKKRRGNKKAIIAIARMLLTAIYNMLKKNEPYNPELYRKADRPPAHREVSVDEAIFILQRQGYLGTAPSPP

SEQ ID NO: 165134 - protein, 323 aa, unidentified
MQGKALPDQSAQAQVYVGVDVCKDWLDVYFHPLGKALRIANDRHGLKRLKRACEGVAIARLVLEATGKYHRHAHRSLHAAGLPVAVVNPLRSRLFAEAVGALAKTDRIDARMLALLGARLDPAAAPPAGEAMDGLQELVRARQSAVADKTALSNRAGEAETDFLRVELAQLIAEAERHIARLDEEIGRRIDSDERLAERFRILLSIKGVGPIAAMTLLSCLGEIGACSGKGAAMLAGLAPIARDSGDRNGQRRIRGGRAHVRTALYMAAVAAAKWNPDLAAFYKRLRENGKAAKIAITAVMRKIVVLANVLIRENRQWTPTRP

SEQ ID NO: 165135 - protein, 419 aa, unidentified
MKAWNQITHFAGFDWAKDHHDVIVLDATGKIVGDFHFEHTAAGWEQFQNQLLTFPNVAIAIETKSGMVIERMLELGCHIFPVHTQSAKAYRQRKVPSGNKTDRVDAWSLADALRLDGADWKQLTPQDPLVKELRLLCRDEVALIRDRTALITQLRQALYEYYPIALEAFDDWTIAAAWAFIVAFPTPDALVKAGKRKWEKFLHVHRLAQPKTYQRRLEIFARATQFAGSLPMAYAKSRLAVVRVKQLQLVETQLKAYRDEIERLFLLHPDARLFASLPGAGKKIAPRLLSEIGDDRALFPDAQALQCLAGTAPVSFQSGQIHRVHLRRQCNKSLRNAVHFWANLNRDGCPWAATYYAALRAKGKSHACALRALGQRWLKVLWKMWQTRTVYDADLHARNQLKHGSWVLQLNAQPAAVKT

SEQ ID NO: 165136 - protein, 410 aa, unidentified
MLFIGDDWAEAHHDIEIEDEAGRLLVRKRLPEGLAGVTLLHELIAEHLDPSGEPDQVLVGIETDRGPWVQALLATGYLVYAINPLQVARYRERHSTSGAKSDPGDAHLLAEIVRLDRAHHRRIAGDSESAEHVKVAARAHQTMIWSRVRQVNTLRSLLREYYPAALAVFGTDLASPDALAVLAAAPTPELGRRLSQARIETLLRKAGRQRNIAATAARIKTALGSDQLTARPGVVPAYAASASASVAVLTTMVTQTEVLAGQVEQGFGRHPDVEIYRSQPGLGVILGARVLAEFGDDSDRYADAKARKNYSGMSPITRASGTKRVVLARYARNRRLGDALFRQAYSALRASPGARACYDRQRARGASHYQALRTLANRLVGILHGCLSHHTLYDENQAWHTPDDKLTIAA

SEQ ID NO: 165137 - protein, 360 aa, unidentified
MRKRLSKKESWFKENNFTAEDEIYVGVDVHKAHYHLAIWHKGRIGCVYLMSSDNNKLLRDIKRIRGSLKNIVYEAGPTGYSLVRLLRSSKLPAEVVAASKTPRMTDSSAKTDRLDCQQLATYAAKGLLTFVSVPTEQQESDRQVVRLRDQLASKRKRIMQQIKSLLLQHGISWPGGGWNEALLKRLRELDITSELMFTLNQHVDEYEFLCSKIRETKAELRKIFGSERHSVAIKILESHPGVGNIVAWAFRAEMFDITRFKEPKHISKYTGLCPRVSQSGKTCRQGPITKTGRRQLRALLVQAAWAWYRNDPHARQIYNRLLRNTGNGKKAIVGLAKRIAIHLWRMLCDGCLYDANIVKV

SEQ ID NO: 165138 - protein, 366 aa, unidentified
MREQQNNRQERTIIGLDLGDRWHRFCVLGESGQVVEEGSVANNRVALSELSSRYPGALVVMEAGCHSPWVSRHLKQAGCEVIVSNPRKTRAIYQHERKSDRRDALMLARIARMEPALLYPVRHGSEEAQQDLLRIKLRDSLVRARVGLINSLRFTLKSLGYTIANPSTERFHKVIQSALPESVVQMIAPSMQAIEELSLRIKLLDREIRTLAHTKYPETSWLEQIPGVGPITALYFVLKIGDPARFERVRDVGAFIGLCPRRDQSGENDPQLRISKRGDAYLRRLLVSSAQYILGLFAPPSALRQYGLALAAGATARAKKRAVVAVARKLAVLLLTLWKNNSPYQAFPQQREKMRIHDLERLRCIA

SEQ ID NO: 165139 - protein, 483 aa, unidentified
MSVAAAWRAWEPDSESDLGVASNPRLCPEHVEQIASFTDAFRTAHRPRVAPTREVLVMELLYPHCAGLDVHKESVVACVRHRRDGGGGGGGGGGGGGGFADEVRTFATTTRGLLALGDWLAAEGVTVAAMESTGVYWKPVWNLLEDRVKLILVNAQHVRQVPGRKTDVKDSQWLAQLLQHGLLTASFVPERPQRELRDLTRQRAQLTGDLARVANRVQKVLEDANVKLGSVASDVLGASGRDMLRAVIGGQADPAAIAELARGRMRPKIPLLTEALAGRVNDHHRFMLKALLEQVEHLERQVESFDARIEQVMTPFERAAVERLDGVPGLNRRSAQNVLAEIGTDMTRFPSAQHLASWAGLCPGNHQSAGKRKGGRVTQGNRWLKRTLAQCALAAANKDGSFLQARFRRLAARRGRKRAALAVAHSQLTAIYEMLKDSTDYRDLGAAYVDQLQRERVKRQLVHRLESLGYAVSLGEPPDKAVA

SEQ ID NO: 165140 - protein, 361 aa, unidentified
MGDVKTGNTSTKIVGGVDTHKDLHVAAVVDEQDRILASESFATTRQGYKQMLTWMRSFGELTRVGIECTGTYGAGLLRYLEQAGITVLEVTAPDKSDRRKRGKDDTLDAGNAAHAAFAGIRTVTPKKRDGMVESLRVLKVCRKTAIQARRVALQLIQNIIVSAPDEVREPLRKLTRMQLIRTLAAWRPDLSSYRQVAPAYRIALKTLGRRYLELHDEIADLDVMIAGLVDELAPELVSRNAIGYETAAQLLLTAGDNSDRFRSESSFAALCGVSPVQASSGKVTRHRLNRGGDRAANSPLHIIAIGRIRTDARTQAYVSRRIAEGHSKREVIWCLKRYIAREVYDIIQRRNCIINQNAIST

SEQ ID NO: 165141 - protein, 347 aa, unidentified
MRDDRYYIGLDVHKRTISYCVKDAAGHVHQEGKIGSTRRELDAWIKTLPQPRTIAMEATIFTGWIYDHLLPHAEKVRVAHPLMLRAIAAAKKKNDRIDAGKIADCLRCDFLPECYMTSTAIRDRRRTLRYRNLVLKQMVQMKNRISGLLMETGVSYNKQRLHKLGYFTELMSGNEEVDESIRPLLKLSRETIVRSQRLDYALVSSLERDPLLGERLERLRTIPGVGPITALTWALEIGDVSRFQSVKQAISYCGLCSAERSSADKLVRMPISKQRNKHIQQTLVEAAKLAPRYSHELALVYERERQRGNKNRATLAVARKMVAYMLAVERRKQNFVLKGEFSGTAAA

SEQ ID NO: 165142 - protein, 412 aa, unidentified
MEVVYECCAGLDVHKKSITACVLWALPKGKKKQEKRRFATFTQDLLAMADWLRESGVSQVAMESTGVYWKPVWNILEGQVEILLVNAQHIKAVPGRKTDQKDSEWIADLLQHGLLKGSFVPPTPVRELRDLTRYRVSLAQECNRIANRVQKVLEDANIKLASVATDALGASGRAMLDAMIEGQTDSGELAEMSKGLLRNKRAELRLALEGRMTEHHRFLLKQLLRHLRFTEARMDDVEQEIERRMQPYQDDVKRLCSIPGVECVTAWGLLAEIGFNMDQFPSAAHLASWAGLCPGNFESAGKRLSGKTRKGSAALRRCLSQAGWAVSTKKNNYLTAFYRRVAARRGAKRAIIAVAHQLLVIAYYLLKRKEEYRELGPNHFDNINADRVRHSLVKRLERLGHVVTLQPAEQSA

SEQ ID NO: 165143 - protein, 351 aa, unidentified
MKTQITAIPKLYIGIDIHKRSWKVHCSTDLFSGKSFSMPPSPGQLLKYVSKHFSGYEVSVAYEAGCCGYSAHRAFEFYGWRSLVVNPADIHRKGKERYTKTDKIDAQLISRELKDGRLTSIVVPDVHREQFRSLFRRRNDLVKDFRRIKSYIKMQLLYYGIKEPLEFDNDHWSHKYRKWLDNMVFQYPTAKATLDGRMRFFRFIDKELREISNQLRAYCRKHLKKDYNLLRSIPGIGGIVACGILCELGDLRRFNSVKHLAGYVGLAPGVHQSGCNYRTLGITPRAHRLIRSYFVEAAWQAIRADPVMQAYYRKHQGKNVKSIIIKVARKLLSRTLAIIKTETPYTIGVIK

SEQ ID NO: 165144 - protein, 326 aa, unidentified
MTDSNHVILGIDISKAKFDVALMVAGKVKKSHLFENAQDGFETLSGWLLKQGITSVSACMEATGCYGDALATYLHDQGFVVSVVNPAQIKSFSGAQLSRAKTDKADAKLIAQYYQQMCPAPWSPPPMHVRELQALVQRLSALAQMERQEQNRMGTAPAVIRTSIATMLATIKAEIKTVEAMIRDHIDRHPDLKNQSELLESIPGIGKATIFRVLAFIGDVQRFDHAKALAAFVGVNPTVHQSGSSVRGKPHLSKKGNSVIRKALYMPAIVARRYYPVIKEFADRLKKAGKPNMLIIGAVMRKLLHIIYGVLKSGMPFDPAWSANHA

SEQ ID NO: 165145 - protein, 363 aa, unidentified
MEVAGRFVGIDLGKRTYEMCIVDRKGKISRTGGKTDFAGIDRLCEKLNGDDAVAIEACNLAFRIERAIRKSVGCKVCIMNAGKLAVIYMSTRKTDKEDSLKLAKLLKTHDEDELPIVTPPSDEEWERRKLLSEYRSLKCQRTKEINKLHAIFEHNGYTQFVRKDMCSEKNRANILPLLKGYEKEEAERLVERLNLLEKQIERLLQKINAEVENDGKIQKVMTVPGIGPITALAYVAYVGDVNRFDNAHQVSNFIGFVPKVDNSCTICRSGHTTKKGNPLLRSLLVQAAWSTVKSKNGGALRDKYKYMAESRCIGKGKSIVTIARKLGELLYLILKTDQEYKPQKFITPELKISKLAEDALECS

SEQ ID NO: 165146 - protein, 343 aa, unidentified
MDQYIGLDVSLKDTAISIREDGKRIWRGNCPSDPKVLAQLIRKRAPHAKRVVFETGPLSTWFFHALTSEGVPAICIEARHAQKILNETLNKTDANDADGLAQLAEAGFYKAVRVKSFDAMLARTLVAARNQLLSISTQLSNQIRGLMKTFGLIVPKGTGRVFDSNVRELLDENGGLARIISPLLEAWRDIRKRAADLGRQLLVAARKSQATQLLMTIPGVGAVTAVSYVAAIEDPDNFRTSRAVGAWLGLTTRRYQSGEIDYGGHISRKGDNRLRGLLYETATVILTRTSARNESSLRSWGLKLRERVGFKRAAVAVARKVAVIMHSMLKTGEVFNTSAGATV

SEQ ID NO: 165147 - protein, 401 aa, unidentified
MTAVRSRAWIGVDIGKTHHWVCAVDETGKKLLSLKVLNDEAQIIEVITSITDLADGRVWAIDILGTPSALLVALLANAGEQVRYASGRVVAAMSTAYTGEGKTDAKDAYVIAETARIRTDLAVIDADTDLVRALGVLTGHRADLVADRVRMINRLRDLLTSVFPALEREFDFASCKGALVLLSGYATPESIRRMGEARLSRWLRQRRVRGYADVAARAVAAAHSQHTVLAGQDVAASIVAELAGAVLAQHERLKLLDQQIQDVFAQHPQAEVIESIPGFGPVLGASLLVAAGDLAAFPTAGHLAAAAGLVPVPNDSGRRAGNLHKPRRYSRPLRHALYLSAQSSMMRAGPNRDYYLKKRDQGRTHSQAVIALARRRIDVLWALLRDNRTWTAAPPPRAQAA

SEQ ID NO: 165148 - protein, 344 aa, unidentified
MNLTRVGVDLAKHVFQVHGVDRHETVQVKRTFSRRQMLSYFAKQTPCLIGMEACASAHYWARELGQLGHTVKLIPPQFVKPYVKSQKNDANDAEAICEAVGRPTMRFVAVKSAAQQDVQALHRIRSELVRQRTAKANQIRGLLSEYGIVVPTGIGTLRRAIPEIQEDAGNGLSGLFRRVLGGLRQDLETFDVRVAELDAEIAHVASSDETAQRLQSIPGVGPMTATALVAAVGDARQFARGRDLAASLGLTPGQHSSGGKERLLGITKRGDSYLRTLLVHGARAVLKVAARKDDPRSRWVMSVAHRRHKNVAAVALANKMARIAWALLTRGGAYDSLHGMTATA

SEQ ID NO: 165149 - protein, 424 aa, unidentified
MKVTYQTCCGVDVHKSFLVATIVKTTGGIEPSYQKKRFSTFNNSILEFKQWLLDNHCHDVCMESTGKYWVPVFNLLEDKINVVIANPKWVKAVKGNKDDTKDSKWIGDLFRLGLVKGNYIPCKKVRILREYTRYRYKLVSCRSSEKNRYQNALTVCNVALDSIVSDIFGKSSTSIIDYLLEQSGTSINHEEIASKLLRSLKSKEDAVIESVEGYQMTDAQKYRMRLVRAHMDYITAEINDVDIMIENMISSNPDFENAVQFLCTIPGVKRDSAITIISETGTDMSQFSSSKRLCCWAGLTPGSNESAGKKKSVRITRAGVYLKPALVQCAHAAVKSDKSPYYKKKYESLVKRRGKKRAIIAIARMILTAIYQMLSTGEQWNPSDLYKIDMPVALVEKQKAKAIRQAKKLLQREGLLPPDEPLAS

SEQ ID NO: 165150 - protein, 370 aa, unidentified
MKKNNTCQQNPRQRTRVRPGSLTIGMDLGDKSSRYCVLDEQGEIVQEGSVGTTKKALGQKFGSLRRSRMAVEVGTHSPWVSRLLAKLGHEVIVANARQVKLISQSSRKDDRLDAQTLARLARVDPQLLRPIQHRSEEAQAHLMVIRVRAALVETRTSLVNTARGLAKSVGERLPKCDADQLGVERMEGLPAQLQQALRPLLEQIESVTEKIKESDGRIEQIAGTAYPETALLKQVRGVGTLIALTFVLTIDDRDRFQKSRDVGCYVGLRPKRSESGESQPQLRITKEGDVYLRKMLVQGAQYILGYRGPDTDLRRWGLGLASRGGKNAKKRAIVAVARKLGILLHRLWVTGEVYEPLRNRQARQGAGAAA

SEQ ID NO: 165151 - protein, 370 aa, unidentified
MNSIIYVGMDVHKASFTISCFSVTTQETFATVKISPDAKAIKKYLDGVSLSRSEECEFVCGYEAGCLGYTLYHQLTAMNIRCVIMAPTTILRNSKRIKTDRIDAENLARCLAYGGYKSVYIPTAQDEAVRDYLRMRDDHKLMLKKIKQQINAFCLKHNKIYPGNKSKWTQAHVKWLNVLEFDGYLQDAFNEYMITYRELADKVERLESQIEQLAELEEYRDKVKKLICIKGIKTHTALSLIVETGDFSRFQSAERYASYIGLVPGEHSSSEDQNRLGITKAGNRHMRMLLIEAAQCYSRGVPAKKSKDLKSRQKGASPEVIAYADKASIRLRRKYIRMELVNKKKANVAKTAVARELACFIWGMMTDNIA

SEQ ID NO: 165152 - protein, 459 aa, unidentified
MNRKRSKPKIDRKMPMVHPNAAAIDVGATMHMAAVRPDRTPEPVRSFGTFTTDLHRLVEWLKECGVETVVMESTSVYWIPIFELLDAHGFTVFLVNARDAKHVPGRKTDVSDAQWLQRLHSYGLLRASFRPKGQISELRAYMRQRERLLEYAASHIQHMQKALTEMNLQLHHVVTDITGATGLRIIRTILAGERDPKVLARLRDYRCHSSAETIEKALTGSYRAEHLFALEQALALYDAYHEKASACDARIEAVLKELSIGRGRCSGTELPSPRRSRTDQPNALAFDVRAALFALLGKDITKIDGLGPYLSLKLIAECGDDLSAWPSPKHFTSWLCLAPSNKISGGKVLSSRTRRSGSRAAALLRLAAVTVGRTDTALGAFYRRLSARIGKAKAVTATARKIAVLFYNAVRYGMEYVDPGASFYETRYRTRVVDNLHRRAKAFGFVLMPLEAPPSVVVS

SEQ ID NO: 165153 - protein, 407 aa, unidentified
MNRNGCTKVSAIGLDVHYKFSSVTMRDEAGKTVLRERLDHQDRQALRRRLSQWPKSVPAVLEASFGWGWLSDEMVAAGIDAQLSNCHKVEQMRKARGGVKTNKKDADLLSLLPGEADQWWRIWLVPPEVRDRREWMRHRADLVGTQTQVKSRIHAVFHRHGIFHEFSDLFGSKGRVFLGELCRDGRHAGGQLPSGALAALRGQVRLLDQVRMQLAQIAIRLRQELEHDELTQRLASITGFGRILSHVLKAEIGQIERFGGNHNRLAAYSLLGPRSRDTGEQDPAKTPLGRHLGHRGNRTLKWAFIEAAHGAVRRGGRFRAMFDRVTKGGTKDRNRGYIRVARELVKVVTAVWKNGTRYQEAPPARPGSTKPKPPIALSPRKQMEKFFGNTRSGTGQLCHPMVPVAQA

SEQ ID NO: 165154 - protein, 410 aa, unidentified
MIEAILERCAGIDVGKKFVVVCVMTGGAKDEPHTQIKKFGTIVSELQRLAGWLVAEGCTHAVMESTGSYWKPVFNLLEAHVRVVLANAADVQNRRGHKTDPNDSRWLAHLLRHGMIRPSFIPPLAIRELRDLTRRRRQLIGENSRERNRVQKVLEDANVKLGDVLSDVFCVSGRLMLAALLDGEMTAEQIADLAKKKAREKIPQITASVAGHRLSDHQRFLIRHALRHLEFLDQEVEALNQEIRRRMENPTLAEAFHLLQSIPGIKEESAASILAEIGADMGQFPTAAQLSSWAGLCPANHQSAGVKKSVRRNRGNVWLKTTLTQSAWAATNRKGSRLQSRYHALKARCGNKRAIVALGHTLLKTVHAVLAAKMPYREAPPITRDDRNVERVQHHIRCLKKLGYNTLAVK

SEQ ID NO: 165155 - protein, 402 aa, unidentified
MNAVGIDVSKGKSMVAIMRPFGEIVSAPFEIKHTASDINSLVELINSVEGESRIVMEHTGRYYEALAHQLSEANLFVSAINPKLIKDFDNDSLRKVKSDKADAIKIARYALDKWQNLKQYNVMDELRNQLKTMNRQFGFYMKHKTAMKNNLIGILDQTYPGVNTYFDSPARSDGSQKWVDFASTYWHVDCVRKMSLNSFIDHYQNWCKRKKYNFSQSKAEEIYGKAKELVPVLPKDDITKLIIKQAVNQLNSASTTVESLRTLMNETASKLPEYPIVMAMKGVGASLGPQLMAEIGDVSRFTHKGAITAFAGVDPGVNESGSYEQKSVPTSKRGSSDLRKTLFQVMDVLIKTHPQDDPVYQFLDKKRAQGKPYYVYMTAGANKFLRIYYGRVKEYLSSLPES

SEQ ID NO: 165156 - protein, 376 aa, unidentified
MERGSLMLNTTTFVGLDVHARSIKAVALDAMTGEVRSATFAYDAAAVAEWVRSLDPAAKCVYESGVTGFDLQKRLAALGVDRVVGAVSKMIKPSADRKRKNDRNDAEFLARMLSVGNVVEVWVPDDECEAARDLTRALDDAREDLRRCKQRLSKFLLRHGLVFSETNAKGQRKKNWTAAHWAWIRSISFPDKADDEVLAYYIDAARQAMEDKARLERLVEAEASKPRWKKRVDSVRCLKGIDVTSAADLVFEAGEFSRFKNARSFAAWIGLTPSEHSSGESVRQGGITKAGNKHLRRVLVESAWHYLGCSPHSKDLAKGQAPDPGARRHAAKGVRRLVGRRAAMLERGVHKNKANVATARELACWCWAVGRMVENG

SEQ ID NO: 165157 - protein, 386 aa, unidentified
MPQPKNELRKSLVALDQHKTVIAVVELSLRNWLVGGIVPGIHRDPLKKLAADEHALLRLLHHWRDEAVKTGHSITRIVVTYEAGRDGFWLARWLRKHGIEAHVIHPTSVPVSREHRRAKSDRLDIGLLKRSSLGWLRGEEKHCTMVSIPTLEEEDAKRPNREREHLVGRCTSLTNRLKATLVRLGIRGVNPKLPKAAERLATLRTPEGEPIPPNTLAELQRDMAQLRFIKAQIKQIEGARREQLEQAPQKCSNAKVMELKSIRGIGLETADMLVQEVFSREWRDHRAVARYAGLTGSPDESGARRREKGLAKAGNARVRRGMIQLAWRFLAHQKNSTLAQWFEARVVAGKKRKTMIVALARKLLIALWRFVAMGEIPPGLVLRTAS

SEQ ID NO: 165158 - protein, 319 aa, unidentified
MGKSKVEYEQVIDRGCGLDVHRDTVVATVMGKGIKTETRTFGTTTSSLNELGEWLQSLKVTDGAMESTGIYWKPVLHVLRAYPLNLIVVNARHIKNVPGRKTDKADSQWICKLLISGLLKGSFIPPENIQELRDLHRYKKKLIGIVASEKNRIIRVLEDANIKLSSVVSDTSGVTASYLIKGLIEGRKDLEKLISECYHRKLQANPQQIKEAINGRLTAHHGFILKSMQKHITSVEEQITEIDAEIEKYIKDFEKEIELLQTIPGVGKEGAIGIVSEIGVDMDVFPDEHHLASHSGMCPGNNESAGKKKVQKHDMEIKI

SEQ ID NO: 165159 - protein, 371 aa, unidentified
MRKVALDLGARKTAYCEVQDSQVIQRATVTSVETLESLLGPQHPPAEVAIEACREAWHVHDLLSSWGNRVVLVDTTRSRQLGIGQHGRKTDKIDAEVLALALERGGIPVAHVLSPHRRELRRWLNVRRALVESRAQSVTTSRGLAREQGAPLPKCAIGNFVRHARKLAPQPLEVIAPLLKQLEAVNAELEVVDAKLAELCETEPVVKVLMTAPGVGPTIAASFVSVIDDAKRFHSPHQVESYLGLVPSEDSSGAKRRLGAISKKGNSYLRSLLVQGAWSILRKADRKDPLRLWADAVAERRGKKIAVIALARRLSGVLWAMWRDSAPYNAALLASASSRGTRKSAQDLEVQAAKLSATTRKRVRTEATLQT

SEQ ID NO: 165160 - protein, 359 aa, unidentified
MEDRSAATARVVGGVDTHKDLHVSAVVDESDRVLETRSFAATRQGYRQMLQWMRSFGVLLRVGVESTGTYGAGLLRHLQAAGVEVLEVTAPDKQDRRRRGKDDDIDAQNAAHAAFAGKRTVTPKTRDGMIESLRVLKACRKTAVAARRVALQMIHNTIVCAPDDLRDALRKMTRMQLVRTLAAWRPDLSDYRSVASACRISLKSLGRRYLELHDEVADLDTMIGAIVKELAPALVARNSIGTESAAQLLLTAGDNPERLRSEAGFAALCGASPVPASSGKVTRHRLNRGGDRAANSALHIIAIGRLRTDPRSQAYVARRISEGHSKLEALRCLKRYIAREVYALIRRRAIEIAQTRIAT

SEQ ID NO: 165161 - protein, 370 aa, unidentified
MKVLHERVAGIDVHKEMIKVAIRSPGEKPWTRKTEILEYRTFYGVLQEMARELRRRGVTHVVMEASGVYTEPVYYALAERDFTEVAVINPAHAKALKGHKTDAKDCTRLAELFECGLLHGSYIPAPELKEVRDLTRYRMKTVQARTSEIQRLAKALESAGIKLGSVASSITGVSATAMIEALIDGERRGGVLADLAQGRMREAGKLADLSMALSGRFTGHHALLCRLHRDRIKMFEDAVAGLEDRIAGKAAPWRRELDLLMTVPGFGDAVTQAWLGEIGPAPHLHFSSHDKLACWVSLCPGNNISARKRKYGRTGDAGTYIKPMLVQAAWSAIRVRGRLQARYNRLVRRFGGDKNPGAKKRRSSRSRTPC

SEQ ID NO: 165162 - protein, 398 aa, unidentified
MTESSDYESVQVFIGVDVGKDTHHAVAINRSGKRLFDKALPNDENKLRSLISDLKQHGQILLVVDQPATIGALPVAVARSEGVLVGYLPGLAMRRIADLHAGEAKTDARDAAIIAEAARTLPHALRTLKLADEQIAELSMLCGFDDDLAAQTTQASNRIRGLLTQIHPALERVLGPRLDHPAVLDLLQRYPSPEKLASLGEKKLAAQLCKLAPRLGKRLAADIAQALAEQTVVVPGTNAAAVVLPRLTLQLITLRKQRDEVALAVEQRVLAHPLYPVLTSMPGVGVRTAARLLTEVACRAFASVAHLAAYAGLAPVTRRSGSSIRGEHPSRRGNKALKRALFLSAFAALRDPLSRAYYTRKMSQGKRHNQALIALARRRCDVLFAMMHDETFYTPQAS

SEQ ID NO: 165163 - protein, 327 aa, unidentified
MQDIRLALDIAKEVFQAVLVKDRSEVLWKKRIRRESLLGQIARLAPCLIVMEACAGSNYWGREFQKLGHQVMLLPAHHVTAYRQGQKNDLSDAMAIVEASYRAQIQAVPVKSENQQLLQSVYMIRRRLIGQRTALSNQIRGLLGEFGVLLPKGLRAVRKELPQRLECFEPALMWMMREQYEELCALDERSKRISRQLESLCGAHSVSQRLMQLPGIGPVTASLLIAHCTAQAYKNGRSYSALLGLVPRQHSSGERVRLFGVTRTGNQELRMLLIHGGRAVVRRMEHNDDAISVFARGVTQRRGKNKAAVAVANKLARQAWAELRRAA

SEQ ID NO: 165164 - protein, 356 aa, unidentified
MHHKVNNLDFSNQSIYVGIDVHLKQYKVTILGQYCSFKTFSQPADSEVLVKHLFSNFPKASIHCAYEAGFSGFGLFYELVAQGIDCIVVNPADIPTKDYEKRQKTDALDSKKIANCLRSGSLESIYVPSWETIGIRNLVRTRNCFIKKRTAVKNKIKHFLYFNNINIPIEYSGPKWGKDFIAWLQQIEFQTEPSTFCLEMYLDLLTNLEIQIKKCTEKINHLAKQECIIKKLSLLKSIPGIGTLASLTLLAEIDEIKRFKTLDKLSSYVGLVPQMNSSGESERIGGLTIRGNKKLKSILIESSWTAIRKDPAMLLAFNTLCGRMQKNKAIIRIAKKLLSRIRYVLLTNQPYNMAIN

SEQ ID NO: 165165 - protein, 391 aa, unidentified
MIYVGIDVAKDKHDCFIINSDGEVLFKAFSIANNRNGFNDLYQKIESVMEDVTKVKVGLEATGHYSYNLLGYLIDKGLPTYVINPLHTNLYRKSLSLRQTKTDKVDARTIASMLMSDVNLKSYSDTSYHNEELKSLTRYRFDKVKQRAKLKSSVSRLVCILFPELEKLVPTLHMASVYTMLSEFPDAKQVANAHLTRLTNLLSESSKGRYGKETAITFRNAARTSIGSNMPAKSLELKHTIKLIQELSSEIDEIENEIKLIMDEINSPILSIPGINYRMGSMIIAEIGDFNRFDSPDKILAYAGFSPSTYQSGQLDGAYSHMEKRGSRYLRYALYNAAKYVCNWDPTFAEYLAKKRAEGKHYNVAISHAVKKLIRVIYHLEKTNQQYIKAV

SEQ ID NO: 165166 - protein, 410 aa, unidentified
MKTPTSTINLLDIFVGVDIGKGSHCAAAINARGEVLLKPVKVLASAEGFAAFEERLRQLGDKSALLIGLEASGHYWMSLWRFLLERDWTVQVFNPVLSSKSARTHLRGRKTDADDALFIARTVRDGDFIPLQPGQEETQQLKLLCRQRRFITHELANAKRRLTGLIDLSFPEFSKHFDNIHSKAAHAVLKAAPSAAAIAGLSLRRLQSLLATASRGRFGAVKAKALKESATESLAALRPDPALELLIQSMIAQLEFFDQQLAQLDLHIQRLFCSMAHPIKSIPGIGSITGPLIVAELGDLRRFAGRRPLHALLAYAGMDPQVRQSGQWSGKTKMSKRGSVALRTALYQAASMARLHEPRLAEIYHHHRNELHKHHSVAISHVARKLLAIIYAVCARGQAFDPTKICPQPT

SEQ ID NO: 165167 - protein, 375 aa, unidentified
MNEIMRIGMDTSKSVFQLHGVDAAERPVLRKKLRRSQVLEFFKKLPPTRVGMEACGAAHHWAREIGALGHEAVLLPAQLVKPYIPRNKNDAADADGICEAMSRPRMRSVPVKTAEQQAALMLVGVRDQLVARRTQLSNTIRGYAAEFGLVAAKGLDKIEPLLARIAAADGLPELAKEMFTTLGADYAELGMRLSRLDERLQAWQRQDETSRRLMEVPGVGPIAAALLVMKVPNPRAFRSGRDFAAWLGLTPKDHSTAGKQRLGVITRAGDEALRRTLVVGATAVIQQMRRGRGRASPWLTGLIARKPPKLAAVALANKTARIVWKLMVSGERYDHGRAARARAERSAALTEGFALRSALAATALRGDAAATVREP

SEQ ID NO: 165168 - protein, 340 aa, unidentified
MGRNIGVDLHKRGMTVCYMEAEGKYEIKEYGTDLFGYGSFKDELRKDDEVGVESTGNTGYFVTKVSGSVKKVRVINPWQFKIISSSVKKTDEHDAVTISKYMSKGLLPEVRMRSKEERELASLIGTRDNLVRTRTGLKNKIHNILNANGVATERESMSSEKGLDRILGMGFEGLAGFELRILVEQIKNFNKAIKEIDEEIKKKGRGLKGHENITSIDGIGDINGTIMLNAIGDVKDFENEKKLEAYFGIVPRVRDTGESENHGRITKMGNKLARTALVQSTLIAIRKSPYLKSYYSRLKAKKGSGKAIIATSRKLLGIIYRTLKNDWVFENFSEYKLQTN

SEQ ID NO: 165169 - protein, 331 aa, unidentified
MMTKVAIGIDIAKDKLDVAIVEMAHGSLLFQTSYANTAAGHQRLIVKARNYQESHLVMEATGTYHLALAKALFEAGCKQSVINPLQLKRFAQMKMRRLKTDRSDAQLLAAYGREQHPEAHYMQPVAEQQLKQINTQIRHLIKVRTSIKNLAHANGYLPESAPICLEVDASLLAYLDHAIERLEKAQQALIQATYKEVQVLIESVVGVGRRTSMMLIAYLGTFERFRVYKQLVAYVGLNPVPMESGTSLRRRMHISKQGQAELRTLFYLCALSAKNHNKVCRALYERQLAKGKPKKVALIAVANKLVKQVFTIVKSGVAFDNDYLEKMSAVS

SEQ ID NO: 165170 - protein, 328 aa, unidentified
MYSIGLDISKSTVDIFIPINQSNIKIKNSMQAIKSFYSKLQRLYKKDIDKLVFVFEPTGTYSNLLKKFCSERNIKCFIINPKKSINFAKAIGQRNKSDIQDSVMLSKMLVTALADEIKVPIINIVVEELHELISYYKFLLKQRTQYKNHLEAISTRNHSSVVTKNIIKEIKLLNIKIDNIIKEMKELIKSDKDLWEAFNNILTIKGVGDILAIVLLHHFIKYPYTNQKEIISLAGLDPISKSSGTSIQSKAKISKAGSKLCRSTLFMAVMVAVRFNDELKIYYERLKQRGKHTTVTQIAVMRKIIIIAHSLYKNNEKYDEKKCIKFVA

SEQ ID NO: 165171 - protein, 355 aa, unidentified
MKSQELFIGVDVCKDRLDIANDSNSEVWSSANDDLGVSLLVEKFTALKPTLIVMEATGGLETLLYSALVTAGLPAVVINPRQVRDFAKALGKLAKTDAIDAWVLARFGALMRPEVRPVKDEQTRELAALVTRRRQLLGIRTAEKTRLRQAAKWTRKDIKSLIKVLDKRLAKLEKEIKDHVKNTPGWKEKDEIITSVPGAGPNLSSYLLANLPELGKLNRKEIAMLVGVAPLNRDSGKFRGGRIIWGGRSQVRSALFMATLSASIHNPHIKGFYQRLIEKGKKPKVALTACMRKMLTILNTMVKNNTTWNISYPLTLDINHGCSGAQSLWKNIMRARMLWSNTTISILCAPLRTLR

SEQ ID NO: 165172 - protein, 454 aa, unidentified
MAKRREKRESRAVVLEPDAAGVDIGAEEIYVAVPPDRDEESVRMFSTFTCDLHALADWLVQCRVRTVAMESTGVYWIPLFQILEARGLEVYLVTARYLKSVPGRKSDVSDCQWIQYLHSVGLLRASFRPPMDICAVRSLWRHRESLLQMASEHILHMQKSLSQMNLQIHHVLSDITGASGQAILDAILAGERDPVQLAQLCNCRVKSQREKVAKALEGDYRPEHVFTLKQSLDGFRYYQKLIAELDREIQRLMQTLPSAVEAGQEIPRRTKHSAFQRQGNDPGFDLRGQLYRIAGVDLTDIPGVSAVTAQVILTEVGPDLRRFRNASAFASWLGLCPENRVSGGKVLSCKTRKVKSRAALALRLGANSLCRAKGYFGEFFRRMRSKLGTAQAITATAHKIARVRNHVLLTKEPYAETVFHQSEEHARRRAEMKLRKHAALLGFQVIPLSATSAT

SEQ ID NO: 165173 - protein, 333 aa, unidentified
MQNFYFIGIDVSKKKLDICVMSNSKVLKEEQVSNHPQAIATVIAGIKEELSMSNDSLIICAEHTGQYTYPLICACKSVGSKLWLENASQIKYCSGVTRGKNDKVDARRIAVYAMRFFDKAKPYQRPTEELMRLKQLEAERSLYLTDLAKYKAQLSDQEGFMEDKIFKRKAKRLKEMIKSLEKTLKEIAQEMADVIYSSEELSRQMRLLKSVEGVGPVVAMNMIIATEAFTRFDNPRQFNCYVGVAPFAYTSGSSQHSRNRVSQRAVKYIKCLLHMAAVAIAHKKTGDLKTYFDRKVAEGKNKMTVLNAVRAKLVARMFAVIRNNRVYQPILSV

SEQ ID NO: 165174 - protein, 482 aa, unidentified
MKKRNIFQNRSQQLLRLFEKAGNRLKMMCVPIDYAKKDHMVMFCNGYGDILRKPFSVKNTLEGVKYLIDQVMRSCRQRHIKKEYVFFGGEDVNSYAENFANAIRAKGFLVANVNAHDAKKQRETLQASTDRIDLMGIATMLLNLRAKCSPAQEGIYRNLRTLVRHRKKLVVMKTEVKNRVHTLVDRLFPGFLNEKNSGINPFSKSSLVLMEDRFSAQQIRRRQQRTLIKILKRCATPNAESLAAKLHSYAGQVITTPEEYAATLQLSLQHHIQHYRCLQENIDQLLTEIALVLAQTQAAFLTSIKGVGIVLAAGVSSEIGNPFEQKPLNNLTSYSGIIPQVKQTGGIEGHTHTGRVSKRSNHLLKDYVVQSAFHIGIRGPQPLLQDYKRREAAGQHADFGIGRRFLRMAMCLMRSSQVYLPPKLRSPKTQMQERAGYYLTTWPLLRDKWKKAHAHQVAFAKDQPLGQWRQMVQELYDIKLKL

SEQ ID NO: 165175 - protein, 322 aa, unidentified
MIKPSLGIDVSKLDLSLSLLIDNKHYQTKIDNNQHGFKSFEKWIKKHNIQHVKACMEATGSYGRSFAHYLYNNQHDVHIVNPLCINAFAKSKLSRHKTDKVDSKLIAEFAQQNDLPLYSPREKNLQVLQDLYRCLQNLKHQAKQVQNYLENKKHLANSVCKAYARLAKSISKETIAVEAEINTLIDKTEDIKNKVTHMQTIPGIGKLTAVAILAEAPCLDNFTNARELAAYAGLTPKHKTSGTSVRGRSTISKMGSSTLRKALYFPAIVAKKHNPIFVKLNQKLASKGKPTKLILIAIMRKLLHIIFGVVKHNKPFDPNFCS

SEQ ID NO: 165176 - protein, 361 aa, unidentified
MKRALKDNQEAFAGQEFYIGIDVHQKQWTISIQRNQLPLAKPLTIDPSARSLSSYLKRQYPGGKYHAVYEAGYSGFWPARDLLTHEIDTIVVNPADIPTMHKERSTKTDSVDSRKLARSLENKELRAIYIPERKAEEYRLLNRYRSQLVRDETRIKNRIKAILAEFNYRVPVDLEGNRWSGAYLRWLQTITFETPYAQIAYNERLEHLAESRKRLAKVLRELKLMATQEPAIASLVKLLQTVPGVGFLTAILLVVELIDMHRFKRFDNLVSYIGLAPSIHQSDEHSYSRGLTKRQHKELRFRMLESAWIAVRKDPALTMKYGQLCKRMNKNKAIIRIAKMLLSRIRTVWITQTPYVYGVIE

SEQ ID NO: 165177 - protein, 294 aa, unidentified
MTVYIGVDLHARQQTLAYVDTRDGEIKCRELQHQKDDVRSCYQQFSGEVIVGVEASGYTSWFEEMMEDLGHTLLVGDAAEIRRLARRCQKNDRRDAELILDLLLHDEFPTLYRYSQQTRAVLRQLRFRHKLVRMRTMILNSLHALSISAGLSLQAKLATAQGRTRLQQLRLSSVLTTQRDEWLELCAELSHRILAVERWLKRQAKDDARVQRVQTHAGVGLLTSLCLVHTLGAVTRFASTRKVPAYVGSDVTAHSSAERKVYGGISTAGSRLLRYLLVKAGQTAVKGDEQLRDF

SEQ ID NO: 165178 - protein, 344 aa, unidentified
MDYFAGLDVSVKDTSICIVDDTGKIVREVKVASEPDALLQVLRNPAYRFRRIGLEAGPLSQWLFSALAEAGLPVICVETRHMRAVLKAQINKTDRNDARGIAQMMRAGLYRPVHVKTLRSQKLRMLLVHRKLLQSKSIAIENDLRGTLRNFGLKVGVAGTAKFEARIKELVENLPDLAALVEPLLVVRRVLREQIAVLHRRLLAIVRNDEVCRRLMTTPGVGPVVALTYRATIDVPARFRNSRAVGAVMGLTPCKYQSGQSDRTGAISKCGDEMLRVMLYEAAQILLMRSTKWSWLKAWAMQVARRRGIKKAIVALARRLAVIMHRIWVDGTEFRWTKQEAAAA

SEQ ID NO: 165179 - protein, 491 aa, unidentified
MSQHRLVGIDLGIASAHTVRVLCEDGSEVCRRRCWPRLDSLLEVEAAALAGAPPDLRLEVVIEPTGPAWLPIAVFFTRRGHTVYRVSSAKAADLRRFLSRHAKSNGIDAETLARLPLVDPGGLRPLRLPEGDAASLDRQVRATDRLTRPAAEHKRRLKDLVRQLLPMTPLPGELGRADLAVLGRTGAHPRRLLAMGRARLTRLIVKASSGHLGEERAQAWLDAAHFALELYGDHPALAFDDRAAEVVTEVRLPQATEAELPAHESAREQAYLQVDPDQLARSLPGVAAVGGPALAALVGDARRFPGGASFRSFTGLAPRASETGETDRKGQPMSKAGPRLLRTTLLRAADHARHLDPQLARLYSVQVVERGACHLKALCVVAAHLGERAWAVLARGTPYEFRDVDGTLVTPPEAKALAAHGKVPDDVRQRRRSRKSRKHGGKAPHQVHQGHATRARGAQTRRPSPEPILTSDLIPIKQVLIGLQERINVPF

SEQ ID NO: 165180 - protein, 345 aa, unidentified
MNATTVAVDLAKNVFELAVADSHWKVIERSRLTRSQFERWFQNRHAGLVVMEACGSAHYWGRWLRARGIEVRLLPAQYVRAYVKRNKTDAADAAALLEAVRASDIKPVAVKSVEQLALQGLHRTRSAWMAGRTSRINMLRGFCREFGLEVPVGAVRGLAQIARFIADEHSGLPTILRTPMRLVLEEIRLMEARIESLECELATLARHSPACHALASIPGIGLLTSTAMVAAVADPRSFDSGRRYASFFGLTPREFSSGSSRYLGRISKRGNRYIRMLLTHGARSVLRAATVARRMGREVDRLRAWALAVQDRTNHNKATCALANKLARIAWAVWVKHERYQSAKA

SEQ ID NO: 165181 - protein, 317 aa, unidentified
MEQNSIPKPPIKGRVVGFDCHPDTFTAALVQGKTPAEAVVQKVFTKVPLSQMISWAKKHLSPDDMIVMEASGNSAEVVRRFRANHFQAEALESCHLGKLKEAHANNDRISAVRIAKAFLAGTAKIVWIPDAKTQERRDVMHAHRKAVKRHTQMNNRLDSYLSDNGVRLEASLKALEPQIAFAQIRQAKEWSTSQWLIIDSFMAELQAAGHVRQKWEQAMAMEVISDPVLLSLARLTGIRAVTAYSIGAVIGDIARFKRPKSLVNYLGLHPCFDDSGNEQWSGGVGGGHGRKDLRSLLIESAQSILNTASPLARWAGA

SEQ ID NO: 165182 - protein, 409 aa, unidentified
MQVGFYVGLDWGCERHALCVTDGSGKVVKRCFVQNDATALQVLADVLGDTPATQVHVGVETRRLAVVEALLARGFRVFTINPKQSNRFRERYTAAGAKDDHRDAWVLATTVRTDLSCFHAVVAESDAQVHLRAVTRSREVVAGSFRRASNRLREVILLAMPVLLGLCEGADEPWFWDLGVNALRSDLSNVLDDEAIAKVLKDNRIRKLKVADIREVLDRPHLQAANGLRKTAAWQAELLIAELRLLHAQEKLIAAEIGKALADLPKADDGLSDADIVMSMPGFGERVAALFLVEAHDALAERNLKQLRALAGVAPVTEASGKRQQSKDPRVVMRRAVSSRLRNAMFMAAFNSRNDPRFGSLYASAKARGLTHGCALRTVGNRQLTVLVAMLRHRTTYATPTNLEPSSAS

SEQ ID NO: 165183 - protein, 357 aa, unidentified
MVFVGVDVHMSYLEIAEIDKDGKLESRRRIGNTLEAIDAFVESLDSDAKVAMESCSYFYPLYSRLEEAGIEAKVAHPLKVKLIAESRIKSDKIDAVVLAQLYRMNYLPTSYVPPKEIRQVRALLRHRTALVRQRTQIKNRIHHLLEKNGVKTKGLGCSDIFGKGGLTRIHRVDLPTIERSILNTDLGLLEYFTKTIDQLGSELARIASENLQARLLMTIPGIDYYAALLLLMEIGDINRFSDPKKLCCYSGLVPGLHQSGQVARYGHITKQGNKWIRYILVEAVGHTIRHDPDSEIHRMYMRIKARKGHSVAKVACARKLLKVMWFMLTRNEPYRYSDPQLIKRKERRLERKAGKCY

SEQ ID NO: 165184 - protein, 337 aa, unidentified
MEYVVGIDVSKDEIHVCLKESLGKGKSITKSSCKLKNTPEGFKDLLQKYSKYSQSILFVMEATGSYYEDLAYYLYDLGMSVVVVLPNKIKHFAKSLNLKSKTDKIDASLIADYALSRELVCWKPMNKIYRQLRDMSRELLSIKKDMVRAKCQLHAMIHSHEKNNCVMSLKQKQIDFYEESISFLEENIKKLVETDQEFKERVDKLTTIKGVRLITAVSILCETNGFELFSNARQVTSYAGLDVALKESGTFKGKANISKRGNARIRSILYMPALSASFHNSKLRPVYERIAERNPTTKRKGIVAIMRKLLILMYILWKKNETFDPNHQWTSCKETKN

SEQ ID NO: 165185 - protein, 348 aa, unidentified
MKYYIGLDAHSTTSTFAVVDENGQCVLRETVKTSEQSLVRVINKINGERHMTFEESSISQWLYLQLKDKVDRLLICNPSYVAKKQGAKTDFRDALHLAQELRTNHLQAVFHDTSHWMEIRTTVSGYLDIVEEIVRFKNRLKAVFRAEAIQTDENSFYKNQERVKELKNPSAKFVAENLFRQVEYLEKEKEKYREVFERNRKKYRPIRNLMTIPGISIIRANIIAAIVCQPARFKNKHKFWGYCMLVRHIQESGGKIYGNKRFFGRRELRNVFIGAAENVIRLDGELRDRYDALRAKGATHQDAKLNLARQIASIALCLLKNNDKYNENYLEYQKERKKLRTEFFEQTV

SEQ ID NO: 165186 - protein, 368 aa, unidentified
MTKTVYIGMDVHSTNYTLSSYTCEADNCFSTVKLGPNVKNILNYISRIKKDHGDDIEIVTGYEAGCLGYTLYKSLEKEGIKCIIIAPTTLPKQKAGEIKTDKRDAQKISRALGTGTYKSVYVPDQEDDDVKQYIRMRDDHKLTLKKTKQQINAFCLRNGYTFTDGKSKWTKKHLKWLRSIETTAMQREILDEYLITFDYYTLRIKQMDEKIEEISRQERYKENVDKLCCFAGMSTHKALCHIVETGDFSRFAKAPSYSAYLGTVPGEDSSSTSVNRLPITKAGNSHLRLLDIEAAHAIGRTSKQKSRVLLERQRGCSPEVVAYADKANARMRKMYREISERKNKNVAAAAVARELACFIWGMMTDHIS

SEQ ID NO: 165187 - protein, 405 aa, unidentified
MAAVMIGVDPHKGSHTAVAIGADEVPVGLVRVRACAAQAERLLTWAKSWPERIWAVEGAAGLGHLLAQQLVAAGERVLDVQPKLAARVRLLATGAVNKNDPGDARSVAVAALRSAACLPVRPDDHAAVLKIWAKRHRDLSRARTQVACWPHAVLCELVPGGLSKEICAAQAAAILDQAEPGGAVRQARLELAAEFTADLRRIDVQLRETRKKLAVAVRASGSTVTEVFGVGPFIAATMIGDVRDVSRFASRDRFAACDGTAPIEVSSGNRKVHRLSLRGNRRLNHAIHMAAITQIRYRHSDGRACYDKKIAEGKTPKEALRALKRQISDAIYQHLKADAARAAAAGAQGPGGQPGNDSVASAASSHPERQLFGQATPGPVTTLRHPADQQERASSHARKKTARTT

SEQ ID NO: 165188 - protein, 338 aa, unidentified
MEQEVATVGLDLAKNVFQVHAIAADGAVLIRRKLRRTEVIRFFTELPPCLVGMEACASAHHCARELIAIGHEVRLMPPAYVKRYVKRGKTDAADAVAICEAVTRPTMRFVAVKSVEQQAVLMLHKSRDLMVRQRTMLINALRGHLAEYGIVTSLGAGGVVASLKALHEEQDRFPAHARSALHGIAAQLRALTSEIDRLEAQILDWHRNDETSRRLGTIPGIGPITASAIAAAVPDPSLFRSGRQFAAWLGLTPRANSSGGKERLGGITKQGDGYLRRLLVVGSTAVMRMTRKNPARQPWMAGLLERKPTKIATVALANKTARIAWAVMTRKEVYAAAA

SEQ ID NO: 165189 - protein, 364 aa, unidentified
MKQLLYAGIDWASRTHAVGVVDDHGGIRARFEVANTGKGFGGLIRRLTKLQVAGVAIERPDGPLVEAMLDAGLRVVVITPRQVKALRSRYRAAGAKSDAADALLLADVLRTDGHRLAPLCPDSDATIVLRALSRTRKDLQKARVALCNQLTAQLERCFPGAVGLFADLHSATAIAFLGRYPTSQAAADLTPVTLAAFLRRIHYCGRTPVAVLLERIQTAPAAAISASQATGRAVCVTALLDAIQACHSRERELEAEIIERLEVHADAAVFTSLPKAGHGIRAAALLSEIGDVRTRFPDEEALAALAGVAPVTRASGKTRSVGFRWACDKKLRNAVIDFADDSRHASPWAAKVYTDALARTRRHP

SEQ ID NO: 165190 - protein, 403 aa, unidentified
MKHVIAFAISMGKSYMVIYNAQKQCVFKSEIRHSKPEFKKLQEKIHELTDKTGELPKIVSEATGIYSRQLERFIQDNQYTYCLLNPLEAKLQCDSLRIYKTDRSDAHRLALTHFTATRRVFTGTDNLFYQLKSLSRLYSELDSELSIIRGRMHKVIQLTFPELERMFTSKSDLFLNFVQLFLHPDCILGLSKTIIKNRIRANTNKKISNITAKKKAIQILEIAKTSYPAVSQNDVLCDQLKLYARRYQELLHQKECCINKMIYIAEQRAEYDIILSLPGIGPNTAVRLMAEIGDITRFNNNKQLNAFAGIDIRRFQSGKTFFKDKINKRGNKHLRKLLFLIIQNMIKQRRHGQNHIVEYYDKTKTQPYNKCHKVASIACVNNFLKLLFHFITHDIHYDYRLTA

SEQ ID NO: 165191 - protein, 411 aa, unidentified
MEAAVITAVGIDVSKSKSTVAVRRPGGEIVLRPFDVRHTNSDLKKLASTLKKLGGDIRIVMEHTSTYWRPIALTLKEAVFFVSIVNAMLIHDFSDNTIRKLKTDRADALKIANYALTFLDTLPPFNNEEETRLLLKMQSRANERITATATALRNGLIALADQIFPGVNIAFDPNTKNANGHEKWVDFFLRYWHKDCVCQYSMEAFTESYRGWCKRKNYKFRTDTAHQIYLLAQEGVATLPKCESTKMLITQACKSLNAVCEAKQSTQLEMQRLAAMLPEYEVVMQMEGAGPITGPALMAEIGDVRRFKNKKALVAFAGIDAPPFQSGAFESKSRHVSKRGSPHLRRTIFIVSNIILTRSNPENAVYCFMDKKRSEGKHYYVYTVAGSAKFLRVYYARVTEFLRSQPSPGAC

SEQ ID NO: 165192 - protein, 353 aa, unidentified
MDRTTYGLDIAKNVMQLHWVDAQTGEIGRRKLARGRLSAYFAQLQPVRIVMEACGSAHHWARVLGALGHEVELLPAAQVRPFVRSNKDDAADARAIWLAAQQGDIRRVPQKSVEQQAMLALHRTRSHWVSVRTATVNSLRGLLYEFGVVVRGGRKAGLKALVEQRALIEAQIPATMRALVDGQLQMLASIGQRIDQLEREIAALQRQLPAARELDRVPGIGVLGSTALAATLGDGKAWRSGREFSACIGLVPAHAGTGGRVRVGHLSKRGDPYLRTLLIHGARAVIEHASDQPQWLRQLLGRRPMNVAVVALANKMARTAWAIVAHGRAYQRDWQGVKPSTRPGSAAAQAAAA

SEQ ID NO: 165193 - protein, 452 aa, unidentified
MCLEDRPILEANAAGIDIGAREIFVAVPPDRDEHPVRKFTTFTEDLEKMAQWLVSCGITTVAMESTGVYWIPLYDVVEQHGVKACLVDARGMKNVPGRRTDWHECQWLQFLHSVGLLRAAFRPEGDVCAVRSVMRHRTELVEMTSQHIQHMHKALTQMNVQIHHVISDLTGVTGLAIVDAIIGGERNPDVLAKLRDPHIKASEETIRKSLVGNWRGEHLFTLQQSRQSYQHYQEQITTCDEEIEKMVLAFVARVDPAEKPLPPDRKRKQRGRKKKNVNPKTGFDLRTESYKLFGVDLTQIPGLMAMVLMLFSEVGRDMSRWPTAAHFVSWLALCPDNDISGGRVLWRGMRRVHNRAGDLFRMAAYALHHDQTPLGDYLRRMKSKLGPAGATTATAHKIAIIFYTMVKKQVEYDATLWAERDAQREKRFDAKLKRQAQQRGYKLVPIEETSAA

SEQ ID NO: 165194 - protein, 441 aa, unidentified
MSHGRALSRGDRRRNERLARLRSVVRRDFAVVAVDLASAKQAAVVTDHDSMVLGRRMFTGNTWVIDDILDWAEPIAAKAGYAGVVVGCEPTGHRWKPLLDRSRARGLELVCVNPMLVHRGREEEDFTRDRSDFKDATIIAKRVAELRCYVPYVMEGHWCRLRHLGARRADQLVAVGSARQRLRDLLECAWPAVLSAAADPLDALTWRAAMAVSTDPGRIVAMGFGAFADAVREQLPRWGGTRRNLRILRAIFDAAHAPVGVETERAAACERAAYALEDWHYALDQVTDVEHRMVEVLDALDLYELVTTITGLSVVGAAAILAETGDPARFDCARTWAKHAGLCPRANESGNFHGSTNVSRRGRPGLRLAAWRALWGALRHNPVYAARYTHLTTRADNPLCDGQARAAIAAALLRQLFVVVTQRVAWDPAIAAGTGVVPQAA

SEQ ID NO: 165195 - protein, 360 aa, unidentified
MLYLGIDQHRKQLTVNLRNEQGDVVLKRQVSTEWDRVRKFFDELRKLVDQEDGFVTIVEVCGFNGWLLKMLDEYGCREVVLIQPERRSKKKTDRRDAAELSQTLWVNRERLLAGKSVHGIKRIVPPSKTDGENRELTALRKRTAWLCTRTINKVHRILLKHNLQQECPTKGIKTKKARRWLAELPLEEIDRMEMDLLLAQWKLWESQLEQLDEKIRERQSTDATAAIVATMPGAGAYSSLALASRIGSIDRFPRPGSLANYWGLTPGCRNSGDATDRLGSITKQGSAMARFILGQMVLHVLRRDVAMKAWYAKIKRRRGSKIARVAVIRYPSQRVEQVRELAKQHDDEEIAELLSNLADG

SEQ ID NO: 165196 - protein, 411 aa, unidentified
MEQIHDRVAGLDVHRDQVTVCVRTPGPRGGVHTDKARFSTTTGGLAAMASWLAGCAVTLAAMEATGVYWKPVYYALEGRFELWLCNAHHVKNVPGRKTDMSDAEWLADVAAHGMVRPSFVPPPAIRELRELTRYRKTQIDVRAAEIARLEKVLQDAGIKLTSVASKVLTQSGRAIVEALIAGQRDPRALADLAKGKLRPKIPQLTEALDGHFGVHHAIVASCILGHLDFLDAAIAGLDEQAAARVGGGYQPAARLLADVPGLERRSIEVIIAETSADMSRFPSPGHLASWAGLCPGNHESAGKRRRVATTHGNQWLRRTMIESARAAARTKGSYFGAQYRQIARRRGPNKAAVAVAHSLLDAIWHILTTGEVFTDLGEDYFTSRHDKEHQARWLTAQLEKLGYAVELTTTT

SEQ ID NO: 165197 - protein, 408 aa, unidentified
MKTLHKRCAGLDVHKAEVVACLRVITNRKVGREVRRFPTTTQGLLALAEWLESAGCTDVAMEATGVYWKPVWHILEGRFALILANAAHVRNVPGRKSDVNDATWLGDLLAHGLIRSSFVPPPEIQELRDLTRTRRQLTREIVQHVQRIQAVLEEANIKLCSVITDIMGASGRRMLKAMIAGETDAEKLAALGHERLGCTRAELVEVLTGCVREHHRFLLGQHLRTIEQLEDSIAAFDARIEGALSPFHDIVERLKEVPGLAATATETVIAEIGTNMSPFPTAGHLLSWAGFVPRLDESAGKRRSTRIRKGAPWLKPVLVQAAWGAARKKNSYFQAQFLRLKARHGAKKAAIAVAASILTTVYHMLRDGTCYQDLGPEYFTRRNPAQAAARLANRIRNLGYHVEIRAAA

SEQ ID NO: 165198 - protein, 379 aa, unidentified
MVINERGERLLSRRVLNDEAALLELIRDVLDIDQDVLWAVDVNHGGAALLIGLLLNHGQPMAYLTGLAVHRASGTYRGEGKTDAKDAFVIADQARMRRDLGLLRPGDEIAVDLRILTTRRTDRAGDRTRQINRLRAQLLELFPALERALDLTNKGPVILLTGYQTPAAIRRAGAKRIETWLRNRKVRSAAALAKVALEAAQAQHTALPGETLAAGMAVRLAKAVMVLDEEIAELDALIEARFREHPHADVICSLPGMGTQLGAEFIAATGGHMTAFASADRLAGYGGVAPAARDSGRISGNHHRPRRYHRGLLRVFYLSAMASLKSCPASRTYYDRKRAEGKGHKQALIALARRRVNVLWAMIRDGACYQSAPSVAPAV

SEQ ID NO: 165199 - protein, 414 aa, unidentified
MRVYHNVCCGIDVHKKSVTACLMWGPADREPQYEIRRFGTMTRDLQRLAEWLEQAGCEVATMESTGSYWKPVWNVLEGRRMKLILANAKHVRALPGEKTDRKDGKRLAELTRHGQIRPSFVPPQAILELRDLTRYRSKLLAAGGDERRRIQKVLETANIKLGSVLSDVFGVSGQRMLQALVDQDAVDTQKVAQLAHWSLKPKMDALQQALEGKLTPHHRFLIELSLNHMRAVEAQVLRLDEEIQRRLKAYQEEYALLQTIPGIKEAGAARILSEIGADMSAFADGDHLSSWGGVCPGNNESAGKKFQSKIRKGNQHLLSALTECSWAATHKKDCHFRRKYYRLKARRGSQRAIVAVSHAMLKCIFIVLSQRRANEEPKPASLTDPQKRRKVSSLCRQLRELGYQVELKSKELNG

SEQ ID NO: 165200 - protein, 416 aa, unidentified
MGEALRLFIGDDWAEDHHDVELMDVSGRRLAKARLPEGVAGMARLHAMAGQALGEEAEDADLGQVMIGIETDRGPWVQALIAAGYTVFAINPLQASRYRERRGVSGAKSDAGDAHVLADMVRTDSHQLRAVAGDTAQAAAVKVVARAHKTLIWERTRHMQRLRHSLRDYFPAALEAFTDLTAPDTLELLAKAPDPASAAKLTTAQISAALRHARRRSIPAKAAAIQLALRAEHLGQPAVVTAAYAATVGAATAVLAVLNEQIDALEGQVEAHFGQHPDAEIIGSQPGLGPVLGARVLAEFGDDPRRYADAKSRKNYAGTSPITRASGKKKAVMARYVHNDRLIDALGVQAFSALNASPGARAYYDQLRARGLSHYAALRQLGNRLVGILHGCLKTRTLYDEATAWPQHAAETGTAA

SEQ ID NO: 165201 - protein, 342 aa, unidentified
MDYFAGLDVSVKDTSVCIVDGTGKIVREVKVASEPDALLQVLRNPGYCFKRIGLEAGPLSQWLFSALGEANLPVICVETRHMRAVLKAQINKTDRNDARGIAQMMRVGLYRPVHVKTLRSQKLRMLLTHRKLLQSKAIAIENDLRGTLRNFGLKVGIAGRTRFEARIVELLEYLPDLAVLVEPLLIVRRVLREQIAVLHRRLLAIVRDDEVCRRLMTMPGVGPVVALTYRATVDVPARFRKSKSVGAVFGLTCSRDQSGERDHPGAISRCGDGMMRAMLYEAAQSMLVRSTRWSWLKAWAMQIAKRRGLKRAIVALARRLAVIMHRIWVDGTEFRWTREVTA

SEQ ID NO: 165202 - protein, 348 aa, unidentified
MRTEYFITMDTHCRTTDVCIKTAGGKLVRREHLATGIPQLREVIQSVPHPRRVAFEEGALAGWLYRNLKSDADELIVCDPRRNAHVAKDGDKDDPIDAEKLNDLYRGGFLKVVHQQDSSEKAAIKQVIGMYHDRVAHRVGEGNRLLALGKRWGVLLKRSMLQQADARQSLQTRLKEAGVPQRILSLAGELWESLDLALRQEQVLYAQVCAMAKRDKMISRVAELPGYGPVRSATLLSYLDTPWRFKSKSALWKYVGIGLHREKSGQDLEIICVEQACNRLLRAVVIGAAQSVIDQKNSVFAQRYAQWVRNGLSFRNARRNVARDQVTAIWGMWKSDKAFEVSLICRAC

SEQ ID NO: 165203 - protein, 359 aa, unidentified
MMVLGCDPHKRSITCGAVEAATGVARGVRTAAAHADGFDVLVRWARALAGERVWAIEDCRHVSGRLERFLVARGERVVRVAPKLMAGAREGARTRGKSDPIDALAVARAAVREGVGTLPTAWLDERALELRLLVDHREDLVGTRTRDQARLRWHLHDLDPTFTVPPRALDRAVWWQRVRARLEQEPTGVRVQIALELLEQIRGQTASIRALEAELARRVHAYAPRLLAERGCGPLTAAKLIGEIAGIERFATDAKLARNAGSAPIPASSGNRTRHRLDRGGNRQLNCALHRLAVNKGLWDPDTAAYLARRQADGKTRKEALRCLKRHLARRVWKLLRTPAPSHTPSITIHCNMPTHALT

SEQ ID NO: 165204 - protein, 416 aa, unidentified
MNAVGIDVSSRKSTVALLRPLGEVVCLPFDVTHDIAGLASLAEKLKAIDGETRVVMEHTGRYYEAVEKALHEAGLFVCAVNPLLIKEYGANSLRRVKTDKADAVKIARYALDNWADLRDFTPMDAIRYDLKTLNRQFQLASKQRTASANNLIALLEQSFPGIRKCFDSPVRSDGTQKWVDFAHSFWHVDCVRKQPFPAFCERYRKWCKLHAYFFKLRNAEKVYALAKSAIVLTPKSKVVKVLVQEAANQLSSISRSVEVYRAEMDRLAAMLPEYPVVMAMYGVGKSYGPQLMAEIGDVRRFERKQALVAFAGIDPMPNQSGDKNVRSNKSSKRGSPYLRKTLFNVIRTYLQCAPQDEPVFQFLNRKRAEGKPFYVYMLAAANKFLRRYYAKLRDYFASLDTLQPVAPIPTILKAAL

SEQ ID NO: 165205 - protein, 313 aa, unidentified
MYYIGIDVSKKDLSVFNGKKDLKFINQQGLRPFKKYLKKKYKNFSDLVIIFEPTGIYSFNLKEFCAENSVKAYIVNPKRSHSFARSLGIRSKDDKIDARILYQFHRLIDSKDIKVPRIDQQTKVLSVYLTSYEFALKQRVAISNHLESLRDKKLTSLLKKELKRAKKLEDKIFNDIKEYIGQNQNLREDYQRLLTISGVGEKMAIALLTLFKTYQGTNRAQITALVGLDSTKRESGTSVRGRAKISKNGKAIYRKVSYLPAVCATVHNQKIKIFYQRLLANHKPKKLAIIASMRKMLLIAHAMYRDKTEYVAA

SEQ ID NO: 165206 - protein, 362 aa, unidentified
MGYATILGLDLGKFKSVCCVTDVAARAHAFETIQTTPQVLRDWLAKHVSSAADPAGVLLVIETCDTAGWVHDLATSLGMTCIVVHTIGDERWRWRKVKRKTDRDDALKLARLALLGELPPAVHMPGPAQRQKRRLIVHRRSVVSRRTRSRNAIRSIYSQQGLPLARGNKQWTKAGVAQLAEDARDIADCDDLDLWRGRLSAELELMASADAQLKALDKKLDALADERTALLQGIKGVGPRLAEAVVLHLDDPHRFKTGEQVASFAGLVPKQLQSGQTLRLGHITGRGPALLRSLLVESAWVVWRHNAWARLFVDKVSRGGRGRRKLAIVALARKLLIILWAMLKTNKPFRSPGVPAAAAVAT

SEQ ID NO: 165207 - protein, 343 aa, unidentified
MTLDVYFRQCVGIDISKDKFTACLYMYDRASDVGCCTKSIDFANTKSGFNQMVRWSRKEAVKSHPLTYLMEPTGVYYERLAYHLHKIGQTVYVVLPNKARKFCESEGIKTKTDAMDARCLALMGCVSRKLKPWSPPAAIYRELRQMTRFHADLCQVRASVANRMEALDHMEGTAKSVHKNCEKLLQEIDTLMEKNGKAIMKKVAEDKELEAKVKRIATVKGLREPTIVCVIAETEGFHYIENRKQLVGYAGLDVKAEQSGNEDPKHRISKKGNANIRTALYMPALVAVRYNRQIKAAYGRICQKHPNEKMIGVTAAMRRLLLLIYTLWKNGEEYDETRGTLPL

SEQ ID NO: 165208 - protein, 369 aa, unidentified
MADYREAFVGIDVAKLKNAIAIAEAGREGEVRFFGEVDTSATSMRRVIGRIASRFDHVHFCYEAGPTGYGLYRLIRSLGHQCTVVAPSLIPRKPGDRVKTNRRDAISLARLLRAGELTAVWVPDEGHESIRDLVRARAAAVETLRVHRQQVSAFMLKHGRSYRRKKSWTMRYLRWLQEQRFDHPAHQIALQEMVEAVRVSKERVERLERVIEEFVPAWSLAPIVLALQTLRGVDLIVAVTFVTEVGDASRFESPRQLMGYLGLVPGERSTGETVRRGGITKAGNGRVRHMLVESAWTYRHPPKVGKAKLYRLDQAPPKVREIAWKAQSRLTARYRMLSARGKRTTVVCTAIARELVGFMWAVAREARAT

SEQ ID NO: 165209 - protein, 412 aa, unidentified
MEGETVIAGVDTHKDVHVLCLLDGLGRKIWSGSFGADPEGYDRLAEAIGDPGSCMVVGVEGTASYGAGLTRRLVELGYNVVEVLRPKRDKVRPGEGKSDPLDAERAARKAASGRGCSVPKSQDGWVEAVRQLYVARRLAVATSTSCVACAKSMLTTAPGALRERFRGRERPKDLMPLLARGRKAGDALEESVLASLRSVAAVWKEARSQVESLDERIRALLEANAPALLGVEGCGTTTAAALVVAAGDNPGRLKGEAAFSMLCGASPIPASSGKTERHRLNRGGNRQANWALYEIAIKRMAYDERTRRYVARRTSEGKSRREAIRCLKRYIAREVYHVLMDPNPDGAAPEGPELAKMRKAMRVTQKKAAAELGLSAATLGHLERGKRRSTKLERRYYELLCELERALPQTAS

SEQ ID NO: 165210 - protein, 340 aa, unidentified
MNIVFLGIDLAKNVFQLCGLNQAGKPVYTKRTGRKELLQTLANIPACLIGIEASTGAFYWQREFEKLGHKVKVISPQYVRPFVRGQKNDGNDAQAIAVALMQPTMQFVPPKSPEQQDIQALHRARQRIVNHRTATVCQIRGLLLDRGIPIGSAVSRARRAIPLILEDAENGLSSRMRRTIAELYDLFNDLGRRIHFFDKEIETVFRQSEACPRIAKVKGIGPKTATAVVAAIGKGTEFKNGRHFAAWLGLVPRQHSSGDRQVLMNMTKKGDKHLRTLFIHGARAVVRVATNNNDGHMNQWVNQLKERRGFNKTTVAVANKNARIIWSMLRNDTGYQVVCN

SEQ ID NO: 165211 - protein, 326 aa, unidentified
MQGKEASEQEANVKSSAGVDVSKDWLDAHVWPSDKRLRVANTPEGIRKLKRWLQRFELLVVVIEATGKWHRLLWRSLFQSNIPVAMIDPYKARMFAKALGIAAKTDRIDASVLARYGYMVRPAVRPPQPQVVEQLAELVTGRDTAVAEQTRLKNQLSAATVEFFRKQLRQRLARLDKDIAELEEEILARIMADPELSRRYEILDSIPGIGPTVAATLVVRLGELGSLPDKQITMLAGLAPIADKSGKHDGKRVIWGGRAALRRMLYLAAVSASQWNPTLKPFYRRLRETGKEAKVAFIAVARKLVILANTLIAEDRIWQKIPPQNA

SEQ ID NO: 165212 - protein, 414 aa, unidentified
MDVVVERCAGLDVHRDSVVATVRVPGKGKSRRRRAQQTQSFGTTIAQLERLADWLQGFGVTLVGMEATGVYWKPVFWVLERRFECWLLNAQHLHNVPGRKSDLIDSAWCCQLLEHGLVRPSFVPPPEIRRLRDLTRLRSTQMEERSRAIQRLEKVLQDAGIKFSSVASKTYSVSARAMLEALLGGVSDPIVLAELAKGKLRAKIPQLQEALANRFELAHHGVLVAQLLAHIDALDETVANLDRRIAEATHPYADLITLVSTIPGVGRYIAEVLIAECGVDMTVFPNAEHLVSWAGICPGTNQSGGKRRSGKTRHGDHWLRTALSEAARAAARTKQTYLASHYWQIRGRRGEKKAIGATRHDILIAYYHIVRDQVPFRELGPDWLARRHSVEHRTRRLVKQLEALGNKVTLEAAA

SEQ ID NO: 165213 - protein, 458 aa, unidentified
MAHRKKKIPAQLVEDEEYQLRHECVAGIDIAKDKGDVSVRLPPAREGGRRRSRVEENVPARSRDILELGARLLADGVELVVMESTSDYWRIWYYLLESLGLAVALVNSSHARQLAGRPKTDRLDCQWLARLAEMGLLRPSFVPPPEIRALRDLTRARQQLVRDRARAWQRLEKLLEGALIKLSSELSSLARVKTARLILDALADGERDPRALAARALGKLAGRRGDLEEALHGMAAGPHHSLLIRAHLDQVDSLSRSAGAIEDEIAAALEALPAAWGVSAGGEPSPDPGPDAAVPPAAARLAEIPGVSLDLARAIIAETGLDMSVFPTAGHLVSWAGLAPVARQSGPRSRKPKKGQGNAFLKNLCTQAANGTARTDTFLGARFRRLSARIGGARAHCAVARSILIIVWHLLNDPAARYEDLGADWHDRKASRDKKIRGHLRGLQALGIDTSSLTATAG

SEQ ID NO: 165214 - protein, 381 aa, unidentified
MQASNASAPIANHSGTVFIAIELSQKSWVLTVHSPDRDGISQPKLTGGDHTGLLRFIGDIRERVQRKLGAIPAVVTCYEAGYDGFWLHRLLTAAGMTNYVFDPASIAVEQRGRRAKTDRIDGKLLLRTLMAYARGEPRVVRIVQVPSREQEDARRVNRERDRLISEQTAHTNRIKALLRQHGMAVGKPRRRDWLKWLADQRDWEGQAVPPWMLAELTHEHARLMLVCEQLEAITRALAATTAPSAHERDLLQRLKSLGLVTAAGLANEVFYKDFRNRRQVGAYVGLTPSPWQSGGTDREQGISKAGNPRARKMAIELSWLWVLHQPDSALTRWFKARTLKASKRIKRIAIVALARKLMVALWRFLTTGLVPQGAVLKPVKA

SEQ ID NO: 165215 - protein, 403 aa, unidentified
MISVGIDVSKGKSTVCIMKPYGEIVKSPYEVTHTKEDLATLVTFIKSQEEEVWTIMEDTGHYHWPVLLFLYEQGVRVTCVNSLRMKKYCSQSIRRAKTDAIDAVQIANYGITYWFELKPYVPRSDVFQELRTFSRQYYQYTCVETKIRVNFQNLLDQVMPGITAKLADQNGRHKLTEFVYRYWHYQNILKQSKNAFTKNYSNWAKKQGYRLNESIASEIYELAKISIPILPCNDSTKIIVQQLAQTLLVVDETRNDILSNMDELARQLPEYELIRAMPGVGDKTVSLLISEIGDVTRFKNKHSLIAYAGIDAPPYQSGKFDATQRKISKRGNKYLRRIGFEIMLSLLRNKPTDDPVYLYILKKKADGKASKTAMIAGFNKFLRIYYARVMEAYTYIENTKIAA

SEQ ID NO: 165216 - protein, 465 aa, unidentified
MTPRQGKRFRTSDQVEDLTVSQRHAAGIDVQAAVHFVAVAPADVPPGFVNPDAKLPAGVRKFAAMTADLEALAAWLKECGVTTVAMESTGVYWIPLYELLASLGFAVILVDPRQTKHAPGRPKSDVLDCQWIRRLHSYGLLTASFRPADEIVVWRGFQRQREMLVRYAARHIQHLQKALEEMNVKLTEVVSDIVGQTGMKIIKDIVRGERDPRKLAKHRHEKCQATEAQIAAALYGNWRKEHLFALKQALQMYEFYQRQLQACDQEIETCLRGFADKSGGVALPPSPRRQQPRGHAPRFGARALLFRMAGVDLTVLEGISETTALVILSEIGTDLSRFPSEKNFVSWLGLCPQHRGSAGKIFSRRVRRGANRAARALRMAAQGCHHAKNALGAFYRRIQARCGGAKAVVATARKIAERVYRLLKYGQEYVRQAEQAYEEAYRLRTLKAMARKAESLGYKLVPATE

SEQ ID NO: 165217 - protein, 372 aa, unidentified
MKKSSRMSIVRSHAAGVDIGAKFHVVAVPPDADAEPVRTFQSFTGDLHRMSDWLKTCHITTVAMESTSIYWLPAFEILEAAGFNVILVNARDAKNVPGRKTDVNDAQWLQKLHSFGLLRASFRPVHDISVLRSYLRQRERLTEYRAAHIQHMQKALMQMNVQLHHAVSDITGVTGLSIVRAIVSGERDPSMLIQYRDVRCKKTPEVLQQALTGNWQPEHLFALEQSVAFFDFYQEKIRECDDQIETSLLQLSTGIKEPEGALPSTRHRTKQPNQLAFDVRPLLWKITGADLTQIHGFGPYLALKFVAECGTDMKRWPDASHFTSWLCLSPGNKISGGKVLSSKTRRSSSRIAAALRLAATTIGRSDTALGAF

SEQ ID NO: 165218 - protein, 312 aa, unidentified
MTEHCYCGIDVAKDRLDAQVLPHRQRFSVDNNATGWAELVERLHALPIAAVGIEPSGGYERGIIRILLAAGLSVRRINPSKLRQFARARGILAKNDRLDAQLIAEYVSIMPTRVVQRVATAERLAEVVTMRRQLCDQHVTIENQAAHVEDAILRRLNKRRLARLKADIHLLDKRLAEIVAADVILAQRYELLTSMRGVGPTLAFTLIALLPELGQISRKQIAALVGLAPYDFDSGKLKGHRCIYGGRMPVRNILYMAALSAARYNPALKVFHNRLAAINKKPKVIIVAVMRKMITTLNAMVRDNAAWQPRAA

SEQ ID NO: 165219 - protein, 320 aa, unidentified
MMAQNDLVVAGIDVAKDKVDVCVRSLSLKRTFASTAEGRRELTSWLRRRKVGKAVMEASGGYERDWAKALRNAKIEVRIVDPKRVRSFAQSAGRLAKNDTIDAEMIAWFAETFDEARGQAYDATREQLHQMVNARQAMKDMQTKLESQGEHALPATVQRMHARIMKTIAVELVKIEAAISAMVQATPHFTELAEIIESVPGIGRTTSAALIAAMPELGQANNKIVAALLGVAPYDDDSGRRRGERHIKGGRRRTRNVFYMACLGAATQHNPVLKAFYDRLVAKGKQKKVALVACMRKLISILNIMIERRQKWDASRYAVS

SEQ ID NO: 165220 - protein, 314 aa, unidentified
MSPLVFVGIDVSQTCLDIAIRPGASYSLTHKEAAIVVLVEQLLALGPTLIVLEATGGMEIPLTSALATAGLPVVVVNPRQVRDFAKASGRLAKTDALDAQVRAQFAEVMRPQPRPLPDAETRALAALLTRRRQLVEMLTAEKNRLLSASSPIRKRVRTHIVWLERELEHTNTDLSDAIRQSPVWREKDELLRSVPGVGPVLTSTLLANLPELGTLTSKQIAALVGVAPLNRDSGTLRGRRTVWGGRAQVRAVLYMSAIVAARFNPVIRSFYQRLQRVGKAKKVALTACMRKLLTILNAMLKHRTPWRVVEAQHA

SEQ ID NO: 165221 - protein, 313 aa, unidentified
MSDNLPQTIGIDISKASLDCHVHPAGAERQFANTAKGHKALIAWLRQWPVERIAYEATATYHRALEAALADWPCVKLNPERARRFAQATGILAKTDRIDAMLLARMAATLQPPVRPARSAQQAQMAELINARDGLVRDRTALKNREKNLTIAFLKRQCRQRLEQIDRHIEALDTEIANLIAADAALARRHEILTSIAGVGTLTANQLIATMPELGSLENKQAASLAGLAPVARQSGQWKGKSFIRGGRANVRQALYMPALVAARYNPDLKAKYQQLVTAGKPAKIAITAVMRKLVVTANAMLKADRCWTQSPA

SEQ ID NO: 165222 - protein, 335 aa, unidentified
MKKVFIGIDVSKKWIDVCVTRDGKMIVHQQFDNNKAGFRKMVSWLKHYGPQSQWLICMEHTGIYAQPLWYYLTEKSITYTVVPGSVITSGLEIRRGKNDKIDAADIARFTMRYADELKPHRLPAQVLRRLKMLFAYRDRLVKAKMIISVPAGEASVFAAEESKEVRADSSSLVQIIAARITKVEKLMLHVICSDQETARVYRLIESVPGFGLITASYLLIITQCFTTMCNSRKLANFGGVAPHPHKSGSSIKGKDRVSHLADKKLKALLSNGTGSLLQHSRGTKQYYERMVAKGKNENLVKNNIKNKMLHTVCAVVKRGTPYIDDYIPQWSHKVA

SEQ ID NO: 165223 - protein, 379 aa, unidentified
MNRIIKIGMDVHTTNYTLCIFEPSFEHDGTVHCITQVKPEVKNIIHVIKTFKKKHENEELNIVCGYEAGCLGYSLYHELKEKGIECVILAPTTMKTEKGGRKLKNDYRDAKMIAECLAYGGYSAVHVPTELDNSVKEFIRMRDDIKENLKSIKQQIIAFLTRNGKQFEGKSFWTRKHIDWINTVSFSEPLLQDTLKEYMIEYNHLCDRVETLDRQIEEISLKEEYVEKVQQLQCLIGIKTHTALSLIVETSDFNRFKKGNMYSAYLGLIPGDDSSGGHEDKLGITKAGNNHLRRLLVEAAQGYTRGRVGFKSKDLKSRQEKCSSEVVAYADRANERLRRKYYRMTLRGKKFNVAKTAIARELACFVWGIMTDHIDLCSL

SEQ ID NO: 165224 - protein, 366 aa, unidentified
MNFCGIDLHSNRFTCCFLYEDGNREKITFDVSSDAIERFKSMLNSNTSVIIEASTNTFKFIESIKDLVNEAIIVNTYKMKLIPMSGKKTDKVDAEKLAVYLKMCSSSGENLINPVYIPEGSIQELRSLFTTYNLMKRHIGAIKNRIHSLLKQHLQPFTKEYIFGKKTRSHIRLITINPVADYQLKLLFEELEAKERLSDDIEGRIKLEGAKYIKEIEILTSMTGISVITALAIIADVATVERFPNAKHFTSYLRTAPEVDCSNETVIVKGTNKNGRKLSVTLISQSLNHFRDSNPRLKSWYNKKEEHHFKKGKLRMALCRKVLAEIYHMLDKHEYHYYRNADLHNKKMKEYYQFLEVNGIELRKTA

SEQ ID NO: 165225 - protein, 372 aa, unidentified
MKTKTTKSLTPAVVPTPTAPVPAGGFTLGLDLGDRSHYVCVLDATGQVLHEGPLPNDRVALAVLLNKYPAATVALEAGTHSPWISRYLTGLGATVIVANPRKLHAISRHERKCDRRDAAMLARLARADVALLHPIKHGSAQAQHDLLGLKLRDALVRTRVNLINTVRFTLKSLGHAVNNPSSEAFHKNILTAVPADCLPVVQPVLAVLAVLTDQIKTLERDLVARSKRDYPVTQRLQQIAGVGPLTALCFVLKIGEPARFGRSRDVGPYLGLCPGRDQSGGTDKQLRISKCGDGLLRRLLVSAAHYILGPFGPDCALRAYGQHLAGTSAREKKRAVVAVARKLAVLLLSLWKHGTDYEPRVPAAPTLVLTPA

SEQ ID NO: 165226 - protein, 360 aa, unidentified
MIVQGTSVGLDVHALSVVVHAVDEETGKVARTRLCPDHGEMLGWLRQLRAPVRVRYEAGPTGFGLARAIAEAGMECLVAAPSKLQRPAGDRIKTDARDAAHLARLLRLGEITAVRVPERDIEAVRDLVRAREDARADLMRVRHRLSKLLLRQGIVYSGGTAWTCVHEAWLRKQRFADHYLAAAFDHSFDAVLAATAARDRLDEQILDVAASPRFADPVNRLGCLRGISALTGLALTVEIGDWSRFTGSSIGAYVGLVPREYSTGTSRVQGSITKAGNTHARRLLIEAAWHHRKSDSTSGPSLRARWAKVDPALRARGHAGNRRLNKRRRSFTDRGKNPLVANVAVARELAGWCWSLATMQ

SEQ ID NO: 165227 - protein, 322 aa, unidentified
MSVSVLGIDIAKQKFDVALLVDGKTKHKTCKNSVEGFETLMLWLEKQGIRKVHACLEATGNYGEDLAIYLHEAGHRVSIVNPARIKGFAQSELIRTKTDKMDAALIARFCLAMKPGAWIPPSPEIRSLRALVRRVDSLIDMRSQEKNRISTAHESVSLLIKEHIAYLDQEIERIRQQIAGLIEQDPNLKRKKELLDSIPVLGKATIPHILAELDDLEKFNHVRELVAFIGLAPKETLSGSSMKGKSRLCKIGHAQLRKALYMPALVSIQCNPVMIAFYNRLKDKGKNGKVIVCAIMRKLVHVIFGVLKSGKKYDPNYKPAFA

SEQ ID NO: 165228 - protein, 319 aa, unidentified
MPSTAPAFVGIDVAKAELVIAICPSGDHWTVPNSPAGIQALVERVSEHAPTLIVLEATGGYERALVAALAAARLPVVVANPRQVRDFARATGQLAKTDRLDATILALFAERVRPASRPLPDDAAQALDALLTRRRQLMEMLIAERNRLEHARPPVRRGITQHVRWLERQLHDVDQDLDTTIQSSPVWRAKDNLLRSAPGVGPILSRTLIGELPELGTLPRKQIAALVGVAPLARDSGTLTHKRLVWGGRAPVRAALYMAALVGTRCNPVLQAFYRRLLAAGKPKKVALTACMRKLLTILNAMLRTNTIWHHPDHAAATP

SEQ ID NO: 165229 - protein, 374 aa, unidentified
MENTITYVAMDTHKKQHKVALHYPCQEEIVEFTINNTTRDIKKMVKKITKQAPGEVEFCYEAGVCGFTLKRRIEQFDCRCVVIAPSLVPRKPGERVKTDRRDAKKLLMMHKSGLLTEVHAPNEQQEAARELTRLRETAKDNLKRIRHQLLKLLTRHGYVYSNGRHWTQKHITWLRTIEFTEPMLTSVFENYFSEMIYCIGRLEALDKEVELLAGSQEYKEIVGLLRCFHGIEVLTAITIITEIFEFGRFESPRHLMSYLGLTPSEDSSGDKQKKGSITKTGNKRVRRLLNEASWHYRHRYVPSKVLKQRRKGQPQWAVEIADAAGRRLSKRHRHLVNNRKMPCKANIAVARELAGFIWFVVTQYHARKNTKGAA

SEQ ID NO: 165230 - protein, 354 aa, unidentified
MRGAPVGVIAGFDCHTDMHVSAALDPLGRLLGTESFRATPDGYRQALAWLGSLGPIIAVGVESTGSFGAALARFLGEQGLRVIEINQPHPYTKARRGKNDAIDAEAAARKVLSGEATGAAKDTSGIVEAIRQLTVARDGAIKARAAALCQFGDLVVTAPAPLRDRLAERKTLEGKAALCTPMRADLSNRRDPTTAAKVALRSVARRIVTLTAEAAVLAAQLDRLVAIAAPTTLRQLGLGTQNTAALLIAAGENIERFSSEAAFAHLCAAAPVPASSGRTRRHRLNYSGNRQANRALHMIVIVRLRYCPMTRAYMDRRLRDGKTKLETIRCLKRYVVREVYRTLRADLGTLAART

SEQ ID NO: 165231 - protein, 310 aa, unidentified
MERIVVGIDVAKQRVDVHSRPGGEAFAVATDEAGLTELVKRLQKVGPTLVVLEATGGYEVPVAAALGSAGLPVVVVNPRQVRDYARATGQLAKTDALDARIIALFGEAVQPAVRPLLDEQARILGELVARRRQLVEMLAAESNRHRQVHERRVRERIAAHLEWLRQALKELERDLHDTIRTTPIWRERENLLTSVPGVGDVTAYTLIAELPELGQLDRRQIAALVGVAPLNRDSGTFRGRRMIGGGRASVRNVLYMAALTAIRCNPTVAASYQRLIAAGRPAKVALVAAMRKLLVILNAILRDGRPWQPA

SEQ ID NO: 165232 - protein, 346 aa, unidentified
MNITTVGVDLAKDVIQACVFSNNKVLSNKEMTPSEFSQWLVCRKHSLVIFEACSTSNYWAQKAESLGHDTKLISAKLVSTVRQNQKTDKNDALAIVQASLLPDIKFINGKSSEQQQLQSVLRMRELTVKQKTALSNQLTALLLEFNIRVAPRNGGLKGAIQSALEDAENGFTMTFRYALEQMWLQFLNCVATIKKFDEYLSTLVNTVPQCKKLLKLEGVGVINAINLYITLSTSEIGVFKDGKGAAACIGLTPIQHSSGGKTKLGSIGKQVKNSVMRSQLVTGAFTYINHVSKRSAKSKKDIWLQELIKRRGKKCAAVALANKTVRTAFSLIKNNTEYAVQLQNIT

SEQ ID NO: 165233 - protein, 351 aa, unidentified
MTSLSEIVEAVIGVDTHVATHSAAVVDARTGGVLGELTVAATVDGYQQLVDFAGEHCGLRAWAVEGTGGHGAGLARLLARRHELVVELDRPERARRRNGAKSDPLDAIRAAREALSRAKLGTPRSTGQRQALSVLLAARRSAVQAGTDAQRQLFSLVIAAPECLRQRFRGHKLPAMLRLAAQLRVSPHWDSETATTATVLRGLARRALDLAAEATQHENSIRAIVCSWRPDLLAQPGIGPITAATVLCAWSHPGRFRSEAAFAMLGGVAPLPADSGSGSTPVRFRLNRHGDRQLNRALHTITLSRLRWDPATQAYARRRTAEGKTARETKRCLKRYIARDLYRLLEHPHAT

SEQ ID NO: 165234 - protein, 334 aa, unidentified
MENIALIGIDLGKNSFHIHCQDRRGKAVYRKKFTRPKLIEFLATCPATTIAMEACGGSHFMARKLEELGHSPKLISPQFVRPFVKSNKNDFVDAEAICEAASRPSMRFVQPRTESQQAMRALHRVRESLVQDKVKTTNQMHAFLLEFGISVPRGAAVISRLSTILEDSSLPLYLSQLLLKLQQHYHYLVEQIKDLESQLKRKLDEDEVGQRLLSIPCVGTLTASTISTEIGDGKQYASSRDFAAATGLVPRQYSTGGRTTLLGISKRGNKKIRTLLVQCARVFIQKLEHQSGKLADWVRDLLCRKSNFVVTCALANKLARIAWALTARQQTYVA

SEQ ID NO: 165235 - protein, 343 aa, unidentified
MEHCGIDVHSKSSEVAVVDERGERWDRARISTTEPSLRRWFGGRAPMVFCLEAGGQSVWVARILTSLGHDVVVANPARVRLIAEATLKNDQVDAETLARLVRADRRLLCPIIHRSADTQRQRGVLRARRTLVNARTACLNTSRGILRSFGFRTPSRTAERLAACLADSRMPEALVAVVAPLVQLALELDAKIAALDAEVETMGEAYPEVALLRTIPGVGPLVGLAFVLCIEDPSRFKRSRDVAGYLGLRPTMRESGSTSRYGRITHQGDTEMRRLLVQAAHGVLRSRAESDLKQWTQGLVARVGKKKAVVALARKLAVVMHTMWVQGEPFRPFRDTIDVDVAA

SEQ ID NO: 165236 - protein, 471 aa, unidentified
MVRPNPRKWGEMNRQQRREMMRKMQSEDLSLEVVHTDAAGIDIGNETHYVAVPPSRDPQPVRCFGCTTAELRAMADWLKRCRIRTVAMQSTGVYWIAVSDILEQAGLEVYLVNARDTKNLPGRKTDVQESQWLMKLHTYGLLRNSFRPSRQVRTLRTYWRQRQDLVQAAGEHIQRMQKVLTQMNIQLANVISDISGVTGQAIIKAILNGERDPRELAAYRHGRVQASEQEIAQSLEGNWQDDLLFVLQQEEAGYEFCQKQMAECDRQLEQCLQQMEDRSQGAALPAEKRKSRLRKKTARNAPGFDVRRLLFRMTGIDLPQIDGIEVMTAMTVFSEVGWDMSKWKTENHFVSWLRLRPNNKISGGKIIGKDRIPTNNRATAALRMSANSLRLSHSYLGAQFRRLRSRLGPPVATKAMAAKLARLVYNILRHGMKYVDKGAEVYESQHRQHQINFLKRKAAMLGLQVTEVSAA

SEQ ID NO: 165237 - protein, 403 aa, unidentified
MSQEHSIDIFLGLDVGKSEHHACALDRDGNKVFDKPLPQLESDLASVFHQLQEHGTVLVVVDQPNTIGALPIAVARACGCEVGYLPGLAMRKAADLYPGRAKTDKRDAFIIADTARTMPHTLRAVDRNNEVLSALKMLSGFDDDIARDCTRTVNRLRSILTQIYPSLERVLAGSTLTRTPILDMLIHYKGPQGLKRAGYHRVLNWMIKHTRKDPTPLVDEIFAALKAQTVTVPGSDAAELVIPQLAANIKALKEQRDTIAEQVEGMLDDFPLCEVLMSMPGVGIKTATQILLAIGDGSDFDSAGHLAAYAGIAPVTRRSGSSIRGEFPARSGNKRLKNALFYSAFAAIRSHEPSRQYYERKRAEGKRHNAAVICLARRRCNVIYAMLKNKEFFREIPPRPVAA

SEQ ID NO: 165238 - protein, 386 aa, unidentified
MQKLNDLSRSPSPLDPDGTLIAVIELSLSSWLVAGIVPGVERQPLKKLAVDESALLKLLHRWRDEAAKAGHHIKRIAVAFEAGRDGFWLARWLRAHDIEVHVIHASSVAVSREHRRAKTDRLDTSLLKRSFLGWLRGERDHCKMVAIPTIKDEDAKRPNREHESLVGERSRIVNRMKAALIRLGIRGFNPKLKKAAGRLEDLRTPEGEPILPNMLAELRRDMERRQLINDQIRQIEDARLERIEQAPGDGPNAMVLLLARVIGVGIETAAMLVQEVLARNMRDRRAVARYAGLTGSPDESGIKRREKGLARSGNARVRRGMIQLAWRFLMFQKDSTLAQWFRGRTESTRGTRKTMIVALARKLLIALWRLVREGVVPDGVVLRPAQ

SEQ ID NO: 165239 - protein, 344 aa, unidentified
MDHSAGLDVSVKETSVCIVDDTGKIVREVKVASEPEALLAVLKNPAYHFKRVGLEAGPLSQWLFSALAEAGLPVICVETRHMRAVLKAQINKTDRNDARGMAQMMRVGIYRPVHVKTLRSQKLRMLLTHRKLLQSKAIAIDNDLRGTLRNFGLKVGMVGTVRFEARIRELVESLPDLAALIEPLLIVRRTLREQFCILHRRLLAIVRDDEVCRRLMTAPGVGPVVSLTYRATVDVPARFRKSKSVGAVFGLTCAKYQSGEVDWDGRISRCGDEMMRVMLYEAAQSMMRSKKWSWLKAWAMQIARRCGMKKAIVALARRLAVIMHRMWVDGTEFRWTREQSAVAA

SEQ ID NO: 165240 - protein, 454 aa, unidentified
MRHGKKKQKPGQVQEDMPVINSNAAGIDVGSAEIWVSIPPDRDEEPIRRYATFTADLYALADWLKQRGIESVAMESTGVYWIPVFEILERKGLHVVLVNAKYAKNVAGRKSDWLDCQWLRLLHTFGLLPSSFRPAAAIATLRCYLRHRQMLIEYASAHIQHMQKALTQMNLQLANVVADITGDTGMRIIRAIMGGERDPQRLAQMRDYRTKNDEATIAKALQGNYEPQHVFALKQAVELWDFYQQQRTTCDQEIAQYLHNLDSAVDVDSHPIPPPRAPKKRRNSPGFNCRLETYRILGVDLTQIDGISESSALTILSEIGTDWSRWKTEKHFASWLTLCPNNKISGGRILQRRTRKSSNRVHDVLCVCAQTLFNSRSALGAFARRMRSRLGPQKAIVAIAHRLALWIYRLLRFGKTYVDIGQDAYEQQYQQRKLKTLTRQAKHFGFQLVALAES

SEQ ID NO: 165241 - protein, 335 aa, unidentified
MGEVSTIGLDIAKSVFQVHGVDADGAVVIRKRISRAKVLEFFADLPSCLVGIEACPSAHHWSRKLQALGHTVRLMPPSYVKAYLKRSKNDANDAAAICEAVTRPSMRFVPTKSGQQQSGLMLHRGRQLLVRQRTMLSNAIRGHMAELGIISAKGRNGTVELLEIITNADDDRVPTVARLSLDALARQYANTTAEIRAFEKHIHAWHRSCEESRRLEGIPGVGPIVATALVAEVGDWKAFSSGRNLAAWIGLVPKQHSTGGKERLGGISKQGNRYLRWLLIAGAMAVIRYARQHGTKRLWLARIMERRPIKVAAVALANKIARMAWAMMVHGERFK

SEQ ID NO: 165242 - protein, 376 aa, unidentified
MPSEIAIRVAIELSHSSWIVAVRLPDVEKSRLHRLEGGDTAALLTLIDDMRSRVATKLGGPVNVACCFEAGRDGFWLYRVLTTHGIAAYVLEPTSILVNRRARRAKTDRLDAEGMLRVLAAWLNGDRQICSMVHVPSPEEEDAKRPHREREHLVQERLRIENRIEALLFTQGIRGRPSLRSWERDMAELRTGDGRKLPPLLRAELERLRRRLVLTLELIREMETERDEALTVTSGAAATQKVTALQRIRGIGPNFAAILVCEVLYRSFANRRQLASYVGIAPMPYQSGGIDRDRSISRAGNPRARTTLIQLAWLWLRYQPDSALAIWFRERVGTLQGRTRRIAIVAMARKLLIALWRYVETGVVPDGVEIRAEASA

SEQ ID NO: 165243 - protein, 342 aa, unidentified
MYYIGLDVHKKTISYCVKDASGQVHQEGQIGATRWELDGWMKTLPQPWTVAMEATIFTGWIYDHLLPHAQQVKVAHPLMLRAITAAKKKNDRIDAGKIADCLRCDFLPECHMASTAIRDRRRTLRYRHLLVRQMVQMKNRISGLLMETGVSHNKRRLHKVGYFRELLSSNAEVNESIRPLLRVSRDSIVRLQKTEYALVSSLQRDPLLAERIKRLRTVPGVGPITALTWALEMGEVSRFPSIREAISYCGLCGDEKSSADKVMRTPLSKQRNKHIQRVLVEAAKLAPRQNHDLALVYEREKQKGNANRATLAVARKMVAYLLAVDRGQRDFVPFADPRSVAA

SEQ ID NO: 165244 - protein, 405 aa, unidentified
MFYGGIDVAKHQHEVCILDHEGQAVLRLHVKNNQKGLEKLNKAMHTLDIKTDDICFCLEATGHYWLPLFSQLEQRGYQLHVINPIQSDALRNLYVRKTKTDTKDALLLADMMRLGYTKETKLATETTLRLQTLSRSRFVFVRQVSSLKNQVLCILDRIFPEYASCFSSVFIQTSKELLKRYSEPEELAEVDLSELSHFLSEHSRGRLGHERAEQIKALAKGTFGIRLAIDAFTLQLRLLVEQIEFIEDQIKIIEEAINQVMEELRTEDTEYRHVLETVPGIGSTLAAAIIGEIGDIQRFPNAKALVAYAGIDASVKASGQFEGTKNRMSKRGSPVLRHSLWLAAVSARRFNPELKEFYELKRSQGKHSNVATGAVARRLTHIIYSIWKSDRPFKPDYQWTPQGND

SEQ ID NO: 165245 - protein, 352 aa, unidentified
MERYIGIDVHAKSCTVAVVDPKGKRVGHHVLETNGKALIGCLRSIAGTCHLCIEEGTQSAWLYEILSPHVDDMTVMRVTESRGQKSDERDAFALANRLRLGNIESRVYKDHGPYRKLRELARAHLMIVGDSVRVQNRIKAFVRSRGVIVEGGAIYGQKGREAYLKKVPEGTRVALSTMYSEHDSIAEIRAQAEANLVAEVRRHRISRVLQTCPGIGPIRAAQLLPVVVTPHRFRTKRQFWSYCGLGVVMRSSADWIRDASGKWQRSRVPSTRGLSESHNHQLKAIFKGAATTVVTGLHEDPLYADYKRMVDAGTKPNLAKLTLARKIAAIVLTMWKNEEVYAPEKYRKELSA

SEQ ID NO: 165246 - protein, 316 aa, unidentified
MVVGIDVAKQTLAVVLVRPDGTRRQKSCANSGTGHAELLRWLTRHAEGPAAIGLEATGGYHEAVALALHDAGHQVSVLNPQTVAAYARSQLRRAKTDARDAAVIADYVRTQAPPVWVPPPPEARVLQALVRRLDALLGMRTQERNRLETAAPVVQPSITATIAHLDTEIASVKRQIAGHIDRHPTLRTQRDLIVSIPGIGETTAAIVLGELLDVARFTSARQVAAFAGLVPRLRQSGTSVRGRGPLAKLGASRLRKALYFPALTALRHHPALRAFGARLRAAGKPKMLIVAAVMRKLIQQVYAILRTRHPFDPARA

SEQ ID NO: 165247 - protein, 326 aa, unidentified
MQSAIARSKEKLGLSAKCPVYACYEAGRDGFWIHRCLSAMGVQNLVVDPASIEINRRKRHVKTDRLDAEKLVRMLMRYWLHNERTVWRVVVVPEEAQEDERRTHRERARLIRERTSHICRIRSLLVQHGIRPLKILGCDNSQMKDWQGKALPSGIQKEICHEQERLRLVNEQIKQLDAEQKEQLKMPITEADRKAAKMKTLKGIGQHDSCLLSKELFGWRKFNNRREVGAISGLTGTAYNSGDTVVEQGISKAGNRRVRSTMIELAWRWTFYQPDSELTKWFMQRFGSGGKRMRRVGIVALARKLLIALWKFVEFGEVPAGAVVRA

SEQ ID NO: 165248 - protein, 380 aa, unidentified
MDNSTGTVRKNDQETNFIGMDLHLDNVVVVVAQNEIKDNTVRNKTVLSKKFKTVGQPNIDELFKVLETYCQDKPHMAVVESTYNWYWLADEFEKRNWNLRLADPSTVSKAGFKYSDDYTDASYLAECVRNGSIRSTAIMPKDDRAVRDLARYRMTLVEDRGRLKTILVNMTANHLSIKLNADKLLKEIDEAVEKAASASDEGAADEVLSHYYDNRQVRTKMRSLLRRIRFLTNEVEALDEELTELIKPNVYATSLQSIKGCGYVTSMLIGLEIGDIGRFRTHKDFVSYCRLAPTSKLSNGKSKGLGNAKNGNAYLSWALTELATFVVRYNPEAKRVYDRYFNRSRLRVKAIRSVAAKIARGIFMMLKNGEVFDMKRCFGG

SEQ ID NO: 165249 - protein, 346 aa, unidentified
MKTLYQTKKLFGAFDLHSNNNYLAIIDEEDNRIYKRKLPNSPDVILAELEPYRNNLAGLVVESTFNWYWLVDMLMDEGYQLHLANPAGIQKYKGLKHSDDNYDAFWLAHLLRLGILPEGYIYPKDERPIRDLLRKRGHLVKLRTSLINSLQGIIQRNCGRKLSANKIKAIRKDNVAPFLEDNKDLALSGSISKETIDFIGCQIRKVEKVVLDRVKLKEEFIKLLTMSGVGKILALTIMLETGTIGRFKTVGDFTSYCRKVPSGWTSNDKKKGKGNVKNGNKYLAWAFSEAAEFARRHDEHSRAFYNRKSTKKNFMVAHSALAHKLARAAYFVMRDQVAFDPQKLFT

SEQ ID NO: 165250 - protein, 407 aa, unidentified
MNQLFVGIDVGSRENTVHIMLPDGSKHSSFDIQNSLNGAKTISKRVTSVLIEKGLPAVSIGIEATGVYGDNLMCFLREDGILGQFERKLYVLNPKQVNKFKEAYSDLPKTDDVDAFVVADSIRFGRINTSVYQDDYRYKALKNLTRARFYAVQNLTREKQRFMNYLFMKCSGLAQEKVFSDNYGAAALAVFEEFQTPDDIANMDIGELSAFISEKGKNRSPRPDEIAEAVQAAARGSYRLPKTVNDSVNQVLSISISSMRAIESQIKALEKEIVRQFENISNPLISIHGIGIVFSAGIIAEIGDINRFAAQAKLAKYAGLAWSRHQSGMFEGQHTRLIKSGNRFLKYYLCEAAFSLVRCDTEFKRYYNLKYKEVNKYQHKRALALTARKLVRLVFRLLKDNRLYRPA

SEQ ID NO: 165251 - protein, 411 aa, unidentified
MEVIYKRCCGLDVHKEIVVACLLIREGGKVLKEIRTFLTMTVDLVVLHDWLKAHEVTHVAMESTGIYWRPVFNLLEEDFTILLVNAAHIKAVPGRKTDVKDCEWIADLLSHGLLRGSFIPPEPIRDLRDLTRYRKSLTDERVRQVQRLQKFLEGANIKLASVASNVMGVSGRAMLEALIAGSTDPQVLSELAKGRLRKKLPELKKALEGRFRSHHGFMVAEILTHLDFLDEAIERVSQEVSNRIVPFLRKVELMDLVPGINQRVAEGVLSEMGVDMSCFPSHRHAASWTGLCPGNNESAGKRKSGRVRKGNPWLRRYLIEASWAAIQKRGTYLSALYYRLVPRRGKKKAIVAVAHAILVMIYHILKDQVPYHELGSDYFNKLNAAYVQRHHVKRLESLGFKVILEPLSQVA

SEQ ID NO: 165252 - protein, 433 aa, unidentified
MAISKYLQKKAWISGKTVIGIDPGKDRHQAVVIDGHGIMKGKPFSFGVNQKGFNEKLWNGIRMATEMDKPEDTVFAVETSCNLWVTITDYLRRQGYTVVLVSPLSTHHARPLMNHDFTKTDPKDALLIASNAQNGNYDHYREFSAGTKRLHQLSLTYSKLMKDRTRMRMRIRALMEVVFPEYLKCIDVCTETSLYLLQRYFMPEDFLRMDIKNEASLIKKLSRNNYDESLLYRIRKQARGSIGADKTDERDVLRLTLDSYITLYRGINEQMRAIHEKMTEIAKESVYFEVITSIKGIREGTAARFMGECRIYDELPFSHYKQIEKLAGLNLRLNQSGKHVGARHISHIGNKRLLNLLYLMTTQVARHIPEVRIRFLKRQMQKRHYRKNIVACISQLLKLLTSLLKKKRGYEYYPERMKEMKELEAEYMGFKVA

SEQ ID NO: 165253 - protein, 420 aa, unidentified
MCLSIVDNVQSAPGLLSLGEQGLGERPLHARKQIFRYYWRERLLMNQSNGMDSSSPKRHLGAKLVSDTTSKRKGGVTMKLSRVGIDLAKNVYQLHGVDRSGKTVWKRRLKRHQWFKVLLDTVGPECEIGMEACTGAHHWGRELQSRGYTVKLIPPQFVKPYVKSNKSDAKDAEAICEAMSRPNMRFVTVKRVEQQDVQATHRIRAELMTQRTAKANQIRGLVAEYGLVAPKHLSSLRAAIPCWLEDAENGLTGDFRTLLQGVWTDLLLLDDRVCEMDRTIKRLADNNEDCVRLQQLRGVGPMTSTAMIATVGDARQYQKSRQMAAAIGITPKQHSSGDRDRLLGISKRGDVYLRTLMIHGARAVVARAKHKDDRLSRWVTNIANKKHPNVAAVALANKTARMAWAMLRHETDYDPAFAIR

SEQ ID NO: 165254 - protein, 413 aa, unidentified
MTYRICGIDVHKKMLAVVVAAITEDGEIRFEQRKFDNHEAGLESLEEWLVECGVSEAVMESTAQYWRSVWLKLEGKYRLHLAQAMSNRAPRGRKSDFADAERLVRRLVAGELVLSYVPDREQRLWRMLAREKYLARRARVQQINALEALLEQVRIKLSSVVSDLSGVSSGRILRALTRGVQDPAELAAMADRGVKCTPEQMRIALAAAPQLRTEERAMLKQMLDRIDLLAQQIAETDHLLATCLSQHQDAVTRLSAIAGLGADSAQQMIAEIGPQAAAFSSAAQLASWIGVCPGREESAGVSKSDRSPKGNRSMRRLLAQCANAAVHAKGSAFELFYRRKVAHLGHYKALWAVAHKLCKVIWKVLHDGVSYQERGPRWNSPHAAKQIQRLKRSLRLLGYDPNSLRKLDQAASV

SEQ ID NO: 165255 - protein, 353 aa, unidentified
MPNQQKTTAKIAVIGIDIGKNTFHLIGQDERGAIVMRAKVSRRQLFVRLGNIPPCIIGMEPCSGAHYIARRLMELGHDVRLVPGQYVKPFLKAHKNDYRDAEAVAEAVQRPTMDFVPVKTPEQSDLLSLHRIRSRLVRHRTALINQIRGILMERGITVRQGPAPMRAALIEILSEPPSDLSPRIQRLLGDLSEDWRRLDDRIDAISDEIETLAKYDAACQRLMTVPGIGVITASAMVAAIGTGQGFKQGRDFAAWIGLVPRQDSTGGRTKLGRLSKHGNKHLRTLFIQAAHVVLAKKPAAAKRALWPWVERAAQRLAHRNLLATALANKLARIAWAVLARGHDYRPEASTNVA

SEQ ID NO: 165256 - protein, 421 aa, unidentified
MKKRTYRKIAVKEVDVATLAAELGAGRVVFAIDVAKVDMVAAIVAGDGRVARTVCWKNPSENGLVLALLGGLRGAGLLVEAVMESSGTYGDVLRHQLLEHGVPVYRVSGKRTHDAAEVYDGVPSLHDAKSAAIIAKLHIDGVSTPWGPLSEEKRELKAAIATMDLYREQHQRLIHSLESSLARCWPELTEHLELSSATLVALLARVGGPHDVAGALEQSRGLLHGMSHGLMLQETIEAVLQSATSSVGVKLLTQERVALMTLAAEAHRALKEFKKAKLAVERLSTSGAAQRLAPTTGKATAAVLIADVGDPRDYPSTRAYLKGYGLNLKEKSSGKQKGQLSITKRGPGRARQYLWLAVFRWLQKDAVARAWYAAKIKRDGGRRSRAVIALMRKFAQALFHVARGVPLDSSKLFDLSRLRLT

SEQ ID NO: 165257 - protein, 420 aa, unidentified
MMNSTNTYPIHPKMTRTYCGIDSHKDSHTIVILNCFHERLGEITIGSAPSEFSNFLKQAKKYLQTGTTWAFGFEDTSAYGRSFVKFLVEKGYCVKHVDASKVATERGQVLHKTDSFDAECAGRVLINQFDKLPNANPQDKYFIMQNLVTRRNSITKINVMVKNSLHKVVAENYPHYKKFFCKLTTNTALAFIEEFPSPHHLENVTAEELTAFIKTTKGRMTEEKAELILTYIGGDKVERVEFQATQDFTVRSLVRQLKNNLSELGEIDKEIEKMLAYFDYPLTSMKGIDTLTAAKLIAEIGDINRFPNAKALAKYAGVAPVTYASGMTNLQMANARGNRKLNEVFYRLALTSVMPIGTKGLLLNPILYEYYHKKIGEGKMKNQALKAVQRRLVNIVYSIMKNNRPYENPGSGYIPTEEVA

SEQ ID NO: 165258 - protein, 328 aa, unidentified
MFIIGVDVSKSKLDCALIDNSNHAKFKFKVVSNSEDGFITLIDWLSQQLNSTTSEYHFVMEATGVYHEKCADWLFNTGSKVSVVNPAHTKYYGQSLGVRSKNDKKDSVVLARYGLTQNPAAWQPELPEIRILKALASRLDAIEKDILREENRHEKSSINPCSNSVLKSIQMMLSVLKEEKINLEQLINNHINQFEYLKVNYALLQTIPGVGPVVSRYMLIVIGSRTFKSASQCAAYIGLVPIQNESGSSLRGRSRLSKAGNPIIRAKLYMAAISALQHNPDIKIQNQRLLKNGKSKMSALCAAMRKLVHICFGVIKHQRPYQVQANLI

SEQ ID NO: 165259 - protein, 367 aa, unidentified
MNEPTRFVGLDDSKEFIQVAVADGDRNGEVRDFGVIPNTPGDLRKLVRRLGRVEELHFVYEAGPGGYGIYRELLALGTRCIVAAPTKTPRRAGDRIKNDRRDAANLARLHRAGELTPVWVPDEQTEAMRDLTRAREDCKYAQLKARQRLGAFLLRHGRRYSGKSHWTAAHHRWIIEQRFAHPAQQITLDEYYEAVEEASRRIARFETQIGTLLDEWSVAPTVKALMAHRGVSTITATTIVAELGDLTRFTRARDLMGFVGLVPSLCASGQKHRNGAITKTGNAHVRRVLTEAAWSYRHPARRSPHLRKRLAGQPEAVQQISWKGQVRLCGRFRRLRARGKQHNKALTAIARELVGFLWATAREVANT

SEQ ID NO: 165260 - protein, 321 aa, unidentified
MATKQDKIEFDQVIERGCGIDIHKSVLVATVQGKGIKTETRSYDAFTESIKQLRDWLKSLSITHIAMESTGVYWKPVYNILEEDFEIVLVNARDLKNIPGHKTDKKDSRRIAKLLLAGLLKGSFIPPKPIRELRDLTRYKRRIIQQIASEKNRIHKFLEDANIKLSTVVSNMSGAVATKIIDAIIEGEGEAEKLAKLRHGRMKASEEELVVALTGNLTEHHKFMLKMVKQSIKNKELLIDELDRQIDNQLKENQMVLDAELLSTIPGVDKDAAAYILSEIGNDMTRFPDEQHLASWSGLSPGNNESAGKKKAQGPHTETNG

SEQ ID NO: 165261 - protein, 361 aa, unidentified
MTKLSDSPVRPSTCIGLDIGDRFSQFTVLLQDGAMIKRGRLATREPALRATFGKLAAPGARIALEVSTHSPWITRVLTDMGFEVVVANPRKLPVSRSRRKNDRIDADLLARYARVDPELLCPVAHRGDDARLGLAWIRQRETQLAVRTTMVNNVRGTVKSFGARVRKCDADYFHRHARNDLAGHPEILELVESTLALIESTTVSLAGLDRRIEKLAASLPIVELFKQVHGVGTLTAVTYALVIEDPRRFRRSRSVGAYVGLVPRQCQSGDSDPQLRISKTGDRMLRCLLVNVAHYLIGGRNKHDSTLRRFGLSIAGDGQNKTAKKRAVVAVARKLAVLLHSMWMSGQAYEPLRGTATMTAA

SEQ ID NO: 165262 - protein, 339 aa, unidentified
MKLYAAFDLHSSNNYLAVIDEEGKEQLQKKLPNDAEAIVMALSPYRKKIVGIAVESTYNWYWLIDLLMAKGYEVHLANPAAIQKYKGLKHADDRHDANWLAEMLRLDILPEGYIYPKEERSLRDLLRKRSHLVRLRTSLIISLQHIITRNCGIMVNVNDVKQMKEDRISPLLANNEDILMAGGVSKEIIDYMTRKIKGIEKTIEGKIELSSSYQKLLSIPGVGKILALTIMLETGPISRFQKVGNYVSYCRKVGSRWVSNGKTKGKGNQRNGNRYLAWAYSEASELARRFDAQARAYFQRKAQRSNRMVAHQALAHKLARAAYYIMRDDVPFIAEKLFA

SEQ ID NO: 165263 - protein, 402 aa, unidentified
MPFFVGLDWAATAHAVCVIDDRGSIQWQGAVPHSAAGLAELVRRLHGFGPPEALRVAIERPSGVVIDTLVEAGFPVVPIHPNVVKASRPRYSSAGRKDDPGDAFLLADLLRTDGHRFRSLCPLSDETRALRALVRGRDDLVAQRVALANQLRALLERFWPGAGSIFADVDSSIALTFLARYPTPQSAERLGERRLAQFLRRRAYSGRRPAAELLARLRGAPRSRTGDAETEASGQLVHALVAVLTPLVAQIQQLSAAVGAAVAQHADGPLVQSFPRSGAVNAAQILAELGDDRARFPTAEQLAAEAGAAPVTRASGKHRAVVFRWACNKRLRQAVITFADNSRHASPWAAAVYARARSRGCDHPHAIRILARAWIGVLWRCWQDRRPYDVTSHRAASSLPAA

SEQ ID NO: 165264 - protein, 360 aa, unidentified
MFTERTSVGLDVHARSVAAAAIDGVTGEVFKARLVPAPEVVIRWVESLPGPSAAVYESGPTGFGLARALSAAGIRCEVAAASKLQRPAGDRVKTDARDALHLARLLRLDEVVAVRVPSEVEESARDLVRCREAARADLMRARHRLSKLLLRHGIVYSGGKAWTQAHDYWLLRLSFPLAGTQAAFQDAYETVVLAAGRRERLDAAILEMAADGQFTAVVRRLSCLRGISTLTAFSLAVEIGDWDRFTGAGIGAYLGLVPSEHSSGASRSQGPITKTGNAHVRRLLVEAAWHHRKPYRPTAVLRRRWQLAPPAAVARAQAGNHRLHQRWVGYADRKKRPVIANVAVARELAGWCWSLAMLPE

SEQ ID NO: 165265 - protein, 342 aa, unidentified
MDKVSIIGLDLAKRSFQAHGALADGGIGFRKKLSREKVLGFFAEQPRCVVAMEACGSAHHWGRAIRDLGHEVRLIPPAYVKPFVKRHKNDATDAEAIAEAASRPTMRFVAVKSEGQQARAMLFRTRDLLVRQRTQLINALRGHLSEHGIVAAQGPANVKVLEEAIEDQTTSLPLLVVELARVFLDQIEGLSKTIAKLEKVTAQEAIGGETTRRLQTMPGVGPITALAIETFAPPMDVFKRGRDFAAWLGLVPRQQSTGGKQVLGKISKMGQRDIRRLLIIGAMTLVRAAVRKGAPEGSWLQRMLARKPKMLVAIALANKMARSVWAMLAKGEDFRVPRVAAI

SEQ ID NO: 165266 - protein, 403 aa, unidentified
MNKLKRVCGLDVHKDIIFACIKKGKYQSEVKQFSTTTQGLSEMNHWMQGEQVYKVAMESTGIYWMPVWRALENDFTLVLVNPYFIKQMPGRKSDVQDAQWIATLLDKQLLKGSVVPDKTIRVLRDYLRRYVLLQGQMTRCLQQIEKQLSRCNIKIASLSSTIGSKTVIGIVASICNGQHEPSQLLKLVHGRIKNKHGEKVKQALEGIIDEHDIFILQQIYSDYNHIQEQCSALVMQAEKISNEHYSKQIELLQTIPGIKKLSAIIIFAEIGGNINLFAKAENLTGWCGLRPKNDESAGKIKSRSITKGNRYLRRILVQTGWAASRTKSCYLNTKFEQLSIRKSSKKALIAIARKQLVIIWNVLSKNENYLEPQIILSQKQVEKKQRYYQDKLNKLASTLEKVG

SEQ ID NO: 165267 - protein, 356 aa, unidentified
MSRDTKYIGMDVHKAAIVIAVLNDSGKLVMESIVETQASSILQFIYGLRGELHVTWEEGTWAAWLYDLLKPHVHEVLVCNPRRNALLKEGSKSDKVDARKLADLLRTGMLRPVYHGENGLRTLRELARSYQTISKDLNRVMNRLKALYRGWGIACSGTQVYAARYREEWLHKIPHAGVHRRAEVLYQQLDGLQALRRTLRPELLAESRKHKAAKLLRQIPCIGPIRAARLLALMQTPHRFRSKRQLWTYSGLGIETHESAQYRYVRGQLQRSKKPQQIRGLNQNHNHEMKEIFKSAATRASCGVGPLRDFYVALLDKGMRPEMARLTLARKIAAITLTLWKKEERFDAEQLKTQAA

SEQ ID NO: 165268 - protein, 348 aa, unidentified
MNEVITIGVDLAKNVFQVHGVDAEGAVIVRRRLRRGQVLPFFKKQRPCLVGMEACATSHHWGREITALGHQVRLMPPRYVKPYVKRNKNDMADAEAICEAVTRPTMRFVEIKTADQQSVLMLHRTRHLFVRQRTTLINALRAHLAEFGIVAGVGRNGLERLLKVIEDGEDDRVPPSARDCLLALRDQLEMVKHQIFEADRRILAWHGASEVSQRLDDIPGVGPLIATALVASIPDPHAFKSGRDLAAWIGLVPKQSSTGGKERLGHISKAGNRYLRMLLVVGALSVIRRAKQTGYTRRPWLTELLQRRSTKIAAIALANKNARTAWAMMAHGTFYTEPAYQEPASQAV

SEQ ID NO: 165269 - protein, 404 aa, unidentified
MNAVGIDVSKGKSTVAVLRPYGEVVVSPFDVAHTGSDLRALADLIKKLPGETKVVMEATGNYFESIARYLHEQNIFVSVVNPVLISDFGGNTLRKPKTDKKDSVKIASYALTYWLDLKEYTSQEDLRKSLKLMNRQYQQSIKLKTMMNNNLISLLDLTFPGINKLFTSPSRESDGHEKWVDFVLEFSHCDMISKLTIKAFAKKYKKWSDKNSYHFTESSCEKIYAFAKDCVSSVSSDKAIVFSVVQAAKMLISATENCHAIQSEMNRVASKLPEYDTVMNMYGVGKAVGPQLMAEIGDPRRFHSRKAITAYFGYDSENNDSGQKTTRSNPMTKKGSGALRRTLFIIMQVLLQTKPQDNPVYDFLIKKKSEGKHYYSYINAAANKFLRIYYARIKEVLNVSEQMT

SEQ ID NO: 165270 - protein, 341 aa, unidentified
MPALIIGLDLAKHVFQIHGTGQNGEVVLRKKLRRSEMIEFFRQLPSSLVGVEACGTSHHWRRVLTDLGHEVRLMPASYVKPYIKRGKNDEVDAEAICEAVTRPTMRFVEVKSVEQQSGLMLHRTRELLVKQRTMLVNALRGQLAEFGLVAPKGTWSIPALHDLARGSSEAVLPDEVRGCVELIMGQIDDLQLRIGVLEKAILANHRVSEVSQRLQTIPGIGIITASAISATIADARAFRSGRHFAAWIGLVPRQSGTGGKVYLGRISKKGNPYLRKLLVLGATAVIRYSRNKPGLADWINALLARRPARVVTVAVANKLARIAWAVMRRGERFKQALSAVA

SEQ ID NO: 165271 - protein, 346 aa, unidentified
MEHYVGLDVSLKLTSICIVDRTGMVEREGVVASDPEAIATFIKLHAPHVVRIGLETGATSTWLWTELNKMGLPVICIDARHAKAALKMQINKSDRNDAVGIARIMQCGWYKEVCVKDLDSHATKALLVSRALLVKIKRDIENQIRGLLKNLGLVIGRAKMNMFAVRAAQLAEDRSELLAAVDPLLKAREAVEQQILDLDRKVLRLARNNAQVRRFMTAPGIGPVTALCFLATIDDPARFKRSRSVGAYAGLTTRRYASGEIDWTGRISKCGDKMLRSYLYEAANVLLTRVAKWSALKAWGVKLAKRSGLRKAKVAVARKLAVILHRMWIEGTEFKWSSKEAADQPA

SEQ ID NO: 165272 - protein, 351 aa, unidentified
MLIIGCDYHPSFQQIAWVDTGTGECSEQQLQHSNGETEKFYRDLKLRGMQVRVGMEATGHARWFERLLAELQYELWVGDPAQIKAARVRKQKTDRRDAGHILKLMVEDRFPRVWVPSAENRDLRQLLWHRHRLVQMRTRVMNQLQAIALNEGVRRKKGLWSKSGREQLESFPLARWAQRRRQDLLELLDRLNPRIGELTTAIAQEAEQRPEARRLMTHPGVGPITALAFGLIVGPTERFGCGKQVSSYLGLVPREDSSGERQRLGHISKQGNTLLRFLLVEAAQAVVRCDPEWRGRFLHLVMRRGRPIALVAMARKLAVRLYWMARQGTEYKPGEVSVRTWGSSKLGHGVK

SEQ ID NO: 165273 - protein, 338 aa, unidentified
MLTIKIIKVKKPAFTIGTDVSKSTLDVYCTEVNKHIKVSNDSIGFKAFLKFCKEQKINLNDALIVLEYTGGYEYRWIQFCASKNIPYVRIPGLAIKRSLGISRGKNDRVDATRIANYGDEKFKQLEPEKPINTSILKLKELLGFRKRLVRESAGYKASIKERNHMYEVPKSDIINKMLQKKLDANDALLLQIEEAINDLILTDQALLTNYKLLTSIKGIGNVNAWMTIAYTENFTSFTSARSYAVYVGVIPFDHTSGTSIKGKRRVSKLANKELKQELSQAAKSAIIWNEEMKEYATRKLTNKPYGIVVNNVKFKLILRMFTVVKKGENYVDILKKAA

SEQ ID NO: 165274 - protein, 346 aa, unidentified
MLYAGLDLSRKRLDFHLLDGEGATVEVGATPPDADGLRGLSDRLARHGEPVRAAIESMNGSRFVHDRLELAGWQVEIADAQKVKGLAPLACKTDRIDAWVLAELARRDLVPAIWLPDPLVRAERERARWRLYLVRHRSSLKQRVHAVLLTHGKPCPVSDLFGVRGRQLLSRLGLPEPWQGTIEASLRLIDELDREIGECERELRRLGAEHRYVPLLCTVPGISWVLAYTIAAEIGDVGRFASPRKLAGYSGLCPRVYQSGERDLRGPLAKQGPRFLRWALVEAATHACTHPIYRDRYQQTKTRIGKQRGAKVAQIDLARRLAEAIWHMLSREQPFAPKGATDPVAA

SEQ ID NO: 165275 - protein, 363 aa, unidentified
MQVSHIFVGIDLGDKNSVARIAVDRDKSERFGFLNSRQGRARLFREVKRRSEQADGAKIVMAYEASSCGFVLSDEAEALGIKCWVLAPTKMEKSVEQRQHKNDDRDADDVLEKVRGHVLAGNRLPTVWVPDQQTRDDRELIRTRLDLTEKQTQIKAQIRMLIKRHGLEKPSGLGAGWTIGYRRWLQALTESEQQLGWSTRRTLDSLLRQLHFLEAEIDRVQKPLEELANEPRHKPIIEELRQEAGVGLLTAMVYRTEIGQAGRFGRGRQVGKFVGLTPTSHESGQQSDHKGHISRQGPPRLRKVLCQASWVHIVHDAGAGRTYQRLVSRNPKKKKIALVAVMRRLAVRMWHRMRKIELQQIQA

SEQ ID NO: 165276 - protein, 351 aa, unidentified
MVTVGIDPHKRVCYAAVVDTAGRRIGPVHKTAGARALPGLLEWARRRSEGAEVLWAIEDGRGLARALADALLLAGQTVVWVPARAMAAQRRLHERTGAKSDAIDAVAVARAHLAAGAMATHRIDARVRLLRLLVDSRADLVQRRTQVANRLIAWAHTWLEHTPGDLTRPRGRAALEATLDAAGLDARVREVFTEALAEAATLSGRITQLETRIRGLVEPLAPHLLAIPGIGHMSAAVLIGEIGDITRFPRAATLAAHTGCAPVPVSSSGRERHRLCRGGNRRLNSVVHIAAVVQRRFHAGAAALLQRLEPVKGKRGAYRVLKRHLIDVIYRAMVADRAGWDPPTTKPHPTN

SEQ ID NO: 165277 - protein, 394 aa, unidentified
MRFAGIDIGGERHAVAVVNDNGVLLVRSTLFGEEAVGYQRLRELLGDPNDCLVAMEATGHYWRNLFAFLVAHGFKVALLNPLRTRRFAEEELERTKTDSVDALGIARFATQKRPAPTPVTDELTGELRELVRLRTRYVDELSDRMRQLHRAVDLGFPEFTRHVRINTLLATVILARYPTARSFARVSIRKLARLAYDGRHHVGEALARALIEGAKVSVGSHHSEPYQLQVKYTCADIELLRGRVKQLEQDIERKLQDHEVGKLLTTIDGIGARTAACLIAELGDPSRFRDAGALASYVGVVPRLRQSGKRAFSGARGLPLGNARLRHRLWMPTLVAVRRNPWLRAHYDRLLAAGKRPKVALVACMRKLLTAVYSVARNRRPFVPVLATDSSTLK

SEQ ID NO: 165278 - protein, 372 aa, unidentified
MKKDSKRKPRSPQGGASKRSQTGRTIGMDLGDKTSRYCVLNQAGEVVQEASVATTPTALVQLFGAAAASRVALEVGTHSPWVSRLLSRLGHEVIVANPRQLKLLTVSSRKNDKVDAKTLARLARIDPELLRPIRHRGEKAHMHLIQIRVRAGLVEVRTALVNTLRGLAKSMGDRVPQCDPDALDQTRLQELPPPLRTALEPLVEQIESLTERIQECEGKLEQIARSEYPETTLLKQVFGVGTLIALTFVLTVEDRERFSKSREVGCYVGLRPRRSQSGQSDPQLRITKEGDRYLRQMLVQGAHRILSPRAPDTDLKRWGRKLCERGGRNAKKRAVVAVARKLAILLHRLWATGEVYEPLRNANLVPPEKRAA

SEQ ID NO: 165279 - protein, 388 aa, unidentified
MTQAPGALPTPTVLDYERTLILAIELSNTSWVLAAQIPGLPSVKAKRSIEPTPEALMAAIEDYRTRAVKAGRNVERVVAIYEAGWSGFWLARWLAQYGIETHVIQPSSVPVDRRARRAKSDGIDAELLLRTLLAWLRGEPRVCSMVPIPAEADEDARRRVRERAELVAERVGLVNRIGAVLATLGVGEYNPLRRDRRQRLDELRTALGGSLPTHARAKIVRMLDRLELLLIQITELEKSRDAVLEDENPDKAASMIQQLAKLRGVGVQSATVLVREGFVREFANGKALGSYAGLTSTPYSSGGTEREQGIGKAGNVRLRTLMVELAWLWQRYQPDSAQVSWFRERVSGTGRRMRKVMVVGLARKLLIALWRFATQGVVPEGAVMKPAT

SEQ ID NO: 165280 - protein, 344 aa, unidentified
MDHYAGIDVSLECSSVCVVDSNGKMVRETKVASESEALIGWFGALGFGLARIGLEAGPLSQWLYAAMKEADLAVELLETRHVSDAFKAMPVKSDRNDARKIAQLMRLGWFRPVHCKSITAQEIRAMLTARKLVQGKLLDLENSLRGILRGFGLKVGNTTRNGFAGRIEELVKGHSNLQTIGQALLRARAVLLAEFNGFEKRVRAMSRLHDKATLLMSTPAVGPIVSLTFACAIDDPSRFTSSKQVGPYLGLTPKKYQSGQTDYTGRISKHGDASVREALYEAAHIMLTKPIKGCSELKSWAMRIARRAGTNKAKVALARKLAVIMLRMLKDNVPFNPAAKAATA

SEQ ID NO: 165281 - protein, 318 aa, unidentified
MAEVVSFEQIVERGCGLDVHKQTVVATIDGAGLQRETREFSTTTRSLTELKEWLVRAGITHVVMESTGVYWKPVYHVLEPSGMTVWIVNARHVKYVPGHKTDKRDSKWLCKLLLAGLLKPSYIPAREQRELRDLTRYRRKMIEQIASEKNRIIRLLEDCNIKLSSVLSDTQGVVGSKLIDKLCANGRVSMADIEEVYHGKLQASKEEIYEACEGVVSEHHVFMLQAIKEDILSCESIISKITLRIKEMLSPYENVLELLKEVPGLGTKSVEDLIAEIGLDMSVFPTEKHLASWAGVAPGNNESAGKKKVDELRMATNR

SEQ ID NO: 165282 - protein, 315 aa, unidentified
METGPLYVGIDVSKAQLDVAERPSGERAVIPHTEQDIAALVEQLGARRPACVVLEATGGLQAPLASALAIAGIPVAVVNPRQVRDFARATGQLAKTDAIDAQILARFAEAVRPAPRPLPDEATQAFSALLTRRRQLIDMLVAEQHRMRTAPFPIQRQIQAHLTWLKQQLAMLDEDLTHRIQATPLWREQEDLLRSVPGIGPVVSRTLLGELPELGRLTHKQIADLVGVAPLNRDSGSLRGRRIIWGGRAVVRGVLYMSAVVAARRNPIIKAFYQRLRTAGKAPKVALVACMRKLVTILNAMVKHRTPWRLSAQST

SEQ ID NO: 165283 - protein, 321 aa, unidentified
MPEDKVYVGIDVAKASMDVAVHQSQLRWSLSNDDEGISKAVCCLKELAPALIVMEATGGIELPLAAALAAAGLPVAVVNPRQMRDFARATGKLAKTDAIDAKVIAHFAAALKPTPHPLPGAQAQEFDALLTRRRQVVEMLTAERNRLSSAPSKAVREHIKAHIGWLERELANINSDLGRRVRQSPIWREKDALLRSVPGVGPVLSFTFLADLPELGALDRKQIAALVGVAPLNQDSGVLRGKRAIWGGRATVRAVLYMSTLAATRYNPVIRAFYRRLCAAGKAKKVALTACMRKLLTILNAMVKHHTPWRYAPSPIMGPCY

SEQ ID NO: 165284 - protein, 355 aa, unidentified
MNDTKYIGMDVHRESISIAVMNSAGKIVLECVVETKASIILQFINGLRGELHVTFEEGTWAAWLYDLLKPHVTKLVVCDPRKNASMKQGNKSDKIDARRLAELLRLDHLHPVYHGEHGLRSLKELVRSYLTITKDLGRVMSRVKAIYRSWAIPCTGKQVYAPQHRAEWLAKITEPGVRRRAEFYYQQLDALRSLRREVRRELLEESKKHPAWKLLCQIPSIGPIRAAVLLGILQTPHRFRTKRQLWTFGGLGIETYSSADHRYVEGQLQRSKKPASIRGLNENCNHDLKNLLKGAAIIASTKPGPFQEFYTGLLGKGMRPEMARLTLARKIATIVLIVWKKGVSFDAQHLKPQTA

SEQ ID NO: 165285 - protein, 390 aa, unidentified
MSQSNNYGRVIGLDVHPDSFAGAILLKGEDPASARVVSTSRRVELVQLEKWAQRHTSAEDVLVMEASGNAFAVAERLRALAREVVILDSHRAGKVGKAYCANDRVDAIKIARIYLTALSPVVWQPDAKTRERREVFSAYQGVVKEATRLKQQLRSMLNEHCVRLESGFRLSHPSAINRLLKMREWTPVRAMLLEQLHSGLVSARARRTKLRRYMAEEVLHEPELLRLTRLCGISLITLYGLSAAIGDIRRFSNSGKLAAYFGLNPSVEQTGNWEGSGALKRHGRGALRALLVQSAKKLLRVNNPLQKWGLAVAARRGSNRAAVAVARKLCVAVWHVMQGHVIGAIERMDTLHTKLHKLATDLGVPTIKQLGFETKEAFVQKKLYVLRSYA

SEQ ID NO: 165286 - protein, 338 aa, unidentified
MALYAGIDLHSNNSMVVVQDDTDNVVGRQRLPNDLRTVSAWLEPYRKDLAGVVVESTFNWYWLVDGLMDEGYRVHLANTVAIEQYDGLKYRDDASDARWLATLLRLGKLPEGYIYPRTERAVRDLLRKRSQLVGQATMNLLSIENLFARNRGRGISANHVKELTPEAVDAVFEDPNVALAVQSSLKVLDCLQEQIDVLEKAVHGQVRLRKSFKRLLTVAGIGKILALTIMLETGDISRFREVGNYVSYARLVGSSHWTNGKRKGSGNTKNGNAFLCWAFIEAANFAIRYNETIRSYYQRKQARKKRIVALKAVAHKLARACYHMIKEDVAFDVTRAFG

SEQ ID NO: 165287 - protein, 326 aa, unidentified
MNYDIGIDVAKDKIDCLWLKDITSLKIKTKVLPNSAQGFQQLKLWLEKHVCTELSHIYICLEATGVYHEALAYALFKMGVKVSVMNPAFIRNFAKGLGVRGKTDKKDSMVLARYSALIRPRLWQPEIEDIRILKALLSRLTGLENDLQREHNRLEKADISQASKTVIESIELMIEQLSNEVNRIKKLIDNHIEQNPKLKKDRSILKTIPAVGEVLSREMLSVLHSRDFKKASQAAAFVGVVPKLWDSGKLKGRTTLCKNGPGRIRAILYMAAIVATKYNPDIKIQYERLLKAGKTKMQALGAAMRKLVQICFGVLKHQSEYRSQAI

SEQ ID NO: 165288 - protein, 406 aa, unidentified
MFIGWDWATETHDVTVMDESGRRIDRWELAHTEEGFAKTLARLRRHGAPADLPVAIETTRGLAVDRLLAAGHPVVPVHPNAFHAMRARWGASKAKTDAGDSMKLADYLRTDGHLLPRLEPTDQATLGLQALTRQRADHVEAKVAAVNQLAALLDEHWPGGKAVFANLDSDIAMAFLERYPTPASAAKLTAGRLEAWCKHRGYSGKKPGSVLIERLRTAPTAASRLGGDVVKQLIRVQVQLVQGIRTTIRTLDKAIAEAAETHPYAPLFATMPRIGKVNLGQIIGEIGPILERTQTCEQLIAETGVVPVTRASGKSHAVSFRFATNRRARLTLTTFADNSRHSSDWAAKIYNDARARKKRHPHATRILARAWLRVIWACWRDGTCYDPATHQANGKIATAADIPLAA

SEQ ID NO: 165289 - protein, 410 aa, unidentified
MVCKVAGIDVHKKVLMVVIGEAMDPESIAERRRFGTTTSELRRLSAWLREQGVQEAVMESTAQYWRPVWYELEPYMQLQLAQAFSNRAPRGRKHDFRDAERLVRRLVAGELTLSFVPGPEQRSWRTVTRMKVQLTGDKSRLQSQLECLLEGMRIKLSSGVSDLLGGSGYRILRALAKGENDPKKLAALGDERLKCTEEQLTDALTGNLHPVQRRLLALYLDRYDVIVQQMEELNRLTAEGLKEPQEAVVRLAAVPGFGVDSAQQVIAEVGPEASTFPSAAKLTSWVGTCPGEHVSAEKNHSSRSAKGNKYMRRILNQAAQASVKKKGSHFQAEFRRLLPRLGYNGAIWAVAHRLCRLVWKILHKKVEYVEHGTELNPKAKSRRVRALVRTLRKLGYEADLKPLTPATAGT

SEQ ID NO: 165290 - protein, 338 aa, unidentified
MTLYGGIDLHSNNHVVVLLDEGDEVVLQRRLPNDLRLTLQHLGPYREVLQGLAVESTYNWYWLVDGLMDAGYRVHLVNTAAVKRYEGLKYSDDVHDARWLAHLLRLGVLPQGYIYPRAERALRDLLRKRAQLVRLRTTQVLSIQNLVSRNTGHSLSANAIKGWDAAAVEAVLPEPMLALAVEANRELLQHLEARIHALEVVIQGQLKGHTQLALLKGVPGVGSVLALTILLETGDITRFARVGQFASYCRCVDSQRVSNGKKKGEGNTRNGNRYLAWAFVEAAHFAVRYYRPVQRFYQRKRAQRGPVVAIKAVAHKLARASYYVLRDEVAFDMQRAFA

SEQ ID NO: 165291 - protein, 308 aa, unidentified
MIVQNYVGCDISKQWLDFFDEASGHYRRIDNQADAIAAYVAGLQPGRDFVVMEATGVHDRLLRHALAKAGVAFSRHNPAHTHHYAKSTRRRAKTDRLDARMLSDYGRRYQPAAEPAPREENERLQSFARHRDQLVDMRATLKKLLGEALDEAVVADLEDTIAGFDTRIKALESLIAKVIRQAEDTARDHALMVSVPGVSKVSALSLLAHLPELGQRSPKSIAALAGLAPFDNKSGKLNRRSQIQGGRSRVRRALYMAALSAIRTCDRFKKFYTELAARSGSKKLAIIAVARKLLVVLNAIIRDKTAFA

SEQ ID NO: 165292 - protein, 413 aa, unidentified
MGYKIAGIDVHKKVLMVVLIDATSPVEKPERRRFTTLPSDLRRLSSWLREQGVQEAVMESTAQYWRTVWLELEPHMLLHLAHAFSNRAPRGRKHDFKDAERLGRRLIADELILSFVPNGEQRIWRSMTRMKVQLTRDRVRLQSQIESLLEEMRIKLSSVVSDLLGVSGLRILRALAAGETEATRLAALGDNRLRCTEEQLLDALTGSSQPMHRAMLALQLERLHLIDTQIAELSNLIAQAMKPHQEAVIRLAEVPGLGVGSAQQIIAEVGAQAGTFSSAAELTSWVGTCPGKNESAEQNHTSRSAKGNKYLRRVLNQAAHAAVKKKGSHFQTVFRRLLPRLGYQSAIWAIAHRLCRVVWKILHEGARFIEQGSEPDAHTKKKRARVLVQALRRLGYDVAITAKHLANQNALQV

SEQ ID NO: 165293 - protein, 347 aa, unidentified
MVSVVEAFDYVVGVDTHARTHTYCLIQTRTGAVIDSAQFPASKPGNERAISWIQRRGNNSSILAAVEGTASYGAGITASLRRASIEVAEVRPGPKREHAHAGKSDTIDAESAARRVLGINVESLAQPRASGDRATLRVLLAARSLIDQQRTANRNALTALLRSFELGIDVRRPAKDEQISVIAKWRISQDPGIGPLRREAKRLAKTVLEQTYLLEKNHEELARLTEQLAPGLQEIQGVGPVTGAILITAYSHHGRIRSEAAFAALGGIAPLPASSGNTTRHRLSRSGDRQLNRAIDVITRTRMSCDPTTRDYVLRRQSEGLSKREIRRCLKRYICRSLYRELKTRMA

SEQ ID NO: 165294 - protein, 439 aa, unidentified
MRQRKSVRKKEMKLPTHLEHINRHAAGIDIGSRSHFVAVPEGSDEQPVREFSTFTGDLEELAEWLISCNITTVAMESTGVYWIPVFEILERRGLEVRLVNARHVKNVPGRKSDVLDCQWLQQLHTYGLLQGAFRPADEVCTLRAYVRQRSTLVRSAASYIQRMQKALTQMNLQLHHVVTDITGATGMRIIKAILDGERDPETLASMRDPRCRNSQSTIARSLKGNYRPEHLFGLQQAVELYEFYQTKIVDCDRRILDQLRSFDDHAGPGSVEDALIRMSGTDLTSIDGIDTTTALKVLAEIGTDMSRFKSSKHFASWLGLSPGTKVSGGKVLSSATKPSANKAAAALRMAAFTLFHSKSALGAYLRRLRARLGTPKAITATAHKLARLVYSMLAHGTAYTDAGQDYYEQRYRARALQNLKRKAQELGFELVTIQKAALV

SEQ ID NO: 165295 - protein, 345 aa, unidentified
MAIVEVTRPVTGGVDTHLDTHVAAVLDGTGGVLGVESFPTTPAGFTELHDWMIRFGDIERVGVEGTGAYGAGLARFLRGCGLEVIEVDRPNRQARRQAGKSDPADAVEAARAVLSGRATGIAKTGDGAVEAMRALLIAKRSGREARISCLNQLRHLGFCGPDDLREAFRGVPRTALGARAAALRPRVGGDDVAHATKIAMRTLGRRVLALDADNDELDARLAGLVHTTAPDLLGVYGVGVDTAATLLVAAGDNADRIRSEAAWAHLCGVAPLPASSGKITRHRLNRGGNRQANHALWRIVFTRLGSEPRTRDYLERRLAEGLSKREIIRILKRYVAREVYRHLPR

SEQ ID NO: 165296 - protein, 333 aa, unidentified
MKNYTTCIGIDVAKLTLDYCVITPDPQPEQGQILNTKRSIETFLKTLKKAGCEMNETLFVFENTGIYSSLLALVLSENQLDYAQVPALEIKRSLGITRGKSDKVDAKEIANYARRNTDKIALSALPELSLQQLRIVFAEREKTIAAIKSFERTMENEMFLSKEVFASVKAINRQTVKQLKKQLAMLDDRIKILVRENEILYKQQQLLKSIPGIGELTSVYLLIVTKGFTAFGNGRKFACYSGVAPFEHSSGTSVKGKTRVSHLADKKMKSLLHMAALTAIKYDAELKNYYTRKKAEGKHSMLILNNIKCKIVYRIFAVIARDSSFVNLHKFAI

SEQ ID NO: 165297 - protein, 355 aa, unidentified
MNNCTIIGIDLGDKKHAVVGLDDKANVVLKRWIPNTKADLEALFRRNRRAVFGMETGTHCRWVSALCGQCGCEVYVGNAHHLRSIFGNSHKNDMRDAEEIARLLHGDKRHFHPVQLRDAEHQNLVQLVKMREIVVSQRTKSANAIRGMAKANGVRLPDSDADSLHKKLAAVVDTLPESLQTLLGPQVGLLEKLCAAIEEYDRAIRDYRNAHFRKECDLLETIPGVGPVNAAAFVAFTGDVTRFRHARDVGPYYGLTAGRDQSSSKDEPKKITKEGNGFVRHLLVNAANLIMQGRGRNTELRQFGLRVWGNRGKVAKRKAKVALARKLAVTMAAMLRSGAPYNGIMEENENGQSNA

SEQ ID NO: 165298 - protein, 421 aa, unidentified
MTPPNEVVWAGIDTHTDTHTIALLDERGRPLGAETFTADPDGYDRLIGMLPEPRVVAAVGVEGTNSFGAALARRLTAAGYEVREVLRPRRSVRRRDGKSDPLDAVAAARSVMAGDGTSLPKSSDGWVEALRHLNAQRSQLVSAMTAISNSTNGLLVTAPESVRERYRGLRGETRMNRLAECRPAGGLVEHSVLAALKSAAKAWKALKRQAGLLEERMRLILEEHARPLLDMYCAGTVIAATLAIVAGDNPERIRSEAAFAKLCGVCPIPASSGRTNRHRLNKGGNRQGNMALHRIAIVRLRYHKPTRDYMAKKTREGKGKLEIIRCVKRFIAREAYRALISIRNGEAGRGTPAERGAKLRELRVSRNITQQQIGEALCVPSSRISEIERGARDLPELEQRAIQWIHSTTNPKQHTQTLDNV

SEQ ID NO: 165299 - protein, 429 aa, unidentified
MRTESTPGARGPVFCGVDTHADSHWLCVLDWRGRKVLSRQFPADAAGYEALAGAIAAAGEPACVAMEGTSSYGAGLTRHLASLGMPVREALSPARMQRRRPGQGKCDEADAERAARAAMSGSKLGTPKSQDGWVDGVRCMLAARSGAVKARTSAINTARSLLTTAPEGLRSRFRGMGGPRLMEELPSVRAEGALGAALGALADLWGAARDAALDTERAIEASLEENCPALLAMYGCGPVSAAKLAVAAGDNPGRLRSEASFAAICGACPIPASSGKTVRHRLNRGGDRQANSALHEIARQRVMRDPETAEYAERARGRGKSDREVMRCLKRYVAREAYRALMHPHEIRRPGDASELVAARRAAKVSQVRAASILGTSEKYISMLERGQRELKPIRRAYEAWVEAGLPLDWDRRAFEAERKMDSKKHLAK

SEQ ID NO: 165300 - protein, 412 aa, unidentified
MRVHYPCCAGIDVHKKRVTVCVRVTEAGKVQIQIREFGTTTGELLELCDWLKEKGVGSLAMESTGSYWKPLYNLMEGQFEILLANAHHMKTVPGRKTDTKDAEWIAELYAHGLLKASFVPDQEQRGMRELTRTRTGLVGERARLANRIQKLLEDANIKLASVASNVLGTSGRLMLRSLIEGQDDPKVVSDLAKGLLRKKIPALEQALHGRILPYHRIVLRELLRQVESLDESIANLDKAINQAMEDSDRPFETGVSLLTTIPGVAELGARSVLAEIGTNMDQFPSDRHISSWAGISPGNNESGGKRLSGRTTQGNVWVKRCLVQMANAASRAKNSYFQAMYSRLARRIGRKRAIIAVAHAILVAMYHMLKNGVPYEDLGADYFDRVNSERTIKHLVQRLGKLGVDVPLQGGA

SEQ ID NO: 165301 - protein, 338 aa, unidentified
MTTGLAAGTYELFVGIDIAATTAEVSIQRPGAKAGRSFKIDQTPEGFHRLVHTLQATDNEPSHVLVVMEATGSYWISLATRLVHEGFRVSVINPSQAHHFAKALLKRAKTEAIDAQTLAQLAMVLQPEPWMPPPKIYYELQQRLAQRDDLLNLRQQVRNQLHALDQHPEVSASVRTRMERLLVLFQSQIDEVEGEIAAALNQESAWAAAAERLQSIKGVGWVTAAWTLVTTLNFTTCDTVDALTAYAGLAPMPRQSGSSVWHRPSIGHSGNGRLRTAFYMATLTAARFNPAIKAFYNRLLEAGKPEKVARCAAARKLLHMAWAVVKKDQPFDPNYAQE

SEQ ID NO: 165302 - protein, 339 aa, unidentified
MRIIGCDLHKAKQTIAMLDRDTGEVVEHTLSHDGEAVREFYAALPKPAVVGIEATGSMGWFVRLMEELGLTCRVGHPAAIRTAEPRRQKHDRRDAQLLLRLLLEDRFPAIWLPTAEQRDLRALLLHRHQWVRMRTRVQQALQAMALGQGVRRGGTLWSTEGQAVLAALPLLPHATDRRDALQALYRQLAAHVERLDEQVQAFAEQRPGATLLMTHPGVGPVTAATDVFLGDPSRFPNGKALASYVGLIPSEYSSGARQRLGHVSKQGNPFLRFLWGEAVMGAVRRDPELRRFFRRKLPQKGLGKARVAAARKLGIRLWLMLRDQITYDEFCRRSRRRPS

SEQ ID NO: 165303 - protein, 345 aa, unidentified
MIIGCDFHPSWQQVSWLETETGETGERKLVQASGDAEQFYRQLPVPSLIGMEATGNCHWLVDLLAEIGHELWVGDAAQIRASCVRQQKTDQRDAEHILKLLVEGRFPRIWMPSSEVRDLRQLLLHRHKLVTIRTRVKNELQHLCLNQGVQRKHKLWSKAGQQVLRELPLKPWAARRREDLLGLLAMLDQQMEPLDRAVKEEAQRDKMALLLQTQPGVGAVTALAYVLTMGDVSRFARGKQVASYLGLIPREHSSGGRQKLGAITKQGNRMLRTLLVEAAQMAVRCDPGLRREYLHRCHQKPKAVAKVAVARKLAVRLYWMLRTQKPYPEVVRIESSSTEALVSES

SEQ ID NO: 165304 - protein, 261 aa, unidentified
MIIGIDVSKASFDVAWHEAGHPRHQTFDYTEAGITALMAATPATAHYVMEATGVYHSRLALALYQAERTLTVVNPLVVKRYAQMQLSRVKSDKADADLLRRYGEQQPLTAWAPAAEDIVELQQAHRWLDDLLRTRTQLGNRQEAAMHQPRPSTFVANQMAAQRTQLEQQINACEHHLEVLVKKSFSALYAQLLSIPSVGPRTAMELIIVTAGFSRFDSVKALGAYIGVTPTTCQSGTSVKGRGGIAKLGQGRLRQLLYLCS

SEQ ID NO: 165305 - protein, 408 aa, unidentified
MSKTCGIDWSERHHDVAIVDDQARVVGRARVSDDAAGFTRLLELLAEHRDGEDGPIEIAIETDKGLFVAGLFAAGFTVFAINPRAVARYRERYGQAGGKSDPGDAGVLANILRTDRHVHRPLPADSELVRAVKTCARQHQEAIWARQQAMNRLRSLLHDYYPQALQAFPNLAHRAAASVLRAVPTPQTAQRLTLNRVVALLKKAGRRNDPGLAETIRTTLRAPALRQPAPIEHALGVAAVGLIDVITAMSDAITALEAELATVFDEHRQAAIITSQPGLGPVLGARVLGELGDDPHRFTDTAGLRSFAGTAPITRASGRSRVVTSRRICNRRLGDACHWWAFAAITKSPGARAHYDHRRAAGDTHNAALRNLANKLLAKLWHCLQTGTLYNEATAWPALTDTPEQAAA

SEQ ID NO: 165306 - protein, 353 aa, unidentified
MKYVGLDWAYRTAQWCALDPGGEIAGEGRFAADRDGLARLVLELGDEVTACLEMMSGALWARDELVACGWQVQVADARKVKTVAPLAAKTDKVDARLLAELSRRQLVPALWLPSLDERALRERLRRRMHLVRLRTSAKGRIFGLQTQWGIRISLRRLRRADGMTLLERAGMPAVWRHSISECLALIDFLDARIVPLDAELRPFAQADPRAVLLDTIPGVAELLALTIAVEIGEISRFAGPEKLVSYGRLAPRVRQSGEGRPHTGPLNKSGSRLLGWAAVEAAQQAWRESNPWHQLYLDVSRRSRNHNSAKAAVARKILIAAWHMLSRNEPFNPAPRSTGGASVPASSRLALAA

SEQ ID NO: 165307 - protein, 411 aa, unidentified
MLEVKVEKCAGIDVGKKFLAVCILIGLAKQKPVGEVRRFGTNVKELERLRTWLLESGCTEVVMESTGSYWKPVFNILEGSLKVILANPEQVKALRGKKSDPNDSRWLASLLRHGLVQGSFIAPRDIRELRDLTRRRRRLVGDGAAEKNRVQKILEDANVKIGNVLSDVFGSSGQAMLEALLENKQGPAEIAQLGHWSLAPKIPLIVEALEGHRMSDHHRFMIRQCLGHMRHIEEMIEELDKEIGVRLKPYPQQVKLACTVPGIKPTAAASILAETGMDMSPEGPFPDCHHLASWATVCPGNNESAGKRKNGRTRPGNRWLRATLTPTGWAGAADKKSLFQFRYQRLKLRRGGQRAVMAIAHAQLIAIYWALRNGTPYPEQLQKLEQDRREAQIRYHLQKLNKLGYAPDMHG

SEQ ID NO: 165308 - protein, 357 aa, unidentified
MLGMGDSAPRKGADAMTFVGCDRHTRMQQVAVLDTGTGEVSEHRLPHEGTAVEEFYAALPRPVTVGIESTGYAVWFHTLMQRLGHTLLVGDAAKIRAMVVRKTKTDRRDALHILDLLHHDRLPAIWVPDPATRDLRALLTHRMRLVRIRTMVKNGLQAIALNSRLACGSKLLRQAGVAQLQALALPPHTARRRDQSLELLAGLTTQIRELDDAITTAALGHPDAPRLITHPGVGALTALTTIVVLGPVSRFHDSKHVVSYVGLAPALHAAADKYHLGRITKQGSPLLRFVLGQAAAHAARMDPDLKRTYGAIVHRRGRPKAKVAVARKLLVRLFIMLRDRIDYDEFRRRGRAALAAA

SEQ ID NO: 165309 - protein, 447 aa, unidentified
MKALPVLDCKAAAIDVGSEKLHVSIAGDTPEVFGTFTGELERLRDWFKEQDVRSVAMEATGVYWLYVYEVLEAAGLEVVVVNGRHVQNVPGRKTDMADCQWLATLHAHGLLRCGFVPPAHIRQLQDYQRLRADHLIGAASQVQKMQQALERMNIKFHDVISDLVGVSGLKVVRAILKGERRPGELLALCDVQIQKKKSERVKESLRGCWKKEQLFALRQGLELWEAYQQKIADCDGEMEALLHELAGPQPPESGGGKAVGIGPVALAPAKSLGKNAPVIERLQELVTRLCGGRNATQIPGLSTYLVLQLISEVGTEMARWPSEKHFVSWLGLAGGRKQSGKRKGRVKAHRNRAGRLFSAAARALGQSLDKALGGFYRRLRGRLGGLAANVALARKLALLFYRLLRYGMAYVEKGLKSYEARVLETETRLLRKLANKQGFTLIPTTVG

SEQ ID NO: 165310 - protein, 407 aa, unidentified
MEVLNPRCAGLDVHAKTVVACVRIASGATVVYEHRTVSTNTRGLLDLADWLTTQGVTHVAMEATGVYWKPVWHVLEGHYTLVLANAMHIRNIPGRKSDKNDATWISDLLALGLIRSSFVPPAPIQELRDLTRTRKQLVREIARHTQRLQKTLEDANVKLTEVISDILGTSGRAILTALVAGETDPERLADLTSRRLKATRAELVEALDGRVTAHHRFMLQLHLTQIAALDTAVADIEARIREALVPFRAAVSLLTTMPGVSETAAAVIVAEIGDDMSTFPSAGHLLSWAGLCPRLDESAGKRRSTLPLQVAPWLKTPLVQWAWAASRKKDSYFHAQFLRLKSRRGPKKAILAVAASMLTDVYHMLRDGVEFHDLGAQYFGQRDKERLTKRLLQRLHDLGVEVEVKAA

SEQ ID NO: 165311 - protein, 349 aa, unidentified
MRFYSQQHKFYCGIDLHTRVMYVCITDGAGKILVHKNLRSNPDSFARVIEPYREDLVVAVECVFVWYWLADVCAQLGVKFVLGHALYMKAIHGGKVKNDRIDSEKIAQLLRSGMLPQAYAYPESMRSTRDLLRRRMYLVRRQAELQAHIQNTRHQYNLPAYEKRLDRAVNREGIADHFEDSMVAASIQVDSNLLDSLHRQILFIEQLIGEKAHEQDPVAVQLLRTIPGIGKILALTVIYEIGDITRFSQVGNFISYARLVKCAHESAGKKVVGRNNKIGNAHLKWAFSEAACLFLRESDQAKAWHQKLISKYGKGKALSIIAQRLGRTTYTMLKRRTVFDHEAFFASLN

SEQ ID NO: 165312 - protein, 347 aa, unidentified
MKNTVIGIDISKKSTDWCLMQGAEVVSYHHVDNEIVAIESQLQELMDMYLIDRCELMVCAEYTGHYIYPLAVACQNKQVDLWLESGYNIKCEARKERGKNDKEDSRRIAEYGYKNRLDARYYNIPAQEFTILNSLLAEREDYVLARGKYEGQLKDQKNYSDPILYKAKAKRLGKLIRQYDKLIYETEQELEKLMKENETMGHQAALLETIPGVGRLTAMKMIAATKGFTLFENGRQFCCYAGTAPFAYTSGTSIHSRHKVSQRADKSLKAMLHICAVTVARRCKSNHFTEYYQRKVDEGKNPMTVLNAIRSKLVLTMFAVIRTDQPYSSEIVHNYVEKFSLKPIATS

SEQ ID NO: 165313 - protein, 321 aa, unidentified
MATTDSIEIFVGVDVSKAYVDVCVLNAARQHLWSDRVARQTAPLERLAQRLGPQCCVVLEATGGLEALPAAVLETAGLRTAVENPAKIRHFALSHGLLEKTDRLDARVLAEFARERQPRPRRRPDPQIEALSKLVTRRSQLVRLRTCERIRLRGETNAFCRQSIGAMIDTFNEHIDDCEQRIRQHVEASAELSARAKLLRTAPGVGEWTAFALLAWLPELGGCNRGQIAKLVGVAPLVKQSGLWRGHIMIQGGRARVRSALFMASLSAVRRNGYYRDFYLRLLARGKAKKAALVAVSRKLLLTLNQMLASSSLWENAFSTT

SEQ ID NO: 165314 - protein, 360 aa, unidentified
MGLYVGLDISQKQTTICVVDEQGKVVVQGGSLTRASDIDGWLGNRVDRAQIVRVGLEAGNMSSWIYSGLIKLGLTVVVLEAFQAHRFLATQRNKTDKNDARGLAQLTRMGEEFLKLVTVRSQDNQETRALLAMREHLAGQKRDLENHIAGVLKPFGLVVARGNVVPETFRERVIDALCAAADHGVEIRHFVVPPLDLYRNACSQLEVLNKQVEQMAADNPVCRRFMTVPGIGPVTALSFFSAVDFPQRFKHGADVGAYFGLTPRQFQSGETDHMMGISKRGDAMVRRHLVTAATVLLTATRKWCPLKAWGMKIAKRQGLAKARVAVARKLAVLLHSLWIKGEDFQWKAVPATDREGLVPA

SEQ ID NO: 165315 - protein, 368 aa, unidentified
MNKRTYVGLDVHARSVKGCAIDRETGEILRQSLAANDAAIADWAAGLPGPVLAVYEAGPTGFGLARRLAASGIECVVAAPSKLQRPSGDRVKTDARDAEHLARLALLGQITPVRVPGPRQEAARDLVRAREDVRADLMRARHRVSKLLLRHGLVYSGGHAWTDAHHTWLHRQRFDDPALQAAYEAGLETAELTLDRRNRLDAKITAMAATEPYAPVVRALMCLRGISVLTAFGLAVEIGDWNRFTGSTIGAYLGLVPSEHSSGASRSQGAITKAGNVHARRLLVEAAWHHRRPYTHASRDMRARWDAADEASRVRGHQGNHRLHHKWEQFEARHKRRVIADIAIARELAGWCWSLAAPVQQEHPWTDE

SEQ ID NO: 165316 - protein, 357 aa, unidentified
MKKRLNADMVNVNGKTVNIGIDVHKKSWHVTALIEGAVVVAVTMQPFYSVLQKLLVQFKGAKIRIAYEAGPGGFNLYDDLTADGIECIVVPPSLLPVESGNRVKTDKRDSRKLAQYLENNRLKRVYVLSKQERAHRQFVRTRRQLSNHRTDVMRQIKSLILFHGIALPGIDTGFWSRPFLASLRGVETDEYLSRSLNRLIDLYDYLTQQVKQMTKEVRKLARTEKYVQRGKLLQTIPGVGLLSAMEILTELQDVSRFATADQIAAYLGLTPSQYSSGQKVRMGRITHTGNHRLRTRMVECSWILIKKDTGLQKVYEVIKKRRGGKRAVVAVSRKLIVRIRRIVLDGVTYRTEFATAA

SEQ ID NO: 165317 - protein, 371 aa, unidentified
MKSIIYIGMDVHKKTYSLCALLKETGEIIGETKIPADVSLIIKFIENAKKSVDSDDVQIKTGYEAGCLGYSLYWQLAAKGIECDILAPSTMHRSAKNKVVKNDRRDAKNIAANLANGTYKSVYVPTDEDVEIKEYIRMMHDFKIELKKVKQHINAFLLRFGHHYPGKSKWIPAHIKWLKELELSGMYREILDEYLSQLEILSEKIERFKYRLEELSQKETYNEKIGQLRCIKGIDTTAAMTMHAETSDFDRFPTANAFASYCGLTPGEDSSGESYHRLGITKQGNSMIRTTLVEAAQTLVRGTIGKKGKKVKSKQKDQDVKVIDYADKAVIRLQKKYHRMIFRGVKRNIAITAVARELACFVWGIETGHIS

SEQ ID NO: 165318 - protein, 376 aa, unidentified
MSKIRCIGLDVHADSIAVAVAEPDNGEVRSLGVIPNQPEPIRKLVRKLGPAEHGRVGYEAGPTGYGLYWQLTELGVSCAVIAPTLTPTKPGDRVKTNRRDAEKLARCHRGGDLTPVWVPDAAHQALRDLVRAREDAREDQQRARQRLGKFLLRHGWQRPKDIKENWTQKHMTWIKSHVHFEQAASQAAFLDYVHEVEHAADRLQGLEKAMDDAIAVAPAEIQQVVQALQALRGVGKIVATTVVAEVGSLSRFRNPRQLKGYSGLVSSEYSSGNHMQRGSITKTGNAHLRRVIVEAAWAYPHKPWIGGWLAKRQQGLDEETKAIAWKAQWRLCTRYKKLAARGKNKPQIVTAIGRELLGFIWAIAVRAETRAAAQVA

SEQ ID NO: 165319 - protein, 388 aa, unidentified
MQHTVYEKEMENMVAGIDPARHSMQIALVSPSKEYFNKTFPVSPSTAEIMTSLIAKSTPVVVEGFATTGRLFFLELLNNGYSIGELNPNLGKHARILENEGHSDKSDARAIARAGIYFSSRLSIVSLKQNEESLAVLVKTRQRMKKELVADMNRTHSLLSETFGTFYQNLKNKIHSCRGRTFLKSFPSLNSLLENMGTPEVLETLDQEIINKLRLEKAWISKTLLAALEWEITFYLEKIEFYQNKLKDIEKQIAGLLETIDNGSLLQTVPGIGTVSAATIIAETRGLHRFRKESKFAAYCGLAPKLWQSGQMKTKNMKRKNYNRILKGTFYNIAFTAARVNKQAKEYYQKKINEGKHHRQALLCLARQYCRITYVMMKKNEAFHAINA

SEQ ID NO: 165320 - protein, 411 aa, unidentified
MHEKQKYLYVGVDLHKQHHVAVIINCWQEKLEEIKFENKPSAFSTFLLDIDKLIDDGLTPVFGLEDVGGYGRSLAQFLTDHGQVVKEVNPALSYAERKSHMTTQKSDSWDAECVARILLNKLNHLPDAKPHDLFWSIQQLVTRRNALVKAQGALKNQLHIQLSHHYPSYKKFFSEVDGKTALAFWGRYPSPLCLDGVGVKKLTTFLLEASNNTCSVKKASEIMKLVKEDGHTTKEHQETRDFLVRSIVRDISFKKQEMSYVEGELKQLMSLLDFQLDSMPGIDLVTASALIAEIGDVRRFPNANKLARFAGIAPVYFGSGGKGKEQKSKQGNRALHALFYNLAVQQVQVAKGSKLPRNPVFHAYYQRKLKEGKTKGQALVCIIRRLVNIVYGMMKHKTAYKLPIVHEKEIV

SEQ ID NO: 165321 - protein, 349 aa, unidentified
MSTHQCTAVTYGIDLGKSSFHVVGLDAGGSPVKRAKLTRATITRFFVNLPAALIGMEACPGSQWLARKLQALGHQVRIVPAQFVKPYVKSNKNDTIDAAAIAEAITRPTMRFVQIKHCDQVDLQALHRSRDLLMTTRTRLINQMRAFCLEYGVAMRNGVGAFKAALPAVLGDEGNDLTPAMRELLADLAQELTALEERIAQFTRKINAQADASDCARRLATIPGVGQLTATALVAAVGDARQFKTARDLSAWLGLTPAEYSTGGKTHLIGISKRGNSYVRKLLIHGARSCSMHLDRTKDRLGVWIGQIEGRLHHNKMVVALANKLARIAWVILTKPGALYERRAPHLAF

SEQ ID NO: 165322 - protein, 386 aa, unidentified
MPQMNDLSRSLVTLEQDATLIAVIEMGQSSWLVAGIVPGVERQPLKKLAVDESALLKLLNRWREEAEQAGHGIKRIAVVFEAGRDGFWLARWLRARDIEAHVIHASSVAVSREHRRAKTDRLDTELLKRAFLGWLRGERDHCKMVAIPTTNDEDAKRPNRERESLVGEQSRIVNRMKATLTRLGIRGFNPKLKKAAERLDGLRTPEGEPIPPNTLAELRRDMVRRRLVSDQIRQIEDARLERLEHAPGDGPHAMVRLLARVIGVGIETADMLVQEVLSRNMRDRRAVARYAGLTGSPDESGRKRREKGLARSGNARVRRGMIQLAWRFLMFQKDSALAQWFRSRTENVRGTRKTMIVALARKLLISLWRLVRDGVLPDGVILRPAH

SEQ ID NO: 165323 - protein, 337 aa, unidentified
MGLDLHARQSTMAILEDGEETIRTRTLHGSLRSVLAEVVRVKAPFEVCYEASTGYGVVYEALVGVADRVAVGHPAKLRLIFGSKDEHNRADAKRLARLLRAGFVPEVHVPPREVRRWRALIQRRRRHVVERSGVKSALRFLLRSLGIEAPKSLWSKAGLAWVRTVGFDDPSDALMRDEHLAHLEYLNGAIGRAERRLDEVASQHPGVALLETIPGVGPRTAEAVVAWIDDPRRFKRVKAIGKYFGLVPCEDSSAGYRRLGHITKEGPAVVRGLLNQAAWRSVASSPEVRAFFERVRRDDPDRKKIAIVATMHYLARVMLSMLRTGEPWRGSVAKGTH

SEQ ID NO: 165324 - protein, 412 aa, unidentified
MEVLYPRCCGLDVHKSSITACVLIAQSGKPLKHIRRFGCTTRELRELVVWLQEFSVEHVAMESTGVYWKPVWNVLECHFQIILANAQHIKAVPGRKTDTKDCQWIAELLQHGLLRGSFIPPLVIRDLRDLTRARTSLSQEHSRIASRIQKVLEDANLKLASVASNTLGKSGRAILAAIIGGEESCERLADLALGHLRAKIPQLQAALEGQVREHHRFLLQSLLRQLYFIETEIELLDARLEQLGQQHPDLAEALNRWVTVPGVDRVAAWSFIAEMGADVSQFPTAAHLASWAGVCPGNNESAGKRISSKIRKGSPWLRRMACQSAWAAARTKNTYLSAQFKKLAARRGRKCAIIAVAHSILVIGYHLQRKRCAYTDLGSNYFDRLHAEGLKRYLVKRLESLGHSVTLQPRIA

SEQ ID NO: 165325 - protein, 341 aa, unidentified
MGWTVAIGIDTHRDTHVAVALDRLGGGLGSRGVTADAQGYLSLWQWAKELGEPVFAIEGAGSYGAGLARFLVAAGACVFECERPRRADRRAGKSDLIDATLAAGRLLAGTPLARLRGGGVREDLRLLLLERRGAVQARSAALNQLQAVVVTAPEALRSRLRGLSGHQLARSARALRVRPDESATSARVLQRLARRAQQLTRELDELDRELEAIVAELAPDLLEECGVGPVCAAQLVVSSGDPTRMTSEASFAALAGTSPVEASSGLHQRHRLNRGGDRQLNRALHVIALNRVRWHTETASYHQKLLASGKTPREARRCVKRMLARYFHRRLLANPALNLTP

SEQ ID NO: 165326 - protein, 344 aa, unidentified
MTHFVGLDVSQKVTAICIVDDTGRRVWRGQCASDPEQIERVVRRHADDGARIGIETGPMTPWLVHELRGRGLEVTCLDARHARAALKMQINKTDQNDAEGLAQIMRTGWYRSVHVKSFDSHRARALLGARVQLVGMTTRLSNHIRGVLKTFGLLPGRMRGVPFDRRVEALLVDRDDVSPIIRPMLVAWRQLRQQVATFDKAVRALVKSSPACRQLIGVPGIGVLSVLAYVSMLEDPARFGRSRSVGAHLGLTPKKYQSGEIDRSGRISKCGDELVRTLMYEAAVVLMTRVKRASGLKEWAQAIARRSGAGKARVALARKLSVILHSIWRSGEPYRWSELPVAAA

SEQ ID NO: 165327 - protein, 375 aa, unidentified
MNTSQAEGMTVTIVDAARPVPGGADTHSDLNVASCLVTGGVDTHLDLNVAAALDPVGGLLGVAEFPTTLAGHRELLGWLSGFGPVARAGVEGTGSYGAGLARFLRAAGVEVAGVDRPNRQARRRSGKSDPLDAIEAARAALSGRACGAAKSRDGNVEAIRVLVVAKRPARSAKIQTLNQIRHLSFTAPDQLRQRLAGVSRQQLAARAAALRPPTVDSADPVITATRTALRILGRRVLALDAEKARIDALLATLVTQTAPQLLTVFGVGIDTAAELLVTAGDNPGRLRSEAAWAHLCGTAPIPASSGKVTRYRLNRGGDRQANRALWGIVITRLGNDPRTRAYMARRLGEGRSKPEVIRVLKRYVAREVYHHLPRP

SEQ ID NO: 165328 - protein, 321 aa, unidentified
MSNLEKKVIGVDVSSTILVMSFLDDENHSTIITINNSTTCIEKSLKRWDKHQFKIVVEATGSYSSKILYYAYSMGFEVYQVSGLSIKKFSEVKHHISKTDEQDAVLIRNFGEVMKMDPYEPKKENIEFLEQELNLWQDLEQEKARYTLKLKSLCQKPILNKSVIKHYETIIKRINKDIENLQKRLPSLEDKEFKENKDLLTSINGIGKKTALLLLASTNNFKNFKHSKALCKYFGVVPKMYHSGNKKISIGKCRTSKGFIRSILYVCSWSAIRFNKQCKALYERILEKKKCKKVALIAVCNKLLRQAFGIINSKIQYQHNY

SEQ ID NO: 165329 - protein, 410 aa, unidentified
MSDQDNSRDWPAFVGIDWGGSEHQLCVLDTTGARLTQQRVTHDVAGLAELDTALARHGTALPIAVERAEGLLVEHLQACGHIVFPVSPRIAARARERYRVAAVKDDRLDAFVLADTLRHEHERWRALTPPSPLLAEIKALTRDRDRLQQIQQATESQLRAILEAYHPAPARLFSSVDRQITLHFVLDYPTPAAASRIKTTRMNGFLSRHRYTGRVPGQVLAERLRENLLAASTGTVAGKSHSAQSFAQLLQLLNTQLAEYDDAIAAAVAEHPDAPIFASFPGVGAVLTGTLLAEIGEDRARFPTQATLLAESGLAPVTRASGRSRKVRFRYAANTILREAAMWWAYNSMKEAPWAKAAFREARDHRGQQHHRALRGLAARWMRVLWTCWSTHTTYDPKRHTTAQTALTTG

SEQ ID NO: 165330 - protein, 344 aa, unidentified
MQITTIGLDLAKSVFQVHGVDATGQVVVRKSLRRSQMLPFFAKLPACLVGIEACGTSHHWARELTKLGHEVRLMPPAYVKPYVKRGKTDAADAEAVCEAVTRPTMRFVPVKSPEQQAALSMHRTRDLLVKQRTQTINMIRGLLAEFGIDIPKGLERALLMARQIVDGKAPEVPMEAAKIVATLSQQALDTHVRLREIDRDLAVLLRGNNVARRLMTIPGIGPVGATALAASVTDPHQFRSGRQFAAWLGLTPLQKSSGGKERLGRITKMGDKYLRKLLIIGMTSLVRRAKYNPGKIDPRLADLLARKPTRVATVAMANKTARVIWAIMARGETYRTGHQPALAA

SEQ ID NO: 165331 - protein, 342 aa, unidentified
MNAVGIDVSKGKSMVCVMRSFGEVVLEPFEVLHTAQNLNDLAGKLKALDGETRVVLEATGNYHKPVAFVLHDAGLFVSVVNPVLIHDYDNNSLRRVKTDRKDAVKIANYTLDKWRRLRQYLPEDDTRLALKNCYRQYQQAVAIRTMLKNNLISSLDLTFPDANKLFTSPAKNSGCEKWVDFIGDFWHSECVSSLSPDAFSKKYLKWCQKHGYYFTRSKSDEVYACAVSAASLPKSTTSKILIQQQVAQLKSVSQSVAAFQQEMLRLSQQLPEFDTVMEMYGVGPSLGPQLMAEIGDVRRFSSKKSLIAFAGIEPQPNDSGKVVGNDKGISKVGSAVLRRTLF

SEQ ID NO: 165332 - protein, 337 aa, unidentified
MNSVYHTELSSHEGTRCQFNGGSGTIKLGIDVHQEFYVVVMQHGEANPKPPQRFHRQAFVYWASKLRAQGAEVHAVYEACGFGFGLQRKLTALGIHCYVVCPQKLDEQNKRVKTDGLDAKALCLRLDRFVQGNRHALAMVRVPTETEEEQRALHRQREQLLKVRKVLEAQGRSLMVNHGIEPVKNWWKPRTIASLDVPRWMKQLLQNSQAILVALEGKISALSVQLQSAAACSQPRGLGAMTSVIIDREIGDWHRFNNRRQIASYTGLCPGECSSGNTRLQSCVTKHGNPRLRAALVELAWRMVRFQPNYRTVRKWTERLRKGQPPPARRARKPSSP

SEQ ID NO: 165333 - protein, 341 aa, unidentified
MKIQNYAGIDLAKLTFNICIMVDGAMDNLIENEFANNVSGYKQLLDWMSKHHLKLDQTVFCMEHTGLYGQLIAHYLYEQSAVLWIENAVAIKRSMGIQRGKSDKADARNISEYAFKNEDRFKLWEPKRECVKKLHELLTARDRLVSCLTKLTVPIKEFEQTGNRKIARQIEKACRKSIKSLTENINEIEHEISSIIYNDEQLYDLHSLIQTVPGIGKITSMWMICYTNEFKNFRDAKKLACYCGVAPFEYSSGTSVRGKSRVHHMANKKLKTMLHMGALSVIRGKTDMADYYKRKVEEGKNKMLVINAIRNKLIHRLVAVANRGTPYQNRYENANLNLVIT

SEQ ID NO: 165334 - protein, 387 aa, unidentified
MVMDAVDQPAAPAPRRPWGVAGIDPHKRTFTAAVLDERGGLHGVASFDTSEQGLAVALAWLGEVGFDLDRVGVEGSAWLGHQVAASLAAAGYDVREVQASRTAERRRRRRRAKTDAEDAQAIARETLAHPDLPPAGKQHAPDPDWEELVALRNQRRSLIAQRRRLLNEAESVLVGLPLVVRAVLPDTSQVRPRLRALAQGAADQLELTGADRVHLAWLAASAADIGRLDQRIGQLDQRIPAVLARHCCTLTEEVGIAAVGAMELLVEVGDPTRFTTEARFARWCGAAPVAVSSGEGDGEPERHRLDLGGNRRVNSVLHTMHITQARCHQPAKDYLGGKRAEHKTAREARRAHKRLLANVIIRRMWADHQRRRSPTLNLSNPTTPKAA

SEQ ID NO: 165335 - protein, 347 aa, unidentified
MDKIDFAGIEVSKGELVVALQREGQRKPLKTFVNLSPGHQALIRHVSQPGRKVRVCLESTGMYGLDVALALQRAGLEVMVANPRAVRNFAKALMERSKNDRIDAGVLLEFAARMPFQAWVAPRPAALQLHALARRLEAITDMQTAEKGRLEAVQATETTPAAVRRDLERSLRSQRRALARLSGEAVKIIEQDPGLKLRFELLISVHGSIAAASAIRILAELAVLSEDFDVRQCVAYAGLDPRECTSGTSVHKKVRISKAGNAHLRRALYMPALVAIRHQPHLRAFYLHLRALGKPKMVALVAVMRKLLHAIFGMFKHEKPFDGSKVYVLPAPEAAPVAEIPTKEVAA

SEQ ID NO: 165336 - protein, 480 aa, unidentified
MIKSVGIDLAVTGEHKVRCLDERAQPCDGFSFQTTSEGLAKLEERIFGDGSNPVIIFEPTGLAWLIVAICLKARHPDCHLVRVQGRKVVALRKYLRRSSKSDKIDALTLAKMSFIDSEQLEEVYLPPAKIYAMHRLARQRKRLESEITARKTRIGSIVDGYFPGIRQAFSDPWSAHARAFLRSRLNPVSVVHASEKTLHAFLTKERRHGKADAVESHMVYLSCKDAATIYELSRPVGTIDDDFFADLQEEISREIRIMEMTEAESDAIAKRLEQLYLELHPSDNLRTIPGVGQHTAPMFLATVGDPARFRSQSAFASYSGVVPAAKQSSEAEAKGLRMTKAGPATLKWALYQSSQIGRRCDPQLASVYYREMVHHGKNHKQAMGAVMSHMGARVLAVLREDKPYELRDLQGKRITREEARRLILSDFQVPEEIKRERRRRKATSSSTKPQRKYREMVAHRTNEAAVAPQPVVACHLQNIV

SEQ ID NO: 165337 - protein, 368 aa, unidentified
MPNIPKQEAQTPMAIVADTYTYVVGVDTHAATHHYAIVETRSGGQIAHGKFPTHAAGLLRAVDWISRRTSVDDNPAVDQVLISMEGTGSYGAQAAELLAARGYRVVDAPSPKRARGSGKNDHIDALVAARGALPKDSERLADRRAGHTRAALQILLTARDSMRRDRTRSKNQLTALLRTHNLDIDARKGINKAHISLIAGWRKRPTDTTLARIARTEAHRLATRIHTLDADLDSNEKAINALVRELEPTLLDLPGLGPINAAIVLAVWSHPGRIHDEAGFAKIGGVCPLEISSGNSKDHRLNRTGDRQLNSALNSIANTRMRHDETTKAYVKKRKQQGQTKPRIRRCLKRYIARQIFRHLNTTTLDKT

SEQ ID NO: 165338 - protein, 337 aa, unidentified
MDKINDFVYFIGVDISKNVLDITVLNGSKQIFYERIDNTTKSLTKFLKSLVKKNINLEKALFCAEHTGIYGNNLKTVLKLNDYYLWLERALQIKRSIGIVRGKNDKIDSLRIAMYAYKNRIDSVKFQLERKEILSLKALIGLRRRLIQTKKQLSQVFIEKEFLSKQELKDLHSNCKDTLKAIQLDIKKTEKKMLEIIKLDQYLNRLNELITSVDGVGFITSLEIIVTTNEFRNIKEAKKYACYSGVVPFDYSSGTSVNKRSRVSPMANKSIKTILHMAAMSAIQCEGDLKHYYLRKVAEGKNKMSVLNAVRNKLILRIFSCVNQNRIYQKKFKLNLV

SEQ ID NO: 165339 - protein, 406 aa, unidentified
MQVYIGIDWSENKHDVAFMNQAGAVIADLTIEHAPDGFLALDATRAKLGISSAACLVGLETAHNLIIDFLWSRQYEQVYVIPPSVIKGSRNRFGSSGARTDATDARLIADVLRTDRGRLQPWCPDSLLTRQIRAQVSLIGYLTRNVVRTSNRLRAVLLRYYPAALCVFSTLRTQVALQFICAYPTPQAAAELTFEQFQSFAQEQDYRRAAHLRSYYVQLQGPHPQATPETVTVYQNEAVQLATLLLFLVKDKNKALRDLSQLFSQHPDAFIFASLPGTAQLLAPALLAKFGDHRDRFPSPASVQALAGTCPVTDSSGKRKVIYFRKACDRDFRNIAQQWAKASLSSSLWAVSYWKQVRPRCSSDSHAYRCLANRWLSIAWTLWQRRQVYDEAYHLQQRAQRSKPRA

SEQ ID NO: 165340 - protein, 390 aa, unidentified
MIYYVGIDISKYKHDFCIISNAGELIVENSSFQNNKIGFQSFLDQLKPYNKSEVRIAFEATGHYSLNLELFLTNNGYTYIKTNPLIIHQFLKARSLRRTKTDKADSITIAKYLMSIPYQPNSDLLYTIFTLKSLCRAREILIKERSKFAVLLTNELDKSFPELKPFFNNMISSTLLYILEKYTNTKHIAAMKDYDSIRKVSHGKFTYAKFAKLKELAKNSVGFHNENTDLLISTYVSIYNDFNNKIDPIEKQISTIIKVLNPRMLTIPGIGEISAATILSEYGDIKNFSSPNKMLAFAGLDPSINQSGTLESNGKMVKHGSGHLRYAIMNSAMTILRFSPEFYDYYLKKRSEGKCHRVSLSHVCKKLIRVIYTLEKNNIDFDPSLLKWYL

SEQ ID NO: 165341 - protein, 391 aa, unidentified
MIYVGIDVAKDKHDCFITNSDGEVLFKAFTITNNLDGFNDLYQKIETVMKDITKVKVGLEATGHYSYNLLGYLIDKGLPTYVINPLHTNLYRKSLSLRQTKTDKVDARTIASILMSDVNLKSYSDISYHNEELKSLTRYRFDKVQERAKLKTSVCRLICILFPELEKLVPTIHMASVYAMLSEFPSAHAVASAHLTRLTNLLSESSHGRYGKDTAVMFREAARNSIGSNMPAKSLELKHTIKLIQELTSEIDEIETEIKSIMDEVNSPILSIPGINYRMGAMILAEIGDFSRFDSPDKILAYAGMSPSTYQSGQLDNCYSHMEKRGSRYLRYALYNATKYVCHWDESFGTYLAKKRAEGKHYNVALSHATKKLVRTIYAMEKTGQSYSSAS

SEQ ID NO: 165342 - protein, 400 aa, unidentified
MVSDFIKGYNLMKIFVGIDIAKLNHFAAAISSDGEILIEPFKFTNDADGFQLLVSKLESFDKNSIIIGLESTAHYGDNLVRYLVAEFYQVCVLNPIKTCQMRKNNVRKTKTDKVDTFVIAKTLMMQDDLRFITFFDLDMMDLKALGRFRQKTIKQRTRLKIQLTTYVDQVFPEIQYFFKSGLHQHAVYALLKEAPSPKEIASMHMTHLANLLKVNSHGHFTKELAKELRVLAQKSVGANDSAISIQITQTIQQIELLDSQLEKIEAEMTDIMKFNDSVIMTIPGIGYINGGMILGEIGDIHRFSNPNKLLAFAGLDPSVYQSGNFQAKTTRMSKRGSRVLRYALVNAAWNVVRNNATFKAYYDAKRAEGRSHYNALGHCAGKLVRVIWKMLTDEVEFNLE

SEQ ID NO: 165343 - protein, 488 aa, unidentified
MATRRKQKPAAVSGPVEIPDAEHELVIERVAAVDVAKATGKVCVRLPGKTRRFSRVWDVPARTGAIAELGDQLLALGIEKVTVESTSDYWRIWYYLLEAAGLSVQLVNARDVKNVPGRPKTDKLDAVWLAKLTEKGLLRPSFVPPPEIRRLRDYTRMREDLTRDRTRYWQRLEKLLEDALIKISSVASTMITLSTRDMVEALIAGQRDPYRLAELARGKMKAKRAELITALDGRFDAHHGELARMLLDQIDALDTQIDTLTRRIEELVNELPGHTEAVDHPDSEQGPGAGAGTHSAADPRTATAATKSSRVDPTVEADCAIEADRALSTVDRLDEIPGISVANAHDILAEIGTDMSRFPTPEHLVSWAKLCPRTIQSGPVTRAGKTGKGNPYLKGALGEAAAAAAKTDTFLGQRYRRIAKRRGKLKALVAVARSILVVIWHLLANPAARFRDLGADYHTNRIAIERRLRNHIAQLAAMGYHVTLEPAV

SEQ ID NO: 165344 - protein, 427 aa, unidentified
MSETVIDLYSRAAGIDIHQALAVVSAIVPIGTDPFRCKFVRAEFDTFFEQGLKSLVEFLRPLGVEQVLMESTGVYWMAPYDALLDAGINVAIGNAHEIRGMRGRKTDRNDADWLARIAKQGSFHPSYIPGREYRGIRSLARYATRLRGTLSSEKNRLGKLFNAAGYRLNSVFSDMFGTAGMICVRGVLNGEKPEKLLDRVPTLGRYRHTREEMLLALGGKFEEGDLFAARSVLATIDHLDAQLSECVGELERIIREKGERKFELLQTIPGIDALAACLLLAELGGGGLEAFDSAESLCAWAGLCPSQNESAGKSRPAKARKGNKYLRRDVCECAGAAVKTKGTTMRSKFQNFLQRGKGYKKSIMAMGRKLLTYVYYVLKKDQPYVDPKIDYQKQHAEKNFQRFVAQLRRCTTKYDIQIINRETGESV

SEQ ID NO: 165345 - protein, 364 aa, unidentified
METVFYVGMDVHKDSIQVAVLKDGCARCEIEQRLAYDFKKVRKVFRSLQRKGTVLAAYEAGSMGFDLARLLSEMTIQCIVASPGKIARKPGDRVKTDRRDALMIARLLRSTELQAVHVPTREDEAVRDYLRARADLKLDYTRSKQRLSKFLLRHGYLYEGSLWTLRHMEWMKSIEFSLPMLADTFARYMETLLTQKERLRGMDTQIEALATGARYSEGVARLRCLKGIDYLTALSLICEVGDFRRFERAEQFMGFLGIVPGERSSGPKRRQGGITKAGNVHLRKLLVEASWHYRYHSCASKSLIERRAGQKPEVIAYAERARERLQNKFSRLVHGKFKKSQVAVTAVARELAGFVWGLMVGKVA

SEQ ID NO: 165346 - protein, 370 aa, unidentified
MSVRRILAKTIDTDLEYEAIGIDLAKNCVSAALLTTDGEVVCIDRLDYSELEKSAQVLCPTTFAMEPCTEMNYLVQKLEAWGHRCLVIGGKNVQNYVENHFSGQKTDLNDAQALAFLAQDTQLRTIKAKDVEQQKYASLTTLREQYIKQYRQTIVSLKGICQAWGLNISKGISGKAQLKDLIENHAAFPEELRESLVDMVTHAQTTQKVLNKITKTLELLAKNDKVCQLIQTIPGLGSICSCRLRATVGDIKRFKSPKDFPAYYGLVPRSIATGHNEKKGKITHRGDRTMRSLMVQGAGSVINMATKGKLKSKQLTKWILKKQKEKMPWGKLVCAVAAKLLRIVRAVLISNKPYNSKIAGVAKCSLPKGS

SEQ ID NO: 165347 - protein, 372 aa, unidentified
MSQSSTLYVGMDVHKESIAVASVAQEYGADVVSLGTVGTRQCDIDKLIRRLQSKSQQLVFVYEAGPCGSWLYRYLTKKGYTCWVVAPSLIPKKTGDRVKTDRRDAMQLARLMRSGDLTPVYVPAVDDEAIRDLSRAREDTLRDLKAAKLRLKAFLLRHDIRYTGRANWSPAHLRWLSEVVCPTPAQQIVFQEYVQTVTEQTERLGRLELELHEQVKTWRLAPVVEALQALRGVQFTVAVTTVAELGDLTRFENPRQLMNYLGLTPSEYSSGARRQQGSMTKTGNTHARRALVEGAWAYRYPAKVSRHLQLRLEKLPAALQAISWKAQVRLCKRYRQLMAKGKNANQVVVAIARELVGFMWAIAKQVPVPPKA

SEQ ID NO: 165348 - protein, 345 aa, unidentified
MSELYSGRQFVGIDLHRRRSVIVRMTAEGDPLECVRISNDVEMLSTVMARAGESPEVVLEATYGWYWAVDALRDLGAQVHLAHPLGVKAFEYRRVKNDERDARDLADLLRMGRLPEAWIAPPATRELRELVRHRAKLVGIRSNCKAQIHAVLAKCGIQVSMTDLFGLAGTELLDRLELPKPYAARIASLRRIITALDFEIDAFAGQVRGRLARDPGFVAVQSIPGVGPILGAVFVAEVGDVHRFARAEELTCWAGLTPKHHESDTHVHRGHITKQGSRLVRWAAIESVQILPKHTLVGRIRDRVGDRRGRNIGVVAAARRQLEFVFYALRDHRVRALQGTRPVAA

SEQ ID NO: 165349 - protein, 340 aa, unidentified
MTQHKIIGIDLAKNIFFLFEINHKGKNLCRKKLQRSKLLSYIANKETCTIAMEACSGAHYWAREFSQFGHEVILYAPQHVKTQRRKQKNDYNDAEAIAEVALYKRPHPVPHKSVEQQDIQSLIRMRRLLVTERTRIVNQVRGLISEYGIIMPKGAAAFRKAIPEILENDENKLSCILRELLSHQYERYLYIDEQVKWFDDKLNQTIKQFENAKRLMSIPGFGPLTSQAVAVWLGSGQQFKTGRDASAAMGLVPKQDTSGDKVILLGITKRGNTYIRSLLVHGARAALRRAKFKSDNLSKWMLELQERRGPNRAAVALANKLMRIAWAVITKNEEYQPKQS

SEQ ID NO: 165350 - protein, 457 aa, unidentified
MNPKRSKPKNDRTMPMIHPNAAAIDIGATMHTAAVRADRMPEPIRSFGTFTTDLHRLVDWFTECGVETVVMESTSVYWIPIFELLDARGFAVFVVNARDAKHVPGRKTDVSDAQWLQRLHSYGLLRASFRPKGQIAELRAYVRQRERLLEYAASHIQHMQKALTEMNLQLHHVVADVTGATGLRIIRAILAGERDSKVLACLRDYRCHSSAEAIEKALTGNYRAEHLFALELALALYNIYQDKASACDARIEAVLKELSISRGRDAGPLPSPRRHLHGKANGPDFDVRAALFKLLGKDLTQIDGLGSYLSLRLIAECGDDLSAWPSAKHFTSWLCLAPSNKISGGKVLSSRTRRSGSRASALLRLAAVTVGRTDTALGAFYRRLSARIGKAKAITATARKIAVLFYSAVRHGMEYVDPGSSYYETRYRTRVVENLHRRAKAFGFVLLPLESKAGAVS

SEQ ID NO: 165351 - protein, 377 aa, unidentified
MGDYSEAFVGLDTSKLRNAVAIADASRGGEVRFLGEIENTPAATAKLVRKLSAKYERLTFCYEAGPTGYGLHRQIKDLGFECVVVAPSLIPKRPGDKVKTNRRDALNLAKLLRADELTAVWVPDGRHEAMRDLTRARETAMLDLRTKRQHVSAFLLRLGRPYPESRKTWTKAHANWIASQKLEHPQQRLVLEEMMLAIRQAQERLQRLEQAIAAAVPEWSLAPVVTALMAMRGMDLVSATTLLAEIGDLSRFRTPTELMAYLGLVPSESSTGDTVKRGSITKAGNRRARRMLVECSWSYQHPPRVGQAKQPKVDAAPPAVREIAWKAQCRLYRRYRALIRKGKLKTVAIVAIARELAGFIWAVARAVSAAGVAAAPA

SEQ ID NO: 165352 - protein, 419 aa, unidentified
MKTWTELTHFAGLDWAGDHHDVAVVDTQGRVVAEFRIEHSATGWTEFRKKLAAYPAWGIALETRSGAAVEELLQSEGTVFPVQPRAAARYRERKAPSGVKDDQLDAWAMADALRLDGRHWRALAPEDPLIQELRLLCRDEVALIEQRTALINQLRAALREYYDAALQAFDDWTLPAAWALIVQFPTPEALSQAGKRAWEKFLHVHKLWRPETVEKRLELFAKAADWKRNEAVTRAKSRLAVSVAKLLQTLERQLDDYRAAIEALFAKHPDHDLFGSLPGAGGKLAPRLLSELGEDRARFDTAQALQSLAGTAPVSFQSGQIFRVKMRRCCNAHLRHAVHLWADCSRAVCGWAQAYYQAQREKGKSHACAVRCLGHRWLEVLWKMWQDRTTYDGELHARNQQKHGSWVVQILTAPKAKPT

SEQ ID NO: 165353 - protein, 414 aa, unidentified
MEVKQQADRAAGLDVHRDNVVAATRVNEAGGEVVVTKRRFPVTRRGIAELVAFLKEAEVTRVAMEATGVYWKPVYYPIEGLFDELWLCNAQHVKNVPGRKTDLSDAEWLADVAAHGMVRPSFVPPPEIRELRELTRYRKTQIDARGMEIQRLEKTLQDAGIKLTSVASRVWSVSSRKIIEALIAGERDPAVLASLVLGKLRPKMAELTEALDGYFGPHHALVCRQVIAHIDFLDESIKNLSEEIANRLLPFEAAMTLVCSITGIAEPSAQAILAEIGVDMSRFPTAGHLCAWAGVAPASYESAGKRRPAGTRHGSAWLKRVLIEVARAASRTKGSYFSAQYSRIARRRGPNKAAVAVANSMLAVIWHVLTHGCIYEDPGADYFERRHDPAIEAKRLQARIEALGFDVTLAPKAA

SEQ ID NO: 165354 - protein, 285 aa, unidentified
MNAATHTLGIDIAKGNFEVNLRTLQSGQARHSCSFPNNLQGFGALQRWLIQQGITQAPNLHACLESTSRYGDALAGWLHSQGYQVSMVNPRRTRHYADSQLCRTITDRIDAAIIADFCVDQRDKLLLWEPLPSQHRQLQDLTRTRAALVEHHDGLANLLESATGLARKAVQRQQANLQREIERLELQIKKLLDQIVGSAFQTQVALADSVPGVGLLTAVTVLAELPPLDKIAHAHQAIALFGLDPKSKTSGTSVKTPARISKMGSKRGRRALYMPALVALLCSDD

SEQ ID NO: 165355 - protein, 350 aa, unidentified
MVGADVHEKSMMLKIAVGRGGARKRSFINDPEGRRAMISHLKESAHEIGAERISLVYEASSLGFRLYDELTEAGIHCAVVAPTKIVRSMKDRRRKTDERDAELLLELLRGHVLAGNDLPRVWAPDAATRDDREIVRARLDVAEKLTGVKAQARTLLKRQPLEKPSGLGQGWTKAYRAWLRGLVRGPGPLPYGARRALESLLRQMRGLEEEIERLDDEVAALSEQAAYAKPARELMQVKGVGLHTAMVYLTEMGSLKRFGNRKQIGAYLGLVPSAHESGQSGERKGHITHHGPWRVRRVLCQAVWARIRSHRPTQADYERLVARNPKHKKIAVVAMMRRLAVQLWHVGLAA

SEQ ID NO: 165356 - protein, 338 aa, unidentified
MEWTVAIGVDTHKDVHVAVALDGLGAQLDSREVETTAAGYRSVLSWALELGAPVFAVEGAGSDGAGLVRFLERAGVPVWECERPRRQERRRGKSDLIDASLAARRIVSGEGLSIPRGGGRREDLRLLLLERRSAVRARTAALNQLSSLLVTAPEQVRARLRALSGERLAAAAARLRPGSDAITAVLRRLGRRVARLSQEIAEVERGLAALLAELAPDLLEECGVGPVCGAQLLVSSGDPSRITSEASFAALADTSPVEASSGQQRRHRLNRGGDRQLNWALHVIALARIHHHPETAAYHQRLLAAGKTAREARRCVKRALARYFYRRLHEMPRLALTT

SEQ ID NO: 165357 - protein, 324 aa, unidentified
MFYLGVDVAKKKLDCMLLDTSSGKMKSKASIPNTPAGFAELLEWLHKNHAVDPHVVMEPTGMYHEGAALALADSGLVVSLVNPAQLRAFAQGLGVKTKTDKADSAVLARFGATQNPAPWQPPSTSARRLKALLTRRDAVADDLQRERNRQEANQFSSIPEAVGDSIAQSIDFLETELKRLEKMIADHIDDDPDLRNKKELLETIPGVGPRVSGHMTALFAGRTFGSAEQLAAYLGLVPVMWESGSSVRGRPRMSKAGPAYLRKILYMPAVVARRWNPHIKALNDRLLAKGKSKMAVIGAAMRKLAHLCFGVVNSGKPYDSKFAM

SEQ ID NO: 165358 - protein, 429 aa, unidentified
MQESASTAPVEGVAAYVGIDWADQKHDVALRSASEPGKVEHRLIAHEPEALMDWLGELQQRFGEKGKILVCLEQSRGALIYHLMGYEFLELYPVNPSQLASFRETFSPGGAKDDQPDAELLCELLYCHRDRLKAWKPDDELTRKLAFLNEGRRKAVDQRTQLANEIKSQLKVYFSLALQVLDNDTSTALAADLLLQWPTLDSLQKQSAHKLRKFFYAHNCRNEQKLLERLELIKVAKPLTRDPAVIEPAALRVQLLAQQLKSLLPYIARYEKWIAELFDAHPDSFLFRDLPGAGPALGPRLFTAFGTDRGRFEHSINFSSLSGIGPIRRASGKKTGKNASVHFRHACPKFLRQSLHEFGLHSIRSCPWAKALYQSLRARGKGHHAAVRAVTFKWIRILFCCWKNRVPYNPERYLQALQTRGSVYAEAAG

SEQ ID NO: 165359 - protein, 421 aa, unidentified
MKGVRSKKVKAVKEGTLIVGVDISMTSNTGYCTTTDGRDTKPFRFDNTREGLDKLWSIIVMSKKKFQCNEVIVGYESTGPYGEPFVHYLMKKPVTVVQVNPMHTKRLKEINDNSPLKTDDKDPRVIADVIRLGHALSVVIPEGDAAYLRRINNTRERHINERTALLNQLQQLVFLLFPEFKIVIKNIKIKTALHILKKYTTPDTIGELHKEELGEEMRKKSMGKYGITHAESLINHAKNTIGIKEGVTGLALDIRHILMQLEMIDGFIAEIEIEMEKVLKRIPYSSRLLSIKGLGTVTVAGLIGEVGDFTKFNTQSEITRLAGLDLYEISSGIRKGQRRISKRGRSLLRKILYYAAMQTIRKNGIMHEYYTRLTDRGMKKIMALVAVSRKLLRIIYAIVRDESEYAVDYESLKRKVIKKAA

SEQ ID NO: 165360 - protein, 403 aa, unidentified
MIGVDPHKGSHTAVVLDAGEVVCGQVRVTARRDQLLRLQRWAQPWPDRVWAVEGARGLGRLLTQQLLAAGERVVDVQPKLAARVRLLNTGQVNKNDPNDARSVAVAALRSRQVSEASLEDHTVVLRVWARRYRDLGRLRTQVMCRLHTVLCEMVPGGFSKEISAGQAIQVLAGITADTPMTAARLELAHDLVDDLQRIDDQRREVRRRTARAVASSATSITEIYGVGPIVAATVIGYVRDIHRFPTRDHFAAYNGTAPIEASSGNRKIYRLSRRGNRQLNYVIHMAAVTQIRNHGTAGRAYYDRKIAEGMTGKAALRSLKRKVSDAIYNRMINDASRPPSNDTAKDPGGQTGNDSASSVTGSHPEPPALRRSHSRASAKPKAQASQAPNSSSLRSSRPRRRSP

SEQ ID NO: 165361 - protein, 322 aa, unidentified
MTVYLGIDIASKKFDAALLRNGSYRCKAFANSVAGFTALVKWADADDFSEIHACMEATGDYGTALATFLYEKKIKVSVVNPSRIKGYGMAELSRTKTDKSDSKLIARFCRATAPALWQPVPQPVRTLQALVRRMDTLKGMLRMESNRTDNADASIQPSLLRITIQLKEEIEIIRQEIKKHISSNAELKRKEALISSIPGIGSVTGAVILSFMADKQFTKAKEVAAFLGLNPRHHQSGSSVKGKSRMSKTGNAFLRSAMYMPALVALKHNPDIRAFGHRLRLAGKPGMLIVGAAMRKLIHIIFGVLRSGTIYVPQISGESACK

SEQ ID NO: 165362 - protein, 359 aa, unidentified
MIAVGVDVHKRQCTVAIQREDGGLKCFGPMQNTREGWRELLRQLPPATEIALEVSTSGYFAMSVLEEEGWLDRAHWVHTAGIDSLRRQKYDRLDAKRLARKLSVAERDPLPEAWFPPPEIRRLRLRARQRCWLAVVRTQVKNRVQSLLQMHGLRPPVKDLFGQGGRAWLAAQVLPEATRESVDQLLRVHDFLVEELGKAEAYLRAVEGQFPELARLRTIPGIGEILAPVIWSEIGRLERFRSADALVNYSGLTPSLYQSGEVSIRGGITHQGSAWLRWALVQAANALTDGDSPFAERYRRLRRRKPSNVAKTAVARSLARCVYGVLKSGGRYQKVRWGHRPSRVVSSSGAGKPEVAIGH

SEQ ID NO: 165363 - protein, 415 aa, unidentified
MANPLLVGVDVHRQTNTCCLMDRDGQVLGRRFTIDNNRPGAEAFVRQLAHQVLAGDFDAIQIAAEATGWYWWHFFQTLARDPILQQWPLQLYALNPRLTANFAKTYVDRDHTDTSDAFVIADRLRLGRDLPPAFQLEERYLALRLLTRYRFHVVHLLGREKAYALAILYLKASEYGRLKPFGNLFGAASRAVLQEFTSLEAIAAMPFDELVEWLDVRGKRRFADPQANARTLQQVARDSYALPQALQQPVHHILTWSLQHVTFLDTQIKRLDSAIAEQVASMPHSLETIPGIGPVFAGGIVAEVGDLARFDYDQAKVAKFAGFKWKKHQSGEFTAEETHLTRTGNRYLRYYFCEAANAVRMQDAEYAAYYERKYREVRQHQHKRAIVLTARKLVRLVVRLLTTNQPYQPRRSATS

SEQ ID NO: 165364 - protein, 387 aa, unidentified
MPQPAAVLPHASPDYDRTLVLAIELSSKSWVLAAQVPGLAQVKAKRTIEPTKEALLGALASYRARAAAAGHQIERVVSIYEAGWSGFWLARWLITQGVQVHVVQPSSVLTDRRMRRAKSDGIDAELLLRTLLAWLRGEPRVCSMVPIPDQTDEDARRAVRERGELVAERVALVNRIGAVLATLGAGDYNPLLQSRRRRLNELRTGLGEPLPPHARAKIERLLARLELVLAHITELERERNAVAETAAPDHAAKMIQQLAGLRGIGVQSATVLVREAFVRRFANGKALGAYAGLTATPYSSGGLEREQGIGKAGNRRLRSVMVELAWLWQRYQPGAAQVVWFRERVGKTGRRLRKVMVVALARKLLIALWRYVTDGVVPEGAAMKPAT

SEQ ID NO: 165365 - protein, 322 aa, unidentified
MLYAGIDVSKLSFDVAILNNGSYQNMQFANNLEGFKALSKWVKSFRKEVIFCMEATGIYGLALAKDLVQKGEKVIVANPIKTNAFAKMEMSRNKTDKADAQSIARYCKHLDDKGEITKNLFKPKGEAFEKLQFLITRLEQLDKIATQENNRLDVSLDKEAVRSIKYIISHIDKQIIKIKRVLKEIVKQDDTLKQQVDLLISIPGIGEKTAWSILAYLGDISLFSNAKQVTSYAGINPKIEQSGTSINKSRLSKIGNKRLRKALYMPALTAVKHNPLMKDLYERLQQKGKPNKVALCAVMRKLLVLAYGVLKSGQAFDPYYQK

SEQ ID NO: 165366 - protein, 427 aa, unidentified
MYRIAGIDVHKKKLAVVVSDVEVHGEYQFERGWFGANPEQLRCLSQWLVEHQVEEVVMESTALYWKPVWGALERYWQPICEKGEGAGATSGILHLAQAQSNRGPRGRKKDFRDAERLVKRLVADELKLSFVPDGEQRLWRTLTRRRYQLTRARVQLQNQLEALLEEAHLKLSSLVSDLLGVSARRMLQAIADGETNPEALAGLADRRLRATPAQLSDALGACTELHAVYRRLIKMMLGELKVIEEHTAELNQELATLLRPHQDAVERLAEVPGLGVDSAQQILAEVGANAVVFASDKNLCSWVGICPGDEESAGESSSHRCPQGNRQMRRLLNQAANAAVKTKGSIFEIVYRRLVPRLGHNQTIGAVAHRLCRLIWLLLRKGVRYEERGPAVSQRSRQNRTSKMIRELRTLGYRVEFLNAVPSNPMP

SEQ ID NO: 165367 - protein, 353 aa, unidentified
MSKILAIDLGKNNSAICIFDRSSLKSKFRTVHTGKQIMHDLFTEYQDQIEIVLFETGSQMGWVADILWALNIPFKVANTNHAAWKWKNNPNKSDRKDAQRLAMMYHSGFFPTVHVPKREVRQKRSMIVYRADIVTRITKVKNSIRALLSREDIHLPSNKKGWTIKALALIRELALPIKEITNLEDIWKGHLHCELELLDNLTEQLRNIESKLDDLGRSDEKIKRLRTIPGVGPRLSEAAVAIIDDPHRFKNSRHVSSYLGMVPRRWQSGQVDITGRISKQGNKLLRTLLVEVSWLGLRESWMRKIYDRVRRGDKKRSKVAIVAVARQLLVRCWAILRDGSCWDADHAKRFVHC

SEQ ID NO: 165368 - protein, 353 aa, unidentified
MTTLTDLREVVDVVIGVDTHVHTHSAAAVQAATGGVLAEITVEATAEGYAALVEFAGEHATLRAWAIEGTGGHGAGLSRYLLDREEIVVELDRPKRATRRNGAKSDPLDAIRAAREALARTRLGTPRSGGDRQALSVLLAARRSAVNASTEAQQQVFSLVIAAPEPIRARFRGQKLPGMLATAASLRVRSSWDVETTTTVLALRSLARRVRALSIEAAEHEKAIRAIVRGWRPDLLEQFGVGPIVAATVLCAWSHPGRIHSEAAFAMLAGVAPIPANSGQVTNRYRLNRYGDRQLNRALHTITRSRIRYHEPTQVYLARRTSEGKTSREIKRCLSRYIARDLYRLLESGPTTA

SEQ ID NO: 165369 - protein, 423 aa, unidentified
MKRHGGWEGGSMETAFRLFAGIDWASEEHRISILDANRNELENKAYKHSGTGLSQLADRLTTLSGSDVSTVAVGIETPHGAVVETLVERGFAVFSLNPKQMDRFRDRHSVSGAKDDKRDAYVIAEALATDRKKFHRVQLSGPQIIRLRQLCRSDEDVKQNQVQIGNQLRDLLNRYFPQMLALCPAVDEPWFWDLLEKAPLPEQAARLSASKIQRILSAHRIHRIDGKQVGETLQVPALHLAPGGADAASEHMLLLLPQLRLYHQLRKQIESRIDSVLDEMGSNEQIAGHRDVNLLRSLPGVGRCVAATVLAEASQALAERDYHALRSYAGVAPITRRSGKRKSIIMRHACNERLRNAFYHWSRVSTQHDSRSKLHYANLRAKGHTHGRALRGIADRLLSVLIAMLRTGTAYDPARRGQAVTAA

SEQ ID NO: 165370 - protein, 316 aa, unidentified
MTDTPAFIGIDVAKDHLDVHVLPQGTAWRCAQCPQALADLAARLAALRPALAVLEATGGLEYPAAAALAAAGVPVAVVNPRQARDFAKATGRLAKTDAIDAEALALFAQRVRPPARPLPDAAAREFDALLQRRRQLLEMRAAEQNRLQTAHAAKVRASLQAHIAWLSKQLDKVEAELSAAIQASAVWRVKDALLQTIKGIGPTVARTLLAALPELGTLTRQQVAALAGLAPVAYDSGKLRGQRHIRGGRADVRSALYLAAWSAARFNPALRAFSDRLQAAGKATKVRLVAVARKLLTVANAVLRDGRAWDPALAAR

SEQ ID NO: 165371 - protein, 391 aa, unidentified
MIYVGIDVAKDKHDCFITNSDGEVLFKAFTITNNLDGFNELHQKIASVMDDVAKVKVGLEATGHYSYNLLGYLIDKGLPTYVINPLHTNLYRKSLSLRQTKTDKVDARTIASMLMSDVNLKSYSDTSYHNEELKSLTRYRFDKAKERAKLKTSVSRLVCILFPELEKLVPTLHITSIYALLSESPGAKHVATAHLTRLTNLLSEASKGRYGKDTAITFRDAARASIGSNMPAKSLELKHTIKLIQELDSEIDEIENEIKIIMDEINSPILSIPGINYRMGAMIIAEIGDFNRFDSPDKILAYAGFSPSTYQSGQLDGAYAHMEKRGSRYLRYALYNATKYVCHWDPTFAAYLAKKRAEGKHYNVAISHAVKKLVRVIYHLEKTKQQYIKAA

SEQ ID NO: 165372 - protein, 348 aa, unidentified
MAKTTFDELMSIGIDIGKDIFHIVAFDPEGHLVMRKQIKRLALVATFDKLPRSVVGMEACLSARFVSRTLRKMGFELRIIPAIYVKPFIKGQKNDYNDAEAIAEAALRPNLQTVPEKNQEHLDLQALNRVRSRRTATINQIRAFLIEQGITVRKGLRALKNSFEKILEERKDEVSPRMREILIGLYGAWLWLDDRIDTVSKEIEQISRTEENCVNVITISGIGPMISTAMVAAIGTGEAFGRGRDFAAWVGLIPRQYSRGGRTVLGRITKRGSWYLRMLFVQAAKVILMRTNRWPDFSFGAWLTKAAELMNRNKLAVALTNKLARMAWSILRHKTAFDAPRDEAAIGV

SEQ ID NO: 165373 - protein, 315 aa, unidentified
MTIKLEEYVGIDVAKDKLDVAVLGQKATSEAFNTKKGITVLVKKMCQLNPKLIVVEATGGYEEALVLSLFEAGMPVALVSPQRVRQYAKARGLLAKTDKLDAQNLGEYGKNIQPRLFVAKSEAGRRLSAIIGRRRQLGDMQKAEKNRFRTAYAQMRGSIQTVIDCLETEIERLDTEIRNFMKEHENFGEQEKLLRSAKSIGPVTAATLLADLPELGKLDRKQIAALVGVAPMNHDSGKKRGYRKTKGGRPEVRSVLYMSALSAIRYNPVIKAQYDQLVKRGKEKKVAITACMRKMLTILNAMMRDQQPFRAIPVS

SEQ ID NO: 165374 - protein, 417 aa, unidentified
MGAGYRCSIGDRVGRTKDCFMDTSYAVFCGIDVGKGEHHAVGLDAAGARLFDKALPNDETRLRAVFDDLAARGPILVVVDQPNTIGALPVTVARACGHDVAYLPGLSMRRVADLYPGQAKTDARDAFIIADTARTMPHTLRRVDIGDETLTELGVLVGFDDDLAGEATRISNRIRGLLTGIHPALERALGPRIAHLAVLEILSRCGGPSGIRQAGRRRITTLAVKHAPRMGARLVEEIFAALDQQTVVVPGSTAAEIVLPKLADSLKEVLQQRKSVAEDVERMLDEHPLSRVLTSMPGIGVRTAARILIEVGDGSGFASAGHLAAYAGIAPVTHRSGSSIRGEHPARSGNRKLKRALFLSSFAALHDPTSRAYYDRKRAEGKKHNAALICLARSRCDVLYAMLKNKTLYQQPAPAAA

SEQ ID NO: 165375 - protein, 323 aa, unidentified
MTTQACLGIDIAKRTFDAVLLQDGRTRHRQFTNTVAGFLQLEAWLRDHATAPLHAGLEATGIYGDALALFLHQRGAPVSVINPARTHAFAKSELARTKTDKADAALIARFIAANRPPVWTPPPPEQRQLQALVRRLDALHAMYRQEHNRLDLEDAASILRESIAAHLTHLDDQIRQLQHRLREHVRTYPPLQQRCVLLQSIPGIGECTALKLLAELPSPSCRTARQAAAHAGLCPRQRDSGSSVHGRTRLSKTGNARLRKALYLPAVVAMHHNPILQEFARRLLERGKPKMAVVGAVMRKLLHQAFGVLKHGQPFDPNYALTP

SEQ ID NO: 165376 - protein, 354 aa, unidentified
MSQTLNTAIAVIGIDIGKNSFHVVGLDRRGAIVLRQKWSRGQVEARFVNMPPCLIGMEACVGAHHLSRKLREFGHDARLMPAKYVRPFSKGQKNDFNDAEAIAEAVQRPTMKFVATKTAEQLDLQALHRVRERLVSQRTGIINQIRAFLLERGVAVRQGLRFLRAELPRLLATPPDVLSPRMVRIIEDLAGDWRRLDDRVEGLSSEIQSIARQDSGCERLMSVPGIGPIISSAMVAAIGTGDAFSKGRDFAAWLGLVPRQMSTGDRTILGKISKRGNRYLRVLFVQAAWVVLIKPKSWERHGLKSWIEAGKKRLHRNVLAIALANKLARIAWSVLARGQAFEVRKVDEADAQPA

SEQ ID NO: 165377 - protein, 356 aa, unidentified
MHSMNRELRRVIGGVDSHADTRHAAALDERGRLLGTKSYAVSAAGYRELLAWLASFGPIDRVGVESTGSYAAGLTRHLLAEGVRVLEVNQPHAHTRRRRGKTDAIDAELAARHALSLASAVTPKQSSGIVESIRQLRVARDSGVKSRSAAIVQLGDLICTAPGELREQLALRKTLKGKAALCRRLRPDTDRLGEPVNAAKLALRSLGRRIALLDDEIAELDAQLTPLVATAAPRTTALLGISTGHAGQLLITAGENIDRLHSEAAFAALCGASPIPVASGKHGRYRLNRGGDRQANRALHMIAVCRLRHCPQTRAYAQRRSSEGKTRKEIIRCLKRYIARQAYATLRDDLRSLTPA

SEQ ID NO: 165378 - protein, 343 aa, unidentified
MVTIGHDAHLKTSTMTVLDHDGKKLFRKKLNNDPQELLSFLRGIPGPKQLAMETCYNWPVFYELFKNDVTEFHLLHAKKLRSVIESQAKTDGNDSDEIAYLIHSGRPLVRSYVANMDTRCFRRLLRTRVSFSLDITRIKNQVHALLNANTFYSQRPKSFKDIFCKRGLEYLRSVQLPQEERFVLDRLIDKKIELEHRRDEFDKYIQSLNFHAKDLKWLETVPGMRGMLFKYIVLSEIDNIHRFRNARSLAAYCGLVPKEHSSGDKNRKGGLRSECNQFLRWAMIQAVLPAIIKDKGLRHYYQSIKERSNSSAARIATARLVLKAVYCVLKEQRSYRMQAVNRV

SEQ ID NO: 165379 - protein, 324 aa, unidentified
MKTQSIGVDVGKTELVASIRNSNGRLAMPALFPNSSLGFRKFLVYLKTSDVSEDDPILFESTGPYHWQACRTLADEGYFVKVANPLHTKQIARLSIRKRKTDKVDSQNLAFLASQDYGYRFVETEEMAKRKALVRHYWKLRQSATDHLRHDRYMKEYRGINDESISKYMIKHCEKLKKIIVKEWDKGNDVKYLDSIPGITPFLAATLLAELLPLERFKTIDQIVAFSGLDPSVKQTGGKTGHHGHISKRGSPTLREALFLAAFGSFQREPMKSLYVRYKARGLHHNTILCILGRKILRIAVSLLKKRRVFDPTKLSTDDDLTGT

SEQ ID NO: 165380 - protein, 346 aa, unidentified
MMIIGCDFHPSWQQVSWLETETGDCGERKLVHASGDAKMFYQQLALPVLIGMEATGNSQWFVELVEDLGHEIWIGDAAQIRASYVRKQKTDKRDAAHILKLVVQGRFPRLWTPDREQRDLRQLVLHRHKLVEIRSRVKNELQHLSMNQGVQRKHKLWSEAGQKVLRELPLKPWASCRREDLLGLLAMLNQQVGQLNTAVQQAAEENPQARLLMTQPGVGPNTALAYVLTLGDVSRFARGKQVASYLGLIPREHSSGGRQKLGVITKQGNRMLRSLLVEAAQIAVRFDPGMKKQYLHRCHQKPKGVAKVATARKLAVRLYWMLRTNVAYPEIVRIESSPRVPLVGAS

SEQ ID NO: 165381 - protein, 412 aa, unidentified
MKRVSRRVGIDWGSESHQVCRIDGEEQPKQRAFPHTREGLSALVAFVVEGEIDPEQVAIAIEVNHGAVVEALLAKGLRAYSINPKVLDRLRDRFSPAGAKDDRRDAFVLASCVESDAHVFRRIEVGNEENTRLQAATRLREDLKSDLRANANRLWDALREYRPALLALCPGADEPWLWVLIEKAPSPSEGAKLTRASIGAVLKKHRIRRLTAEEVRTVLRGDILPLSSIYIESHVARVLVLIARLKLAQAQIATIERQIQTALAERVKSEEQTERRDLTILLSLPGVGPFTVATALGESGDAFERRDYNALRSASGAAPVTKQSGGTRHVVMRQVCQPRLRVALHISALQAIRIDPKFHDLYVRARARGQSVGRAIRNIVDRLLFLAVQLLRKNQLYDIELRQLAPEVLAAS

SEQ ID NO: 165382 - protein, 367 aa, unidentified
MTVTIVDAARPVTGGADTHRDLNLAPCLVTGGVDTHLDVNVAAALDAIGGLLAVAEFPTTSAGHRELLGWLAGFGPVARAGVEGTGSYGAGLARFLRAAGVAVVEVDRPNRQARRRSGKSDPLDAIEAARAALSGRASGAAKSRDGNVEAIRALVVAKRSARSAKIQALNQIRHLSFTAPEQLRQRLAGVSRHHLAAHAAGLRPATGAGADPVITATKTALRILGRRVLALDEEKAGIDALLSALVTQTAPQLLAVFGVGVDTAAALLVTAGDNPGRLRSEAAWAHLCGTAPIPASSGKVTRYRLNRGGDRQANCALWGIVITRLGNDPRTKAYMTRRLAEGRSKPEVIRVLKRYVAREVYHRLPRP

SEQ ID NO: 165383 - protein, 475 aa, unidentified
MSILPSFPDGQVSPRWIGLDLHSTEIQAQALLADGTALPSTRFVTSASNIELLCAELTAQDAVAMEATFNAFTVARRLQPSDARIVISDPRKTRAIAEAKIKTDKIDARVLADLLRADYLPTVWLPDPATQQLRHLLSDRQSDVTRRTEIKNRIHAVLQRELLKGNRLLTSKDGEQLLELLVSDHSPLPPEERTRLKLLRRELAHLDELIAAHEKALASFIVGDAQLHANLNRLMTIPGVSLVVGAGLLSAIGDVTRFKSGKQLASYFGLVPSTYQSGNSKAFHGPITKQGRKLARWLLLEAAEHTIKAPGPLRAFYLRLKKKRNHTVAKTAVARKMTEIIWHLLTKEEDYLYQIPRLTQEKQSRVKYLATGEKAKGGLKKGEPRSEFYGTGLKGRAVKTEVARQAATKAEEKYAAVVTARAAGQQTHSPEGDCLIESDFALDPLRPRAADWETEIARLHAKALSRAPKKKIKRT

SEQ ID NO: 165384 - protein, 346 aa, unidentified
MNYIGIDLHKRFSHFTVLGENGEIINSSKVDNRKEEIISHLNNFDQSASKAVIEATFTWGWLADLLSEHKIEVMLAHPQKVKAIASAQIKTDKVDSEILAKLLKADLIPQAYYCPKEEREIKELLRCRASLVGLKTQLKNKIHSLLHKANVREDEDFTDLFGKKGRKFLNNLDLGEKLTFALKEYLSLFDSLEERIKNTSNKLKDVFKEDEQAKFLENLPGLGYYTSLILSKEIGPITRFRTAKNLVSYAGLVPSTYQSGEHVRHGRIKQGNKYLRWVLIEAVPKTIKKDKILKEFYQRILSKKGHNKAKIATARKMLAQIWYLLTYKKIFTDPETGSPVFFSGHN

SEQ ID NO: 165385 - protein, 492 aa, unidentified
MTRHRRPPAQAKSSSNEARPKPASRPPRTQPVTMTVLNPNAAGIDVHADMHMVCVPADRVTPAATEAACQPAHVRRFGANSCDLHAIADWLAECGVTTVALESTGVYWIPLFELLESRGFEVWLVEPGQLSRCGARPKTDVLDAQWIQRLHSYGLLLPSFRPADSVLALRGYHRQRQMQIRYAASHAQHMQKALEQMNVKLTEVVSSITGLTGRRIIAAILAGQRDPVQLAALRDPNCKNDVATIAKALEGTWRPEHLFALQQAYDLYQFHHRQIAQCDEAIQAELAKLPNRAGDKSFTAKPRRCGRKPNDLNFDACAPLFKALGVDLTEIDGIDVGTALVILAEIGVDVSRFPTEKHFASWLGVCPRQHESNHTKKKRSPRKGKNRVAIALRMAAQAIGRTQSPLGLFYRRIKSRIGGKGAVTATAHKLAGLVYRMLKYGREYVRQSMAEYEQKMREQLERSLQRKAATLGYELVRKAASPAEPTAAPTLA

SEQ ID NO: 165386 - protein, 420 aa, unidentified
MDINQRRAPLAAWVGLDWADRQHLICLQANGSPETESRKLNQRPDALHEWIAQLRARFTGRKVGIAIEQSRGAVIHALMMYDFLELYPINPKALARYREAFTVSGAKDDPADAEFLMDLLRLHQARLRAWIPDTVETRRLQILTEYRRKLVNDRVRHTNRITSLLKMYFPQALDWAGELGTTLSCDFLQNWPTLTAIQQVTPTQLRDFYRQHHCRRLALIDQRIAQIADALALTDDPAIVQTLSMAVQAEAAQLRPLIQAIARFDEVIAEQLTRHPGHTLFDSFPGAGPVYVPRLLTAFGEDRSRWGSSAEFLCHSGIAPVTKKSGKSCLVHRRLACSNFLRQTFQEFAAQSIQSSSWARACYDRMRSRGFRHPAAVRSLAYKWIRIMYRCWMDSTPYDEEIYLASLRAKHSPLVQEPSE

SEQ ID NO: 165387 - protein, 373 aa, unidentified
MPKYSTAFGMDVHLRSTTVCALDADTGEAVTRRFPGNPWGEIAGWMDGFPGPSLAAYESGYLGFAPQRELAGLGVECVVAAVSKIPRSAADSASKNDRNDAARMAKAILAHDISPIWVPSPEVEGIRDLAGAHDGATARLATAKQRLLAFLAKRGFVYGGTTPAGNPRKYWTYDFLRWLDKVRPEDDGGVRTLAALRNEVEAAAEARADLLSEYRAAVDASPIAAEVAALQSIKGCAFALAAAFSAEVGDFTRFRSGRQVTAYFGLAPSQRSSGDSVRLGGISGAGNALVRKLAVEGSWCYAAARHQPKLMPRDTGVPLEIRMHGRKGSERLLRRRKEMLARGVPAAKANAATAAELVRWLWALGMMCREGAE

SEQ ID NO: 165388 - protein, 312 aa, unidentified
MTTSICGVDVSSGFLDAAIGDTRHTRRVRRTPEGIAELAAFCREHDVELVAMEATGGYERLPFALLWQAGLPCAVANARQVRRFAEALGLLEKTDRIDAGVIASFAAVRKLAPQPPAAATQERLTALTVRLRQVTEARVGQRNQRRLVTDATVLALIEETIAFHTHQIKELEKAIDALLAEDPLWTALAEAFRSIGGVAGRTVCGVLALLPEIGTLSNKAVAKIVGLAPIANDSGKRTGKRPVRGGRAPLRTLLVCVAGIVAKHEPDFIAMRARLLAAGKPNLLIRVAIARKLLVRLNAKARDIRNAMPQTA

SEQ ID NO: 165389 - protein, 397 aa, unidentified
MPAVWAGVDSGKRTHHCVVINQIGMVLLSRRVNNDEAELLELIGAVVDLADGDQVCWATDLNAGGAALLITLLAAHSQRLLYIPGRVVHHAAATYQGSGKTDAKDARIIADQARMRTDLQPVRDADQISVDLRMLTARRTDLICDRVRAINRLRATLLEYFPALERAFDYSKNKAALTLLSEYQTPDRLRRLGATRLAAWLRKRGCRNSAAVAAAAVDAAHQQFTTLPAEPIGSTLVIRLAAEISAIDRDLVELDAQLTDRFRQHEAAEILLSVPGFGPVLAATFLANIGGNLNGFDTVDRLAAVAGLAPVPHDSGRISGNLHRPRRFNRRLLRTCYLAALSSLKNSPASRAFYDRKRREGKSHKQALIALARRRLNVIWALLRDRAHYQEPALAAA

SEQ ID NO: 165390 - protein, 251 aa, unidentified
MSEETFVGIDVSQGYLDLATRPGRGVRRFINDKGGILYLATFLGEISPASVVMEATGGLEVPVAVALAVEGIPVAIVNPRQVRDFARATGRLAKTDTIDAEVLAHFAQALRPEARPLPDERSKEMAAFLARREQVVNMIVAEKNRLKRALSAKVEENIKAHITFLEGQLKEIEEDLRRAVEESPLWRTKDDLFKGVPGIGQMTSMTLLFDLPELGTLGRKEIASLVGVAPINWDSGTHRGRRKVWGGPVPE

SEQ ID NO: 165391 - protein, 411 aa, unidentified
MHPKMKNVYVGVDTHKWTHTAVVINCFAEKLGEVTIQNRPAEFEGFLKDIKVYTKRGVTPVFGLEDTTSSGRELASFLLAKKTIVKQVASSLTWSERKNQSITHKTDSYDALCIARVLLSKYDELPAADPRDIYWTLGMLVGRRNAVVKSNAALKNQIHGNIVHHYPSYKQFFTVFDCKAGLEFWERYPSPAALAGVSIADLAEFLHEQSSGFFGAAKAEEILRLIARDGCTGTDYQKARDFLVTTCVREVKHNNREIKNIEIAIKNLMDELDYKLETMIGIDLVTAAGFISEIGDIGRFSSADKLAKYSGIAPIDYSSSDVERILKNSQGNRKLYQLFHDLAARNINQGRNKDKPFNDIFYDYYQKKLTQGKTKHQAIVCVMRRLVNIIYGMMKHKTAYVHPYLPKQTTG

SEQ ID NO: 165392 - protein, 427 aa, unidentified
MSYRIAAVDVHKKMLAVVVADVAGEGEYQFERRKFGATPGELHLLAQWLDQQEVEEVVMESTAQYWKPVWGTLERYWKPARQKREGASKMCGTLHLCQAKSNHGPRGRKNDFADGERMIKRLVAQELVLSFVPDPEQRLWRTVTRRKHQLTRAKVSFKNQLESLLEQAHIKLSSFVSDLLGVSARRMLKALAEGETDPLALATMADYRLRATPEQLRDALGACAQLNGVYRRLLKMVLEELQVIEAHIEQLDREALSLMQEHQDVVHRVAEVPGFGVDSALQMIAEVGPEAAAFRSAKALSSWVGVCPGNEESAGESHSTRSPKGSRPMRRLLNQAAQSAVKVKGSIFEVAFSRLLPRLGYKQAIWAIAHRLCRVLWLILHKGVRYEERGPAVSAKSKRTRAARMIKELHKLGYRVEGGPLPAIARA

SEQ ID NO: 165393 - protein, 416 aa, unidentified
MNAVGIDVSSRKSTVAVLRPLGEVVCLPFDVSHDADGLASLAEKLKALDGETRVVMEHTGRYYEAVAKALHEAGFFVCAVNPLLIKEYGANSLRRVKTDKADAIKIARYALDNWADLRDFTPMDAIRYDLKTLNRQFQLASKQRTASANNLIALLEQSFPGIRKCFDSPVRSDGTQKWVDFAHSFWHVDCVRKQPFAAFCERYRKWCKRHAYFFKLSNAEEVYALAKRAVVLTPKSKVVKVLVQEAANQLISISRSVEVYRAEMDRLAAMLPEYPVVMAMYGVGKSYGPQLMAEIGDVRRFERKQALIAFAGIDPMPNQSGDKNVRSNKSSKRGSPYLRKTLFNVIRTYLQCAPQDEPVFQFLNRKRAEGKPFYVYMLAAANKFLRRYYAKLRDYFASLDTLQSVDPIPATLKASL

SEQ ID NO: 165394 - protein, 429 aa, unidentified
MIDVTDRHELFKLMRASVRGSEKYLLVGVDVAKNNHHAFFGTPNGRTLRKNMVFDNCIKGFESLRSIARDLQSQHGLVEVVYGLEPTASYHKPLAEYLIRQAEHVVYVSNVAVAKNRALLDGRWDKNDKKDAANVADLVGQGRCLYYDVPEDSLRELRSLIAFRIRLKKEEHSLRMRLRNNVFAQFFPELDKLYIRAGQPDDLVLSIAQHCLDPREIAGMTFEAFLKLITPRKIRIEQERRLRDLWEAAKESVGCLVHDAARWEARSLVNKLKAVRETVKDNEKLMGKVAQRFPEYGCLLSIPGFGPIVSAMVLAAIGNCFRFENRKQVLRLAGLDLSAERSGKNSDSAQSVISKQGKAALRYALVQAAMVASSLNPDIRSYYSKLIKGRELERGIKLKMKVKLAAKLLVVAWTLMRRREQFKPSCFAG

SEQ ID NO: 165395 - protein, 476 aa, unidentified
MPERENKIISHQAKKQSAKSKAKTKAKKFTVADLPRHLRHINVNAAGIDVGSDRHLVAVPEGRDVVSVREFKAFTADLHALADWLSQCGVTTVAMESTGVYWIPLYEILEQRGFEVYLVDARRVKNVSGRKSDVLDCQWTQELHTYGLLVQAFRPPEEVCVLRSYMRQKEMLVQTAAEHIQHMQKALQQMNVLLHNVVSDITGVTGMNILKAIIAGQRDAQVLAALRDPHCQNSVATIAKSLVGNYREEHLFALRQAVELYETYQLKIADCEAAIAAYLLRQEHYTDDEPPAPPKPILARNRLRAGLDIRDQLYKMSGVDLFNVSGLAADTLLTLAGEVGFDMTPWQSVKHFSSWLALCPGTKQSGKRVLSRKTKPSANRAAQAFRMAAVTQARAKTALGAFYRRIRSRSGGREAVTATAHKIARIYYSLLKHGTAFVELGEAAYEQQFKERRLKALKKQASALGYQLSPLAATSF

SEQ ID NO: 165396 - protein, 320 aa, unidentified
MSATSVVVGIDVAKAYVDVAVLGGEFVAQRFENEAEGHAALAGALQPLDVALVVMEATGGYEAALACALQATGLPVAVVNPKQARDFAKAMGRLAKTDRIDADMLAELAAVLVRRDDLARYLRPLPDAQQQTLAAVVTRRRQLLTMLGSERQRLQLAIPLVRPSIEAMIQAIRAQLDDVEAQMVSHVREHFAELDTLLRSARGIGPIASATLLATLPELGRLTRRQIAALVGVAPIANDSGTTRGRRRVQGGRFETRRVLYMATLTAAKHNPAICAFYQRLVAAGKLPKVALVAGMRKLLTTLNAMVRTNKPWDSSPHRA

SEQ ID NO: 165397 - protein, 349 aa, unidentified
MGEVSTIGVDIAKSVFQIHGVDADGMVVIRRRVGRAKVLEFFAGLPPCLVGMEACATAHQWARELKKFGHDTRLMPPTYVKAYVKRGKNDAADAAAICEAVTRPSMRFVPIKSVEQQSALMLHRTRDLLIRQRTQLINALRAHLAELGLVAAKGHEGLHQLVTAVAESSDERLPSNARFACQAIVAQLSAVQTQINGIDTRITQAHRANADSKRLDAIPGFGVILSTAVVATMTDPKAFKTGREFAAWIGLVPRQNSSGGKERLGSISKQGDRYLRRLLVLGAISIVGTARTRPDKYPWVTELLGRRPAKVVAVALANKMARTAWAVLARGETYRAPTRSSSAAIAAAA

SEQ ID NO: 165398 - protein, 342 aa, unidentified
MTKIIGCDFHPRFQQIAFLEQETGEFGERRLNHPEEAERYYRSLAGQAVRIGVEATGNFRWFRRLMQELGHEFLLGDATEIRASNPRKQKTDKRDARHILTLLVQDRFPAVWQPPLDNEEQRQLLAHRSRLVEMRTRVKNQLDSMAKNEGCLSPRVWSAGRRELMEGLPLTGWRAERRSDLVGLLEMLNQQIEPLDKAVRKAAEANREAQLLMTHPGVGPVVSLAYVLVIGDWRRFQRGKQVGSYLGLIPAEESSGSKRRLGKVSKQGNTMVRWLLVEAATTAQRYDASWHRQYVRLSMTKHHGVAKVAIAHKLAVRLYWMLRSGEDYRQVMERGSHAGQSV

SEQ ID NO: 165399 - protein, 310 aa, unidentified
MGQVFVGIDVAKAAVEVCVRPTGEAFAVPRDEVGVARLVERLTALGPALVVLEATGGYEASVAAALAGGGLAVVVVNPRQARDFARSTGKLAKTDRVDARLRAQFADAVRPPVRPLPTAAAEELGALVGRRRQLVDMIRAEKTRAQQARRREVQRRITAHLQWRERELAGIDDDTRRLIRSTPVWRETDEVVRSAPGIGDVTASTLLADLPELGHLDRRRIAALVGVAPMNRDSGAWRGHRMITGGRAPIRHHLYMATLTAITHNAAIRVFYHRLVAGGRPKKVALVAAMRKLLTILNAMVRDRRHWQNA

SEQ ID NO: 165400 - protein, 343 aa, unidentified
MGIVVLGIDLGKNSCSLAGLDASGRVVLRRRMRRGSLESFVGGLERCVVAMEACGGAHHLGRVFVGQGHAVRLMSPEYVRPYVKAQKNDELDAEAIAEAATRPTMRFVEVKSQAQSDVQALHRARERLVSERTALINHLRALLLERGIVVPQGRRKLEEEIAVFADEDEIEGLSPRIRRLIEDLRSEWRTLDERIAAFDAEFVRMAREDEAVRRLITIPGIGTINATALAAAVGDARTFARGRDMAAWLGLTPRQMTTGGKPRLLGITKRGNRYLRKNLIHGARAVLPYLIERETPLGRWARGLLARAHKNIVVVALANKLARIAWAVLARGCTYEPGGAAAA

SEQ ID NO: 165401 - protein, 458 aa, unidentified
MNNFYLGCDVSKGYADFIIINEDKQIVLDSFQLDDTALGHQQLCSILGTFSGEHSGSVIYSAVESTGGYENNWYTSLWNLQSKMCIYVARVNPLGTNHNSKASMSRIITDKNAAKNIAEYLINHKKKIIFNKDDKFSSLRKQWTFVRMLTKQRTQLYNQLESILYIANPEMLIYCKHGYPNWLLTVILNYPTAKRLSKARVATLSSIPYLNEQKAISLINKARVSVAASDDDVTANLIISLVKQIIELSKTIDRQSKFIADNCKLPEIEILKSFPGIGDYSAIGLLLNICSTEYYQSTKNLASYFGIHPIWKQSGDGTWGMHMSKQGKKEVRNILYMVAKTAIVHNERIREIYARHLKKGMNKTAAIGICMHKILRIVFGMLKHNEKFNPEKDSANSQKMLKDNKQVKAVTNKLRRYQKLDLAAPISRRQTKKRKEQEKSQNEITSFSTGSIPHSFSD

SEQ ID NO: 165402 - protein, 338 aa, unidentified
MYYTGIDLHKFTSYLTTVNSSGKIVKQQNIKNVDHNFVQYFSSIKGNHKTTVESTMTWYWLNDLLSSLNIPLTLAHAKYVKAIAYAKVKTDKVDSHILAQLLRMDYIPQAYKISNDKRVLRDALRARLKIVQRHTSVTNSMHLLLAKYNFYNPSELSGIAKYQYNQLAQLEALLKEQILDLEKQLYPDLIPNDDVQRLLWIPGIGKTNAFNIVLEVDDINRFPDIKNFYSYCRLTPSARNSAGKHKQRSSKDGNKYLKVVFSDAAVHAIQHYPVIKKYYNSQLRKKNKQIARTIVAKEIAKVVYYVLKRKENFNNKFKNRELEHTKALQWPRVINPCT

SEQ ID NO: 165403 - protein, 406 aa, unidentified
MLNAVGIDVSKGRSTVAVLQPGGVIVHKPFDVTHKSKDLHDLAQYLGSLEGDTKVVLESTGRYHEPIRNTLSETGLFVCTVNPHLIKNYGNNTIRKVKTDSADAKKIARYTLDNWAELREYTSMDTTRTQLKTLNSQFSFFMKQKTAAKSNLIALLDATYPGVNKLFNSPVRADGSEKWVDFAYSFWHVDCVRKAGIKAFTDHYKRFCKHHGYEFQEAKAKAIYEDSKELIATLPKDAIYKELIQESIRQLNLVSENVEHIRKTMNELASTLPEYDTVMNMYGVGPTFGPQLIAEIGDISRFQHREALTAYAGVDPGKNDSGQEVHNSSHASKCGPSRLRRTLFQIMTTMLQNGVKEDDAVSSFLFKKKAENKPYLVYMTAGANKFLRVYYGKVKECLRNQEQAEQ

SEQ ID NO: 165404 - protein, 449 aa, unidentified
MDSYAGVDWAADKHDVRVCDEAGEGLLAATFAHDEKGLRALCRTLVRLKVQLVAIERSDGLLVERLLDAGLRVLPMHPKQVAAARARFRAAGGKSDRFDAFVLCELARTDSHRFRVLEPDSDATKALRALTRTREDLVHARVALTGQLRAELERFWPGPIGLFTKLDSPISLAFLERYPSPAEVRGLGERRLQAFLARQRYSGGQKPAELLAKLRRAPEGRVGEAELAARRALVLALVAAIRPLVEQIKELTEQIATALREHPDGEIFLSLFRDPRSVVTAAELLAEIGDCRARYPTRDTLAADAGQAAVAIESGKRKTAAFRWGCNKRLRGAFCTLADTTRHWHPWAQDLYASACGRGHDHPRAIRTLGRAWCRVVWRCWQDRTPYDPAKHRALQQHCTVTIPTSSGALPDLAATQRMLGAAVTGTAARRAEREALDGKPTPAIPLGG

SEQ ID NO: 165405 - protein, 404 aa, unidentified
MNMNAVGIDVSKGKSMIAILRPYGEIVSSPFEIKHTSSNIQSLIEQIRSIEGESRIVMEHTGRYYEPLARELSLAGLFVTAVNPKLIKDFGAHSLRKVKSDKADAVKIARYTLDSWTELKQYSLMDELRNQLKTMNRQFGFYMKHKTAMKNNLIGILDQTYPGVNTYFDSPAREDGSQKWVDFATTYWHVDYVRKFSLNAFVDHYQKWCKRRKYNFSKDKAEEIYGAAKELVPILPKDDLTKLIVKQSIEQLNTASKTVEELRTLMNDTAAKLPEYPVVMGMKGVGPSLGPQLMAEIGDVTRFTHKGAITAFAGVDPGVNESGTYEQKSVPTSKRGSADLRKTLFQVMDVLIKTHPQDDPVYQFLDKKRAQGKPYYVYMTAGANKFLRIYYGRVKEYLASLPES

SEQ ID NO: 165406 - protein, 388 aa, unidentified
MQIAAVRPQAPTAIRTDLGAIFVSLELSRSTWLITSLAPGGGEKMSKHSVRGGDVAGLLERFVQLHEKARARTRQCFRIIVIHEAGLDGFWIHRVLQAEGIESHVVDPASIATSRRRRRAKTDKIDGEALVRALLAYKRGEPRVCAMVKVLTPEEEDRRRLCRERKVLTAERVRHVNRVKGLLFAQGITGYEPRRRDRRERLEELQTGDGRRLPEHLKAQVRRELDRLELLLEQIKAVEVERDVLLAAEYTVTPAPAAMLLDIKGIGPEFAAILWSEGLFRHFDNRRQVAAYAGLAPTPWQSGSVNREQGVSKAGNPRLRTTLIQVAWLWLRHQPDSALTHWFHERVRLNGGRLRKTTIVALARKLLVALWKYVTAGVVIEGAVMKTA

SEQ ID NO: 165407 - protein, 375 aa, unidentified
MKEKVRFLGLDVHAETIAVAIAEPDGEVRSLGTIANRVESIRKMVKKLGPVEHLKACYEAGPTGYVLYWQLAELGVACEVIAPTLVPVKAGDRVKTDRRDAERLARSFRSGDLTAVWVPDEGSEALRDLVRAREAAKQDQLRARHRLSKFLLRSGQRPVAGMKAWTLGYMAWVRQLRFKQVAQESTRLDYLHEVEHMAERVKRLELAITEAVKLASPALREVICGLQALRGVAQISAVTIAAELGNISRFEGARQLMGYSGAVPTEDSSGQRTRRGSITKTGNAHLRRIAIEAAWSYRLRPSVGPALRKRQEGVAEEIKEIAWKAQHRLHKRYCRLAAAGKDQRKIITAVGRELLGFIWAIGIKAEAAGKLRTAA

SEQ ID NO: 165408 - protein, 389 aa, unidentified
MFYLGIDIGKNTHVASLIDSKKKVLFKAFSFSNSIDGAENLICKLEPFKNQLEIGMEATGHYWLSLYSYLSEKNFTVRVINPIQTDGWRQGIEIRKRKTDIIDSLLIADLLRYGDFVETSLSNEDYLSLRNLSRFRSYLVSSIGDLKRKTIALLDQVFPEYASSFSNIFAKTSKEILANFSSPSDFEDINSEDLQSFLNNVTMKKFATRKLEELSKKASKSFGVNFCMDSFSLQIKMLIGQISFIQNQVLDVEKEIKSLLEKLNSPITTIPGIGAVNAATILGEIGDIKRFSNPSKLVAYAGLDSTVSQSGKFESTSNHMTKRGSPYLRRALFQSALRAEFCDPVFSDYYQKKITEGKHHLVATNAVARKLVHTIFAVLTKDEPYQVQS

SEQ ID NO: 165409 - protein, 582 aa, unidentified
MHTKPCKRLAHDASPVIILACASLLNLASHFMEVQLIINPDPTTVDYEIEALAVLAEGEMLYVGIDVGKESHHVGLMSKSLLAKHRRFDKCPVSNFPNSREGFDQLLEALRAYAPLGRCVCLKETTGHYGHALGEYLQKQGVTVYTMHVFKRALKNKTDKRDALNLANTAYNQLELDKQPGDTKEQIHHEVPASEAARKLRVLVQRKTELTVDITVRKNRLTAIADEVFPELTEIFVDPNRATALNIREKFPTPAAVVAASMKDLLACRTHTRPSTEGMQKLKDLAAQSIGITDEARLYGLVLEQGQLISELREMQKNLDILETEITAIVEDCREGKILMSTGFIGTMNAAAIIASIGSIARFENPGRLRAFAGWSPNQTQTGTSKDAMALNKGGNKVLKQAIFMATFNALKTDTQLKTKYERLVLRKCNLDLRTGKYVGRMKCVGRICGDVLTLVYVLLKKDYDLLQSLPPGKTPPDPGLYSRELHKKHCLRGKGEVPPVATPIKGIRSEKVDRLCELLAQDPGIKVGELAELAGVSRKTAGKMRKQWLEENLFKQQAAKEVHETAEEIASASTEVIPMQA

SEQ ID NO: 165410 - protein, 434 aa, unidentified
MNTPPPYDLVIGLDRSDQKADLCLIETRTGARRTAVIATAPEALWEWLLQLRQQHPDARVGLCLEQPAVHLIPFLEAYNWITLHPINPITLQKYREAFVTSRAKDDTKDADYLADLLRAHPDKLPVWAPQDSATRAVQQLVVHRRAVVDERTALSNRLIALLKQYFPQALTLCGEDLWRPLATAFLLKWPSLPAVQRAKPATLKQFYHLHGSRSTKLLEERLALVQKAVPVTDETAVIGSFVLRVQLLGRELQQVQRTIAEFDRRIAAAYAAHPDREIFASLPGAGPVLGPRLLASLGADRERFGESAAQLQCYTGVAPVTKRSGGSCHIHRRYCCPKFQRQSFHEYAKESVLWSRWAGAFYLQQRSKGAPHHTAVRALAFKWQRVIWRCWQDRRPYDERRYEAALRKSGSPVVALFDRVELGKSPWKHPAKKS

SEQ ID NO: 165411 - protein, 340 aa, unidentified
MRLIGCDLHARQQSIAMLDRDTGVVVEKTLKHEGEAVREFYASIPPPVVVGIEATGSMGWFLRLMEELAIECRVGHPMAIRKAEVRRQKHDRRDAALLLQLLAEDRFPTIWMPSTELRDLRALLLHRHQWVRMRTRVQNALHAIAMAHGVRRGHTLWNRAGQALLASLPLAPHTAHRRSELQALYQHLDAHVDRLGERVKEVADERPRATLLMTHPGVGAVTALATEVFVGDPCRFPDGKAVASYVGMIPSEYSSGQRQRLGALSKQGNPFLRFLWCEAAAHAVRRDPDLQRFYRRKMAQKGFAKANVAAARKLGIRLWIMLRDQIDYAEFCRRGLARQS

SEQ ID NO: 165412 - protein, 445 aa, unidentified
MAHANRLSRGDVRRNARLDRLRGVVSRDRAVLAVDLADDKQVVVVCDHDSRVLARRTWRCRPWQLDQALGWGLAVACRQGFAGVVVACEPTGHRWRVVVEHAHRLGLEAVCVQPLLVRRAREAEDFTWDKSDDKDALLIARLTTQLHCYLPEQPTAAWARLRHLGNRRVEQLTHTTAAQQRLRDLLECGWPAALEVARHPLDSLTWRAAMTVGRCDPVYIRRLGFTRFARAVARELPRWGGRRRNLGVLRVLYAATGDDRGVAAQRAGALERAALVLADFKQALAALAEVEARMAKVLAELGLAELVTSIPGLSVVGAAAILAETGDPTRFDDAKAVVKHAGLCPRDNASGSFAGKTTISGRGRPLLRLAAWRAVWGALPHNPVFAARYTHLTSRQHNRLSDGQARTAVAAALLRQLWVVCVNRIPWELAVASGTTGKEVTDPAA

SEQ ID NO: 165413 - protein, 351 aa, unidentified
MLYTGLDLHKSFSYITVMNDKGETVGHKKLPSNGEVVEFLKEFDDTMEVAIEATPSWYWLYDHLEDEGFKVKLSHPLKTKAIAYAKVKTDKVDSATLAHLLRSDLLPLSYVPEKPVRLNRELLRYRARLVRVQTRIKNNIHTILAKNNVSHSYSDLFGKEGMAFLYSLSLPENYKIALEGYLSVLETLRHEIRLASKRVQALAEENPDAVLLMTIPGVGYYSALMIESEIGDVKRFSSAKQLCSYAGLVPSTYASGNTCYHGHITKQGSRWLRWILIEAAIHVVKRPGPLRRFYFKVERKKGGKVAKVATARKLLEWIYHMMRDNKSFKEAERLAELQGKGEPVKKPGLIL

SEQ ID NO: 165414 - protein, 362 aa, unidentified
MAKLTTIIAFDQHAVTTVAAVLFPGHRTPALHTLASDSPTILRFVERLRRQGPITCCYEAGPCGFELQRALSARDIACEIIAPALIPRRAGDRIKTDRRDAGHLAVLYRAGALTVIHIPTEQEEAARDLLRCREDIRADLLRARHRLSKFLLRHGRRFTATKKAWSKRHDAWLRAQTWPLAALDQTHRAYLRAVDETIARLRAVEQDLRALLDLEPLRPRVARLRCFRGIDDLTALTIAAELGDPRRFARAPSTMAFVGLVPSEHSSGAKRAQGGITKTGNTHLRRVLVEAAWHYRHHPFVSAALRQRQRGAPDTVIAQAWTAQHRLHRRYQRFAARGKPKQHIVTAVARELTGFVWAALTQ

SEQ ID NO: 165415 - protein, 372 aa, unidentified
MNNVTSLAVDLAKKVFQLHGTDVVGKPVLKKKVSREELVKFIASSNPCSVYMEACGSSNYWGRKFESYGHKVKLINPRYVKPYVKRNKNDKNDAAGIAAAARDPDMRFCNVKTEDQQDMQSVHRIRSLLVQQRTAIINQVRGLLAEYGIIIPQGVASINRMLPEILDNDQNSMSSLMINCLKELYEHMKLLSEKISNHEKRIEVLYKNNEVCKRLSEIPGIGILGSTILASVLGNGAAFKNGRHFAAFLGLTPRQHSSGNKERLLGISKGGDTYIRTLLIHGARAVMFWANKKNDKQSKWLKCLMARRGNNITAVALANKIARIAWAVVHEDMRYMPNYKAVIKNVQGVIANKYGLARYGTMGKCASLARIA

SEQ ID NO: 165416 - protein, 408 aa, unidentified
MQVVYPICGGIDVHAKMLVACLRDKGQRETRTFSTMTDDLLRLRDWLVKSNCTHVAIESTGVYWKPVFNILEGSLKVVLVNPLHVKALSGHKTDVRDAERLADLLAHDLVRPSFIPPPEIRQLRELTRYREGLVREQASVNNRVIKVLESGNIKLAQVASDALGASGRAMIRALVNGETDTAKLAELACGKLKRKNSDLRRALDGRLTDAQRFVLREQLRRIEELEAALAQINEQIDQTCQSHPKFAHSRALLQTIPGIGQRVAEIIIAEIGVEVEVTFPTDKHLASWCGLCPGNNASGGKRKSGRTRDGNTYLRSALVQAAWAAQRAKNTYLSAQYRRLARRINKKKAAIAVAHSLIVIVYYVLVRDRSYQDLGGDYFDRQHVEQQRAYLLRRLEALGCRVTVEQNA

SEQ ID NO: 165417 - protein, 339 aa, unidentified
MTVKTVGLDLAKDVFQVHGISENGRVIFNKAIKRAKLLAFFEALPPCRIGMEACGSSHHWGRQLRKLGHEVKLMPAGYVKPYVKRGKNDAVDAEAICEAVRRPTMRFVEIKTEEQQAILSIHRTRDLAVRQRTQMANMIRSLLREFGHILPIGIEAVTAFAKRHLGGDHPDMPEIANGLLGIQCYQFIGLNERIEGYSKMIEQHALVNADARRLMRMPGIGPITASAIVATIGDAKQFRTGRDLAAWLGLTPLNKSSGGKERLGKITKQGDRYIRKLLVVGMTSRAVMAKRSPEKVDLWTAKIIADKPFRLATTAMANKAARSIWAMLTKKQEYRQPAF

SEQ ID NO: 165418 - protein, 316 aa, unidentified
MRKKEVFVGIDVAKEELEVAVFPRADTETWPNTEEGILRLVDHLKSLCPTLVVLEATGGLEMPCVGALAAEGLPVVVMNPRQIRDFAKATGRLAKTDRIDARTIARFAEAVRPEIRELKTEEMQELTALGLRRRQIIQMITSEKNRLATASKWPREDIKEHISWLEKRLSDVNSELNKVIRTSPVWREKDDLLRSVPGVGPVLSATLLSQLPELGSLNRKQVAALVGVAPLNRDSGQFRGKRCVWGGRASVRSVLYMAALVATRFNPAIAVFYHRLRIAGKEHKVALTACMRKLLTILNAMARDRTHWSPVPLRES

SEQ ID NO: 165419 - protein, 357 aa, unidentified
MEKRLKQSLGIDVSKLKLSLSLGFLTGKLEKEFISHEDVSNDLSGYKTLLKWLKKSVDSSVDFLIVMEATGVYHQGIAHYLHSKGYAVCVMQSGRVKRYAQSLDQRSKTDALDSRMLSMLGLERTIRLWHPPSEELQQLKGLSRERSSLLKDRTTENNRQGAIDSGVHRNPKALKRHKNRLKLLNAQIELIEQEMQELVSKNKELKRKMDFLISIPGISFKSAATVVGETLGFESIVNTKQLASYAGYDIILRESGNFKGKTKISKRGNSHIRAALHMPSMTCVRCNPTLKQFYNRLKPNKAKPLVALIAVQRKLLILMYTLWKNEQVYDAKFETKKQQKHEAPAARDNKLIAQFVS

SEQ ID NO: 165420 - protein, 406 aa, unidentified
MQFHDAIGIDPDSKGCVACLVRRNGSPFQIKNFPLSSNGREALVEFITSVPDVLVGIEGRRGQSSPVELFLEEKGIAYHTIPALNVSSYRSAMVGQQKSNRDDARAVAEFLLDIEAKGRLGEYARHDKPDEDMRVLARERLRLGQEMTEYENRLWKLVKESAHDLYLALTGSGDEETSKTSMASRRLLHLFIAMPDITRWSSLDDEELLTLSGGKKITGWDNFIKTIRTPLGRDFPLGLGQQIVIRNTAQSLLQMLDQKSQLDAALEDTVNARPIAKDIREHYAGIGSFTAALLVEEIITVDRFANDDRLASYAGLTKRSYSTGSNLNQRKATSCNKRLKTAFITFAKGYLRCNKGSHLAHYHQHLLKRGMSRMEALKRIARALARDLYRYMRVALAEEESGKSVA

SEQ ID NO: 165421 - protein, 422 aa, unidentified
MLAESHDEEQIIARVAALDIAKAELVCCVRVPSPAGGKRRLQEVTTHSTMTQALTELANRLVEMGVQRVVMEATSSYWKPVFYLLEAHGLDPWLVNARDVKHLPGRPKTDVLDAVWLCKVAERQMLRPSFVPPWPIRRLRDLTRYRTDLVAARTAEKNRVEKLLEDACIKLSVVASDIFGVSGRAMLAALVAGERDPKVLAQLARARMRGKIDRLEQAFDGHFADHHRFLLSRMLSRIEGLDADIAAIDAQIDVQLAPFAEAAAHLDEIPGIGSVAAAAIIAEIGVDMSRFPTAGHLCSWAKFAPGINSSAGKTKRSASSGHGDPYLARVLGEAAVGTTKTDTFLAARYRRIARRRGQPRAVVAVGRSILVIIWHLLQDPDARYQDLGAEHYNRHVDPSAKKRSHIRQLEALGYTVTLTPAA

SEQ ID NO: 165422 - protein, 351 aa, unidentified
MSHQTTTEPIATIGIDLGKNTFHLIGMDARGKIRLRRKIARGQLQSCLANVPVCLIGMEACAGAHHVGRQLAALGHDVRLLPAQYVKPFLKGHKNDYRDAEAIAEAVQRPTMRPVPLKSAEQLDLQALHRVRRRRVGQRTAVINQIRAFLLECGIPVRQGLAGLREALPTLLSQRTDVLSPRMIHLIEDLSEDWRQLDERIETLTRDITALAREDAGCRRLMDIPGVGVITASAMVAAVGTGAAFAKGRDFAAWLGLVPKQISTGNRTILGGLSKRGNRYLRTLFVGGAQAVLQHPHNWQRYRFGRWLMTGALRLHRNVLAAALANKLARIAWSVLYRERGYDAGIATQVP

SEQ ID NO: 165423 - protein, 326 aa, unidentified
MAMIGIDVSKKKLDSLWLKDVVAGKVKSRVFDNTPAGHKALLTWAQKQTGEALETIHFVMEATGIYHEALATELYQAGAKVSVVNPAQVRNYAKSLGRRTKTDKKDSFVLARYGATQGPRLWQPEPEEVRTLRALIARINAVEKDIQREKNRLEKAEVGRVSEEILRSIHTVLEQLEKEKSRLEALIERHIDQHPGMKMDRQLLESIPGVGPVISRYMMAVIRSRSFDSASQCAAFVGLVPIQHESGTSVHGRPRLSKAGDAQLRAKLYMAAVACIRCNPDIKRQYERLLKNGKTKMSALGAAMRKLVHICFGVLKHQTPYQVQAF

SEQ ID NO: 165424 - protein, 322 aa, unidentified
MARVQGETTTELPQHFAGVDVSKAYLDLRLSRERRARRFANDPAGFTALAAHLGPVPHLIVLEPTGRYHHAIWKALATAGHQVAPVNPLHVRRFAESEGELSKTDALDAAVLARMAAERRPAAKAPLSEEQLRIKELSASLADRIDRRAMLKAGRKEARDPLITKLDEAEIDLLNAAIDTLKAEIAGLIEADPKHARRAEIMASIPGIGVSSAHRIIADMPEIGTLTDKQIGALLGVAPRARESGKRRNRRRVKGGRRQLRAALYMPAIAAARANPDLKAFRQRLKAKGKPGAVIITAVLRKLIVLANALIAQNRLWEPKTG

SEQ ID NO: 165425 - protein, 470 aa, unidentified
MNDNREAGRRRTKGSRQRKSPGLLERIQPDAAGIDCGAEYHYVAVPPDRDPEPVRPFRTLTADRERLADWLAACGVKTVAMESTGVYWIPLYELLEARGFQVVLVNARDVRNVPGRKSDVADSEWLRELHRVGLLRASFRPAGEIAALRAYLRHRETLVHGAATHIQRMQKALVQMNLQLHTVIADLTGVTGQRIVRDILAGVRDPHALAAHRDHRCRASADVIAASLTGHYRGEHLFALRQSFEAYEFLKRQIDACDAAIDAHLTTLAERQAPPPHTLPTPRRTRKPRDNDPRFEIRAPLFRLTGTDLTQIDAIGPSTALQLIGEIGTDMSRWRSEKHFTSWLTLAPHNKVSGGRLLSSKTPPSANRAAAILRRCAMSLGRTATALGAYYRRLAYRVGKPKAITATARTLAILVYRVLRGDLVYRDPGALAYEQLHRARTLRGLRKRANQLGFGLLNLETGEVLDAAVS

SEQ ID NO: 165426 - protein, 355 aa, unidentified
MDPKKYIGMDVHQASISVAVRDAAGKLVSESIIETKATSILEFVRGMRGSMCITFEEGTSAAWLYDLLKPHVTKVIVCNPRKNALLNAGSKNDRVDARKLSDLLRAGLLTPVYHGENGVRTLRELGRSYITITKDLTRVMNRLKALYRSWAIPCPGAKVYSRRHRNAWLEKLSEGGVRRRAEQLYQQLDALRKIRQEVRAELLAESQKHPAHRLLRQIPLLGPIRVALLIGLIQTPHRFRTKRQLWAYCGLALQTRASGEYRFNAGELQASKKAPALRGLNVNHNHDLKNLFKGVAMNVSTSTDPLADFYRNLLAKGMKPSLARLTLARKMAAIVLAVWKKGVGFDPGELKQNAA

SEQ ID NO: 165427 - protein, 348 aa, unidentified
MLADQLDYVVGVDPHRDVHALAIVEVRTGGVVFETSVAASSGGYARALQLADEHAPGRRAFAIEGTGSFGAGLTRFLSGEGERVLEVGRLRRERRSGGKSDALDAIRAARSVLGQKRAAEPRAGGEREALRALMAAREGAVNARRAGLCQLRDLLITTPEPLRSELRPLTRAQLLHRLRAMRPQRQRDVALRGALQALRTVAGRVQHLTAEERELAGEIETLTRKLAPQLLDQPGVGPLAAAQILISWSHQGRIRSEAAFARLAGCAPIPASSGQTIRYRLDRSGDRRLNRALHMILVTRRRAHPPTIAYINRRMQEGKSRREASRCLKRYLARNLYRLLEHGAPLAT

SEQ ID NO: 165428 - protein, 443 aa, unidentified
MKPLSVLDPRAAAIDVGSEKLHTSIAGDTPKVFGTFTVDLEALRDWFKEQAVRTVALEATGVYWLYLYEVLEAAGLEVVVVNGRHVQNVPGRKTDMSDCQWLATLHAHGLLRGGFVPSADIRRLQDYQRLRGDHLIGAASQVQKMQQALERMNVKFHDVISDLVGVSGLKVVRAILEGEREPGRLLALCDVQIQQKKAKAVRESLRGCWKDEQLFALRQALELWETFQQKIADCDRQLEAQLRELAGPEPKDGEGGGAELALAPAKRPGKNAPAIERFQELLARLCGGRDATQIPGLSTYLVLQLISEVGQDMSCWPSEKHFTSWLGLAGGRKQSGKRKGSVKAHRNRAGRMFCAAARALAQSVDKALGGFYRRLRGRVGGLAANVALARKLAALFYRLLRYGMEYVEKGLKDYEDKVLATETRLLRKLAQRQGFELIPAAAK

SEQ ID NO: 165429 - protein, 391 aa, unidentified
MNRNTGMHAGQVIGWMSGLQVVGMDIAKSVFQLYTVDMKTGELRDKRLKRDKVLEFFRLMAPAMVAMEACGGAHHWARQLQKLGHQVRLVHARAVRPFVQGNKTDVTDARAIWLAVQQSGMRFVAVKTEAQQAALTLHRQRQQLIKMITMQLNGLRGLLYEFGVTLPLGRKAMLAQVVGAIDSVAPVLPKMTVDSLLQQVQRIVQLRQAVDEVEVSLKQLISQDRQMQRALSIPGVGILSATAAVATMGDPHHFKSGREFCAWLGLVPRQEGTGGKVKLLGISKRGDKYVRTLLVHGARSVLLRKGQSSDWQTELQKRRHKNVAIVAQAAKIARTIWAVLAKDQDYQANHKSVRPQHSRAAAQEPSWDGSPTCPPRRSFVAGDARRRGQVS

SEQ ID NO: 165430 - protein, 363 aa, unidentified
MNYVGVDIHKKYSVLCALDESGRKLREGRVEGNSARGFAQFFAGLEGPSKAVVEACWNWGLIHDELEELEPVEEVVLAHPYKTGLIADAQIKTDRLDAHALGTLLRGNLVARAHVPGRETRARKNLLRQRLYWARLRTMLRNRIHALLDRQRELELPQCSDVFGVRGLGFLRRLELAEPDATLLREQLALHDLIAQQMKAQEKRIAAEFKTEAVHQHLLSVPGIGITLAAVIGCEIDQIERFNSAEKLCAYAGVVPTTHASGGKTSHGRLLPFCNKWLRWALVEASWVAIGCSPYFGSLYRQHRARGKKANTAILIVARRMCRIIWQLLEQKRDFEKLAPRPKLYSFPGCSALALTVNPALAS

SEQ ID NO: 165431 - protein, 461 aa, unidentified
MGKGSAGSGMTRGDRRRNARRERLRGLLPRDGAVIGIDLAEEKQALAVVDHDVRVLARKTVRVPAFRLGEALDWAVAAARVKGFARVAVACEPTGARWIQVQRLCGERGLPLVCVQPLVSHIAREQQDFTTHKRDESDSVLIGRLAAELHCYVPEELDETWAQLRHLGRRRGQLITAAIASVQRVRDFLSVAWPVAPEACAEPYESVTWLAAVQLTAGRCGGQPEQLAVIGLAEFTALVRCAVPGWGGRRISGRVCRAVFAALADTEGVVPWSRRGLFRRIADELGDLQRTRAQLRTVEADMVLVLDELGLARLGDIPGLSAVGAAAILAETGDPRRYDGSSSLVKHAGLSPADNASGAFEGQAHISRRGRPGLRLAVWRAVWPLLIHNPVLAARYQAMTTAVPAQPPARSRHAAAARAARAKARVACAAALLRWIYSMTVHGTCWDPAVASGAAGTPEAA

SEQ ID NO: 165432 - protein, 259 aa, unidentified
MAFIQDLKSKSIHNQFENTVMGVRKLITWLKSLECKNTDTLLCMEHTGMYSKIIVAKLISEEFQLWVEMSLKIMRSGGVQRGKNDKIDAERIAAYALKNQDSFNAYQTHKESVIRLRALFSLREKLICYRTALTNVSNEFKKFDSNVSKITSCYGKNTLSGIKKDLLKIEKEIDNLIERDDELKILFKRITSVPGVGKVTAILLIYLTNEFKNFENPRQLACYSGVVPFEYCSGKSIKSRPKVHYIANKKLKKVCNIRK

SEQ ID NO: 165433 - protein, 437 aa, unidentified
MLHALKIITQIMNTSTNFAATIGLDWADQKHDLWIRPADGSKAEHVRLEQTPEALHEWVAKARERFGNRKIAIAVETCRGPVISALMAYDFIVLFPVNPKGLKSYRDAFSISGAKDDRTDAQLLEEFVRLHPDKLRALEPDTELTRKLGGLVENRRHLVDERTRIVNQIHATLKTYYPMAEALLHDQMNTPMAADLLVRWPDLDSLQSAKPQVVRSFFYKHNSRSAKKTEERLGAIQKAKPLTTDPAIIVPARHLVLALAGMLRPLHQAVARLDKEIQQAMDQHPDAPIFRSFPGAGPALAPRLLVAFGTNRDRFDQSDDVAEFYGVAPVVVQSGNSKTVHVRYRCPKFGRQTFHENAGCALKKESWAKCYYEQQKERNKGRHHQACRALAYKLVRIYFACWKQRKTYESDRYLQALETHASPLHRKLENLTATICE

SEQ ID NO: 165434 - protein, 348 aa, unidentified
MDDIIYDHYIAIDWSKKNMAIARMTKKSNKITVIDVDSDVDELQIYLNNLKGSKMLVLEETTVAQWLYTELRDHVERIIICDPHRNRLLSEGPKTDKIDACKLVQLLRAGLLKEVYHSADEFLYIRRLVSGYEDLVKAGVRLKNQRSALLRSCGRSGDEKSSVKLSTGADRYVLSCLDRQIKAYEDEKKGYLKEFRKLSRKHPEIRHQRSLPGIDLKNAVKIVSRVVSPHRFPDKGHYLSYSGLIKLERISGGRSYGKKEPRYSRQLKSVYKTGAVAAIGGENPINDYYEYLILEKGYAQHNARNAVARRLAILSLGVFKSGKNFKPNGRRDKKLRKKTGNQACRHCA

SEQ ID NO: 165435 - protein, 370 aa, unidentified
MPKCTPLFVGLDVHKETISVAYAAGGVAEPPQFVGQIGTRQSDVDKLVRRLQTRSSRLVFAYEAGPSGYVLHRHLTGKGLDCRVVAPSLIPKKPGDRVKTDRRDAVELARLLRSGDLTGVYVPSVDDEAIRDVCRARDATRITLKAAKLRLKAFLLRLGFNYVGRADWNDAHRRYLAQVVCPTPAQQIVFQESLRAVDEQVERLARLEDQLRELAPSWRLYPVVEALQALRGVQWIVALTVVAELGDLTRFDNPRQLAAFVGLTPSEYSTGSSRRQGGITKTGNPRARRVLVEGAWAYRYPAKISAHIQRRIDKLPKVAQDIGWKAQLRLCKRYRRLIARGKHANIVTTAIARELLAFMWAIAKEVPITA

SEQ ID NO: 165436 - protein, 345 aa, unidentified
MPIVGGLDIHRKQLTFDYLDTETGEVKRGQVAPADRAHLRAWLARFAGRDDAAFAVEGCTGWRYVVEELAAAGITAHLAEPADTAALRGKKRHAKTDKTDCRHLRMLLAEGRLPECWIPPGHILECRALLELYHDLRAEHTAWVQRIHAVFFHQGAPALGDGALRTGKDLAALRAAAAAHLSPVGQLQVAVSLEVLEALEARMHQVRHQMLAAARHLTGAKVLAARLYGVGPVTALAMTCWLAGKDRFSSSRKAVRFAGLDITVWSSDRKGPPGRLSRQGPPVLRWAVYEAGKTHARSSAPDHRYYAQVKDRQDGKRAALSEARKILRQACHILAELGDDALTAA

SEQ ID NO: 165437 - protein, 342 aa, unidentified
MDIDVLGIDLGKTVCSLAGLDATGAVVFRKRLQRHRLLDFLEGLGPCVVAMEACGGAHHIGRFCLQHGHEPRLMSPLYVRPYVKVHKNDDRDAEAIAEAATRPTMSFVAIKSEEQLDLQALHRARERLVTERTRLINQGRGFLMERGIRVGTGRHVFQKELMRLTEDGTPDLSNRMLLMLSDMAKELATINGRVDAIDIEIRALARADVDMQRLMEIPGVGPTIASALVAAVGTGSSFAKGRDLAAWLGLVPRQITTGGKAKLIGISKHGNRYLRKLFIHGARTVLHLVRDRTSPITRWADGLKERAHVNVAAVAMANKMARIAWAVLTKGERYRPTALVGV

SEQ ID NO: 165438 - protein, 410 aa, unidentified
MIEAILERCAGIDVGKKFVVVCVMTGGAKDEPHTQIKKFGTIVSELQRLAEWLVAEGCTHAVMESTGSYWKPIFNLLEAHVRVILANAADVQNRRGHKTDPNDSRWLAHLLRHGMIRPSFIPPLAIRELRDLTRRRRQLIGENSRERNRVQKVLEDANVKLGDVLSDVFCVSGRLMLAALLEGQMTAEQIADLAKKKAREKIPQITASVADHRLSDHQRFLIRHALRHLEFLDEEVEALNREIRRRMEDPALTEAFHLLQGIPGIKEESAASILAEIGPDMEQFPTAAQLSSWAGLCPANHESAGVKKSIRTNRGNVWLKTTLTQSAWAATNRKGSRLQSRYHALKARCGNKRAIVALGHTLLKTIHAVLSAKMTYREDPPITRDDRNVERAQHHIRRLKKLGYNTFAVE

SEQ ID NO: 165439 - protein, 339 aa, unidentified
MAIVCGLDIHRSQVTFDWVDVATGEGQRGRLAPANRETFRRWLEQFAGHDVDVVVEGCTGWRFIVEECRAAGVTPHLADPAEASVRIHGVKRRAKTDKVDAKGLRELGVQGRVPESWIPPAQVLEIRTAVRLYHDLMTDRAAWLHRIHATLFHQGAVAQTQLLRGDRDRLHDSELLSPAGKEAVRSILRVVEVLDGEINRIRQQLQRFATKQPGCRELQKEYGIGKLTSVIIWSEIGDCRRFSSSDGAVRHSGLDVTVYSSNGKRSAPHLSRQGQPLLRWALYEAGRCGSRATSPDHTYWQQVANRLGRKRAGISVGRKLTRRCHHRLRALGDEAFAEV

SEQ ID NO: 165440 - protein, 341 aa, unidentified
MLQPEQSPERRSTRQLAFTRMGLSMNHDHKLYVGIDVSKAKLDVASTHQKRVQTFSYTPDGLQQLIQVWEKSPPQLVCLEATGGLERTLVKLLNQNGIPNAVVNPRQIRDFARATNQLAKTDAIDARVIARFAQTMTPSPTPPLTLSQQKLRDFIARKRQVTKLLVQEKNRLATTTEPCLRDMVEQAIGFYNQQLLAITQQIQELIEQDKQAQEKAKLIESVPGLGTATAALLVSELPELGALNRQQIARLVGVAPTNRDSGTLRGKRTTGGGRVQIRNALYMPTVVAIRYNPTIKAFYQRLVQNGKPKMVALIAAMRKLLTILNVMIQNQHSSKFQTNYH

SEQ ID NO: 165441 - protein, 338 aa, unidentified
MNCTTLGIDVAKQVFQLHGVDERGHVVVQKRVSRGKLRETIAQLPACMIGMEACSSAQYWARELQQLGHTVKLISPQFVKPYVKGNKNDSRDAEAICEAVSRPHMRFVPLKTVESQDIQAIHRLRSRLIKERTALVNQIRGLLAERGIVIAQGIPRLRKQLPMILEDVEGALTPLSREVMRELYEELVALDERVIRADALVQRVFTQSAACQKLAKIEGIGPVIATALVAAVGKAQEFANGRHLAAWLGVVPRQYSTGGKERLLGISKRGDRYLRTLLIHGARATVHWARRKTDARSRWIMSLEQRRGKNIAAVAIANKNARIAWALLTTEAEYRQAA

SEQ ID NO: 165442 - protein, 430 aa, unidentified
MKSNTQNAKIEAITEKTLVLGIDVGSETHYARAFDYRGIEYSKKPFKFSNTEAGFVTFKEWILDLKEKHEKDKVVPGMEPTGHYWFNLGKFLQDNEMKPVLVNPHHVKKSKELDDNNPTKNDRKDPKVIAGLVREGRYMIPYLPDGVYADLRTASNIRFQLQAELTRIQNRISRWFNIYFPEYKTVYGKPDAKSGMLILKQAPLPEDILTLGIEGVNQIWRDAKMRAVGKARAKTLIEAAEHSVGSKEGAVSARMEIRMLLEDYESRNIRLQEVMTLIAELVNQIPMAEKLLEIKGVGIKTVSGFLAEVGDISRFNNPKELQKLAGLALVENSSGKHNGRTTISRRGRKRLRYLLFEVAMSLVAKNPEFRELHTYYTTRRLNPLKKMQSLMAVAAKLIRVFYVMLTKGVDYDPKKMVGDIKRPAVYLQAA

SEQ ID NO: 165443 - protein, 405 aa, unidentified
MYSVGIDASKGKSTVCILKETGECILTPRDFNHTKDDLEALDQTIQKLTGKNDVRIVMEATGIYHWPLLLFLKRKGYFVSVINPLRMKLFAKNYNFRGVKTDKYDSTIIAAYGCEKWFSLQQWDFNDDTRDELKRLARSYVSYQKPKISVKQSLDLELEKCMPGIKNLFSDDQKLYSFILFFHHYDNLTALSKNKFLDKFNRWAKKKGYQFHSSTPTKIYELASSGIPTVPFDDSCVLIIENLVNTLITIDKGLNDILTRMHQLASSLPEYDVVLNMSGVGYTLAPLIIAEIGDVRLYRSKKSLVCAAGIDVPPYESGQFKASHRVITKKGNSNIRRHLYLVMNSLYVTKPKKDSAVYEFMIRKKAEGKLHKQVIVAGMRKFLHIYYARVKERYQDIGLWQTLSC

SEQ ID NO: 165444 - protein, 370 aa, unidentified
MRFYQGQHPFYCGIDLHARTMHVCILDQAGQTVFDKGIPCRPEALLRAIQPYRDHLVIGAECMFAWYGVADLCVEQDIAFVLGHALYRKAIHGGKAKNDRSDAGKIARLLRGGTFPLAYAYPKGMRETRDLMRRRTYLVRKRAELLTHLQILNAQYNLAPFPKKLACAANRTEMNVAERFADPSVQKSAAINLALIDRLDELIGDLELYLVRTAKVDDIQTFYRLRSIPGVGKVLALILLYETHDIGRFDTAGQFLSYARLVRCAHESGGKKLGTGGKKIGNAHLRWANACAACLFLRSSERAKKWKQKQAAQRGEGKALAILAARLGRAVYHMLRKGEAFDEDRFWSGARRTRTGSSSLSRKEARDAGH

SEQ ID NO: 165445 - protein, 334 aa, unidentified
MMYVGLDVHRRVCYGTVTDGDGRVLKRGRFSSDPEGLREFMDGFEGAIIAMEAGYCWQPLYDGLLEAGHDVRLAHPQKVKAIAEAKVKTDKVDSETLAHLLRAGLLPESYVPPRDVRELRDLVRRRAFLVGMRTRLKNRIHAELAKRGIGLGVPLFTREGLELLRSLRLEAVDQLLPVMEALDMQISRISGSLRRMSGEDPRAQLLTTIPGVGYYVAMLLISEIGDISRFPSSEKLCSYAGLVPSVRRSGDTTRHGGITREGSRWMRWALIQAVHVHIRRESDLSRFYHRLAKRKTPQEAVVATSRKMLKVVYWMLLNNEPYHPEPYDPARPRV

SEQ ID NO: 165446 - protein, 338 aa, unidentified
MNIVFLGIDLAKNVFQICGLNQAGKPVYTKRTGRKELLQMLANIPACLIGIEASTGAFYWQREFEKLGHNVKVISPQYVKPFVRGQKNDGNDAQAIAVALIQPTMHFVPPKSPEQQDIQALHRARQRIVNHRTATVCQIRGLLLDRGITIGAAVSRVRRAVPLILEDAENGLSVRMRSTIAELYDLFNDLERRIHFFDKEIETVFRQSEACQRIAKVKGIGPKTATAVVAAIGKGTEFKNGRHFAAWLGLVPRQHSSGDRQVLMNMTKKGDKHLRTLFIHGARAVVRVAANNNDSHMNQWVNQLKERRGFNKTTVAVANKNARIIWSMLRNETEYQVV

SEQ ID NO: 165447 - protein, 350 aa, unidentified
MEYIAFDSHKRYTFASVEEHTGNVLSTGRINHCRGAITEFLSAWKPGTEVAVETIGNWYWIVDEIEAAGMVPRLVHARRAKMMLASVNKTDKLDCFGMNRLQRTGTLPTVWIPPAEIRDLRDLPRTRMVLTRQRGRLKNRIHATLAKYGITIEGASDAFGKRGLQELETKLALLPPHSQFCVERLLEQLESVQGQIELLEGRMKKAFRASRELELLQTLPGVGFILAVVILLEVGEVSRFPAASRLASYAGTTPRVNASGDRVRYGRLRPDVNRYLKWAFLEAANVIGINHRRFALRHTDRLYLRIRQRKGHQKAVGAVARHLAEATYWILTKGEPYREPKQHAVSSTKG

SEQ ID NO: 165448 - protein, 392 aa, unidentified
MKASRRLTLIERRSKYPARVNGSIPLYQASKNKGGDKVIRIGIDAGKNKCVATLKRDSKEILERVTFTNKTEGIMELVGHAKGYGEEAVAVVESTGNYWIRIHDMLEENGINTLLANPVQTKAIAKARIKDDKIDSNILADLLRADLIPESFVPDREHRELRQLVRTRIDLVRNRTAFKEKVHAVLAKYEFESPVTDIFSIKGIAWLRSIELSWIDRMAMNAYIDTMNVLDAQVEKFTAKIASIAKEDDSVKMLMTIPGIDYFTALTIMSEIVDVKRFSTPWKLVAYSGLAPSRRDSGNSKKRGGITRLGSKWLRYALVEAVNTTIRYDERLGAFYKRIAKRRGPQKAKVATAKEMLVIIWHMLTNNEPYRTMNKDLVERKYKKMEWQSRSA

SEQ ID NO: 165449 - protein, 348 aa, unidentified
MTVYIGVDFHARQQTISYLTTEEGAIQHLVLLHDNPAAVRAFYAQFAGQRVVVGFESSGYAAWFEELLEELGCEIWIGHATYIRQFAKRRQKNDRRDADLILELLHTGDFPRIHRYSRTTREMLQQLRYRQRLVKMRTMAMNMLLFMASSRGVSLRTQLQSKRGQAKLQQLPLPATLGTQRDELLSLLQTLNEKISTIERWLEQQTKADLAVQRLQTHPGIGLLTSICVRYTLEDASRFANTRKVSAFAGFDPMQDQSDERKRMGAISKQGSRWLRFYLVEAGQVATRKDADLQRLYQRVARRRGHAKAKVAVARRLLVRAFIMLRDEIDYAEFQRRGVAARSSRGTA

SEQ ID NO: 165450 - protein, 376 aa, unidentified
MKKGSTRKASNSALSKKMRKPIHSQAAQERLTVGLDLGDRHSRYCVLSERGEVVIADALPTTKTGLNRLFERMPPSRVVLEVGTHSPWVSRHLAGLGHEVIVANPRQVALIYRSGPKDDRLDAEKLARLGRVDPQLLAPIRHRGEQAQADLAVIRAREALVEGRTKLINTARGLVKSLGERLPCCDSEDVGLELTEKLSPGLQPILEPLLRSVESLSAEIAAYDKQIKSLEKRYPEVELLQQVHGVGTLVGLTFLLTIEDPDRFRRSREVGAYLGLQPRRRESGASQPQLGISKVGDQDVRRLLVQAAHCILRQRAPDSDLRRWGLKRLERGGKNAKRKAVVAVARKLAVLLHRLWVSGEVYEPLYSRRTPRAVAA

SEQ ID NO: 165451 - protein, 353 aa, unidentified
MTGTKYIGMDVHKESISIAVRNDAGKLVMECVIETKANVILDFIHGLRGELQVTFEEGTWATWLYDLLKPHVTKLVVCDPRKNSRQGNKNDRIDARELSDRLYMNKLSSVYHGGAGVRTLKELARSYLTISKDLGRVMSRVKAIYRSWGIPCAGKQVYAPRHRAEWLAKITEVGVLRRAEFYYQQLDALRVLRQAVRRDLLAESKKHKATKLLCQVPSIGPIRAALLIALIQTPHRFRTKRPFWKYSGFAIEMHSSADYRSVKGELQKSKKQISVRGLNRDCNHDLKNLFKSAATIASVKPGPFQEFYAALVAKGMRPEMARLTLARKIATIVLIVWKRGVSFDAKYLKSQTA

SEQ ID NO: 165452 - protein, 340 aa, unidentified
MGNVTTIGLDIAKNVFQVHGVDADGAVVVRQRLTRGRMLKFFAKLPRCLIGIEACATSHFWARELVALGHDVKLMPAQYVKPYVKRGKNDAADAEAICEAVTRPTMRFVGIKSPEQQSAMMLHRVRLILNRQRTQLSNAMRAHLAEFGIVAPIGRNGIEQLLDVIADPTDERVPADARFCLEMLAAQLRIVKEQILENDRRILASARETELGRRLMEIPGVGPLLASAIVATVPDPAIFRSGRNLAAWIGLVPRQNSSGGKERLGSITKAGHQYLRQMLIVGAMAVVRYAERNGAKRPWLVQLLARRKTKVAAVALANKNARMIWAMMASGERYREPQIA

SEQ ID NO: 165453 - protein, 406 aa, unidentified
MAAVMIGVDPHKASHTAVAIGAAEEPLGQLRVRASAAQAERLVAWAAPWPERTWAVEGAGGLGYLLAQQLVAAGELVLDVQPKLGARVRLLATGASNKNDPNDARSVAIAALRSATSRKVAAENHAAVLKLWSKRHRDLGRTRTQVACRLHAVLCELVPGGISKEITAAKAACVLESTEPSGAVALARCELAAEFLDDLRRIDVQMRDTKKRLAVVVRASGTTLTEIFGVGPVIAATMIGYVADASRFPSRDNFAAYNGTAPIEMSSGNRKIYRLSRRGNRRLNHAVHMAAVTQIRYRHSDGRAYYDRKLAEGKTPKEALRCLKRRVSDAIYARLQADARRAATIARTGGPGGQPGNDSVASAAGSHPENQLFGQATPEPATTLRRPAAPARTRPAPAPKKKRKGS

SEQ ID NO: 165454 - protein, 403 aa, unidentified
MNAVGIDVSKGHSTVAVVRPLGEIVASPFEVCHTEPELSKLAEMLKSMIGETKVVMECTGAYHLPIANALCDADLFVSTVNPQLTHDYGNNTIRKTRNDKLDSIKIANYALSNWLDLPRYIPEGDVRRMLKAFSRQYNKYIKMRTMLKNNLISLTDQTFPGVNELFKSPPRKSDGHEKWLDFAAKFWHCECVCGLTPKAFEDRYRRWCKKEKYNFSQSKAEDIYVSACGHFSVMPKDETTKILITQAVIQVNAVSESIATMLREMNRLASALPEYDVVMGFYGVGEVLGSQLIAEIGDIYRYQKKSSLVRFAGLEPVENSSGKYHGKERISKQGSSHLRKTLFQVMECLLKRAPADDPIFQFLDRKRSEKKPYRSYMCAGSAKFLRVYYSRVKAHLDNYYSEN

SEQ ID NO: 165455 - protein, 327 aa, unidentified
MSPPMNTPTLGIDMAKLTFVAALWFDRQRFLKAQFDNSPSGFRKLHTWCQTHGAGGALRVAVESTSTYAEALLEWLYTRSYTVFLLNPEQVAHYARACGQRNKTDPADAVTIAAFIAAHEATPWQPPPPEQKDLRSLTRARAQVVATVKALGVQLQTSAGPARPHLQALLDAARRTLRAIERDIAAHLRKHPRLGAQVRRLMTLKGVGLVTAAIAIAELPPITAQTDPRTIAAWAGLTPRRWQSGPREWTTRLCRKGNVYLRQALYMPALVAKRHNPLLRAYAERLAARGKRPGAILGALSHKMLRILVGLLRSNSDFDPNWSPKKI

SEQ ID NO: 165456 - protein, 366 aa, unidentified
MDKVKFYVGLDVHKDSIAIASAAAYSRDDPHFVGTTRYSVISLTKALSRLGAPSELSICHEAGPCGYGLVRALREQGYHCEVVAPSRVARRPADRIKTDRRDALLLARLHRAGELVPVAVPEPQDEAIRDLVRAREDAVNDQRRVRQRLKSFLLRHGHAYTGTRWGPKHELFLSRIKFEDSAQHIVFTEYRMAVRFATELVERLTQSLRAHTETWRWLPMVKGLMTLRSIDFISALTIVAELGDLRRFPHPREFMGYLGLVPSEHSSGNSKQRGRLTKTGNTHVRRILIEAAWNYRLPARIVESLQPRLEGQPRHIIDIAWKAQLRLCQRFRRLRARGLHQNKTCAAIARELCGFIWDIGTRQQPA

SEQ ID NO: 165457 - protein, 344 aa, unidentified
MTIVEDRPAITGGVDTHSEVHVAAALDPVGGLLGTREFPATAAGYASLLGWLGKFGDVALVGVEGTGSYGAGLARYLAARGVRVVEVDRADRQDRRRKGKSDPLDAVSAARAAQSGRASGEPKGRDGAVEAIRALMVAKRSARNERTQAINQARALILTGPDELRARFARKRAAALAEAIAALRPRPGDAAGYAVRTALRELGRRVEFLDAQIERLDDLIVPLVAVRAAGLLSLYGIGPDTAAMLLIAAGDHPGRLRSEAAWAHMCAVAPIPASSGKTRRHRLNRGGNREASHALWRIVITRMSAHPATRAYVKRRTAEGLSKKDIIRCLKRYVAREVCPCLRG

SEQ ID NO: 165458 - protein, 412 aa, unidentified
MDVLVERVAGLDVGKQVVVVCVRSPGPGGRRVSETRTYRTMSRSLEAMADWLVEQGVTLAGMESTATYWKPVFYALEDRMGTWLLNAAHLKAVPGRKSDVKDAEWIAQLLEHGLVAPSFVPVPEIRRLRNLTRYRVQLMGDRTRDAVRLERLLEDASIKLSAVASSVTTLSAREMLAQLVAGNTDAVAMADLAHGKMRRKLPDLAEALTGHFDAHHALLVGAMLHRLEHVETALAELDVMIAAAMVPWAHQLELLQTIPGVGLKTAQVIVAETGGDMAQFPTAAHLAAWAVVAPAMHESAGKRRPAGSRKGNKWLASMLVEAASSVSRSKQTYLAAQYAQIASRRGRKRAALAVAHSMLVSAYYMLERDEPYREVGNDWFDQRHADAHTRRLVAQLKRLGHTVVLDPADSPA

SEQ ID NO: 165459 - protein, 578 aa, unidentified
MTTRSKKRCKKEKTPSETPSQLCTVVDAGMLAGRAVLSTLSAATLTTLLTLKNLPGRSKIKQKARRIAALEGIVTLDDLTKVGIASRDTVTPVVVNPVVQAMDNARRDIKPGSGVRLNVPVAGIDVHAGTLTVAIAGPEGIRHNTEFTNDAKGIESLLRLLDHHGVKHAAMESTAEYWLKACWSLQEHGVQMLVANAQQTKATQGVKTDPKDARRIALAFRDGRLKPSIICTPEQQARRKLNRDAIKKSQQAAKVISRLKAMYHVYDAPEWITELHDSQRGQSILTGCLELHDLAVIEALLTTEFANGKGMVDDPQELREMAIGMLEFLERLGKNPENLFRFGQHLKEFMFFRQMAKQYRLQLLQSVEDDEKFLEDVKFLLSCPSIGEDLALTLMVELVDIHHFWSSKALVKWSGMACRVNQSGFQKRATGHVYKGGNKWIRWAMFNAAKVDHAQHAREGHPVGYFVNRLYKDEKKAYKVAVLAGGRKLLTYVFHVLSLKKPFDELYREVENVRLEANKKRKLQLLNRLVKEANASDLLPAVIASLKNQCKEIALVDKMYVDALSRLLATSQFVEAPA

SEQ ID NO: 165460 - protein, 353 aa, unidentified
MEIVGALDVHRRQITYATLERESGEVRHGRIVPAERTEVREWLERFSGCEAEFVLEGTTGWRYVVEEIERAGHRAHLADPAETAAKRGRKRRAKTDRADCDLQLKLLLAGELPESWIPPAHILELRTRVRTRKTLIDQRTAWQQRLQAQLFHQGVAAGLKLRTRAGRDALAKAELSPAGRELVSLALRMIDTIDAELGPLDRRLCSFARTQPGCRALMERLYGVGPVSATVILAELGDCRRFARSNDAVRHTGLDVTVYQSDSKRSPGHLSHQGPEVLRWALFEAAQQASRRTSPDHAYYQQVAERIDHNRACLSVARKLCRRAHHILRELGDEALAPFEPDARHEEATTAAA

SEQ ID NO: 165461 - protein, 345 aa, unidentified
MTQYKRIGIDTSKAVFTLHGIDQEDRPVLRINLRRAQMIPFFRKLPPTVIALEACGGSHYWARELTALGHTMRLVPPQYVKPYVKRGKNDRNDAEAICEAAGRPGMHFVPAKSVTQQAQGMVLKVRETLIGQRTALINTVRGHAAEFGIIAGKGVGKIVPLLSAIEQEAAIPPEAREMFVLLGQQIDEIDARIKEVDAKLNAAHKANEVSQRLVSIPGVGPITALTLAVEIDPAMFESGRHLAAWAGLTPKERSTGGKQRMGGISRAGNERLRVLLVSGATSVINVALRPGNRQMTDWLRALLLRKPRKLAAVALANKMARTAWAMMTSGETYRRPFIAAGAVAA

SEQ ID NO: 165462 - protein, 326 aa, unidentified
MEHELHYIGIDTAKEKLDVDVLRPDGRHRTKKFANTTKGHDELVSWLKGHKIDHAHICIEATGTYMEPVAECLYDAGYIVSVINPALGKAFAQSEGLRNKTDTVDARMLAEFCRQKRPAAWEAPHPLERALRALVVRHQALTDMHTQELNRTETAREVQRPSIDAHLLWLEAELKRLEKQIKDLTDDDPDMKHRRKLLESIPGIGEKTSAVLLAYIGLKDRFAHARQFAAFAGLTPRRYESGSSVRGASRMSKAGHVSLRRALYMPAMVATSKTEWGRAFRDCLAANGKKGKVILGAMMRKLAQVAYGVLKSGVPFDASRHNPVAA

SEQ ID NO: 165463 - protein, 344 aa, unidentified
MDQYVALDISLREVSVCVLDATGAVVFEGRSPSDPRCLAALIRSKAPRAVKVGLETGSTATWLAHALLAEGLPVVCMDARHAHAALSIRPTKTDRSDARGLAEMVRVGWYRAVAVKSLEAHERCALLAARHRLVVMRVDLDGQIRGLLKTFGLIVGPGNSDAFLRRAEALAEGHPVLSPLVTCLSEVRRHVAAQISALDKQIGRIVRNDTTLRRFVTVPGVGPITALAFLSTIDDPSRFRRARDVGPYLGLTPRRHQSGEIDRTGRISKCGDGFTRKCLYEAATVLLTKVQRWSPLKAWGVRLAQRIGAKKARVAIARKLAVILRCIWSDGTQFWWTKQETAMA

SEQ ID NO: 165464 - protein, 418 aa, unidentified
MQVEAERDEIIERIAALDVSKAEVVCCARVPGPGRQRMQEVRTVSTMTAALLGLGDWLAELGVTRVVMEATSDYWRAPFYLLEDRFETWLVNAHDVKHLPGRPKTDRLDAVWLCKVAERQMLRPSFVPPPAIRQLRDLTRYRVDLLAVRTAEKQRVEKLLEDALIKLSVVVSDPFGASGRAIMAALIAGERNPMTLADLARGRLRAKTDRLIEALTGRFTDHHAFLLTQMLARVDGITADIATVQARIDAQLGELAPAVAKLDAIPGVGPVAAQMILAEIGTDMSRFTTPAHLTSWARFAPGVSESAGRPTGNAGTGKGNRYLARIVGEAAVSAARTDTFLGERYRRIARRRGKKRAIVAVGRSILVVIWALLSDEQAQFVDLGPDFYAARTNPERKVRQHVRELQALGYSVTLNPAA

SEQ ID NO: 165465 - protein, 388 aa, unidentified
MPAAETPVAYLGIDVGKSSHSACALDAGGGVAFRAELANRPDDIDRLLERAGSGALVVVDQRRNIGALVLARAHAHGNPCAYLPGYAEKQARGMFPGIAKTDAIDAEVIARTALGVPGALRPAPEEPEGAASLRVLSSQREFASSARTRAKNRLRATLLEADPALEGAVDPSSRWQVSMLAEFGGAAGCSAAGWRRFSNAARRAGAPAAGARRLWEALLASSRSGRRLPAGEDVAVRILAREIASLDADIEELDSLVADSLAGDEVYECLLTVPGIGPKTAAALVTSIDISAFRGHDELASYCGVAPSDRRSGSSIRSTSPQHGGNRQLKNLLIFSCNSLIGTDNRFGRYYGECRARGMRHGKALKAVARKRLKVIYAIMRDAVPYAA

SEQ ID NO: 165466 - protein, 339 aa, unidentified
MKYIRIGVDIAKNYFQVHALESEDCSATKRRLSRSGIVKFLAEVEPCAIGMEACGSAHYWARRFRAMGHEVKLTPPIYVKPYVKRGKNDAADAAAICEAMSRPNMRFVAVKSEDQQATLMAHKTRELLIKQRTMSVNALRGHLAEFGVIAAKGINHVEELLERTAAADLPAMVQATLGVLLGQLRSLDVAINELERAIVADHRRDPISRLAASVPGVGALAASAILASAPDPQAFKSGRDFAAWLGATPKQNSTGGKEKFGSITKQGNRYIRRLLVLGAISVLRASPKRKGALCDWLVALRARKPPKVVAVALANKLARIVWAVITTGEVFRTSIYAKA

SEQ ID NO: 165467 - protein, 347 aa, unidentified
MDQMIRIGMDTSKHVFQLHGVNAAEEPVLRKKLRRQDLLTFFGKLPPTVVALEACGGSHHWARLLQSLGHQVKLIAPQLAKPYVKRGKNDAADAEAICEAMSRPTMRFVPVKTAEQQAALMLVGVRDRLVRQRTQLINVIRGYAAEFGLIAPTGLCRVEPLLERIRTDETLPALARELFEVHATEYAQLQARLEDTEDRLMAWHRAHEVSRRLAKIPGVGPIGAAMLVMKTPTPEAFRSARHFAAWLGLTPKDHSTAGRVRHGVITRAGDEVLRSVLVVGATAVIRQLRRGQSAPASPWLVALLKRKPSKLAAVALANKIARVAWKLMVTGESYKAPASVSAAAGAV

SEQ ID NO: 165468 - protein, 423 aa, unidentified
MDALIERAAGLDMHQGSVVACIILGAAGRRPTEEVRRFGTMRQDLAALRAWLLEKGVTHVGMEGTGVYWQPVYAALEAAFTLIVGNAAHMRNVPGRKTDVKDAEWIADLVRHGLVRASFVPPPEVRVLRELIRHRKALVGTLAAERNRTLKLLESAGIKLAGVMSDVFGVSGMLMLRALAEGTADAATMADLAKRRLRRKRDRLALALDGSLAEHQRFLLGLHIRRLAEIERDLAEVEAAIGAAMRPFAAQQALLVTIPGVDALTAAAIVAEIGTDMAAFGTAQRLAAWAGLCPANHESAGQQKRRGTRKGNPYLKAMLVATAISASRTKGTYLRDKFHRLKARMGPKKAAVAIAHKILTAVFHRSSRRCSSCCSAPMPSPTSAPTTSIVSTSIARPSAWCAASTRSAMMSCCALRWRGLDPR

SEQ ID NO: 165469 - protein, 394 aa, unidentified
MHKDAHCAVVIDCWMNKLGEVNFENRPSRYPAFVEDVRKICGTKEIVFGLEDTRGFGRNLAAYLVGRKFEVKHVNPAYTSTVRLANPIIYKDDSYDAYCVARVLRDMVDTLQDAKHEDIFWTIRQIVKRRDLIVKSNVMNKNQLHSQLAYSYPSYRKFFAMIDSKSALCFWENYPSPEYIWNTTPEEIYHTIKPVHQALKIQRIHEIISMIERDGDTRKDYQPERDFIVRNIVKDIRHNKELISEIDDELRKLIPLTGYKLHTMPGIDLVTEAQIISEIGDINRFPDSDKLARFMGLAPVQFSSAGKGKDQRCRNGNRALNAIFHFLAIQMVAVSASGKPRHPVFREYFEQKVKEGKNKPQALVCVARRLVRIIYGMMKTKTEYRPYEKVDDKN

SEQ ID NO: 165470 - protein, 367 aa, unidentified
MTVTIVDAARPVTGGVETDLNLSVAPCLVTGGVDTHLDLNVAAALDAIGGLLGVAEFPTTSAGHRRLLGWLSGFGPVARVGVEGTGSYGAGLARFLRAAGVAVVEVDRPNRQARRRSGKSDPLDAVEAARAALSGRACGAAKSRDGNVEAIRALVVAKRSARSAKIQTLNQIRHLSFTAPEQLRQRLAGVSRHHLAARAAALRPSQREGADPVVAATKTALRILGRRVLALDEEKARIDALLATLVAQTAPQLLAVFGVGIDTAAALLVTAGDNPGRLRSEAAWAHLCGTAPIPASSGKVTRYRLDRGGDRQANCALWGIVITRLRNDPRTKAYMARRLAEGRSKPEVIRVLKRYVAREIYHHLPRP

SEQ ID NO: 165471 - protein, 354 aa, unidentified
MLIIGADYHPAFQQIAFVDTETGERQERRLEQPEGAEKFYRELAAQGKRVRVGMEASGHARWFERLLAELNIELWIGDAAEIRRKRERKQKTDRQDAQHILRLLLKDDFPRIWVPSWENRDLRQLLWHRHRMVQARTRMMNQLQAVALNEGLRCKKKLWREAGRKQLEAFRLAPWASRRRQDLLELLDRLSPTIAALSQAIEQEVEKCPEAQRLMTHPGVGPLTALAFVLIIERADRFQCGKQIASYLGLVPLEDSSGNRRRLGHITKQGNSLLRFLLVEAGQVTVRSLPEWRSKYVHLTMRRGRKIAKVAMARKLAVRLYWMMRQGWDYEQLKKFGSHSGQPGHRHGVKSNIE

SEQ ID NO: 165472 - protein, 432 aa, unidentified
MKFTQLNKQNQRISRISETTLVIGTDIAKHNHVARAFNYRGIELGKRCLFQNDDNGLLNLLAWAESIKQEHGLTDVLLGVEPTGHYWFPLYHYLKQRGIEVVLVNPHHVKKSKELDDNSPTKNDIKDAKVVAKLVIDGRYTQPQLPEGVYADLRVLMNQRDRLCGDLNRVKGRIHNWLDRFFPEYRQVFKDWEGKASLITLQLFPLPQDVVAAGETTVVATWKKNDVKRAVGPKRAELLYRKAQKSIGLTEGATAAKHELAMYLEHYAMLCRQIEQLMEHVAGLVEQIPGATHMMSIPCIGLITVAGFLAEVGDLSGYDHSQQIVRHAGLSLRENSSGLHKGETTISKRGRCRLRALLFRAALTMVAKNPEFRALHRYFTTRRENPLKKKQSMIAIVGKLIRVLFELGRKQKNYDASKVLGPHREAQLQAAA

SEQ ID NO: 165473 - protein, 408 aa, unidentified
MTVVGIDVSKGKSMVAAMKPGGELVAAPYEVRHSDIELSHLALDVLCMEPDTRVVMEATGRYHEPVAALLHSEGIFVSILNPLLIKQSGAGSLRKVKSDPKDALKIAKYGLDNWSTLREYTPMEAIRQQLKLCARQCDLYNKNIVMLTNNLISLSDKTFPGVNELFSSPEKADGHLKWVDFYRSFWHCDCINRMSPDAFEERYKKWCKRKGYHFSTDAADALYAASCGPYTTLPRDSNAKLLVTVAADQLIALRENQSKLEAEMLNLCKQLPEYETVMAMYGVGKSTGSHLMAELGDVRRFPHRSSIVAFAGVDPGVVGSGKMQLSSVTTSKRGSPQLRKALFQVVSTYVKCKPENEAVYQFYAKKRDEGKPFFVCTTAAANKFLRIYYARVKECLNAAESATQVEEG

SEQ ID NO: 165474 - protein, 365 aa, unidentified
MDHPLFAGLDVSIQETAVCVIDDAGHVLMQTTVATQPTAIATALAPYRKRLGRVGHEAGALSPWLHPALLAQGLPAVCLEARRVRAALSAQRNKTDAADALGIAHIVRTGWYGTAHIKQESTYRLRLLLTQRRNLKRKFLDLENTIRHSLKAFGIRLHKVGRAGFEPAVREAVAEDALTRELMDSMLTARAALWKEYLRLHKLVVRYVAQHPVCRQFLAIPGVGPVTALSFLTAVEDPSRFRRSRNVGAYFGLTSKRWQSGSSIDIQGRISKAGDPDVRRALYEAATVMLKRYRGQDKIREWGLQLARKSCHHKAAVAVARKLAVLMHAMWRDGTVYIGDATLSDEARARHHHDKARRLLGAALA

SEQ ID NO: 165475 - protein, 406 aa, unidentified
MSFDHPREETAAIRTHFGAIFVSLELSRKTWLITSLSPGGREKMSRHSVPAGDVAGLLARFAEFKSKAVARTGTSYPIIVIQEAGLDGFWIDRVLRREGIESHVVDAASIAVSRRRRRAKTDKIDGEALVRALLAFKRGEPRVCSMVRAPTPEEEDRRRICRERQALIAERVRHVNPRRMRSIRPVIKGLLFSQGVGDYEPLRRDRRRKLETLRAGDGRALGPNLKAQLGRELDRLELLLEQIRAVEAARDALLAPAVEAEAASAPTPSPARMLLRLRSIGPEIAAVLWTEGLCRSFSNRRQVAGYAGLAPTPWQSGTIDGEQGVSKAGNPRLRTTMIQLAWLWLRHQPQSALARWFHQRLAGAKKGARKTLIVALARKLLVALWKFISAGVVVEGAVMKDVATHG

SEQ ID NO: 165476 - protein, 413 aa, unidentified
MGIDVVIQRAAGIDIAKASLVACVRVPAGDGGWQVDKRMFSTMTADLLALADWLAGYGVTRVGMESTSNYWRPVFYALEERFECWLLNARHMRAVPGRKTDMTDAEWICDLTAHGLVRPSFVPPPPIRRLRDLTRRRSLLLGERTREKQRMEKLLEDAGVKLSVVATDIFGASGRAMIDALIGGERDPLILANLARRRMRSKVDALAQALTGHFTDHHAFLARMICQHIDTIDTMIGELDQRIDTEIAPYRRQVELLDTVAGIDIRGAQVIIAEIGVDMHRFTSPAHLASWAGVCPGNNKTGGKAKTMHTRPGDRWLKAALGVAAMAAIRKHDSYAGALYRRVAARRGGIRALVAVGHSLLEAIWHMLSTDNPYQDPGSHYYLNRANPDQTRRRAIAQLERLGLRVTLEPITP

SEQ ID NO: 165477 - protein, 415 aa, unidentified
MEIVYPRVAGIDVGKKVVAVAVRTPGDQPGQRHQQLRKYRTFYPTLREMVGWLVDQAVTHVAMEATGVYWKPVFHVLCEVESLDVLLVNARHVKNVPGRKTDAKDAEWLAELCEVGLLRGSFIPPKEIAAIRELTRYRKKLTEARTSELQRLCKVLEDGGIKLDSVASSITTLSARAMVEALIGGERDPRVLADLARGVMRKKIPDLTMALAGRFGAQHALLARMHLGHIDHLSGMIQTLDGEIEQVITPFAEQVRRLRTIPGIGERTAQVLVSEIGVDMTRFPTAEHLASWAGLCPGNNESAGKHHSGRTRKGSKWLRGALVEAAHAAARTKDTYLAAQYRRLGGRRNDKRAAVAVAHSILVIAYHILDRGQPYAELGGDWLLKRESASAHAKRLVHQLERLGHKVTLEPADAA

SEQ ID NO: 165478 - protein, 346 aa, unidentified
MRFYDGQHRYYCGVDLHTKRMYLCILDHEGNKLFHRNVRAKPHDFLNAIEGFRDDLIVGAECMFTWYWLADLCLEEKIKFVLGHALYMKAIHGGKKKDDKLDSEKIARLMRGGTFPLSYVYPREMRATRDLVRRRMFLVRRRSELLAHVQLMNQQYNQDPFEKMLKYAGNRDVLDRFAESSAQLNVAADLEMVGHYDHLIKQLEKNLLQEAKLHDPKACSLLRTIPGIGKILSLVLLYEIHTIDRFPSVGDFLSYARLVTPKQTSDGKVTGHSGAKIGNVHLKWAFSESVLWMLRYSEDAKAFLKRKEKKYGKARTMTMLARKIARAVYQMLKRKESFDALKFFAS

SEQ ID NO: 165479 - protein, 341 aa, unidentified
MKKNLFFIGLDIAEADFAASIYQTPDQPIVTKEAIPNNPEGFKMLLLWLYDYHINKKNCRICMEATGVYSQAIAYYLLFQGFPVSVEPPLKVKRAFDPVGHKTDPVDSKQIAEYAYRFQDELTSWKPRDEILEKIRQLLSVREQFTKQKVALDNSIQAYAKQRVQVTLIRKAQKETLNQLKKQIARIDKELEKLIKQDPEIFQRANNLDSIPGCGMLLAAHLLVITENFTKIQNSKRLAAFVGIVPYQHQSGTSVSKRAKIRHFGPGPSRKLLRLAAQSVATHNVTFRRYYLRKLDQGKAKPLVLNNIANKLLKIACTIIRNNTRYIKDYRSIHPMYLKSA

SEQ ID NO: 165480 - protein, 334 aa, unidentified
MKKRYFMGIDVAKATFDFCLLSRSGACLWRGQFSNDARRIERFVHQLRAHGWKLEQIHFALEATGVYGQKLIAALHQAGLAVSVLNPAQVKYFALSVLRRTKNDTVDAEIIARFCRERKPLATQPLRPIETQLELLVRERESRVVEQTRERNRAKKDPYQIELPKLISRQRQQRLAQLKKELAQLDAEIDSLIASDQRLKTQSQLLCSIPAIAKLTAAKLLAELAGKEFQSARQLGAYAGLTPAESRSGYTLYGKTRISKIGNAFLRKALYMPAAVARRWCKPFQLWIAMLQSRKLHDLAIRGAIMRKLLHIVFGVLKHHQPFNPMLASIPKTV

SEQ ID NO: 165481 - protein, 353 aa, unidentified
MYIGVDTQKQTHVFVAIDADGRTSGSRTLANTPEGWATALQWAREQQQHLRWGVENSGSLGKGFAQFLLAQGETEVREVVPHRTAQYRRRGRTQDKTDTADALAMARLLRAEGELLPLVHADDVSTELRVLRDYRDNLVADRTRLTNQLHAQMLQLDPRYAERSGPLTRAAGVRYCLGLGLPEADGVAQTRLLVVRQLATRLLQLDADTSAVTKALEQQVAATATPLLQCCGVGAVVAARLLGELGSPPRVHSAAALAALAGIAPLTVASGGRQGHRVNPGGNRTLNRAIHIIALTQRRCEPLAQAYYAKKRAEGKTARAAMRCLKRRLVDVLFRLLLPLPAVSPAPLLTIAA

SEQ ID NO: 165482 - protein, 415 aa, unidentified
MANPLFVGLDVHSRTNRVCLMDQAGEPWGRRFSVANNRPGSQLLAVRLLEALRQGEFDSLRLAAEATNWYWFPLFQTLQQDPLLNQWPVALFALNPRLIAKYKETFSDRDKTDDSDAFLVADRLRLGRDLPAPFQLDAQHLALRFLTRYRYHLVKDLVREKNHCLSILYLKASEYRQGHPFSDVFGATSQALLQEFATLEEIAAMPLEELVIWLDAKGKGRFPDPAQVARELQQVSQDSYPLDSQLQQPINYVLNWNFQLVNFLERQLQRVNTAIAEAMGQIPHTLDTIPGFGPVYSAGIIAEIGDVARFDHDEAKVAQFAGLHWRKTASAKFQAEDTRLTKRGNAYLRYYLCEAANAVRMRDAEYAAFYQRKHDEVPKHQHRRAVVLSARKLVRLVVRLLTTNQPYRPRSVPGG

SEQ ID NO: 165483 - protein, 446 aa, unidentified
MAGVVIGIDPHKGSHTAVALDVHEKQLGRLRVRASSRQVDGLLEWASGWPRRRWAIEGARGLGQLLAQQLIASGERVLDVPPKLAARVRLLDSGQINKNDPNDARSVAVAALRAHELPELAAEDHAMVMRVWARRYHDLARLRTQVVCRLHAVVCELVPGGVRKYLRASQATDVLDRIVADSPVAQAKLELARELVADLERIDAQRREAKGRTARAVAATRTSINDVYGVGPIVAGTVLGYVRDIRRFPTRDRFASYNGTAPIEVSSGDRKIYRLSRRGNRQLNHAIHMAAISQIRHHDSEGRAYYEKKIAEGMTGKTALRALKRKISDTLYEHMIDDVHARDKRIGKDPGGQSGNDAISSVAGSHPDRPALRTSHSRASTNSRTPATGGVLRPGPAPDRRPTSRNAAGAIPSTRSMPLSCQDDSWAGPTPHHRPLHPWSRSWRLL

SEQ ID NO: 165484 - protein, 440 aa, unidentified
MTEAVASARSEEAWAAFAAIDWADQKHFWRLVPAGCERQEYGELENTPEAVEVWAAALQQRFGGRPIAVCLEQSRGALVYMLAKYSHLVLFPVHPTTAARYRETFCPCGAKDDPNDTASLLDLLLRHRERLRRLQPDTDQTRLLQFLVEERRKLVDEKTRQHNRLIDCLKLYFPQALHWFDDLGGALAGAFLERWPSLQEAQRAHPGTLKRFFHQHHCRKEDRIAERMHAIQEGTPATGDAAVLEACAMTARGLGALLATLRVQIAVFERRIEELVAAHPEGALFASLPGAGAALTPRLITVFGTRRDRFHSAYEVQCYSGIAPVTEASGKSHQVRFRWSCPKFLRQTFHEFASQSIRQCDWARSYYQLQRDRHKSHHAAVRALAYKWIRIIFRCWKDGKPYDEQVYLSSVRRRTAVLGSAIAGATGCGWKQIAGFQRFF

SEQ ID NO: 165485 - protein, 315 aa, unidentified
MTTAGIDVSKAHLDLALLGPSYQRNLRFPNTPEGQEALLAALRLHHPQAIAMEPTGPYHLPLFKLLQAAHLPVGLVHPAQAKALRVGMGHRNKGDRTDALALARIALSWPEALRAPEALPPWLVELKALMGYRENLLKQKQMVEGQLETLGEGKGAVEAWLKEDLERLKGKLKEVEARVEALLSLVEEARVLLQEPGAGLWVVAAVLAYLPPGVWGKAKAAAAYAGLHPANRESGTSVRGSRLSRRGPGVLRRYLYMGAMVGRRWNGELRAYYEALIGRGKRPKQALVAVAHKLLRRLMGRLKAFYREKGVGGRS

SEQ ID NO: 165486 - protein, 401 aa, unidentified
MNAVGIDVSKGKSMVCVMRPFGEVVLEPFEVLHTAQNLRDLAGKLKALDGETRVVLEATGNYHKPVAFVLHDAGLFVSVVNPVLIHDYDNNSLRRVKTDRKDAVKIANYTLDKWTRLRQYLPEDDTRLALKNCYRQYQQAVAIRTMLKNNLISSLDLTFPDANKLFTSPAKNNGCEKWVDFIGDFWHSECVSSLSPDAFSKKYLKWCQKHGYNFTRSKSDEIYACAVNSASLPKSPTSKLLIQQQVAQLKAVSQSVAAFRQEMLRLSQQLPEFDTVMEMYGVGPSLGPQLMAEIGDVRRFSSKKSLIAFAGIEPQPNDSGKVVGNDKGISKVGSAVLRRTLFLIMSVILQTQPQDEPVFQFMNKKRSEGKPYKVYMMASANKFLRIYYARVKAVMDSERSQ

SEQ ID NO: 165487 - protein, 348 aa, unidentified
MLIIGCDYHPGFQQIAFVDTETGECGERRLTHREEAEQFYGMLKERSVRVGMEASGHARWFERLLSDLQFELWIGDASEIRTKRVRKQKTDRQDAQLLLRLMIEDRFPRIWVADAENRDLRQLLWHRHRLVQMRTRVMNQLHVVALNEGLRRKKALWRPAGRNELESLILAPWASRRRQDLLDLLDQLSPKIQELTRALEDEVEKRPVTRRLMTHPGVGPLTALAFELAIGSPERFHCGKQIASYVGLVPSEESSGDRRRLGHISKQGNSLLRYLLVEAAQVTVRSQQHWRSKFFHLAMRRGRKIAKVAMARKLAVRLYWMWRQGCDYAHFEKLGSHAGEPGNRQGVQ

SEQ ID NO: 165488 - protein, 362 aa, unidentified
MSNSTTWVGMDVHKENIVTVSISGDSGTVMTRWETPNTAKGKERLAGRIAGLGKARCVYEAGPCGYDLRRFLDGKGIPCDVIAPSLIPTKPGDRIKTDRRDAEKLARMHRMGELTAICVPTPAQEALRDLVRAREDANEDLVRCRHRLQKFLLRQGRRFEGKSWTREHWRWVRALTFDDANAGTVLAEYVLAVDQQLERVARLDARIEEEAQNPGIAPTVARLKTLRGVRTLTAMTIHSELIDLSRFASPRDLMSFIGLVPSEYSSGGKQRRGSLTRAGNAHLRRVLVEAAWHYRHPPHRTGETIRKRREGQPPDVIETARKAEVRLYRKFTRMVMRGKRTTVAAVAVARELAGFVWAIGRI

SEQ ID NO: 165489 - protein, 384 aa, unidentified
MSIAKKYIGLDVSKAKIAVAITDEGRGEPRFWGIIEHTKERILKRLQQLQGSGESRVELDVCYEAGPTGYMLHRWLLEAGIACTVVAPSLIPQRAGDRIKTDKRDALRLAQLFRAGELTGIYIPSPEEEALRDLIRAREDAKEDMNRHKQRMGKFLLRLQLFPPSKVKAWTFAHEEWLDTLRFESPCHRMVFQEYRESIRETAERLRRYEKDIELLSHTHAQAPLIEALQALRGVATLTATTLVSEMVSVTRFASAPSFMSYCGLVPSEHSSGVSRSQGKLTKAGNAHLRRVLVEAAHHYRHSPGVRRKLRERISGLPPEVQRMAFEAQNRLHRKYMTMLGKGKHKSKIVAAIARELAGFVWAIASVLEKKDDQNPAPDSLIAG

SEQ ID NO: 165490 - protein, 413 aa, unidentified
MDVLHPRCCGLDVHKSSISACILLREAGRVQKHQRRFGAMTQDLQDLAEWLRQFGVTQVAMESSGVYWKPVWNILEGQFTIVLANAQHIKNVPGRKTDQKDAEWIAQLLQYGLLRASYIPSEIIRDLRDLTRMRASLSQEASRISSRIQKVLEDANVKLGSVATNVLGKSGRAMLEDIICGEDDPEHLASLALGHLRVKIPQLKLALAGKIRSHHRFLLRRLLDQVQFVEHEIALLDERLEEIAQQRPELSQAVTRWDTIPGIDRVAAWALLAEIGDNMAQFPTAEHLASWAALCPGNHESAGKRLRGTTRQGSPWLRRMACQCAWAAARTKNTYLSSQFKRLAARRGKKRAIIAVAHTLIVIAYHLQKNQSNYDDLGGNYFDRIHSDGLKRYLVKRLQQLGNKVTLEPMEAT

SEQ ID NO: 165491 - protein, 343 aa, unidentified
MKHYAGLDVSVKETSVCIVDETGKICREIKVASHPDDLVNLLKDAAWHLERIGLEAGPLSQWLFEGLVTAGLPVVCIETRHAKAFLKAQVNKTDRHDSRGIAQMMRVNLFRPVHVKTLSSQKRRALLMARKLLQEKALAVENDIRGLLRNFGIKVGIVGAVRFEARIRELVENMPDLIDIIEPLLEARRTLREHFATLHRKLLELVRNDEVCRRLMTVPGVGPVVSLAFVATIDTPARFRSSKAVGPALGLTPVLHQSGESSRVGRISLCGDAMMRTLLFEAAQTMLTRMTRWSWLKAWAMKVAQRRGGRKAVVALARRLATILHRIWLDGTEFRWTREVRAA

SEQ ID NO: 165492 - protein, 426 aa, unidentified
MKNTQNEKISQIKNSTLVVGIDVAKETHYARAFDLRGIELSKLLKFNNTAEGFDHLTQWMQSICKQHDKADMIVGFEPTGHYWFTMGDFLKSQGHKLAIVNPFHVKRTKELDDNSPSKNDRKDPKTIAMLVKDGRYREVYIPEDVYQELREAVAERDRLVQRLTAIKNQVTRWLDIHFPEFQTVFKDWRRQAAFLTLRHFSTPERITSAGVMKIMAAWKQTMKRTAGIRRAEELVKKAGVSIGRKIGLVAAQASLQNLLDEHELYVKQYEQLEQLMMELLLQVPNAGKLLDIKGVGLITAATFVGEVGDISRFEDPRQIQKLAGLNLVENSSGKHKGKTRISRRGRRRLRHGLFMAMITILAKNREFRMLHHRNLTREKNPLTKMQSIIALCGKLIRVFYGILRTGANYSAEKMLGDIERGIRTAA

SEQ ID NO: 165493 - protein, 431 aa, unidentified
MAVSLVTRGVAIAGPNGGHAMEDTLIECCGGLDVHQGSIMACVLSGPANSKPRKELRRFATMPADLVQLRQWLRAAGCTAVAMESSGVYWIPVYAALEGHFELVVANPQRIKQIPGRKTDVKDCEWLARLLRQGMMPKSFVPPKPIRQLREMLRFRRKLVERAASQRNRVIKVLEVAGIKLASIVSDVFGVSGHAMLRALAQGTASPAEMAALAKGVLRRRVADLEQALSVPLEEHQRMMLTVSLDSLDHDQVQLAQVEGEIDRHLQPYRAQQLLLMRIPGIDRIIAATIIAEIGVDMSVFLDVAHLVSWAGICPGNNQSADKRFSTRIGHGNPFLKTALVQAAVAASRKQGSYLKDKFFRLKARRGFRRAAVAMARKILVIVYHMLKFGRPYQDLGDTYLDHLSHSRTKRNLLRRLERLGYKVTLQPNPA

SEQ ID NO: 165494 - protein, 341 aa, unidentified
MNIKRVGIDLAKSVFQIHGVDGQEKVVLRKQIRRAQLLDYFKKLPPCLIGMEACGGAHYWARELQKFGHTVKLMAPQFVKPYVKSNKNDANDAEAICEAVARPTMRFVAIKTIAQQDIQAIHRIRSELVQQRTAKVNQIRGLLAEYGIVVGRRVEVLRNALPQLLEEAENGLTADFRTLLDGLRQDLITLDERVDDMDKKIKTLANSHSDAKRLQQIPGIGPIIATALICAIGDGKQFKRGRDMAAWLGLTPRQHSSGGKDRLLGISKRGDAYLRTLLIHGARSVLKVAERKDDPRSRWLQNLCSRRNKNIAAVALANKNARIAWALLSKETDYLPEGEPA

SEQ ID NO: 165495 - protein, 304 aa, unidentified
MMGWMAPLRHLSAKMLGVESPADGEPSMSEITTIGLDLAKHVFQVHGVDANGATVVRKRLRRVQVLAFFSRLPRCLIGLEACTTAHYWARELRTLGHEVQLMPAQYVKAYVKRNKNDAADAEAICEAVVRPTMRFMPVKTPEQQAAVLLHRGRERLVRQRTGLVNALRAHLAEFGVVAPQGLRNVGKLITIVRDESDARLPDLARQVLAVLAAQIEQIEAAVAALEKQLMAWHKSNAVSQRLATIPGIGPIIATAIAATVVEPSAFRSGREFAAWLGLVPRQNSTGGKTRLGGLATTADYWRQR

SEQ ID NO: 165496 - protein, 404 aa, unidentified
MAVMIGVDPHKASHTAVALDESERQLGEFKVRSSVNQVQRFLEWAVPFPERTWAIEGAGGLGYLLAQQLVAAGERVLDVQPKLASRVRLLASGKQNKNDPNDASSVAVAALRSRSPKEVAGEDHVAVLRILAKRNNDLGRLRNKVACRLHSVLCELVAGGCSKEIRAAHARSMLEGLHPATAIEETRHLLAHDLIDDMVRLDEQMKASKKRIAAAVAASGTTLTDLYGVGPIVAATVIGYTGGVERFSTKDRYASYTGTAPIEVSSGPKKVYRVSRRGNRRLNHAIHIVAVTQIRNLDSEGRVYFDRKVVEGKTKREALRALKRRVSDSLYRQLQVDAQRSEAAETKRAREGKQGATLHPARPARALNTGSSEKPLPDPSPRYARSSQRRSTVTRPRNTVARSA

SEQ ID NO: 165497 - protein, 348 aa, unidentified
MDRLSPVTRIRKVGFTMENELYFIGIDVAKAKLDVDILRPDGRHRGKKFYNTSPGHEELVRWLRSHDVNHAHVGMESTSTYMENAAAHLSDAGYTVSIINPALSAAFARSEGLRSKTDKVDARMLAHFCREKRPSAWEAPHPTERALKALVLRHQALTEMQTQEKNRQETAPEVQLASIDVLLECLSAELKRIEKQIKELMDNDPDMKQRRKLLNSIPGIGEKTAAVLLAYTGLKLKFDTARQFAAYAGLTPKQHESGSSVMRTSRMSKAGPVQLRRALYMPAMSALYHTAWGKAFGKRLEGNGKRPKVIIGAMMRKLAQAGAGGVWRVEVRGAVRCVTTWNSGSVGR

SEQ ID NO: 165498 - protein, 419 aa, unidentified
MARKKNSPIVEVMHPNCCGLDVHKQIISACLITVDDNGKEQFEIMEFGTFTKDLVKLRDWLSESGCPIVAMESTGVYWRPVHNVLEGFMEVVLVNARHLKNVPGRKTDISDCKWLAGLLRCGLVKASFIPEKQVRQWRELDRLRKSHVETVGDYKRRVHKLFETANIKIDTVVSDLFGVTGRNLINLLSDERVDLTIDDIEKCAKGSLRKKVEELYDSVTGFFDDHHRFQLRGMMRIISELEREILSITERLRELMKPHQDLLNRLDEVPGINETAAQAVLGNIGITMKEFASDGSLSRWAGLCPGNNQSADKRKSGRTPVRSHPFKKIMVEIAWAAVKKKYSHYREKYYRLKSRLGPKKAIVAIANRIAKAVYRIIKYGESYREIGEGFLDKKNRHRKIDNLRRQAKKLGYILVSARG

SEQ ID NO: 165499 - protein, 346 aa, unidentified
MNATTYGMDIAKNVFQVHWVDGNTGEICRKKLPRGKVTEFFAVRPAGLIAMEACGGAHHWGRTLGPLGHQIELLPTHQVRPFISGNKDDAADARGIWLAAQHGDIRRVAVKSSEQQAMLSLHRMRTHWVSVRTATVNALRGLLYEFGVTLPRGRHSGLRQLAQQRAEINDAVPAVMVRLVDDQLLALADIEGHVQAMEGGISLMLKSQESARRLRDTPGIGVLGATARAATLGDGTSWRNGREFACCLGLAPGHRGTGGKVRIGSISKRGNAYLRTLLINGARALASREHPAPWIVALLGRRPFNVVVVAIAHKLARIAWALVAHGRAYEASWKASAPPAASAGAV

SEQ ID NO: 165500 - protein, 340 aa, unidentified
MTKTHIGVDLHQRFCYLTAVDASGRKLKQGQVVNEGAALRSWLGQVPGPRQVVMEASGFWPAFARAVGPEAERLVMVHPQRMKAIASARLKNDKVDSETLAQLSRADLLPEAWMANQGTQQVRLLTRLRITLGQQRAKAKNQLQAVLHQEGFVKPVADVFGKKGRAWLAELALSAAARVVVEVWLKVVDQMDQAIAEQTRALEKMAEEDARARWLRTVPGIGAYSAMVILGEVGEMERFASKRALASYAGLTPSVRESAGKRKRGGIGHHGSGTLRWIMLQVAQVACRHSPAAKAWYLRLKRRKPAQVALIALARKLLTAVWALLRHGVCFEENVFAARN

SEQ ID NO: 165501 - protein, 340 aa, unidentified
MSEVTTIGLDLAKHVFQVHGVDANGAVVLRKQLRRGQVVAFFAALPRCLIGLEACATAHYWARELQAVGHEVRLMPAQYVKAYVKRNKNDAADAEAICEAVGRPSMRFVAIKTAEQQAALLLHRGRERLVRQRTTLVNALRAHLAEFGVIAPHGLRHVARLVAIVRDDSDTRLPALARQVLEVLAAQLEQLTTAVTAIEKELMVWHRNNPVSQRLASIPGIGPIIATALAATIVEPIGFKSGREFAAWLGLVPRQHSTGGKARLGGISKRGNRYLRRLLINGASANLLRSRATNANPWVIGLRRRRPSLVVAVALANKTARIAWAVMRRAQSYRHRSAAA

SEQ ID NO: 165502 - protein, 345 aa, unidentified
MKIIGCDFHPSFQQIVICDLETGELQERKLSHADGQAERFYQELGESALIGIEATGNCQWFLDLVQRLGHEVRVGDAAKIRASYVRKQKTDKRDAGHILKLLLEKRFPQLWTPSAAMRDQRQLLRHRDKLVEIRTKVKNSLQHLAMNRGMQKKSRLWTHLGMEQFQQLAMPGWAGTRREDLLQLLKELNGQIEPLDQAVKQAAEQHPQAQLLMTQPGVGPVTALAFVLTVGDVTRFAGSKQLTSYLGLVPSEHSSGSKRWLGAITKQGNRFLRKLLVEAAQTTVRKDEGFRKEYQHRCRRRPKGVAKVAAARKLAVRLYWMLRSNVGYPEIVHIESNPRVPLGEV

SEQ ID NO: 165503 - protein, 449 aa, unidentified
MAQRTGLTRGDRRRNEKIEALRAVVRVDRAILSIDLGEDKQVAALMDHDGRVLGRRVVQCKAHALGGLLEWAGAQGVKRGFAGVVVGCEPTGHRWRSVMGLADEAGLGFVCVQSLKVHLAREADDYTRDKTDHKDAVLIGKLISRLDCYLPERAEADWARLRHLGQHRFRLVGEVVGYRNQIRDLLSCCWPAALGCAVQPLESTTWLCCLALAVDRGHGDPATLRGLGREGFLAAARGELSRFGAQRVCHKVAGRFFDALADGRGVVSQRHGALERVGLLLADWCSARTRLSTVEQRMVGVLDGLGLTGLVTSIPGLSAVGAAVILAETGDMHRFASARSVVKHAGLNPAENTSANFRGQTRVSHRGRPALRAAAWRAVWGALPHNAVLGEKFTHLTTRDDDRLAPGQARVACAAALLRWLHAIITTRVPWNPDIAAGVLPRGSRATAA

SEQ ID NO: 165504 - protein, 319 aa, unidentified
MHCIGVDVSKQELVTFDGTAERVFANTPGLHAFRRFVSEVPEPVIVFEPTSTYSRRLETLCRSENIVCCRLNPRVVPHYRQVGKGRSKTDTTDAELLYRYGTERGAQEAEQLSHDALAQALAARLAWHRVIQKARVAYQGLLDALDHDPGTERELSRDLRRSIADLKEREKAQLAAAQAIISTDEQTAQRFRALLSVPGIGPMTALTLFTLFRKYPDINRQQLVALGGLDPIQVQSGTSVHGKSRISKRGSREVRKCLFEATLSAARYNPSIRAIYRRLKEEGKPDKVARIAAARKLLLLAHAIYESGEPFRATVEEVT

SEQ ID NO: 165505 - protein, 400 aa, unidentified
MVSDFIKGYNLMKIFVGIDIAKLNHFAAAISSDGEILIEPFKFTNDADGFQLLVSKLESFDKNSIIIGLESTAHYGDNLVRYLVAEFYQVCVLNPIKTCQMRKNNVRKTKTDKVDTFVIAKTLMMQDDLRFITFFDLDMMDLKALGRFRQKTIKQRTRLKIQLTTYVDQVFPEIQYFFKSGLHQNAVYALLKEAPSPKEIASMHMTHLANLLKVNSHGHFTKEQAKELRILAQKSVGANDSAISIQITQTIQQIELLDSQLEKIEAEMTDIMKFNDSVIMTIPGIGYINGGMILGEIGDIHRFSNPNKLLAFAGLDPSVYQSGNFQAKTTRMSKRGSRVLRYALVNAAWNVVRNNATFKAYYDAKRAEGRSHYNALGHCAGKLVRVIWKMLTDEVEFNLE

SEQ ID NO: 165506 - protein, 367 aa, unidentified
MTNEKLNNSKARVEQDASTKPQTMKLGLDVHADSIMVVRIVDHSAPQPAQKFTPAKFREWVKGQLGLAEEVHSCYEAGPFGYGLHRYLVELGVQNLVVQPVCLDERHTGVNHDKSDAKELALRLDRYVAGNTHALATVRVPTVAEEQKRIASRQREQLKREVRRLTAQGRSLLLTQGYRAKGGWWGARRWAQLQVQLPTWLDERLEVFRRLLAVLTVELDAATAALEAAAPAVRPKGLGGLTYEVIEREVGDWGRFANRRQVASYTGLCGGVSASGQSHHLLSITKHGNVRLRTALVELAWRLVIWQRECKLVKKWWPVLGQAKATKAARKKAIVAIARQLAVDCWRWRTGKVTPQDLGWVMVGPPA

SEQ ID NO: 165507 - protein, 380 aa, unidentified
MTNVRFIGLDVHAETIAVAVAEPGGEVRSLGTIPNRPEPVARLMRKLGKPAQLRVCYEAGPTGYVLYWQLSELGVQCAVVAPTLVPVKAGDRVKTDRRDAEKLARCYRAGDLTAVWVPDAAHEALRDLVRARLAAKRDQLRARNRLGKFLLRHGRRAPEGSTPWSLKHLAWVRGQLFEQAAQQATLVDYLHEVEHEAERIVRLERSIDTAIETLPQKMRAVIEALQSLRGIAKISVVSIMAEVGELSRFAQARQLMGYSGIASREHSSGPRIKRGAISKTGNAHLRRIVVEAAWAYRHRPGIGATLLARQRDQSEEIKAIAWKAQHRLHARYAKLLARGKPKQQVITAVGRELLGFIWAIGVAAERTASDAPPRTLQRAA

SEQ ID NO: 165508 - protein, 415 aa, unidentified
MALKIVYKICCGIDVHKTFVVACIASTNDKGVTTYESHRFSTYTSGLKNLLQWLLKRNCRDVCMESTGKYWIPVYNILEDDCSIVLAHPKYVKAIRGKKTDKKDAKWIADLFKHDLVTASFMPPADIRQLRDLMRYRFKLTCFKSSEKNRLQNCLTVSNIQLGNVVSDTFGKSAQAILDKLLENPADTSFDIEPLVYKSLKKKLPELRDAIDGYITPEQAGKLRVIKAHYEDLESRKAELEELILALAAPYQQELAILQTAPGISSDFTAIGIISETGTNMEAFPSAKHLCSWAGLTPTNNESAGKKKSVRVSKAGCYIKPLLVQCANAVVKSNKHPEIRNRYLHLKKRRGHKKAIIAIARMLLTALYHMLKNGENYNAELYRKSDLPPVDREITVEQAIIIARNQGYKIKSATA

SEQ ID NO: 165509 - protein, 388 aa, unidentified
MIYVGIDIAKLNHFAAAVSSDGEILIEPFKFTNDYDGFYLLLSKLAPLDQNSIIIGLESTAHYGDNLVRFLISKDFKVCVLNPIQTSFMRKNNVRKTKTDKVDTFVIAKTLMMQDSLRFLTLEDLDYLELKELGRFRQKLVKQRTRLKIQLTSYVDQVFPELQYFFKSGLHQHSVYALLKEAPTPNAIASMHMTHLAHILEVASHGHFGKDKARDLRVLAQKSVGVNDSSLSIQITHTIEQIELLDSQLLHTELEMANLVTCLHSVIMTIPGIGFVNGGLILGEIGDIHRFSEPKKLLAFAGLDPSVHQSGNFQAKKTRMSKRGSRVLRYALMNAAHNVVKNNTTFKDYYDSKKAEGRSHYNALGHCAGKLVRVIWKMLTDEVEFNLE

SEQ ID NO: 165510 - protein, 485 aa, unidentified
MAVMLAVVLGLLMLEVAMSPRKPHPTSPDPASLALLHTLHPHAAGIDVGAAELWVGVPPGAVAVPHPPAVLPAHVRRFGAFTADLHAIAAWLRQCGVTTVAMESTGVYWIPLYDVLESAGFEVLLVDPRQVQRAPNRPKTDVHDCQWIQRLHSLGLLTAAFRPEEKIRVWRSYQRHRTNLIEDASRHLQRIEKALEQMNVKLTEVVSDITGVTGMSIVRAMVQGERDPKALAKLRDHRCKESMETIAQALQGTWQPEHLFALRQSLELYDYYHQQIRDCDRVIEAHLQGMALPEVTPLEPTRRVRRRKDNEATFDARQRLHHVAGVDLTAIEGIEESTALVVLSEIGTDMSRWPSEKHFGSWLGLAPNPRKSGGKVKSSATRPGVNRAAQALRLAAKNLQRSRSALGAFFRRIAARRGLAKAITATAYKLARIVYALLKYGTAYVTQGLEAYETAYRERVVRQVKRKAMELGLVVVEREAVAQPS

SEQ ID NO: 165511 - protein, 337 aa, unidentified
MKVTLIGIDLAKSIFQVCGVNQAGKPVFNRQIRRAKLMEFLLQHAGATMAMEACSGSNYWGRELQKHGTEVRLIPPQHVKPFVKGNKNDRNDAFAITEAARRPDMNFVEPRTPDQTDMIQVHRVLDRMIRQRTALVNQIRGFMNEYGVVVARGKEKLFAAMPDLLEDAENGLTPSSRALYQEMYEQWREASEAISRIEKRLSALAREDEAAQRLMKMRGVAEKIATATIAHAGNGHGYQSGRHFSANLGLVSRESSSGGKQKLGGITKRGNQYLRRLLIQGAWSVVRNVDKNDDRMSRWAKQLVERRGKHKAVVAVANKMARIMWSMLYHQTEFRAN

SEQ ID NO: 165512 - protein, 370 aa, unidentified
MLDTTTFIGLDVHARSIKAVSLDVMTGEVRAATFGYDAGAVAGWVRSVDPRARCVYESGVTGFDLQKRLSGLGVDCVVGAVSKMIKPSADRRRKNDRNDAEFLARMLSVGNVVEVWVPDDECEAARDLTRALEDARDDLSRSKQRLSKFLLRHGLVFDERTPTGRRKGNWTRAHWSWIESIRFAEGADNEALAYYVDAVRRAAEDKARLDGLVEAETRKPRWRRRVDSLRCLKGVDTATAADLVFEAGEFSRFRNARSFAAWVGLTPSEHSSGESDRRGAITKAGNKHLRKALVEAAWHYLTCSGRPKDLAKGQAPDRGARRHAAKGVRRLVERREALLARGVHGNKANVATARELACWVWAVGLMAEEA

SEQ ID NO: 165513 - protein, 331 aa, unidentified
MSCQSSYIGVGASSDYLDFDGLPGQSRRRLANTPESHTALAALLSGSRGEDHEVVVVLEASGGCERGLHRVLVEAGVPAAIVNPQQVREFARSQGLRAKTDRVDARAIRRFGEVRRPRPTPLPDPVRAELIELLGYRDQVVAEITARTLQRGHLSSAFLIKRADAALERLRQESEMLAQLIEATVASDPELSRRAAVLTSFQGAGPLVAADLVAHMPELGTLNERQAASLAGLAPFARDSGQRRGVREIAGGRPRVRRALFHVARVGLRWNPVLKALYERLTARGKPGKVALVACMRKAVVILNAMLKTGQPWDPDYQTKKKAAQKDALAP

SEQ ID NO: 165514 - protein, 454 aa, unidentified
MAPRHQKTKQKVHAQLPTLHPHAAGIDIGAREIWVAVPPGSDPKPVRGFDSFTDDLLQLRDWLLACGVQTVAMESTGVYWIPLFQILEASGLEVCLVNARHCKNLPGRKTDIQDCQWLQYLHSVGLLRGSFRPPEQVCAVRSLLRHRSRLVRCAADQVRLMHKALTQMNVQLQHVISDLVGVTGEAIVQAILAGERDPVKLAALKDHRIKASHDTIARSLRGDWRPEHLFTLGQSYQTWQHYQKQITACDAQIEEQLAHWDARVDVQAQPLPAPKTSHRTAQRNEPQFDARTESYRVLGVDLTALPGFQAPTALLLLAELGPDFAQKFPSAKHFASWLGLCPDNRITGGKIMSSATRDVKSRVAEALRLAAQSLWHAQNYFGELYRRWKARLGGPKAITAMAHKLARIVWHLLKHRQPFNPDVFRKEEEKMRRKKLARLQNTAAALGYRLVESQ

SEQ ID NO: 165515 - protein, 457 aa, unidentified
MYGPFIVASSTRIRFAVSLQLLRATAPSLVRRVEVGRVQVSQDDQEIIARVAALDIGKAEVVCCVRVPGQGPRARRMQEVRTYTTMTRSLLAMSDWLTGLGVTRVVMEATSDYWKPPFYLLENSFETWLVNAKDVKHLPGRPKTDRLDAVWLCKVAERQMLRPSFVPPPAFRELRDLTRYRADLITTRTSEKQRVEKLLEDAQIKLSVVASDIFGVSGRAMMAALVAGERDPKVLADLARGSMRGKTARLEEAFTGRFTDHHAFLLRTMLARVDGIDADVDRVQARIDEQIAPFAKAVTRLDEIPGIGVTTAQVIIAEVGLDMTRFPTPDHLASWARFAPGISESAGRKKGGSSTGKGNRYLARALGEAAVGCRSTKTFLGERYRRIAKRRGKKRAIVAVGRSILMIVWELLSDEEKRFVDLGPGYYDSRVNRNRSTRNHVRELQALGYKVTLEPAA

SEQ ID NO: 165516 - protein, 286 aa, unidentified
MDGSKGRTKMTAGLDLGDRYSYLCLIDTENGEVVEEGRLRTTPEALRRRFASERPLRVAIETGTHSPWVSRLLKECGHEVLVANARKLRLIYANRRKTDEVDAENLARLARLDPKLLYPVEHRGEDSQAHMALIRSRQALVGSRTQLVNHVRGAVKSFGGRLPKCPARSFHNRASEHIPQALLPALGPILETIGSLTQLIREYERQLEAISKEHYPETDLLRQVEGIGPLTALTFVLTLGDPYRFEKSRSAGAYLGLVPATAKSGDRDPQKRISKEGDEMLSVGSW

SEQ ID NO: 165517 - protein, 369 aa, unidentified
MKKDTIFVAIDDSKRTLVMGILRPGIDAPELRTLPNEPRHVRRVFARLTREGPVRVCYEAGPSGYDLFRQLTALDVPCQVMAPALTPRKPGDRIKTDRRDAAKLVRLFRAGELTPITVPDEAGEAGRDLLRCREDVQEDLLRWRHRLGKFLARHGRVYREGRNWTQRHWTWIRRQRFDLPALERTLAEYRCAVEQLLARVADLNREIAALAETAPYREQVGWLRCFRGIDTLAAMTLLAEIGDFQRFAHPRQLMAYLGLVPSEHSSGDRTQRGSITKAGNTHARRILVEACWHYRHPPRLGAALARRSQGQPQSILAQAWKAQLRLHRRYRHLVGHGKRPPVAVVALARELVGFLWAALTPPDPVALAA

SEQ ID NO: 165518 - protein, 340 aa, unidentified
METKFRHFAGIDVSKHKLDVCLIVNSQRTQMHYGCFEQSLSGYKAMKKWFAELSGKAVDSLLVLVENTGLYDDALLVWLWDRKIAVCLENATNIKRSVRDNRTKNDKLDSRNIALYLLQHFHELSLWQKPRDVIGQLKLLLTQRSNLVDGLKRLKALHKEWKQYQWSGVHRLGSYEAGIKGLKADIDAIEKDMWELIKSDTALLTMFTLIVSIPAVGKITAMHFICYTNEFKTVKSGKQLSAYCGVVPFEKSSGKSVKWKPKLPHQANKVLKTLLHLCATTAIKMKGSFAAYYRRKIEEGKHSLIAINGIRNKLALTIAAVIRTGEPYNENYIYQHFEKP

SEQ ID NO: 165519 - protein, 400 aa, unidentified
MLSIGIDVSKGKSTVCGMKPGGEIVYTPFEVQHTREGMSELVLLLHNSGEEVRAVLESTGSYHCPVVAALLENGIFVSVVNSLRMKRFCSQSIRKVKTDRIDAMQIALYGLAYWQELQPTKLPEDTYRELQLLARQYYQMTSLLIKAKVDFNAICDQVLPGMQELMNDHAGRHKLSDFVLRYHHTTHILEMGETRFRKDYCKWAEKKGYRNCERMAALIFATAQNGIPVLPNAPSTQIVITEAIRVLHTVEASRDAILTQMQALAKTLPEYSLVREMPCIGDTLAPRLIAEIGDVRRFHSKRALIAYAGIDAPPYQSGKFCANNRHISKRGNRYLRKTGYEVMQSYVMHKPANDPIFTFIEKKRGEGKSGKLAMVAGLNKFLRIYYGKVTELYRGLPTIE

SEQ ID NO: 165520 - protein, 337 aa, unidentified
MKFSGIDLHSNNSVVVVSDEEDRMVFQRRLPNDLRQIMAALAPYREELAGVVIESTFNWYWLVDGLMEGGYRVHLANTTAIKKYEGLKYSGDMADALYLAQLLRLGLLPEGYIYPREARAARDLSRKRMQLVRCRTVQILSIENILARQTGGRMTSNQIKRLTTAQADALGLRPDVALALKANLAVCETLQQQIEVLEKRLKERVSLRQEYGLLKSVPGIGQTLATTIMLETGTVARFAKVGNFSSYCRCVDSLRESNGKKKGEGNTKNGNKYLAWAFIEAANFAVRFCPEAKRFYERKKRKTNSIVAFKALAHKLARACYHMLREEKPFDVKRCFV

SEQ ID NO: 165521 - protein, 411 aa, unidentified
MRLFAGDDWAEDHHDVEVMNEAGKVLARKRLPEGVAGMAGLHELIGRHLGEDADDAEVAVGIETDRGPWVAALVAAGYTVFGVNPLQASRYRERHGVSGAKSDAGDAHMLADMVRTDSHQLRAVAGDSAEAEGLKVLARTHKTMIWERTRQVQRLRHQLREYFPAALEAFDDLDAPDTLELLGKAPEPARAARLTRAQVSAALKRAGRRNITDRATAILAALRSEQLGQPAAVTAAYAVTVRSLIAVIAALNEQVKILQGQVETDFGRHPDAEIYRSQPGIGAVLGARVLGEFGDDPGRYADGRCRRNYAGTSPLTRASGKKKVVAARFIHNDRLVDALSAQAFASLNASPGARALYDELRARGIEHNDALRRLANRLVGILHGCLKARTLYNEATAWGHRRNLPQSDVAA

SEQ ID NO: 165522 - protein, 334 aa, unidentified
MQFGIDTHKASLAIAAVDEVGRPLAQAEFANDPAGHRALRGWASARAAERCFAIEGAGGYGFALAALLLGAGERVLEVPAQLTERQRRRGRQAGKSDAADAVAIARVALREPALPQLQPGWLDRDLKLLVERHRELRQQRTRESSRVHAELSRLRPGYQRQIGSLRTGAALDRAARLVRGDGALPAQLVRQRLAELRRLDRALKALRAQLVDAVAACGSTLTALRGVGPILAALILVEARGFSRTHTRDQFARYNGTAPIPAGSGQSRRQRLNYALHVMALCQAAHDPRARAYLARRQAEGKTWHEAMRCLKRHLSDTVWNALRTDHRLNSPLT

SEQ ID NO: 165523 - protein, 421 aa, unidentified
MEETGELAELVERVAALDIGKAALTACIRVPHEDKPGRRCQEVREYATTTRALLALADRLRCQGVTLVVMEATSDYWKPPYYLLEAEGFECWLLNARHVKNAPGRPKTDKLDAVWLAKVAERGMCAPSLVHPKPVRQLRALTRYRRTLIRERAREKQRLEKILEDAQIKLSAVVSDLFGVSGRAMIEALVAGERSPWALARLARGTLRNKTKILEDALTGHFDDHHGFLCQMMLDRIDGLSAQIGQLDARVEEAIAPFARQVTQLYEIAGVGTTSAQELIAEIGADMSRFPTAGHLVSWAKFAPIENSSAGKKKGGSTGKGNPWIGGTLGEIVLGASRTHTFLAERYRRIARRRGKKRAIVATGNTVLTIAYHLLSDPDARYTDLGPGFYDSKAGRDRQARNLIRQLEHLTGKKVALNEAA

SEQ ID NO: 165524 - protein, 363 aa, unidentified
MRYIGIDLHKQNIVVAVGDSRGSRLVSRTFSTGNVVPVISFFKRQTPFTAVIEASCSYRWLYDLLSPLGEVKIAHPLRIRAIVSGRAKTDKLDSAMLAKLLMAGMIPESYVPPRPYQDLRDITRARARLSRNATKAKNEIHALLARANCRAPYRSPFGPRGRRWLLETNLGPVADRVKSELVRRLEHYESEIAVMDVEIKNIAGTFPEIESLQDIHGFGLFSSLLVTGEIGEPWRFPSGEKVAAYAGLTARVNQSGSHNYHGHITRQGSPWLRWILVQAAMHVTRRDVKLRNFYQRVRKRSSAKIARVAVARKLAVISWVRLKIWHRRHRAKMQYCDKATRVTERSGLVLMTGERESSPVCAV

SEQ ID NO: 165525 - protein, 343 aa, unidentified
MEDTIYDHYIAIDWSIENMAIARMTKKSNKITAIDVPSDITDLQAYLKNLKGTKILATEETTTTQWLYTELKDHVDRIFICDPTRNKLLNEGPKNDKIDARKLVHLLKAGLMKEVYHSNDKFLYLRRLVSGYEDLVKAGVRAKNQRYALLRACGKKGKEKKNLNLDSRGAKFVLECLDRQIGAYEEEKKNFEKEFDRLAKKYPVIRHQKSLAGIGVINAVKIVARVVTPYRFADKGHYLSYTGLIKLKKESGGKIYGKKNPRYCRQLKSVYKAGVMAAIGGNNPINDYYEYLIQEKGYPECNARHKACRRLAILSLGVFKSCKKYQPYRRDHVKESKGTTSSL

SEQ ID NO: 165526 - protein, 344 aa, unidentified
MQTMYYIGLDVHKRTISYCVKDGSGAIHAEGAIPATRFDLDRWMKTLPQPWTAAMEATVFTGWIYDHLQPHAAALKVAHPLMLRAIAAAKKKNDRIDASKICDCLRCDFLPECYMASTAIRERRRTLRYRNLLVRQMVQMKNKISGLLMEAGVSYNKQRLHRAGYFRELLATNAGIDEGLCSLLRLCRETVVRLQKTESAMVLSLERDSLLMDRVERLMTIPAVGPITALTWALEVGDAQRFSSIKKAISYCGLCGAEKSSANTVQRTPLSKQRNKHLQTTLIEAAKMAPRYSPNLAMLYDKEKQKGNANRATLAVARKLVAYLMAIDRGQRNFQAVETNCIAA

SEQ ID NO: 165527 - protein, 449 aa, unidentified
MREPQEIQDEDHEQLLERVAAVDVAKASGMVCTRMPHESKLGRRVTKVWQVDATTNAIIQLGGQPVGLGVERVTVESTSDYWRPWVYLLEAAGLRVQLVNAHQVKHVPGRPKTDKLDAVWLAKLTERGMLRPSFVPPAEIRRLRDYTRLRVDLTHERTRYWQRLEKLLEDALIKVSSVASTLETASVRDMLGALIAGERDPKVLAGLARGRMRAKHAALVEALTGRFDDHHAELTRMLLDQIDALTAQMGTLTARIQQLLAAIPAAQGVDADGSTGPSAGSGPGAAVLPAAARLDEITGIGPAAAQAVIAEVGLDMGVFPSPGQLVSWARLCPRTIQSGTKTRAGATGKGNPYLRGVLGEAAAAAAKTDTFLGERYRRLVKRRGKLKALVAIARSILVIVWHLLADPAARYHDLGAGYYTDRIDKGKKARNHIRQLEALGFNVTLTPAA

SEQ ID NO: 165528 - protein, 424 aa, unidentified
MDAKDQNRWEPRRYYMGLDWAKQEHAIVVVDRKGRIRVDTSIKHTAEGWHRLREKLVALAGPDLSLVAATIETNRGPAVERLLELGCAVYPINPNAARWYRARKTPSGSKTDRLDALSFADALRTDGQGWRPLNPEDPKTQELRLLCRDETSLIEQQTTLVNQLQQALHEYYPAVLEAFDDWTCPSSWAFIERFPTPQVLKKAGQRHWEKFLHTHRLYRPQTYQRRLAIFAGATEFCGSDALTNAKSMLAVSLAKQLRLLEQQLRAYRKRIEAIFQEHCDYGIFASLPGVGEKLGPRLLSEFSNDRDRFPTYEGLQCYAGTAPVSFQSGQIHRVRFRYACNKNLRAAVHLWADLSRKKCVWAQVYYQQKRLEGKSHACALRCLGQRWLKILWKMWQTKTPYDEQMHTRNQIEHGSWVLALTASK

SEQ ID NO: 165529 - protein, 408 aa, unidentified
MITIAQTTPVLVAVDIAKARHEVLISVPGKKRRRRLTILNQLNDFERLVASLTSYDLPVRVAFEATDNYHRALAYHLATAGFEVKLVSSVALARTREALHNSWDKNDPKDAQVILHMMEIGNEQFYHDPLVRGTNDIQELSKTHDIVSKSKTELWHRILTHYLPLYFPEADRFHRSSRSDWFFAFLERYPSPHFISAMSKDAFIADAWDVVGRKVAKERLLADIYETSKVSVGLPVGLDSDAISMFRLVLGEGRSLIAQRNQIEDRAVALLKDLPDYQLLTSIPGIGPINALTILAEAGDLRRFGHHRQFLKFCGMDLATIQSGTFRGQTKLSKYGNARLRRTLWMAGQVAILQRANSFRDKFERYITKDRHNTHLRRKAYTAIAAKMARTVHGIIKNGEPYRPFFEG

SEQ ID NO: 165530 - protein, 354 aa, unidentified
MSQKLESAIAVIGIDIGKNSFHVVGHDERGAIVLRQKWSRGQVEARFANMPTCLIGMEACVGAHHLSRKLKALGHDARLMPAKYVRPYSKGQKNDFRDAEAIAEAVQRPTMKFVATKTADQLDLQALHRVRERLVSQRTGIINQIRGFLLERGIAVRQGQRFLRAELPRILATPPDVLSPRMVRVIEDLAGDWRRLDERIEGLSSEIETVARQDAGCERLMSVPGIGPIISSAMVAAIGTGDAFTKGRDFAAWLGLVPKQMSTGDRTILGKISRRGNRYLRVLFVQAAWVVLIKPKIWERYGLKPWIEAARKRLHHNVLAIALANKLARIAWSVLARGRAFEVRKMDEAANQPA

SEQ ID NO: 165531 - protein, 402 aa, unidentified
MNAVGIDVSKGKSMVAIMRPFGEVVASPFEVTHTGSELSELANTLKSLHGETKVIMECTGNYYLPIAYNLHEAGLFVSAVHAKLIHDYGNNTIRRVKTDKADSIKIANYGLSHWIELPRYWPEEDIRRMLKAYSRQYTKYIKLKVMLKNNFIALTDQTFPGVNELFKSPPRKSDGHEKWMDFAFKFWHCECVCGLRENEFIERYRKWCKRAGYNFSLEKAEDIYASALGHVCVVPMNDYTKQLVTLSINQINAISESIAIVAREMKRLAELLPEYPVVSSFYGVGDVLGPQIMAEVGEVARFRSKASLVCFAGLEPPEYQSGKFESENRHISKTGSPHLRKSLFQVMDCILKKSPQGDPIYQFLDRKRAEGKHYYSYMTAGSAKFLRVYYARVNEYIDAMED

SEQ ID NO: 165532 - protein, 405 aa, unidentified
MAIIGMDIHRSFAQVAFLENGQIKREQRVELVHDRLVKFAKTLSVEDEVVIEATGNSAAVERILRPFVKRVVVANSRMVRAIAYDRVKTDKIDAVILARLHAGGFLPEVWVADDNTQRQRRQTVERMGVLEQVVRTKGRIHAILHANLIPKYSGHLFGKAGKKWLAGLPLPEEEKAIVGRLIDELERNSDQLAKLDMTIIREALENPRVVRLMTIPGIGPVVASTVLASIGDISRFETPEKLSCYFGLTPKVRQSGDRPARHGRISKQGNTHARKMLVEAAWSAKTAPGPLRAFFQRVQRNRGAPAAAVATARKLAVMIWHVLTDGTEYAYARPAFTAMKLRKAALRAGASREYGKAGPGRDYWIKEIREREADHVRRAEHAYERMVAAWKEKPPTAPAMTATPG

SEQ ID NO: 165533 - protein, 334 aa, unidentified
MNYKTFIGVDISKKTIDVALKQINNQTIEHCQFPNNQKGFKSMESWISKQITTEIKDCLFCMEHTGVYVLPLACFLSENELSFCLENPYHIKHSMGLQRGKTDKADSKMIARYAAMHQEELKLSNFPSKIIIKLQALLAYRERLVNAQKGFKVASGELSAFVEKQISTHISKETNSLIKCIESRISKADKQIEELIKQDVQMSKNYELAKSVKGVGPIIASYMIVYTQNFTTITDSRKFASFSGIAPFEHSSGISINKGNKVSHLANKKMKRLLNNGAWNAARYDNEIKIYFNRKVAEGKNQLSVINAVRNKIVSRVFAVVKRGTPFVNIVNYT

SEQ ID NO: 165534 - protein, 338 aa, unidentified
MALYCGIDLHSNNCWVSVLLEGQQVLKEKRIGNDLDLVLEFLEPFREEIEGIAVESTYNWYWLVDGLMDAGYQVHLTNTWAIKQYDRLKYADDRHDARWLAHLLSLGILPEGYIYPKEERGVRDLLRRRLFLVQKKTAFLLAMRGAFECRTGLGTRTNDVKKWTVDDIAPHIDDPYASLGISCLLGPVGTMEEQIKLIEKTVLKQGRLREEYRHLTSVWGIGKILGLTIMYEVGEIDRFAKVGNFASYCRLVKSDWLTNGKRKGSGNARNGNPYLSWAFSEAAHFATIHYEDAKKYVQKKRSKTNGIVAIRALAHKLARASYHVMKDQVDFDPDRLFT

SEQ ID NO: 165535 - protein, 354 aa, unidentified
MSQTPNTAIAVIGIDIGKNSFHVVGHDARGAIVLRQKWSRGQVEARLANIPPCLIGMEACVGAHHLSRKLASLGHDARLMPAKYVRPYSKGQKNDFNDAEAIAEAVQRPTMKFVATKTAEQLDLQALHRVRERLVSQRTGIINQIRAFMLERGIAVRQGIGFLRTELPTILATRTDALSPRMLRVIEELAGDWRRLDQRIEGLTGEIAALAHQDQACSRLMTVPGIGPIISSAMVAAIGTGDVFSKGRDFGAWLGLVPKQISTGDRTILGKISKRGNRYLRVLFVQAAWVVLVKIKDWERYGLKSWIEAAKKRLHHNVLAIALANKLARIAWAVLAKGRAFELTRTDDASVRPA

SEQ ID NO: 165536 - protein, 312 aa, unidentified
MKNDTIGVDVSKDHLDAHRLADGASRRFVNDTSGRKAFLKWLAEKPVERVVFEPTGPYHRAFESALGAAGVPFAKVNPRQARRFAEATGKLAKTDRLDAAMLARMGALLELEARPARSNALLELKELHSAREALVKDRTAAKNRAKTLTLSLLRKHNAQRLDQIERQIQAIETAILAAIEADADLASRFAILTTIPGVSAVTAFALLIAMPELGALDAGQAASLAGLAPIARQSGRWTGRSLIRGGRADVRQALYMPALVAARFNPDMKAKYTHLIDTGKPAKVALTAIMRKLVVLANALLKANRPWTPRIA

SEQ ID NO: 165537 - protein, 324 aa, unidentified
MPQTADKVEMAAMPVTAVIGIDIAKHTMVLHDSISQHSWTINNTYADALQALEPFAGHDLAVCEATGGYERALLEAARTLNLPVHRADPAKAKAFIASHGGHAKTDKADARWLARLGLERGASLTRWCPPDPDREALTALVRHRQDLLKQRTAAKNRRSAPTSGPVRDLLEAEIDFLDGQIAQLDTRIDALQTAPALVPIHRVLTQMTGIGAVGASSLIALVPELGQINRRQIASLAGLAPHPRDSGRYAGKRRTGGGRHELRPVLFMIALSAARFCPKLNPFYDRLVALGKPKRVALTAVARKLLVIANAKVRDANLALPQLT

SEQ ID NO: 165538 - protein, 413 aa, unidentified
MRLFIGDDWAEDHHDVELMDGSGRRLARARLPEGVVGMARLHAMVGAALGDDAQDADPGQVLIGIETDRGPWVAALIAAGYTVHAINPLQASQYRKRRGVSGAKSDAADAHVLADMVRTDSHQLRAVAGDTAQAAAIKVVARAHKTLIWERARHSYRLRHALRDYFPAALQAFPDLAAPDTLELLAKAPDPASAAKLTTAQISAALKRAGRRGIPAKVAAIAAALRSEHLGQPTVVTAAYAATAGAATAVLTVLNEQIGALERQVEAHFGQHPDAEIIGSQPGLGPILGARVLAEFGDDPHRYADAKSRKNYAGTSPITRKSGKKKTVLARYIHNDRLIDALTRQAFTALTASPGARAYYDQLRARGLSHYTALRQLANRLVGILHGCLKTRTRYDEATAWPQHTAKTEKAAA

SEQ ID NO: 165539 - protein, 366 aa, unidentified
MRKASTAALGRRRKLQEGQLTIGLDLGDRSSFYCVLNGAGEVVLEAKVATHPEAMKKAFEKMPASRIALETGTHSPWVSRLLTELGHEAIVAHSRNVRLIGESRRKDDRLDAQALARLARIDPKLLSPIQHRSVQAQADLSVIRARYALVRTRTALVCAARGLTKSFGERIRGRNPKGFGSATAEALSPQLQVALAPLLSALETITARIREYDAQIEQLAEESYPEVALLKQVKGVGTLIALTYVLTLEDPRRFRKSRDAGCYVGLQPGRRNSGQSEPQLHITREGDSYLRMVLVQGAQHILGPFGEDSDLRRWGLKLAERGGKRGKRRAIIAVARKLAVLLHHLWISCEAYEPLHNTRKRRPAVA

SEQ ID NO: 165540 - protein, 407 aa, unidentified
MEVLYPRCAGLDVHAGQVTACVRIADGPQVLYHRRTVATTTRELLTLADWLTAHACTHVAMEATGVYWKPVWHILEDQFTLILANAMHIRQVPGRKSDVNDATWIADLLAHGLIRASFVPPTPIQDLRDLTRTRRQLVAEIARHTLRIQKTMEDANLKLTRVISDVLGLSGRAILKAIVAGETDPERLVDLTSGRLKASRAQLVQALQGRITPHHRFLIGLHLTQVEALEAAVAHVEGHLGDTLGPFRSAVTLLTTMPGLGETAARVLVAEIGVDMTRFPSAGHLVSWAGLCPRLDESAGKRHSTRVRHGAPWLKTTLVQAAWAATRAKNSYLQAQFHRIKGRRGPKKAIIAVAASMLTAAYFMLRDGVEYRDLGGRYFEDRNKQQVTDRLLRRLRDLGVSVEVKAA

SEQ ID NO: 165541 - protein, 483 aa, unidentified
MSQRKRSTAQGKPTPKPSRLPREQPPVLTVRNPHAAGIDVHSDMHMVCVPPDSVESPIEGDSGGLPAHVRRFGANSCDLHAIADWLKECGVTTVAMESTGVYWIPLFELLEARGFEVWLVEPGQLSRCGARPKTDVLDAQWIQRLHSYGLLQPSFRPADSIMALRGYHRQRQMQIRYAASHTQHMQKALEQMNVKLTEVVSDITGLTGQRIIAAILAGERDPHRLAALRDPKCKNDLETIARALEGTWRPEHLFALRQAYDLYQFHHRQIAECDAMIQAELARLPNRSGDKPFTAKPRRCGRKPNDLSFDACGPLFGALGLDLTEIDGIDVGTALVILAEIGIDVSRFPTEKHFASWLGVCPRQHESNRTKKRRGPRKGKNRVAIALRMAAQALGRTQSPLGLFYRRIKSRIGGKGAITATAHKLACLVYRMLKYGREYVRQSMEEYETKVREQQERSLRRKAAALGYELISKQGAAPGPVLR

SEQ ID NO: 165542 - protein, 394 aa, unidentified
MKLVGIDVGKNSHHFCVMDKETGELNVTPSSFSNNKEGFDFLINSLKPYSKKSILIGMEDTGHYHVALLKFLLSNGYTVALINPKTTDLTRKMEGGITKNDKLDTITICDVLDTPERKKQYRITKVDRFDLYEQRQLTRHHHNLKEELNIYCNRLQKSIDLVFPEFNTLFSSKYGIVYMNLLKTFGSAEIIASTDIRTIRKCFEIKGRGGRISLTAEKLKECAKNSIGISSEVETIQIKHLVSQISLIKEQIAEIDKKIEEFSIKNNSPILSIPGISHFSGTSILAELGDIGNYSKPSQIIKFAGVAPYHYESSQYNAQHTAITKKGSKYLRKTLYQIILPVIKNNPVFKKYYLLKISQGKGHRCAQGHCIRKLLRIIYHLLETGQSFDPALLR

SEQ ID NO: 165543 - protein, 370 aa, unidentified
MKKPATLFVGLDDHKDSISVAYVPDDRAADVNFIGRIGTRPADVDKLVRRLQAKADRLVFAYEDGPCGYGLYRQLTGHGLTCLVVAPSLIPRKPGDRVKTDRRDAVQLARLLRSGDLDSVYVPSVEDEALRDLCRAREAAVGTLKAAKFRLKSFLLRLGLHYTGRADWNDAHLRYLAKVVCPTPAQQIVFQESLRAVDEQVQRLKRLEAELADLVPAWRLAPVVRALQALRGVQDIVATTTVAEIGDLTRFDNPRQLAAFLGLVPSEDSSGDRRRQGPITKAGNGHARRALVEGAWAYQYPAKVSPAIQKRLEGLPKTVQDIAWKAQVRLCKRFRRLVARGKHPNVVVTAIARELAAFMWAIAKEVPITA

SEQ ID NO: 165544 - protein, 429 aa, unidentified
MKIIYPRVCGIDVHKKFIVAVICISESVEPVYLKKRFSTFHNDLIRFRDWLIQNDCQNVCMESTGKYYIPVYNILESHISNIVVANPKWVRAVKGEKDDDKDAKWIADLFKLGIVKSSFIPQKDFRILRELTRYKYKLVNMRSSEKNRYQNALTSGNCKLDMVFTDVFGKSASNIIDLILSDNPYTDEDILSKVHKNCKASPDMILNSINGTDLTPVQKSRIELVNNHIKQLSSNIQRLDKLIDLMIEPYEDYISFLCQIPGVSRNSAITILSEIGVDMNQFTSTRRLTSWAGLTPSSNQSAGKKKSVRISRAGVYLKPCLVEVAHAAVKDTNHPYYANKFNKISKRRGKKRAYIAIARKILVAAYHMLLTGEIWNPADLAEVETPVEQRIKYVKNNLKSDIKQLLDIGLTVEELTLMIQQNANIIATQ

SEQ ID NO: 165545 - protein, 402 aa, unidentified
MTYDYVIGMDACKYFHHACVLDIDGTQVLSKRINQNEQSLRTLFSAFSAYDHKVLVVVDQPNNIGRLTVAVAQDIGIDVRYLPGLAMRQLSRIHAGNAKTDIRDAYIIAHAAKNLPESLRSVDRVEEAFLQLKVLNGIDEDLARSYTRLINQIRSALVGCYPQFEQALRGQIIHRKWVLHLLARYGGPTKIKRLGKAKAAAFARRYKARNPEPVLDAIFAAISEQTVTIAGAHYAEMGVAMSAKDALLKLEHRQQIEKEVIELINDIPHTQFLLSMPGIGPKTAAQILMTAGDMSDFPSAGHLASYAGLSPRTNQSGTSIMSNSLNRAGNKKLKNALWQSSFASIRFHERSRQFYERKRREGKRHNAAVVALARRRLNVLYAMMRNHEHYHDPAPSQEDLAA

SEQ ID NO: 165546 - protein, 416 aa, unidentified
MEEELYPRCAGLDIHKTFLIACRRYPDPAGQSRRDIRKFGTMLADLQALATWLAETGTTHVVMESTGVYWQPVFNVLEEHCTVWLVNAAHVKNVPGRKTDVKDAEWLAHLLRQGLLRPSFIPPREQRELREVVRYRQSLVEERTRVSNRVQKVLEDANIKLSSVVTDMQGVSAQAMITALMEGETNPESLATRAKGQLRHKQAALEQALQGRVRAHHRYLLRHLLAHLEFLNREIAEVEAHIEAEVAARPPFAEAVEVLDSIPGVDRQTGIVIVTEIGVDMSRFPSAGHLTAWAGLAPGNNQTGGKERPSPTRKGNRYLRRALVQAGHAAAHKKGSYLRSMYYRIARRRGSGRAAVAVGRTILEIAYHLIQRHTRYEDLGAEYLEQRDAAARIRYLTRELEKLNVKVRIEAAAEAA

SEQ ID NO: 165547 - protein, 327 aa, unidentified
MTRMICGVDISSATLAARIGRDGIAATFANTTDGIAQLAGFCQSHGVELVAMEATGGYEQRSFAQLSEHGLPVAVLNPRAVRQFAQSMGALEKTDAIDAGMIAWYAETKRPQPLCLAPATQLELRARVTRLRQLTEVRTAQSNQQRLVTNAAVRKGFSAMLRFLDKQIEELEQAIAALIDADPLWHQLNRAFRTIKGVASRTVSRLMAEMPEIGTLSNKTISKLAGLAPLANDSGKRQGRRAVRGGRAAIREILFIVGSVVARYEPDFIAFQQRLRAAGKPPKVVRIAVAHKLLVRLNAKAREVRTGLALAKGTPACLQFGESQLCS

SEQ ID NO: 165548 - protein, 402 aa, unidentified
MIFINCLGIDIGKSESVVAHYKDEVLVKEMVIQNNQNGYRYLKNYIKHLDSLFILFESTGIYSRGMKRFCEIHKIDYLEMNPLEAKFKTSSLRSWKTDKSDAHKLALLAFRMKDSKVQRHPEEIYFELRERARFHLEMEINQNCLKVELVETLHQTFPGLEKLFTNRYSKIALNIAKAFPHPDFVSTLTHDELVEKVLHSTDKGISVNKAHKYVQKLIEIQINSFPNVDKSSFLLQKVQYLCDKLLIGIEEMKEFDQEMIDLAKNTTEFENIISIPGIGELTAALLIGELGNIREFKTNKQLNAFVGIDIKRYQSGTSKSRDTINKRGNKKARRLLYLIIMNIIRGRNHYQSHIVDYYYKLREQPHGKTHKTAVIASINRLLKTIHYLIVNNKLYDYQKAPH

SEQ ID NO: 165549 - protein, 387 aa, unidentified
MQQSNDLSRSLTALDENSTAIAVIELSQSSWLVAGIVPGVARHPLKKLAPDEEALLRLLERWRDEATKAGCTIARIAVAFEAGRDGFWLARWLRVRGIEAYVIHPNSVAVSREHRRAKTDRLDTELLKRAFLGWLRGERDHCSMAAIPTLEEEDAKRPSRERENLVDERTRIGNRIKATLARLGIRGFKPTLRTAAERLERLYTPEGAPLLPRTLAELRREMARLRLLAEQIREIEAARCERLRQHPDEGTHPMVRLLAQIVGVGLETADLLVQEVLSRNLRDRRAVARYGGLTGTPDESGARRREKGLARAGNARVRRSMLQLAWRFLMFQKNSALAQWYRARTADARGATRKTMIVALARKLLVALWRLVTTGEVPEGIILRPAL

SEQ ID NO: 165550 - protein, 335 aa, unidentified
MKKIYVGIDISKEKCNLCYRSGLDIVREEECSNEVKVLKKAFKSALKALDAAMDEVLICAEYTGRYIYPLTIACQELDLFLWLDDPTRIKNSMGLTRGKNDAIDATRIAEYAFRYSDKAVRYATQDATLVSMKNLLSDREFLLTDKKRYQAQLSDQKRYMAPGDFKQKNSRWKKVIKSINEQIAAIDAEIEALIAADPVLTRQKELLVSIDGVGDRIAINMIAITGGFTRFQNARQFCSFAGLTPYKYDSGTSVRSKAKISKRSNQTMKALLHMSAVNVVYKMRGGEYKEYFERKTKEGKHVMCVLNVIRAKLVHRMFSVISRETEYTKQYKPAC

SEQ ID NO: 165551 - protein, 341 aa, unidentified
MPATKYFIGLDISAEDFSASCITNPDNLVFSTQKFLNDFDGFNEFIFLLNKNSIKQSEVIICMEATGVYSENLSYFLVSKGFLVAIEAPQKIKNKTKDSPRKNDFIDALSIAEYAYRYTDKITFWKPKDEIIEQIQVLLATREHLSIQMTANQNALKTLKHKYYQTPLANRIYEQTINKFKEHIKQIDQEIKSLINKDDSFKNKISLAKSVPGVGLLLAANLLVLTKGFTEHLNYKQTASYSGICPYEQISGTSLRKLPKSKKCGPAKLRKLLYLAALSVRTHNKTFKKYFLRKTAEGKNTRLVLNNIENKLLKIIFAVINSGVSYTENYKSIDPVQLKTA

SEQ ID NO: 165552 - protein, 431 aa, unidentified
MTKTYILKTPTQTVPAERSAVETYLAPPPPSKGKIIGLDCHPDTFTAALFVGQTPHDARKIGSQENLSLEALLKWAAAELTPQDIILMEAGSNSFEVCKRLCALGLKACVLESCHVGKHAKTYADNDKMAAARIALVYLAGNAPCVWVPDEQSRERRELLHAYRKAVGDHTAATNSIKSYLNGRGIRLGKHSFDDKTTSQWILDQADWSVLQKNILAEHLANITESKERRKRLYRLIAAEIAVDPTMMRCMKVLGVGIVSAFALLAVIGDIGRFHSPEKLVAYIGLNPCQRQSGKGKDIRLGVGRRGRGDIRHLLIQGAHAIMRSGRNTPLGQWGWKLFARKGNRNVAVADIARKLLVQVWHLLHGNPPLALESDTSFRVKLQKLAVALGKTLRTGIGLGKSLEDSIKTLLARCQTHPEPSASPCETPQPA

SEQ ID NO: 165553 - protein, 389 aa, unidentified
MKIFVGIDIAKLNHFAAAISSDGEILLEPFKFTNDADGFQLLVSKLESFDKNSIIIGLESTAHYGDNLVRYLVAEFYQVCVLNPIKTCQMRKNNIRKTKTDKVDTFVIAKTLMMQDDLRFVSFYDLDMMDLKALGRFRQKTIKQRTRLKIQLTTYVDQVFPEIQYFFKSGLHQHAVYALLKEAPSPKEIASMHMTHLANLLKVNSHGHFTKELAKELRVLAQKSVGANDSAISIQITQTIQQIELLDSQLEKIEAEMTDIMKFNDSVIMTIPGIGYINGGMILGEIGDIHRFSNPNKLLAFAGLDPSVYQSGNFQAKTTRMSKRGSRVLRYALVNAAWNVVRNNATFKAYYDAKRAEGRSHYNALGHCAGKLVRVIWKMLTDEVEFNLE

SEQ ID NO: 165554 - protein, 400 aa, unidentified
MMTPDDIDVWVGLDVGKSAHHAHALDHDGNTLYDKPLKQDEKAIRTMLGKLSKHGRVLLVVDQPNTIGSLPLTVARNMGIAVAYLPGGAMRRTAQLLPGDAKTDRRDAHVIAWAALKLPETLRDAGPDDETLAALKLLAGHDEDLAHESTRHVNRLRSLLLQTHPAFERALKGERITRDATLALLERYGGPMGVKRAGIEDVKDWAKSNGLRAGRIIDDMFKAIGEQTVTVPGTLMAETIIPSIAHDIKTIRDRRREVGRQVEKLLEDHPLLTVLTSMPGIGVRTASNILLGIGGDIANFKSSAHLAAYAGISPVTGQSGTSIKGERPSRRGNKRLKNALWQTAFVASTKHPPSVAYYKRKREQGKHHNAAIICLARRRCDVIYSMLKNGTLYQEPALVA

SEQ ID NO: 165555 - protein, 424 aa, unidentified
MKVTYQTCCGVDVHKSFLVATIVKTTGGIEPSYQKKRFSTFNNSILEFKQWLLDNDCHDVCMESTGKYWVPVFNLLEDDINVVIANPKWVKAVKGNKDDTKDSKWIGDLFRLGLVRGSYVPCKKIRILREYTRYRYKLISCRSSEKNRYQNALTVCNVALDSVVSDIFGKSSTSIIDYLLEQSGTSINHEEIASKLLRSLKSKEDAVIESVEGYQMTDAQKYRMRLVRAHMDYITAEINDVDKMMENMISSNPDFENAVQFLCTIPGVKRDSAITIISEIGTDMSQFSSSKRLCCWAGLTPGSNESAGKKKSVRITRAGVYLKPALVQCAHAAVKSDKSPYYKKKYDSLVKRRGKKRAIIAIARMILTAIYQMMSTGEQWNPSDLYKIDMPVALVEKQKAKAIKQAKKLLQREGLLPPDEPLAS

SEQ ID NO: 165556 - protein, 461 aa, unidentified
MVRSRKGHAAQRSVAPGPLPQLTANAAGIDVGGTSHFVVVPPDRDGTPVREFRTFTGDLYRLAEWLTACGIETVAMESTGVYWIPLFQVLEARGFTVKLVDAHQLKQAPGRKSDVLDCQWLQQLHSFGLLAGAFRPDDQLCVLRSYLRQRAMLATYAGQHGQHMQKALVQMNLQLQVVLEDITGATGRKIIRAVLAGERDPHTRAALRDGRCKHSAATIAAALQGDWRAEHLFALEQAVELVEQYQAKIAACDARIQAHLQQFPDRGTGEPPAPGPQPRADRHDLRFDATAELYRVSGVDLTAVPGLQAHTVLKVLSEIGLDMTRWPSAKHFGSWLGLAPNNRISGGKILSRRTKPTANRAAAARRVAAQSLHRSKSALGAFLRRKAAHLGMPKAITATAYTLARSIYSLLSSGHAYVEPGQDAYELAHKHRAVRSLSKRARDLGFDLVKRDPVQPLAAPA

SEQ ID NO: 165557 - protein, 349 aa, unidentified
MNATIVAVDLAKSIFEIAAADADWRIAQRSRLPRSKFFGFFMQLQPCQVVMEACGSAHYWARRISALGHTVRLLPAHYVKAYVRRNKTDRADAAALLEAARCADISEVPVKTVDAQQIQSLHRLRSQWMSTRQRYVNTLRGILREFGFAIPLGVNVAKDRIGTALADPESEVPPALRTTLAEMLQEIRLLEQKILGIEHQLNALTRHDVRVQQLRQIPGIGALTSTALRAIVGDIQRFPSGRHFASWLGLTPNERSSAEKRRLGKISKQGDVYLRTLIVHGARSALLGAHRAERSGHPLDHLRRWALDCERHRGHNKATVALANRLARIVWATWTHERPFDGNWSTQAA

SEQ ID NO: 165558 - protein, 403 aa, unidentified
MNSVGIDISKGRSTIAVMRPFGEVVISPFEVRHTGSELSKLAKQLKSLDGETRVVMEATGNYHASVAKLLHNAGLYVSVINAKLVHGYGNNELRRVKTDRKDAVKLANYGLDRWLTLPRYIPEEDTRLLLKNCYRQYRQYSKVQTVLKNNLISLLDTVFPNANRLFSSPIRGDGSEKWVDFVAEFWHCRCASEKSERAFTSKYLRWCRKHGYNFREAKAHTIYAEASGHIGVMPKSETTKLLVEQAVAQLRATSTALAALKQEMQSLASVLPEYPVVMDMFDVGPTLGPQLIAEIGDVRRFYSKKALVAYAGLDAPPNDSGDVTGRHKSMSKIGASSLRRTLFLVMSVYLQTAPLDEPVCQFMDRKRAEGKPYRVYMMAFANKFLRIYYATVKAYLESLEHTV

SEQ ID NO: 165559 - protein, 388 aa, unidentified
MICAGIDIAKLNHVASVISSDGEVLVEPFQFSNDFEGFRSLSLVLDKFDREKLLIGLESTAHYGNNLVEFLVAKGYRFCVLNPILTSTKRKKSVRNVKTDKVDSIVIAKTLMQEKHRLFEKQDLDCLRLKNLGRSRQDLMKKRTTCKIKLTSYVDQAFPELQYFFNGVHHKAVYALLKEAQTPEQIASMHMTHLSNLLRVASHGHFKKEKAQELRVLAQRSVGSNDSSISIQITQTIEQIELLDRQIDDDEAKIEEIVKAMGSVIMTIPGIRYTEAGMILGEIGDIHRFPNYSKLLAFAGLDPIIRQSGKFNASHTRMSKRGSRVLRYALVYSAHNVVKNNETFRKYYDLKCSQGRGHYAALGHCAGKLVRIIYKLLSEEIAFDPSKL

SEQ ID NO: 165560 - protein, 368 aa, unidentified
MSTSIIPYERSTLVNSEKYIGLDVHQATISIAVMDSAGKVVMESILETKAATILEFFAGLRGTLSVTFEEGTWAAWLYDVLKPHVAKLVVCNPRKNALLKDGNKSDRIDARKLAELLYLNKLSPVYHGETGVRMLRELARSYLTIVKDLTRVMSRLKAVYRSWAIPCAGRDVYYRRHRDEWLGKIKEAGVRRRAERLYQQLDMLQHLRQQARRELLAESRRHSITARLRQIPSLGPIRSALAVALIQTPNRFRTKRQLWAYSGLALETRTSGEHCFVQGQLRRSKKQISIRGLNKDHNHDLKGLLKGAATTASVRPGPFQDFYQRSLAKGIQPTMARLTLARKIAAITLTLWKKGENFDAEKLKSQAA

SEQ ID NO: 165561 - protein, 349 aa, unidentified
MGIIGGLDVHRAQITYDYIDSATGEIRRGRIEPALREDVREWLERFHRQEDVAFALEGTTGWLYVVEELHRAGIRPHLAEPADTAALRGRKRRAKTDAADAKLLRELLLTGRLPESWIPPAHVEQIRTLVRLRKALLDERRAWHQRLQAKLFHHGLPRLGELSPEDRREWFGRLQLPPASLQVVGVAIACIERITEQMVPIDAQLKWIAHHQPGCKALDRGIYGVGWLTAVSIWAELGDVRRFGSSRRAVRHTGLDITVHSSDGKRSPGHLSRQGPQILRWALYEAAMSAARPGSPDHSYYVDVKAREGSGRALLSQARRIARRAHHILLGMGEEALAPAPALPLAEAA

SEQ ID NO: 165562 - protein, 347 aa, unidentified
MQFYTKKHQYYCGIDLHTKIIYVCLLDSEGKVLLHEQTKANPEALMILIEPYLNDLVITVECMFTWYWVSNFCQQHGITFVLGHALYMKAIHGGKAKNDKIDSYKIAKLINSGMLPQAYTYPESMRATRDLLRRRTFFVRQCAHIKGHVKVLNYQYNLPEIKGNLKDKGTRLKAQEQFTDDSAKRSVTANNNFIAFYRTQIQSLECYVKKHAKVDDYHSLVLLQSIKGIGDVLSMTILYEIHTISRFQTVQKFASYARLIKCKAESAGKVYGTSGNKIGNAHLKWAFSEAAALYLRGNKKAQNYHARLVQKHGKGKAMAILSHKLGRAVYFMLKQKTPFDESVFLNG

SEQ ID NO: 165563 - protein, 358 aa, unidentified
MTRCIPAHAATITVGVDTHKDAHVAVALDSLGRPQGTLSVPANPAGYKRLVDWANEFGSVEHVGVEGTGSFGSGLARFLRARGIKVSEVIRPKRRDQYRAGKSDPIDAEAAARAVLAGSATGQPKDADGRVEMIRNLRLARRSAVKARAAAVNQLKTLLVTAPEGLKGELCGLSTSKLVATASRFRPGMNPSDVEAATKFALRSVARRYQRLSEEISELDEQLDRLVSEAAPELVAVEGVGTDTAASLLIAAGDNPERLKNEAAFAQLCGAAPIPASSGKNVRHRLNRHGNRDANRALYVIAVCRMSRDKRTRSYVAKRTAEGKSKKEIIRCLKRYIAREIYRILTSLSLPRSSISRP

SEQ ID NO: 165564 - protein, 356 aa, unidentified
MSRDIKYIGMDVHKEATVIAVLNGSGKLVMESIVETKASSILQFIHGLRGELHVTWEEGTWAAWLYDLLQPQVARVLVCDPRRNALLKEGNKSDKVDARKLADLLRTGMLRPVYHGEHGLRTLRELGRSYHTLTQDLNRVMNRIKALYRGWSIPCAGTQVYAARYREQWLQKIEHAGVRRRAELLYQQLDGLQILRRTLRPELLAESRKHKASKLLRQIPCIGPIRAARLIALMQTPHRFRSKRQLWTYSGLGIETRDSAQYRYVHGQLQRSKKPQQIRGLNQNHNHEMKEIFKGAAIRASCGVGPLRDFYVALLAKGMKPEMARLTLARKIAAIALIVWKKEERFDAEQLKTQAA

SEQ ID NO: 165565 - protein, 360 aa, unidentified
MQSQKSEPACKKDKVYVGIDVHLKSWTVTILNDNISHRTYTQPASAAVLVDYLRRNFPESEYYSAYEAGFCGFNAHYQLLNLGVNSIVVNAADIPTTQKELFQKNDPVDSRKIARALRANQLSAIHVLELQTLEDRSLVRTRDMIVRDIAKLKCRIKSFLRFYGIDLPAQFNSPYTHWSNRFMEWLKEGVKLHSPYAEDSLNFLTEEVKSLRHILLEVNKKIRTLCSESRYSRQMDLLMSIPGIGRVSAITLLTQLEQIRRFRNTDTLASYVGLVPNTYSSGEKESIGEITFRGQKILKRILVECAWMTIRCDPALSASFNAYCRRMQPNKAIVRIARKLLNRIYYVLKNEKVYTCGIKK

SEQ ID NO: 165566 - protein, 360 aa, unidentified
MTKVRELDFKVTTIFCGLDVHKVSWRVNIRDTELELKDFTQPANPNLLHKHLTKNYPGAKYKVGYEAGFCGFGIQRELTALGIECVLLNAADIPKGDKDRRQKNDKRDARGISQELSTKKDLRSLYVPSPAWEHACTLVRNRQQQISDSTRCKCRIWHFLYFSSLPIPDKAETGQYWSRKFIKKLEDMDCGGSAELKAALQLKIQDHLHKRELVLQSNRAIRKMYRQEAYWPLMQLILSIPGIGEINAAIILFELQDILRFKTFDNLCSYAGLVPDTDDSGETKKNKGLTHRRNTYLREALIESSWVLVKKDPAMLMKCKDYCKRMHKNKAIIKITRHLLARIIYVLRKQTPYVSGFVAG

SEQ ID NO: 165567 - protein, 441 aa, unidentified
MAMRTRNELTIQHPNAAGIDIGSSSHFVAVPADRSASAVREFGCYTQDLYEMAAWLLACGITIVALESTGVYWIPVYEVLEAYGIEVMLVNARNVRHVSGRKSDVLDCQWLQQLMSFGLLSAAFRPPADVCALRAISRQRDTLLQEQARCVQRMQKALTQMNLQLTNTITDITGQTGLAIIRAIVAGIRNPQELAKLRNYRIHASEAEIAKSLEGTWKEEHLFCLAQALSLYDTYRTLIAEADAKLDALITPLRRQGVKAAEGKAKRGGKNAPRFDVRNALREWAGVDLTQIGGIDVCTALKVLVELGPDLSKFKNAKHFCSWLGLCPGTRISGGKRLSGASKRIPNRVARALKLAAQGLHHSQCGLGAYYRRLAARLGKGKAITATAHKLARLVYAMLTQGSEYVEQSQAQYEAKFQERTLKYLQQKAKTLGFDLVPQAV

SEQ ID NO: 165568 - protein, 465 aa, unidentified
MARKSKNVKSKERKPIPRSLKTIHANAAGIDLGSREHWVCGPPREDGTPNVERFGTTTPELYRLADWLKEQAVKTVAMESTGVYWIPLYEILDSRGLEVLLVNARHISNVPGRKTDMLDCQWIQLLHACGLLRGSFRPSDEICRFRALIRERNTMVDQRSDWIRRMQKSLDQMNVCVHHAVSDVSGVTGMAIIRSIVDGERDPHALARLRDPRCRKSEGQIAEELTGNWRPEHLFNLRQALRMYDQTNAVIREYDSEILTYLARLQPEDTLDTSVPPPQSKSKARSLAKRGQEPLRQALYRFCGFDLTTIDGIGVDTASVIISELGLDFTVFPDESHFVSYLRLAPNLSISAGKKVRSKSKATTCTRVCSALRMAASTLRNSQTALGGFYRRMAWRKGASVAVFATARKLAQLIYRLLCYGQVYVDTGAEAYNARFERRRLKFYTKLLNTMGYSVQPLTKSTLAK

SEQ ID NO: 165569 - protein, 343 aa, unidentified
MYYIGLDIHKKIIAYCVKQVGGEVHSQGVVNSTRAALDGWIKLLPQPWSAAMEATLFTGWIYDHLLPHASALKVAHPLMLRAIAASKKKNDRVDAAKIADLLRCDLLPECYMAPVEIRERRRTLRYRNVLVRQAVQMKNKMAGLLMETGVTYNKEKLHQKKYFTQLVKESTELPDALKPLLKVGRETVERATASEKALLRALEHDQVLADRVERLVTIPGVGLITALSWALEIGEVARFASVKHAVSYCGLCSAERSSAGIQKRSPISKQRNKHLQTVLIEAAKLAPRWNTDLALLYDKEKQRGNRNRATLAVARKLVAYLLAVDRREKPFLGGKMPRLKTAA

SEQ ID NO: 165570 - protein, 374 aa, unidentified
MSVYVGIDVHRKRSQVAVVTGDGTVQLNRNVVNGSEPMLRLIGDLPAGTPVAFEAAYGWGWLVELLEDYGFEPHLVHPLRCKAIASARLKNDKVDAAILAQLLRADLLPEAWIAPPAVRQLRALLRHRASLVRLGTQLRNRIHAVAADHGYDRTGSYWTGPGRGWLAELDLPPVSREIITDCLVSIDALEPVIERLDGELRQHAKADPRVKILTALPGVGRFTALVILAEIGDITRFGSARKLASWAGLTPTVRGSDLNVRHGHISKQGSAWLRWVLNQAAQTAKRSPQFSATYAAIAKRRGTKIATIAISRKLLTRAYHLLAAAQAAQAPGTAATGNAASAATTHPQTGRVTNPRARSPMRHEPATGRARSSD

SEQ ID NO: 165571 - protein, 327 aa, unidentified
MYILGIDVSKDDFCVHLLHPGGQKSSSKFDNTKKGFRKLFGWLKAFGAKDILACMEATGRYGEALAKSLHDRNLKVAVANPAFVSKHKESLNQHNKTDPTDAEAIADYARCFATKLRLWQPLSPQHERLRDVQGQIAKLTKARTMFTNRGKCGLNCDEVIESNAQLVDFLDAQMEKMHALREELFEQLPELQETREIVDSVLGFGVEIASAIAAKVRMEDFKDGRQLAIFLGCSSSEWHSGKQKKRGKQRKTGDSDLRSLVRQGAVSATRCSFYRDFVQRLRKKGLKESQIITALARKMLIIAHALWRRKEPFDRFYSHPLSSNKAS

SEQ ID NO: 165572 - protein, 315 aa, unidentified
MKRSTSFVNVGIDVGRDRLDVFIHERQLALSYSNDDAGIRALLRRLAYYRLARIVLEATGRREQALVSAALERQMPVIVVNPIMVRRFAGALGMMAKTDAIDARVIAHFAATIQPCVRPAPDPKARELKDLVVRRRQLLDMRTMEKNRLQIMPKALTGRIRRHINALADDVHELDSLIDSLVGKLAHWRERRELLLSMPGVGAVVAHTLIAELPELGKLNNKQVAALTGVAPFNRDSGLLRGKRRIRGGRRTVRTVLYLGAMAAVRFNPVIKQFYARLVAAGKNKKLALTACVRKMVVMLNAMLRDGRKWNPSTA

SEQ ID NO: 165573 - protein, 340 aa, unidentified
MSIVFLGIDLAKNIFQLCGLNQAGKPVYTKRTGRKELLQTVANIPACLIGVEASTGAFYWQREFEKLGHKVKVISPQYVKLFVRGQKNDGNDAQAIAVALMQPTMQFVPPKSPEQQDIQALHRARQRIVNHRTATVCQIRGLLLDRGITIGAAVSRVRRAVPLILEDAENGLSVRMRRTIAELYDLFNDLGRRINFFDKEIDVVFRQSEACQRIAKVKGIGPKTATAVVAAIGRGTEFKNGRHFAAWLGLVPRQHSSGDKQVLMNMTKKGDKHLRTLFIHGARAIVRVATNNNDGCLHQWVNQLKERRGFNKTTVAVANKNARIIWSMLRNDTEYQAVGS

SEQ ID NO: 165574 - protein, 337 aa, unidentified
MKVTLIGIDLAKSVFQVCGVNQAGNSVFNRQVRRNKLLETLLKYPGAAVAMEACSGSNYWGRELKKLGFKVLLIPPQHVKPFVKGNKNDRNDAFAITEAARRPRMQFVEPRTLEQTDILVLHKVIDRKVQARTALTNQVRGLLNEYGVVVSPGKERLLKALPELLEDAENGLTPAVREVLHSLLEEWREANQQIQAHEAKLKRTARQLKPARRLMAVKGVAEKTATAIVGFAGEGKAFRSGRHFAANLGLVPSEHSSGGKQKLGGITRRGNNYLRRLLVQGAWSVIRYADRSTDRLSRWASNVMERRGKHKAVVAVANKLARILWAMLYHQTEYRAG

SEQ ID NO: 165575 - protein, 349 aa, unidentified
MRFYTSQHQHTCGIDLHARTMYVCILSQDGTTLVEKNIPACPAPFLKLIAPYREDLVVGVECIFTWYWMADLCEEEGIPFLLGHALYMKAIHGGKAKNDRIDANKIAALLRGGMFPMAYVYPREMRSTRDLLRRRLHLVRLRGRLLAHIQNLNHQSNFNAFPKKLQYKANRKDVLERFKDPSLRKNVELDLSLIDLYDELIRKLEYCLVRQAKIHDADMFHRLRSIRGVGKILAMTILYEVHDIDRFPSVQQFASYCRLVKCARESAGKKKGTGGSKIGNVHLKWAFSEAAVLFLARNPRGQKYLAKLTQKHGKGKALSILAHKLGRAAYIVMSRRTNFDEKKFFAAIS

SEQ ID NO: 165576 - protein, 354 aa, unidentified
MLIIGCDYHPGFQQIAFVDSETGELQERRLEHPEAAEKFYRELAAPGKKVRVGMEASGHARWFERLLAELNFELWIGDAAEIHRKRERKQKTDRQDAQHILRLLLKDDFPRIWVPSWENRDLRQLLWHRHRMVQARTRMMNQLQAVALNEGLRCKKKLWREAGRKQLEAFRLAPWASRRRHDLLELLDRLNPTIAALSQAIEQKVQNCPEAQRLMTHPGVGPLTALAFVLIIERADRFQCGKQIASYLGLVPLEDSSGNRRRLGHITKQGNSLLRFLLVEAAQVTVRSLPEWRSKYVHLTMRRGRKIAKVAMARKLAVRLYWMMRKGWDYEQLKKFGSHPGQPGHRDGVKSNIE

SEQ ID NO: 165577 - protein, 317 aa, unidentified
MQQTLNIGIDVAKAELVIGVADHPQYNLAIANTASAIKRWLGHVPEHARLAVESTGPYHRLVVDLAQARGLHVYVLNALEVHYYAKSLGQRGKTDRSDAQVISRYLGEHHARLHPFQAGTRVEQSVERLLRRRAQLTAQRDAMRMTLRDVPELKQETAALLAHVDDFLAGIQAHIEHALGQQAELLESWQRLQSTPGIGPQGAALLTCLFHRVPFESVDALVAFSGLDPRPKDSGQKHGRRRLSKRGPALLRRQLFMMAFSASRTPVFKPYYQALRTRGLSTTESFVILGRKLLKIAFGLWRTQTYFEANRHPIKII

SEQ ID NO: 165578 - protein, 309 aa, unidentified
MTANQKFSRFIGIDVSKAKLDIYDDATGEFLTVENTAKAIEKYVSALSPDPELLIVVDLTGGYEALCVNTFYNRGFTVHRAEGRRVKAFMRSYGEHAKTDRIDAYALALFGRKLHEPLRMYTPLPLNLKPVTERISDLKTMLLQEKNRSTAPSLPPDMKKEIVRHIAYLEKEIERLYQKCLDIIKNDPPLAEAFYKIIAIKGIAEKSAVLLLTTLPELGCANRRQIAAIAGVAPYAKDSGTLSGYRRIRHGRTTAKSALFIVTLVAIRHNAQIKEFYERLLKKGKSKMTAIIACARKLLIIVNATLKTC

SEQ ID NO: 165579 - protein, 309 aa, unidentified
MIIHPGFVGIDISKHHLDIFGVLHGAEQVANAAPAIAKLARRCARAGDFVLFEATGIYDQLLRQALVRAGVSFARVNPSRAREFAKAAGFLAKTDRIDARMLAAMAQALQPACQAPADPQRERLARLAKRRDQLVAIRQQERTRRHECLDDEIARDLDHHIAWLGRSIVTLERQIKALLAENADLNRSQQLLRSVPGVGAITATTLLALLPELGARSPKKIAALAGLAPFNVDSGRFRGKRLIRGGRKRVRDALYMAAVTAARSQTRFTAFYQSLREAKKPAKLALIALARKLLITLNAILRDQAPFHA

SEQ ID NO: 165580 - protein, 341 aa, unidentified
MNIKRVGIDLAKQVFQVHGVDHHEKVVLRKQLKRGQFLSFFAELPPCLIGLEACGGAHHWARELQKQGHSVKLMAPQFVKPYVKSNKNDANDAEAICEAVGRPTMRFVTVKTVAQQDLQAIHRIRSELIKRRTAKVNQIRGLLAEYGLVVGQQVNTLRQALPGLLEDAENGLSFDFRALLEELRQDFIQLDKRTVEIDKKIHALAHADPVSKRLQGIPGIGPIIATAIICAVGEGKQFKRGRDMAAWLGLTPGQHSSGGKDRLLGMSKRGDPHLRTLLIQGAKSSLNAAGKKTDPRSLWLNNLCARRHKNVAVVALANKNARIAWALLRNETDYLPEGITV

SEQ ID NO: 165581 - protein, 381 aa, unidentified
MRRIDEWAKLLHQRFGGTIAVALELAKGPIVYALQKYDFIVLFPINPLTLAKYRQAFKPSRAKDDPTDAELALDLLLRHPERFAPIQPQSVAMRSLISLTEHRRELVGDKTRLTNRLTNTLKQYYPQALDWFEQRDTVLFFDFLTRWPTPEQAKRARIDSLKAFFNAHNSRRANVIDARLKSIKSALPLTEDLGVITPCRLHALMLVKQLRVTLQAIEQFDHEISELAPTLPDYSLFQRLPGAGEHFAPRLLAAFGEDRQRFQHADELQKYSGVAPVTERSGKKSWVHWRWQCPTFLRQTFIEWAGQTINKSFWAGAYYRQQRAKGSSYQAAVRALAFKWIRILHRCWKTRTPYNETTYLNALRKRGSPLLKNLMPDATNT

SEQ ID NO: 165582 - protein, 318 aa, unidentified
MSDDTLNIGIDVAKATLDVAIRPGGQHWQIPNTDDGIHDLVDRLVGLHPSLVVLEATGGLETPLTGALASAGLPVVVVNPRQVRDFAKATGKLAKTDAIDAHVLAHFAEAVRPTPRPLPDAQTQAIAALMARRRQMVTMLVMERNRWQTASVPIRSRVRAHIDWMEHELEGLDQDLGETLKQSPLWCEQDQLLQSVPGVGPVVSLTLLAQLPELGTLTRRQIAALVGVAPHNRDSGTLRGKRTVWGGRSTVRSALYMGALVASRWNPELRDFYQRLRAAGKPKKVALVACMRKLLTLLNAILMHRTPWQENHATTLDI

SEQ ID NO: 165583 - protein, 455 aa, unidentified
MANKAKKIKTGNGLKLEIVNPNAAGIDVSSTEMQVCVPPDRDAEYNRCFGTFTEDLHFISAWLKACQIDTIAMESTGVYWVQLFMILVSDGFDVILGNAKSIKNIGEKKTDEVDAEWIMLLHSYGMIKSSFQPNNFARRIRNLSRHKDNLVKTSSREVLHMQKAMILMNIQLGNVITDILGKSGQAIISSILAGERNAGRLALLADPRCKSSKMVIEKSLVANWDDDLIFMLKQSFELYKFIQQQMQNCDQEIENIIIQYKETIMQDCAIEKECKRSNKKKNKKNMIAFDIEAYGNALFGVNIMRVPGISDSSLLRLTGELGHDFTKNFDRYKEFCCWCNVAPNNKITGGKLISSKLPKRKNPVGQILRQSANSLKFSKTPLGYYFRRIQSKSGYMPAIIATANKIGRIIYTMVKNKREFDESYGQIDESEILKKKLLKTQLALEKIQKQLKECA

SEQ ID NO: 165584 - protein, 342 aa, unidentified
MQIASIGIDLGKTTFHLVALDEHGNIVIRKKFSRRQLLAYTANLPTSLVGMEACSGAHFMGAALRDQGHEVRLIPAQFVKPFLKSNKNYFLDAEAIAETVGRKNMRFVPIKTDDQLDLQALHRVRDRLVHRRTAVINQIRGFLLERGITFAKGPANLRRQMPVILEDAGQNLTTRMRNLLAHLWQEWKSLNTDIEHVSQEIDGIADQDAACQRLRGIPGVGPLVATATVAAIGNGAAFRKGREFAAWLGLIPRQHSTGGKARLLGISKRGSIYLRRMFIHGARAMLLRVKYDTGRLGEWARQLELRVPRNKAVVAVANKLARIAWAVLASGNEYRNLAVAAA

SEQ ID NO: 165585 - protein, 338 aa, unidentified
MRFYTKTHQYYCGIDLHAKTMYVCIMNQAGDTLVHRNIRTDQRRFLSLIEPYRDDLVVSVECIFTWYWLADLCAREHIAFVLGHALYMKAIHGGKVKNDKLDSQKIALLLKGGMLPQAYVYPAIMRPTRDLLRRRMHLSRQRAHLIAHIQNTVHQYNLSALGVRLGKPTERGDVTECFPAGDTQSMVQMDLDLIGYYDQPLSQLEWQLVKQARAHDAQMYHLISSIRGIGKILTLVLLYEIQDIHRFPTSGQFLSYARLVRCAKESAGKKVGKSNKKIGNSYLRWAFGGGGALPERQSASTALAEEAGQPTRQGQGAGDPVEEAGPDRLCDAEEKPLL

SEQ ID NO: 165586 - protein, 391 aa, unidentified
MYFAGIDWADDHHDIVVIDEQAKQYDSFRIKHSHKGFTTLEERLKSLTCDPANIACIIETSSGLLVSFLLDKGFRVYPVNPSTLERKRKPSKAKTDAIDARFLARYGRNEFDELRELKPDSLIVEELKVLTRDQAMLVEQQTRLVNQLKDCLKSYYPVAIMFFTRIHQKTTLAFLETYPTLEHVRQDHPQNIAQFLKNQKHPRPNETAQKIYTLAMEEQLTARMPTVRGKVRLLLTLIRQLKTLMQDIAEYDKEIEKLFFEHADSTIFSSLPGAGPRLAPRLLSEFGDDRSRFLSYESVTSLSGVAPVPKTSGKNTFTVSKRTAYVKPFHQALYHFARQTSLKEPWSKEYYQSKRAQGKSHSATIRQLASVWCRIIFAMWQNNETYCSEKF

SEQ ID NO: 165587 - protein, 404 aa, unidentified
MNDSMIGYAGVDWAMDGHAVCVVNGHGAAVIEFDVEHSAEGLSEMCRRIAGTGARRVAIERPDGPVVDALLGAGLEVVVVSSRSVKALRERYGTSGNKSDRSDAFVLADCLRTDGHRWRSLEPDSPATVTLRGHVRARKDLVETRVAVANQLRAHLRIVFPGAVGLFSAIDRPIALRFLERFPSATSAGWLSEKRLATWLRANSYSGSKDPAELYTRLSAAPAGVIGVDGDARGAITLAYVNVLKTLRTQIDELNTRLDELLDAHPDAPIFRSLPRCATVRAATLLAEIGDCRARFPDPESLCCLAGVAPSTRASGRHRVVTFRFSSDTKLRAAICDFAGDSWRGNEWAAHRYHELRASGKTHPHAERILARSWTHIIWRCWQDNTTYDPTRHGAHQRLTTQTA

SEQ ID NO: 165588 - protein, 340 aa, unidentified
MPLYGGIDLHANNSVVVLLNEQDQVIYQKRLPNHLPTILEPLSLHHGEIEGLVVESTYNWYWLVDGLMEAGYRVHLANPAAIQQYSGLKYSDDHSDARWLAHLLRLAVLPEGYIYPKAERAVRDLLRKRAHLVRQHTANVLSVQNIMARNTGARFSVKRIQELTKQELQSLLTEEPQVLAVTSSLAVLDCLKHQIKTLEQTVHKRLNHTPSYEQLLTVAGIGTILAQTIALETGDIRRFPSVGNYASYCRCVDSNKISNGKRKGTGNVKNGNPYLAWAYMEAAQFALRFQPAAQRFYQRKLAKSRNNTVLARKAVAHKLSRACYYLMRDLVPFEETKAFG

SEQ ID NO: 165589 - protein, 460 aa, unidentified
MDQVPVVGIDLAVTASSELAVASGARIEASRRVASTPRDLTEGIRQSAQGRAVAIVVESTAMAWLVAAVAAVRSGVEHTLYRVSGRKAAALRAFYRSHTKTDHIDARVLARMPAVDDSLRTFAPPAPGELALKRLVVCRHKLTVESTKIANRVRSMLHWAAPGLIGAAGGTVSAGLVEVLKRWPDLRSLAEARATTIALSADWSAARAEAVKQAAAEAVAFYEGYVDFSDVGLELEVALSQRTFLEAQIRRLEERIGGLHNQLYPKDRLLSVPGVGPVVAGVVRAVVGDMSRFANLASLRAYTGLVPREDSSGQNRRRGRISKEGPSVLRWALYLAADAARQCDPALADLYRRLMVERGRTHTQAVCAVASHLVGRIYAVARRGGEYVWRDLDGNKITKEQARVIAQSLRVDPQTRARLRARREEGPRTPRTRQPEAPQDVTQPLADKLTEDALEVARRA

SEQ ID NO: 165590 - protein, 489 aa, unidentified
MAKRQQSTFARLTSGRLNRKERKELARRLFAANPGLEIVHANTAGIDVGNESHYVAVRPGSDPEPVREFGSWTADLVHMAEWLKSLGVTDVVMQSTGVYWIALYDVLEKAGFRVCLTNARDTKNLPGRKTDVQESQWLLKLHTYGLLRNSFRPPEEIRSIRTLWRLRGRHVQEAGRAIQHMQKALTTMNVQLANVISDVSGVTGQAIIRAILKGERDPYQLARMKDYRIKAGEEEIARSLEGNWQEDVLFELQQAVEAYDFCHQQIAACDERLESYLAALPSRTIPQPTSPATEAQMPPAGSVEKSPSRKNRSGGKPRKNEPKFDLSSELTRVCGVNLATLDGVDVMTIQTFVSELGTDMTRWPTEDHLVSWLKLAPRRQISGGKVIKQERSPTKNRVAEALRMAASALVCSDSYLGARFRHLRARRGPGKAIKAMAAHLARLIYRLLTHGQAWVDRGAQEHEQRRVAREKLSLERKAAAFGYRLEPAA

SEQ ID NO: 165591 - protein, 358 aa, unidentified
MNSKAFIPRDYDVFAGLDVDKKSISVTFTNHQGFIRSLRVPYSAEHLVNHVRKHFPDQKVAFAYEAGPTGYGLYDGIVAQDYPCLIASPSMIPKAPGQRVKTNRLDSRGISENLRGGQLKSIHVPAVLYRELRHLTQLRDTFVSAMVAMKQRIKSLLLMEGLEFPLAPTGSQWSFMVKAKLRKLPCSSMVRFELDQLLDSLEFNEKQIVKTTQQIRRLCQNDAELSQCIKYVMSVSGIGQIVASQLLARIGDWRELRNVRQLGAFLGLVPTENSTGERTDRGSITHSGDPRLRSKLIQAAWSAIRKDGELREFFRAVCQSHARPVASRVAIVAVARKLTVLISVVLMEQRPYVVRKKV

SEQ ID NO: 165592 - protein, 344 aa, unidentified
MNEVITIGVDLAKNVFQVHGVDGSGSTVIRRQLRRRQLLAFFKKLPPCLVGMEACATSHHWGREIEALGHRVRLMPPRYVKPYVKRNKNDAADAEAICEAVTRPNMRFVAVKSTEQQSVLMVHRMRELLVRQRTMLVNAIRAHMAEFGIVAPLGIPRVKELLAVIADGDDDRIPPLARSCLAALARQFMSLHEEIAIAEKRIHAWHRSSEVSQRLETIPGIGPITATALAATITDPSVFRSGRELAAWIGLVPRQSSTGGKERLGRISKQGDQYLRWLLVAGAMSVIRHAKRRGTTNLPWLANLITSKPTKVAAVALANKTARIAWAVLRQGGTYQKPAAAPAA

SEQ ID NO: 165593 - protein, 484 aa, unidentified
MAKVKLSAFDRLRLGARLNRKERRAVEQRLSAADPELEIVNRDAAGIDVGNESHYVAVPRGRDAQPVREFGSWTAALVEMAQWLVRCGIRTVVMQSTGVYWIAVHDVLQKHGLEVNLVDARGTKNVPGRKSDVQECQWLMRLHTYGLLRACFLPAPEIHGIRTVWRLRDQHVKDSGRCIQHMQKSLIAMNVQLHNALSDIGGTSGQAIIRALLAGQRDPKTLAALRDRRCMASEEEIVHSLQGVWKPDVLFELQQAVDAYDFYRQQMAKCDEQLKQYMALLPARSVETIVSSIEPSPTDMNKKSRSRKPRKPQGNEPTFDLEAELERILSVNATTIDGINVMTVQTVLAEVGPDLSAWKTEAHWSSWLNLAPKRDVSGGRVIRHVREHRTNRVGNAFRMAAQALIRSHSYLGARCRYLRAKLGGHKAIKAMARVLACLYYRLVMKGQRWVDQGIEEFNRRSEQRELALLQRKAQKHGMQLVPAA

SEQ ID NO: 165594 - protein, 397 aa, unidentified
MYIVGIDIAKRKHEAAVIDGDGAVIIKPFSFTNNCSGYNRLLAMLAKAKLPLDEVSFAMEATGHYWLALFTRLQKEGFRVQVINPVQTNSIRSFYIRQAKTDPRDALLIAEVIRFGHFSESTLHPENIYELRELCRGRHAIVSMQADVKRKVVALLDQVFPEYETAFTNMFSDTSMAILQTCPTPKELSEMPLEELCHLIEVSSHKRFRMAKAQELQELARNSFGFAMAGDVFSTMIRLYAKHLDFLKQQVREMDRKIAEIMDTLDTPITTITGIGPTLGAYILSEIGDISRFSSAAKLAAYAGIDPTMRQSGEYNGVRNRMSKRGSPYLRHAIWLAASSAVLHDPALKLYFQKKRDEGKPYMASVGHACRKMVSIIYAVMRDNKAYTPCIPNEISA

SEQ ID NO: 165595 - protein, 295 aa, unidentified
MQAITTIGLDIAKSVFQVHGVDAAGQVTIRRQLKRRYVLAFFQKLSPCLVGIEACASSHHWSRELKALGHTVRLMPPAYVKPYVKRQKNDATDAEAICEAVTRANMRFVETKTPEQQSGMVLHRARHLFIRQQTAVINAIRAHLAEFGIVAPVGRNGVEELLNVVTDPSDKRVPEIAGACLAALGAQLHRLKEQILEFDRMIRAWHRSNKMSLRLDDCPGVGPVLATALVGSVADPKTFRSGRNFSAWIGLVPKQHSSGGKDRLGGISKQGDRYLRGLFVAACHIPDRAIRLAQP

SEQ ID NO: 165596 - protein, 350 aa, unidentified
MRKQYSTVSFKGQIIYVGIDVHKKQWAVAVQHCGRVSETFTMDPAPEKLAEHLKRNYPDAEYRSVYEAGFSGFEAHRTLCQLGVQNIVINPADVPTSGKEREKKNDNIDCRKLARELENGSLEPIYIPTPENLKLRNLKRREDQLVQNLTRIKNRIKGHLNFNGIKFISWAGGSLKIMEEEAQKREDYTLLSDLRELRFLREEKLRVIRDERECLKKLKRERIQENIQSVPGIGFRTAVALQAELWDMKRFKTDDHLNSYVGLAPHTFGSGEDVIVKCGNRKKKQLHYLMVEAAWRAVRHNLEYKARYGALVGRGMNSKKVRYSKGRLPDKSSWVWSLIAPFCFRYLAQL

SEQ ID NO: 165597 - protein, 386 aa, unidentified
MMLIGVDPHKSTHTATAVEPTNNSEAGSIRIEATLGEYRRMLTWAARWPQRRWAIENAEGLGRHLASWLLARGEEVVDVPSTATARVRQLSRGGGRKNDRIDAAAAACVAATQGDFRTMVAEGATDALAVLDEHRVNLAQARVRAVNQLHALLRALLAGGAPTDLTAAAASALLGKVRPQGEAEHARKAVARDLVAEIRSLDARLKSSCKAIAEQVENSGSSLTDVVGVGPIIAGRLIARTGTPSRFPNSGSYANYVGAAPVEVASADHARHRLSRAGDRQLNSALHTVAVTQIRMTGSRGNLYYLTKIAQGKTPREAKRCLKRRLADHIWRTMTADERRLAASPGGHSGATLRSGAAGTTPSTSSSDKSLPGPAIEQSMTSRPAS

SEQ ID NO: 165598 - protein, 395 aa, unidentified
MILVGIDIGKNSHFFTVIDKDTGEVFSKPSKITNDHDGFNDLLSCLQPYPKKDVLIGMEDTGHYHFPLLKFLLDKKYSVALINPVITDLTRKANGEISKTDKLDTVTICDVLASNKKDKKPFRICKVDRFDTYEQRSLTRHHHNLKEELNIYTNRLQKCIDVVFPEYNSLFSSKYGIVYMNILRLYASADNIANTDIRTLRKSFEFEGRGKRISLTAEKLKEAARNSVGISSASEVIQIRHLIGQIELINEQLDEIDKKIEEFSRQINSPILSIPGISHFSGTSILSELGEINNFSNHKQIIKYAGVAPLTHESSQYKALHTKITKKGSKYLRKTLYQVILSVIKNNKVFRDYYDLKISQGKSCRCAQGHCVRKLLRVIFHILKTGQQFEPVLLH

SEQ ID NO: 165599 - protein, 417 aa, unidentified
MNSPPETIPIVRYIGIDIHKHYLMIGGQNRHQEWTLRPRKVQVSRFRDWAEKNFQPGDAVVIETTGSVWDIYDIVAPLVTRTQVAHARKVRQIAEARVKTDKEDIKRLITLLIADIVPKVWVPPMHVRELRSLISFRWRLTKQITMSKNRLHSVVQRFNLNAPEGGLLTDKNRTWWDRQEFSDLTGFEVERDLEIVKILESQKAAIDQKLAELSNTEPWASDMVYLMQIPGLGPIFSMVILSAIGDIKRFSHPKKLVGYAGLGAGVHDSGQKHQGKSITKEGRKELRWALVEAAWRAVGSDPYWEAQLKRLEKRMHRNKAIVAIARRLLVSIWHILTKRESYRHFDEETIAYKMLIWSWAMDEKSRDGMTPQQFAKYGLLRLGIGQDLERINRGGALRRIAPTEEILALKPELEPPR

SEQ ID NO: 165600 - protein, 315 aa, unidentified
MSQSSFVGIDVSKDSLEVHILPSEEHFKVRYDSEGIEQLIQLLQPFQPQVIVMEATGGYEKHLALELHLSGLDKLQILNPRNVRDFARSTGKLAKTDSIDARMIALFGQTFKLTGQTLPSQAQDELQAMVRRRNQLVSSRAAELNRLHQAGTVRVLDSLKRIIAALDAEIKDLDQDIHQLITQNPVWYDMAQCLRQVKGIGNVTACSILALLPELGCLNRRQIAALAGLAPINRDSGVFRGKRMIHGGRAEVRKALYMATLVAIKFNPAIRDFYLKLTSAGKPKKLAITACMRKLLITLNAISKNYFQQHVSVCS

SEQ ID NO: 165601 - protein, 370 aa, unidentified
MKQRLLYVGLDVHKKTTYVAIANGRSNGKVRSYGKIASTLDALNKLIKKLQDGDKELRFVYEAGPCGYQIYRHLDAKGIYCSVVAPSMIPRRSGDRIKTDRRDAINLVRLFRAGELTSIYVPTVEDEAIRDLIRCRDDMKRFERKARQRLLSFLLRHGYQYSGKRNWTKGFYNWLATVRFSHSAQQVTLQEYLDATNECGERIKRITQQIQVHVEEWSRAPFVKAYQAMRGVSLIVSTTVAAEIGDMRRFQNPKQLMAYLGLIPSEHSSGKTVRRGPITKTGNSHVRRVLIEAAWTYKMQARVSSILLKRQKGLPKNICEISWKAQTRLCARYRRLYARGKSRQTVVTAIARELSAFIWAIDKEIQLAIS

SEQ ID NO: 165602 - protein, 325 aa, unidentified
MAKRTTVCAGIDTGKRKLDVAIEGSCEQLQIENTAEGHQTLVAWLQRHKVKRIGIEASGGYEQPVVAALRRKRFVVIVFQPAQVRAYAQFRLQRAKNDKIDAALIAACTAAVKKIHPAPDPRLSPFAERLTMIDQIGEDITKLKNRIETCRNERICAVWKEDIARLAKRARDELKALVAAIRCYPDLAERLDLIHSVGGVGLLTAVGILVRMPEIGQLTREQAAALAGLAPYDDDSGDRVGARHIDGGRQRLRRTLYLAALPASFHWNPQMIALYRRLKAAGKEHKRALVACARKLLIFINTVVARGTPWQSEPPAPRSANPSSA

SEQ ID NO: 165603 - protein, 357 aa, unidentified
MEYGAIDLHKKESQIRIVMESGEIIDQRIATTRDRFTHVFWGRPRMRILVEASTESEWVAQHLEELGHEVIVADPNYEPMYGHRSRRIKTDRRDVAALAEACYQGTYRLAHRRSAQQRTVQEQLNVRDQLTKSRSRAICLARAITRAAGLRIRSGKAETFLTRLAALDLPVSMQATLAPLRSVIEILDDELTQADAQFEKLVAADPVVKRLTTLPGIGPITASAFVAALDIPGRFDGAAQVTSYLGLVPREHSSGQTQRRGHVLRSAHPQVQCLLVQAALRVSRSSDPRTAQLRSWAQTIARRRGKKIATVALARRIARTLFAMWRDETVYEPQRVRVRQVTGASERTSGVVSAASV

SEQ ID NO: 165604 - protein, 351 aa, unidentified
MPRRSTVHAVTVIGVDLGKNTLHLVGLNSFGAIVLREKVSRGRITLRLANLPPCLIGIEAGMATHYVARELAALGHDVKQVPAMYAKPFRQGHKNDFRDAHAVAEAVQRPTTRFVPAKTNGQLDLQALHRVRSRLVSERTAVINQIRGFLLERGIIVRQGLRFLRQLLPDILAKRTDVLSPRMVRIVSDLAGDWRQLDERIEIVTDEIETLAKSDDSCRRVMTVPGIGPLISSAMVAAIGNGTAFAKGRDYSAWLGLVPKQMSTGDRTILGRLSKRGNGYLRMLFIQAARVILLRPANWLKHGFGTWLVRAAQRLHPNVLAAALANKLARIAWTVLAQERSYEARVTKAAA

SEQ ID NO: 165605 - protein, 327 aa, unidentified
MYSIGLDISKATINVYIPINDSDIVINNDLKSVKSLYSKLKKYYKKETKKLIFVFEPTGSYSFLLKKFCSQKEIKSFIVNPRKSSNFAKVIGLRNKNDEIDARMLSQMIITARESEIKIPIIDEIVEDIKDLIVYYKLLTKQKTQNKNQLEAINTKDGSSIVIKNLKQEIKLLIKKEKDILLEIKKIIAKDEKLHNAFLNIQTIKSVGEISAIVLLHHFIQYPNANQKQIVSLVGLDPTLKESGTSVRGKSKVSKSGSKLCRGILFMAVLNAVRNNEELKSFYNRLKDNGKHTTVAQIAVMRKIVVLAFTIYKNNEVYDEERFVNFF

SEQ ID NO: 165606 - protein, 324 aa, unidentified
MTDAILGIDVSKETLDASCARGQRRQSRTFSNSPEGWKLMLAWLKAMGSKQAHACMEATGRHSLGLALALHDAGHVVSVVNPAQIRDFGRTKLGRNKTDKVDAALIREYAELLKPGPWTPPSSAMRTLNELQTVRAGIVGSRTEWKNRIGSGLGDSTATKLAAATIEHFTIQLQAIDKAISETINGDAELRGRCDLLLSVVGVGETLAALLLAEMPEPGILRRSGELVAYAGLNPSHHRSGTSIDRPTRISKIGNAALRSSLYMPALSAMRYNPAIAALVARLKSAGRLKPKQIVVAAMRKLLVICFGVLKTGKRFDPALAMPA

SEQ ID NO: 165607 - protein, 334 aa, unidentified
MKQVNQVGVDVDSEELVSMMRRGGQRLPLARFANSAGGHKKFIRWATKGARPVRVCLEATGIYSLEFALALHHAKNVEVMVVNPRAMKDFGRASMQRAKTDAVDAGVILDYLERMPFTEWQPPTPEILELQAINRRIVQLNTELTREKNRHHASEFAGASADAIAHDIEVNIHHLERRIARMQDSGLQRVRSVPALAAKLAHLVSAKGIGEASAMRILAELLVLPDDLAAPQWVAHAGLDPRPYESGTSVHPPRRISKVGNAHLRAALYMPALVAIRHEPNVKAFYDKLIAAGKKPLQAVVAVMRKLLHAIWGMLKHDQDFDGNKFFKLTEKTA

SEQ ID NO: 165608 - protein, 334 aa, unidentified
MKELKSSVGIDISKDSFEVCIKQLVSERVVIKATHSFQNSFKGFDDFLKWTLRKVPSPIFVMETTGVYHEDLTHFLYSNDQKVSVVLANKMKHFAKSLNIKTKTDKADAQMIAQYGLERQLEWWQPMMPQMKNLRDLCRERLSLKKDLVRCKCQVHALKHAHSTLDVVLQLKGQQIEFLEENIQIIENEIIRITEQDMEFSQRVKKIETIKGLRLLTIVTVLCETNGFAQFNNIRQVVSYAGLDIAERQSGLFKGKTRISKKGNSRIRECLYMPALSATSYNEHIKALYQRVIERNPTIKRKGVIAGMRKLLVLIFVLWKKNEVYNMEYNWNAH

SEQ ID NO: 165609 - protein, 411 aa, unidentified
MEVVHARCAGLDISKRDAKVCVRVAGRGRGKTVETVTTWASMTSQILALRDHLIAERITCAVMEATSDYWKPFYYLLEDAGFDVLLVNARHVKNLPGRKTDVADATWLAQLGAHGLVRASFVPPEPIRQLRDLTRARTAITRERSREVQRLEKLLEDAGIKLSAVASDILGVSGRAMVESLIAGNHDPAALADLAKRRLRSKIPALTEALTGRFTDHHAFLARVHLDLVDQHTAAIDDITTRIEATIAPFHGFRDLICTIPGVSTLTADVIIAETGADMTRFPTAGHLASWAGTTPGHNESAGKVKSSQTRPGNPYLQGALGAAAMSCAQNPRTYLGARYRRIAQRRGPQKANVAIQHSILIAIWHMGTNGCLYDDPGADYFNRLHPERARKRAISQLEAMGYHVTLTHAS

SEQ ID NO: 165610 - protein, 347 aa, unidentified
MMYVGIDVGKHRCRVAMMDKEGHLVNEFSFSNDSDGILYLSSTLSIDDRVIMESTGSYWMNIYDKLEDAHIPVVLAHPLKTKAIASARIKSDSVDARILAHLLRADLIPESYVPSKEMREMRCLVRHRLSIVKVRTMVKNKIHAIIDRNGLKHEFSDLFGKAGISWLKGLKLSSLDRLMLDNYLTHIESLDKQIKRVDEEITSRASQDEDVKLLLSLTGIDVYTALLIKSEIGDIRRFPNYKKLVSWAGLAPSLHQSGSIEYHGAITKQGSRMLRWIIVESARVASTHDPRLRLFYERVRSRRGDQKAIIATANKMLKIIWFMLTRKEVYESANRKRYIKKLNRMDG

SEQ ID NO: 165611 - protein, 463 aa, unidentified
MSGKSSKRRAGLPTDWPASQAQECLDAAGVDVGAESHWVAVPPDRDERPVREFKAFTADLQALGEWLKACGVRTVAMESTGVYWIPLFELLEQQGFEVLLVDPHGLKSVPGRKTDVLDCQWLQQLHTYGLLRGAFRPDGQVCGLRAYLRQRAMLVQYASQHIQHMQKALTQMNLKLQQVVADISGATGLRIIRAIVGGQRDAQALAQLRDGRCQHDEATIARALEGTYRTEHLFELQQALELYEVYQQKIAVCDQQIQACLKTFANRTDEPLPPTDRSSGKHQRARTGPGLEMRSELWRISGVDLTRIDGIDSHTALKILSELGPDLVKQFPSSRQFASWLGLCPGNKISGGKRLSGRTKPCANRVAAALRLAASGLWRSKSYLGAYLRRMKGRLGAAKAVTATAHKLARLIYTLLKHGQQYLDLGQDHYEQQYQQRVLRNLVRRADELGYQLVPIAAPVAQS

SEQ ID NO: 165612 - protein, 379 aa, unidentified
MARYRHVRPTLLCVRPEPSARKDDVMSTAMQVTGGVDTHADTHHAAALDEVGRLLGDREFPATPAGYAELGSWLAGYGELAVVGVEGTGSYGAGLTRHLRAEGATVLEVNRPDRRQRVVRGKSDPLDAENAARRALARRDTAIPKDTATAVESVRALTVARAGAIKARTAALNQLKDLRLTAPEPLRSALRAGGLRQLAQAAARLRPDPTRLAEPTQATKAAMRSVGRRVQILTDEINDLDRQITALVAQIAPATLSLFAVSTHHAAQLVITAGANPDRLHSEAAFAALCGASPIPASSGKSHRHRLNRAGDRHANRTLHMITVLRMRWHPATRAYVQRRTAEGMTKLEIMRCLKRYIARETYHALISDLTTSQRLDAV

SEQ ID NO: 165613 - protein, 320 aa, unidentified
MSQQQVYIGIDVSKTTLDVAVRPTPQHWSVANREKGIDRLVSRLQALSPALVALEATGGLELPVVAALGAAGLPVVVVNPRQIRDFAKATGKLAKTDILDAELLALFAERVRPTPRPLADAEAQALGALLARRRQLIVMLTAERNRLSRALPGIRPGVEEHIAWLKEKLTALDEELAHAIRHSPLWRERENLLRGVPGVGPVLTITLLAELPELGTLDGKQIAALVGVAPLNRDSGVLRGKRTVWGGRAPVRSALYMATLVATRFNLVIRSFYRRLRAAGKAKKLAITACMRKLITILNAMLKHHTPWNPATAQTLGLCS

SEQ ID NO: 165614 - protein, 403 aa, unidentified
MNAVGIDVSKGKSMVAALQPGGKLLARPFEVLHTKSGIKELISFAHTLGGDTRIVMEHTGRYYEPLLQRLAASDLFVTAVNPKLIKDFGNNTLRKVKTDKADAKKIARYALDNWCDLRQHTGMDTTRTQLKTLNRQFAFCMKQKTACKNNLIALIDQVYPGANTYFESPARADGSQKWVDYVRAFWHVDYVCSMSLSTFTERYRKWCHRHGYNFQPDKPRLLMEKAKDLIAMLPMDKTTKMLVQTSIAQLNVLSKTVEALRTQMVALAEQLPEYPVVIDMNGVGPTLASQLIAEIGDITRFPRRGSLTAFAGVDPGAKQSGTMQLKSNKTSKAGSPHLRRALFQIVSGLLMRSPDDAVYNFMDKKRSEGKPYYVYMTAGANKFLRIYYGRVNEYLASLSKEQE

SEQ ID NO: 165615 - protein, 344 aa, unidentified
MLYVGLDLSRKRLDFDARLASGELVERGAVPPDQDGLFGLTRRLGDREVLAVIESMNGARFVHDRLELAGWDVRIADAVKVKGLAPLACKTDKIDAWVLAELARRDLVPEIWLPGPAVRAERERARFRLHLVRHRTALKNRIHSILIAHGVPSPSSDLFGLAGRRLLERLALPEPWRSTTAASLALIDSLDEQIEACEDELRARGADHSYVPLLLTCPGIGWILASTIASEIGEISRFATPARLVGYSGLTPQVHQSGEQDRRGPLRKNGPDHLRWALIEAAHTASRHRLYQPILERNRARHGRKRGSKIAALTIARKLTEAIWHMLTTNQPFTPAGATRPLAA

SEQ ID NO: 165616 - protein, 361 aa, unidentified
MTSMTDNHPKIIGGVDTHGLTHHGAVIDPLGRHLADRQFPATSRGYRDLLDWMRSFGALAAVGVEGTGAYGAELARVLTAAGVPVVEVDRPDRKIRRLDGKSDPIDAYAAATAVASGRASGIPKSRDGLVESIRVLRAVRRSAVKARTQVMNQIRSLLVTAPASVREQTTGLKRAHLVAALARSRPGRELTNPAMATRAALRRLARRHLMLDTEINELDTELTPLVRAASAELLALFGVGTDVAGQLLASAGDNPERMRSEAAFAHLTGVAPIPASSGRTHRHRINRGGDRAANAALHTIVLVRMRYEPRTRAYVERRTAEGLTKKDIMRCLKRFVAREVYRALTTAPAHDTGRPSLAAAA

SEQ ID NO: 165617 - protein, 414 aa, unidentified
MNDPTVTPLPTAAVFAGVDWASADHAVCVIDAAGTVLWRHTVTHSRAGLTRLTGRLRELGVGRVGIERPDGPVVEALLAAGLRVAMVPPRQVKNLRSRYGRAGKDDRFDAYVLADAMRTDGHRFTDLTRDSAPTMGLRALVRARQDLVEVRVGLVNQLRHNLELAFPGAVGLFFDLHSPIARAFLRRFPAAAEAAVLDEDAMAAWLAAEGYCGRTPAAVFLDRLRTAPAGLTGIEAVARRHVTLALLAGIDAIEDQAAELTRRIKETLALHPDAPIFTSLPRAGQIRAAALLAEIGDARGRYPDAGVLAAAAGVCPFTDESGKHRNVGFRYKVDTKLRRALTDFADDSRHANPWAADIYRRARARGMRHPHAVRVLARAWTAVIWRCWQDAVPYNPDRHGALNRYLSQDAAAAA

SEQ ID NO: 165618 - protein, 352 aa, unidentified
MTKRSTAAVTVGLDLGDRFSSACVLETESGEMSDEWRLPTTRKGLARYFEVKPAMRVALEVGTHSPWVSRLLVSWGHEVLVANPRKVRLIAHSRRKSDRFDGRTLARLARLDPELLWPVRHRSSDCQQDLAVLRARAALVRARTLLVNHLRGAVKSCGGRLPSCSAASLSRQAGLRLPEGLQPTLEPILPVLGEITEQIRSYDRQVEALTKSYPETAALRQIAGVGSLTSLAFVLTLEDPARFPQSRQVGAYLGLTPGTRQSGECDPQMHITREGDPFLRQLLVQSAHYILGPFGPDCELRRHGLKLAQRGGKAAKKRAAVAVARKLAVVLHRLWLTQQRYEPLREPTRSAA

SEQ ID NO: 165619 - protein, 405 aa, unidentified
MFDTEDVGVFLGLDVGKSAHHGHGLTPAGKKVFDKQLPNSEPKLRAVFDKLTAKFGTVLVIVDQPASIGALPLTVARDAGCQVAYLPGLAMRRIADLYPGEAKTDAKDAAVIADAARTMPHTLRSLELTDEITAELTVLVGFGQDLAAEATRTSNRIRGLLTQFHPSLERVLGPRLDHPAVTWLLERYGSPAALRKAGRRRLVEVIRPKAPRMATRLIDDVFTALDEQTVVVPGTGTLDIVIPTLAASLATVHTQRRALEAQINALLEAHPLSPVLTSMPGVGVRTAAVLLVTVGDGTSFPSAAHLASYAGLAPTTRSSGTSIHGEHAPRGGNRQLKRAMFLSAFACMNADPASRTYYDKQRARGKTHTQALLRLARQRISVLFAMLRDGTFYESRTPADVALAA

SEQ ID NO: 165620 - protein, 343 aa, unidentified
MQSISTIGLDIAKSVFQVHGVDAAGQVVIRRQLKRRFVLSFFEKLSPCLVGIEACASSHYWSRELQALGHTVRLMPPAYVKPYVKRQKNDTTDAEAICEAVTRPNMRFVPTKTVEQQSGLMLHRARHLFVRQQTAVINSIRAYLAEFGIVAPVGRRGVEQLLEVVADTADRRLPEVARACLAALGSQLRALKAQILEFDRRIIVWHRSSATSKRLDAIPGVGPALATALVARVADAKAFRSGRDFSAWVGLVPKQNSSGGKHKLGSISKQGDRYLRSLFTAGALAVIRYAKIHGTGHRPWLTELLARRPTKVAAIALANKIARMAWAMMARGERYREPAALAA

SEQ ID NO: 165621 - protein, 338 aa, unidentified
MDHYVGIDLHSNNSYTAIIDNDNKKVFKKKTKNDLRLVLHALKPYRDQVKGIVVESTYNWYWLVDGLIEEGYTIHLANPSAIKQYTGLKHSDDVTDAFHLANLLRLGILPTGYIYPKEERPIRDLLRKRTQLVHQRTLQIQSFQNLVSRNLGKSMKGTAVKKLSEDDVEHLFHDKHLVVAGKVSIATILFLAEKIKQLEKTLHKVAKLKDEYRLLMTVPGIQKILALTIMYETGPIERFAKVGNYASYCRCVGSRRLSNEKVKGKGNRKNGNKHLCWAYVEAAHHALWHYEYVERYYQRKMAKTNLIVARKTIAHKLARACYYIIRDQKEFDPTRVFV

SEQ ID NO: 165622 - protein, 338 aa, unidentified
MSLKLLAIDLGKRSFHCYGIDDDGVVISRKTSRAKLLETIQELGPETIAMEACASAHFWGRCFLADDHRVLLINPRFVKPFVKGSKNDAADAEGIYEAALRPTMRFVPVKSIEQQDLQSLHRARERVVCARTALINHMRGLLGEYGVVLPQGAWRFLAQAQDAIAAAELSNLTRELFADMLDELRALDLRLDKLDRQLLALCRTNEACRRLSKLPGVGPVIATAIVAAVDDGRHFHSGRELAAWIGLVPRQYTTGGKPRLGGIGRRANHYLRRQMIHGARAVMFRLAKREDRRSLWLKELTARRGFNRAIVALANKTARTAWALLTRKEDYAAADINA

SEQ ID NO: 165623 - protein, 427 aa, unidentified
MKKIKIDYLSTLFVGIDIGSRTNVISALNFDQDFLIRMVPVANAQGGAEQMEEMVAQVLSQHHEFKAVIIGLESTGFYGVHIANYLSTSEKLAPFSTKVYCLNPNEVKQYKKSFNSLDKNDGIDSFVIADFARVGRIHTEPWRGAQYLALQRLTRHRLHITECIAREKTYMLNNIFLKFSEFAMLKKDEHPFSDKYGATAEAVLTDYLSTEDIVDASVDELVAFISSKSRGRIADPEQTTYLLQKAAQDSYRLDQCLYEPLTVSIGCSFNCISAFEKELKAINAAIQRAVKGLNPTEYQILTSVPGIGPVYASGILAELGTIKCFKSNDALAKYCGIVWKENQSGEFEAEDTPMNKAGNRYLRYYMIEAAGSVIQHCPEYKAFYDKKFAEVRTHQHKRALALTSRKLIRMLFGLLANGKLYSVEKSR

SEQ ID NO: 165624 - protein, 407 aa, unidentified
MEVLYPRCAGLDVHAGSVTACARIARGREVTYEHLTVSTTTRGLLELAEWLAAHECTHVAMEATGVYWKPVWHVLEEHFTLVLANAMHIRNVPGRKSDMNDATWIADLLAHGLVRSSFVPPAPIQELRDLTRTRRQLVHEVARHVLRIQKTLEDANLKLTQVMSNIVGASGRAILHALIAGETDPDRLADLTRGRLKATRADLVAALHGRVTDHHRFMIKLHLTQIDALESAIATIEARIGDALGPFRAAVSLLTTMPGVSETTARVLVAEIGTDMTRFPSVGHLISWAGFCPRLDESAGKRRSTRTRPTSPWLKPTLVNAAWAATHKKDGYLRAQFLRIKSRRGAKKAILAVASSMLTAAYFMLRDGVEYHDLGAHHFEQRDKEQLTKRLIQRLRDLGVAVEVKAA

SEQ ID NO: 165625 - protein, 363 aa, unidentified
MPSIAQVGIDAHKKDLVVALLVEGSDSPIRLTVPNECMEVKRVFAKLAKSYELRCCYETSGVGFALHRWLNDIGVSCEVVASSLIPVKASDRVKTDKRDALKLARLYRAGQLTAVHVPSEKEECVRSLVRLRESLVREVTESKNNISAFLTRHGISWPEKSRWTQKHWAWLRQQTFAAPEDYVWAELIAMLEYKMARLNETERRITEYAQTEVYREKVGKLCCFRGVAIVTAMTLITELFDFDRFKSARAMMAYLGLAPAEHSSGESRKQSGITKTGNSRCRRVIVEASWKCRPKPRMSKALTKRQENQPAWVVAHCWKAQQRLSKKFAAIAYRKPSQVAAVAVARELVGFIWAVMTDNVATA

SEQ ID NO: 165626 - protein, 335 aa, unidentified
MVRTDRPAPTAWVGIDVSQHTLDAGLLPAPGGKTRSASFPNDDAGHAALAAWADDHADGATLGFCLESTGAYGEALATFLADAGRHVSVVNPARVKYAGLMRGQGNKTDRADARLIAEYATRERPPAWQPPTTDVRELQALSRRRDDLRQLAARDKTRLAAPGLTAAARASITRTIAFLDKEADRLQAQADERIAASPLLRADRDLLATIPGIAPVAATAILAELPDPGRFDSAQQAAAYAGLAPREYRSGTSVHKRTRLSKAGNARLRKALYLPALTATRFNPLVAAFYTRLVEAGKAKMAALGACMRKLLMIAYGVLKSRTPFDPSKGGKMVP

SEQ ID NO: 165627 - protein, 345 aa, unidentified
MPNIEIGVDSMVKENFIYVGIDLHKETHTAVMIDCYNQKLGEITFPNRPAAFPKLVTKVKKCNTDGKEVVYGLENAYGYGRALAVWLIDKGYLVKDVNTAISHRQAKHRGAMYRKSDSDDAEAIALATLNMLDKLPDAYPNDAYWSLGQLVHRRDNIMKQRTRLVNQLHEQLCIAYPSYKQFFNDISRPTALYFWEHYPSRKYLKGKSVEDLRTELVPVSHNRCSTKNCEKILDAVASDKVKNNAYQDARDMVTLSIVSDLQHYDSQLAEVDKMLEQMYKMLGCTLTTIPGVNVITAVKILAEIGDIKRFSNANKLAQFAGIAPLHLSSSGKGKDVATKQGNRRL

SEQ ID NO: 165628 - protein, 356 aa, unidentified
MIIVGCDYHPSFQQIAFVDTDTGELNEQRLEHRESAEAFYRELASRGEKVRVGMEASGHSRWFERLLAELGIELWLGDAAVIRAKRGRRKPKTDRQDAQHILHLLLKDDFPKIWVPSWENRNLRQLLWHRHRMVQARTRIMNQLQAVALNEGLRCKKRLWREKGRKQLEAIPLAPWASRRRENLLQLLDGLNPTIAELSAALDREVDKSAEARRLMTHPGVGPLTSLALVLIIGSAERFQYGKRSTRLCLGLVPLEDSSGERRRLGHITKQGNSLLRFLLVESAQVAARSIPQWRNQYFHLAMRRGRKIAKVAMARKLAIRLFWMMRQGWDYEQMKKFGSHAGQPGNRDGVQQSIE

SEQ ID NO: 165629 - protein, 300 aa, unidentified
MNKDKKIYGIDISKDVFDVYNDSTGHYQLSNDASGFKALLKDLPASALVVMEATGYYHYRLAQFLHKHGVFVSVVNPLSVKRFIQMKLAKVKTDKSDAKSIYEYGTSTDVPLYNALTDVQSECLQLFRLLDSYTKKRTATKNKLHGEATLGVPSKTVYSSLKRDLKHLSKEITMLENRLLELVKQDQQHQLTLLQTIPGIGLKTALFLMVVTDGFKKFETASQLCSYVGITPTIRESGSSVRGRSRISKIGNKKLPNLVFLAAFSAYKYNKACKALFDRIVAKGKSKKLALIAVYYTDIG

SEQ ID NO: 165630 - protein, 418 aa, unidentified
MRVLFIGDDWAEDHHDIEVVDADGRRLARARLPEGVGGITRLHALVAEHAPSSWTEQPDDQAAGQVVVGIETDRGPWVTALRAAGYQVFAINPLSAARYRQRHSTSGAKSDAADAHLLAEIVRLDRDHHRPIAGDSDLADAVKLLARAHQTATWERTRHVLRLRSTLREFFPAAVELFEDLAAADALALLERAPDPGRAARLTRAQVTAALKAARRHHVEAKADTLMAALRRPTLRQSSILEGAYAAIVVAEVKIIRALNEQISALGTVVGEHFGRHPTADIYHSQPGLGTVLAARTLGEFGDDTGRFSDARGRKNYSGQSPITRASGKKTVVLARFATNRRLGVALHLQAYSALTSSPGARAYYDSLRARNIGHHAALRQLANRLVGILHGCLKTGTNYNEDTAWAHRRADTDAVAA

SEQ ID NO: 165631 - protein, 391 aa, unidentified
MIYIGIDVAKDKHDCFITNSDSEVLFKAFTIFNNLDGFNDLYQKIESVMDDVTKVKVGLEATGHYSYNLLGYLIDKGLPTYVINPLHTNLYRKSLSLRQTKTDKVDARTIASMLMSDVNLKSYSDTSYHNEELKSLTRYRFNKVKERAKLKTSVSRLVCILFPELEKLVPTLHMASVYALLSEFPSAKHVATAHLTRLTNLLSESSKGRYGKDTAITFRDSARASIGSNMPAKSLELKHTIKLIQELDSEIDEIENEIKIIMDEINSPILSIPGINYRMGAMIIAEIGDFNRFDSPDKILAYAGFSPSTYQSGQLDGAYAHMEKRGSRYLRYALYNATKYVCHWDPTFAAYLAKKRAEGKHYNVAISHAVKKLVRVIYHLEKTKQQYIKAA

SEQ ID NO: 165632 - protein, 354 aa, unidentified
MKYYTSTTQFNCGIDLHARQMYVCVMDRDGKKLVHTNIRNNDFAYFLKLVAPYRHDLTVCAECMFGWYWLADACQEAGLNFVLAHALYLKAIHGGKNKNDRIDSEKITHLLRTNLIPPAYVYPAAKRPLRALLRQRILYVWRRSELLARIQSHQLAYNRPTLPQTRSNRDRWEEKLLTQEDNPIRQLALQNDLALIRHYDTQITALEAQLQKLTKATAARDYTLLQTVPGIGEHLGLTLLYEIGDIHRFPTVKDFLSYCRLVKGTVASAGKLKGLRGAKLGNAYLRWVFGEAAVIAKRDHTVIGPLAQRLEAKLGNKFKANTVLAIKLARAVYFMLRDHTVFDPERLVAALTHK

SEQ ID NO: 165633 - protein, 409 aa, unidentified
MDVLHERCAGLDVHKKTVVACLVESGPDGRTRKQTRTFSTMLPDLQKLRDWLVEEGCTCAAMEATGVYWKPVINVLEGHLEVLVVNAEHMKAVPGRKTDVKDAEWIADLVRHGLVRASFVPERSQRELREMTRLRTAMIQDRARAVNRLQKSLEGANIKLAAVLSDITGVSGQRILDALLAGEDDPEAMADLAHWRVQKKRLALEQSLMGRLAGRLRFVVAQELQQIRNLDEQIEACDREVAKEMRPFTVELERIDAIPGIGTRSAEVIIAELGVDLSRWPTAAHLAAWSGLCPGNRASGGKRKPARTRKGNPWLKGALTEGAWAAGRTKKSYLGERFRQLKAHKGLKRAVVAVAHEILLIIYYLITRQRQYQDLGLHYIQERNREAIQRRAIRQLQDLGFKVDLRATA

SEQ ID NO: 165634 - protein, 361 aa, unidentified
MTNRITTPPETRTVIVGVDTHKHVHVAVAIDSWGIRLGDHAFVADSGGYEALVTWAETHGRIEAFGIEGTGSYGAGLARAVRRAGHHVVEVNRGDRRTRRAAGKSDTIDAEVAARSLLAGQSTAIPKTADGAVEMIRQLKITRDTAMKARTAAMNTLKQILVQAPPVLREALHDLTDHGLLTRCAGLRPGPIDTPSASAKHTLRSLARRWMALAEEIALHDQHLARLTTATSPTLCEGFGVGAHTAAELLIIFGDNPDRIRSEAAFAKLCGVCPIPASSGMTTGRHRLNRGGHRHANAALYRAVIVRMQFHQPTRDYVARRLAAGRTKRDIIRCLKRFLAREIYQRVMTDFRARQEIIQAA

SEQ ID NO: 165635 - protein, 353 aa, unidentified
MKSDKYMGMDIHQAMTVVAVLDADGKVILETMVATEGSAILRLVESLSAPLRVTFEETTQAKWLYEVLRTHVTEVIVCDPRRNKLLGEGSKTDKVDARKLADLLRTGMLRSVYHGHEETRKLKELVRAYETLSIDTQRTMTRIKAIFRGHGIRTPGSRVYQLKQREQWLKMLTEPGLHQRAAWLYEQLDQLRALRRKIRQTMLAESRQHRAVGLLKTIPQLGPIRAAFIVATVDTPHRFRTKRQLWSYSGLGVVTHMSAEYEMREGQVTRKRKPIATRGLNPNCNHRLKDTFISAAVGGMRTEPYRSYLVRLQDGGMRAEMARLTLARKIASIALTIWKKGETFDPKKLNWMT

SEQ ID NO: 165636 - protein, 337 aa, unidentified
MECIFGIDVSKATANVAVLVDETFIKEFKITSDVPGYQTLEDELNSFTEPQIIFESTGIYSRSLRAYLQRSNWQYTEINPLRSKIDMASFRHDKTDALDARGLALAMKKHHYKPTYQQAPVYSELHDLERTYQDYNDDVVRAKNRLHKALQLTFPELEHVLSKQDGGLYWHLVQRFAHPDFVLEYGVSELADQILDATPKNMGVQRALKIADKLLNLAERCAASVSSNAHAVRAVVYLAQEAERLDGLKNEIIDEMTQLSQGLDEVKYLLSFPGIGIKTVMCLIGELGDIRRFHSANAINRYIGIDLIRYESGDHVMKSGISKRGNATHGRSCTAQS

SEQ ID NO: 165637 - protein, 355 aa, unidentified
MDSEKYIGLDVHQATIVVAVMDSTGKLVMESILETEAATILQFFAGLRGTLSVTFEEGTWSAWLYDLLNPHVDKLVVCNPRKNALLKDGNKSDRIDARKLAELLRGNQLKPVYHGETGVRMLRELSRSYLTIVKDLSRVMNRLKAVYRSWAIPCAGRDVYYTRHRAQWLAKIREAGVRRRAERLYEQLDMLQHLRQQARRELLAESRKHAITAKLRQIPYLGPIRSALAVALIQTPHRFRTKRQLWAYSGLALETRISAEYRFVEGQVRRSKKVLSIRGLNKDHNHDLKGLFKGAATMASVRPGPFQDVYQAALAKGIKPTMARLTLARKIAAITLTLWKKGEDFDAEKLKSQAA

SEQ ID NO: 165638 - protein, 354 aa, unidentified
MKSTAKYVGLDVHQATTVASVRDEQGHVILRSIVSTDAGSLVELCQRMRGRVAVALEEGTQAQWIYDVLTPVVDRIIVCDRRGASGHGNKADQSDADELADLLRCGRLRAVYHGSPEHTTLKELARTYLNVIEDNTRVMLRLKALFRARGIRTPGRAVYRSETRGQWLAHLVDAGVRFRADTLYTELAVLQQLRPKAKRALLAAAAQEPAWAVLRSIPFLGPVRAALLLATLQTPWRFRTKRHLWSYAGLAVVTRITAEYALEGGRPVRRRHAPRTRGLNRNHNRIVKGVLKAAATPAASRPGPLQDYYERMVRQGMRPELARVTLTRKLAALMLRLWKTGEVYDPTKLSVQAH

SEQ ID NO: 165639 - protein, 316 aa, unidentified
MEDTLIFVGIDVSKAQLDVKIRPTGEKDSVANDKAGIKTLVKRLAKLQPTLIVLEASGGYERQIAQALVRAELPVVVMNPRQVRDFARATGQLAKTDSIDADVLAHFAEVVRPQLRPLPDAVTLELRALTSRRRQIIEMIVAERNRLAMASKTIGKRIGAHIRWLEQELERANQDLDRAIEQSPIWKVKEELLQSTPSIGPVTSRTLLADLPELGTLDRKQISSLAGVAPFNRDSGTLKGRRSIWGGRASVRCALYMAALVATRRNPVIRDFYKRLTAKGKLFKVALVACMRKLLTILNSMIKHRTRWSESFLKTA

SEQ ID NO: 165640 - protein, 393 aa, unidentified
MAKVWVGIDAGKDSHHAAAIDEAGQVLWSVRVANDQDTLVELVGRVPPGDDVCWAVDLIGCETALLRALLTAAGHTVLYVPGRTVKAMAGGFPGEAKTDARDALVIANTVRMRRDLVAVQPPTELVATLALLVAHRADLVEEWVRNVNRLRRLMTGICPALERALVFTNMAMLILISGYQTPEQIRGAGRDQLIDHLRNNRAVHTAKTVDAALAAASRQHIVLPGQDTAATLAADLAISLLALRRRIKQADKAIEAAFASHPQAQIIRSLPGMGPLVGAEFTVAVGDLSTFPSPDHLASYAGLAPMPRDSGKRSGNLHRPQRYNRRLRHVFYMGAMTTLRIDGPNRDYYQRKRAEGRKHQQAIIALARRRVDVLWASLRDNRVFQPEPPPRPA

SEQ ID NO: 165641 - protein, 343 aa, unidentified
MKIIRVGVDLAKSVFQVHGVDRSEKPVLRRKLSRKEWLKFLTDKLEPGCEIGMEACCGAHYWARQLQAKGFKVKLVAPQFVKPYVKSNKNDANDAEAICEAMGRPSMRFVAIKTVDQQDIQAVHRIRSGLIEQRTAKGNQIRGLMAERGLVAPKEMAQLRAALPAWLEDGENGLSGRFRQLLNGLWGDLLALDARIDELDREIALIAKSDPVARRLQQLRGVGPITATALIAAVGNGEQFAKGRQMSAALGLTPRQHSSGGRDRLLGISKRGDPYLRTLLIHGARAVMQMSKNKDDRLSQWVNKLAARSHHNLAAVALANKTTRMAWAMLRNGTDYQPELVTD

SEQ ID NO: 165642 - protein, 347 aa, unidentified
MLYAGLDLSRKRLDFCLLDEAGELIERGAVPPDRDGLCSLAERVAAQQRQRVVAAVESMTGARFVHDQLESHGWRVEVADAARVRGLAPLACKTDRIDAWALAELCRRELVPAIWLPDGEVRGARERARFRLHLVKHRTALKNRIHQTLVGFGTPCPVSDLFGERGRRLLARLELPQPWAGSVAASLRLIDELDREINEIEAELRRLGASHRYVPLLLTVPGIASILGYTIAAEIGDINRFASPAKLAGYTGLCPRVYQSGEHDRRGPLSKHGPRYLRWALLEASIHACRHPLYAQRYQHTKKRLGRQRGPRVAQVDLARRLSEAIWHMLTRNQPFAPAGASQVLAA

SEQ ID NO: 165643 - protein, 392 aa, unidentified
MYIIGIDIGKNHHKASIVSPKGKQIGHSLCFATTHKGADSLMNFIFKNIGDSPCVFGMEATGHYWYPIYSFLKAKGYTIYVINPIQSDSLRKMYIRQTKNDSIDSFLIAEVIRFGQFSTTSMADENILAMRQLCRYRDSVISSRTEIKLRISTIMEQIFPEYEKQFSSLWLSTSMGILEKYLTPENIQNAPLDGLYGIIKDKSHNRLTMDKALSIKEAAADTFGIKIAQEAFSFQLKQLIDRMHFLDQQIEALDCQILGYYEKFDCYLHTISGIGMIGAATILAEIGDTKRFKSSSALVAFAGIDPTVRQSGEFNSIHNHMSKRGSPYLRHAIFLAATTCSFHNSPLNAYYKKERDQGKHHLTATGAVARKLTTVIYAVLRDGKPYEPKKFC

SEQ ID NO: 165644 - protein, 406 aa, unidentified
MNMNAVGIDVSKRKSTVAVLRPGGKVVVKPFDVPHLSADFQSLEKLIRELDGETRIVMECTGRYYEPVARELSQAGFFVSAVNPQIIRNFQGQDNPLRKVKTDKADSVKIARYTLDSWANLKQYSLMDELRSQLKTMNRQFDFYMKHKTAMKNNLIGLIDQTYPGANTYFDSPAREDGSQKWVDFIDTYWHVDCVRKMSLNAFTDHYQKWCSRRKYNFSKLKAEEIYGKAKELIPVLPKDSFTKRIIKQAIDQLNAASQTIEQLRTLMNETASKLPEYPVVMAMKGVGPSLGPQLMAEIGDVTRFTHKGAITAFAGVDPGVNDSGDYSQKSVHASKHGSPVLRKTLFQIMEVLIKTKPDDAVYRFMDKKRSEGKPYYVYMTAGANKFLRIYYGRVKEYLSSLPESE

SEQ ID NO: 165645 - protein, 290 aa, unidentified
MSYYAGIDVSLEQSSVCVLDGEGKIIREAKVASEPEALIAWFGSLGLAMTRIGLEAGPLSQWLFAAMKQAGLPVELLETRHVRNAFKTMPVKTDRKDARGIAELMRMGWFRPVHCKSISAQETRAILTTRTLIEAKLRDVEMSLRGVLRGFGLKVGKTTPTNFAERIKQLVSEHSNLQVIADALLAVREVLLREFRSFEKRVRTMARHDERARLLMTTTGVGAVISLTYAAAIDDPARFKNSKQVGAHYGITPKRYQSGEIDYTAGSRRSATRACAPRSIRPHTSFSRAR

SEQ ID NO: 165646 - protein, 459 aa, unidentified
MPAPAPAAHHPPRQTPPALPPAAGRVPASLTADDKVAFALGFPVHVGVDTGKSFHQLVARGPDGRRRPARRVDVSRASFEAAHQYLVDTFGVAPTEVLVGVEFAGHHGVTFTAFLRARGYAVVAVLPSVTKKLKEVEDNSPRKDDAKDAAQICKLLASGLFVGVPQLSAEVAEMRVLATERHRLAVEATRLRNRLHGCLDQAWPEFAPSFATLLAPTPLALLRRWPLPADLVAAPPRTVRALVKEVSRNHVSAERVDALIAAARETVGVGAAADARRAEIHRLLDRYALLLTQAAAIEARLEGLVAAHPGARALATVPEVSAVCAATLVAELGTPETFVAPRQVLKLAGMNLARKESGTSVRGRVKQTKRGRPLLRRQLFLLAGRWCSGRGLYRADYLALKARNGGSKTSAMCAIARRLVPLLLHVLRTGEPFDVTRWRRGRTVLPPPPVRGRYRDLVA

SEQ ID NO: 165647 - protein, 437 aa, unidentified
MEEVTDEPLYRDRVCGIDIGKAGMVATIRVPSDKDPARRAAETRSFGTTKREVLALADWLRCWQVPAVVMEATGDYWKGPFYRLEAEGLECVLADAKQVKNLPGRPKRDPSDSRWLAACFERGAVTGCFVATPEFRLIRLHTRYRRDLTEERGREKQRAEKLLESAALKLSSVITDLHGVTGRDIMDHLIAGERNPKVLAQLARARARRKISQLEEALEGAEFFTEDHAALLAAMLERIDRVNAEIDELTAVIERLLAPYEEQLAQAGSMPGWGRRSAQDAIAETGVDMTRFRTGPHLASWAGRTPLDNQSGKRTRRSKSKKGNRYLAAITGETAIAAGKTQTREGARYRRLARRRGKPKAQVALGNTQLKVYHKLLSNPGMRYDDLGPDYYERQRDVRRQIAHHVGKLGALGFEVTLARTPEPEPEPTRPGSTQAA

SEQ ID NO: 165648 - protein, 366 aa, unidentified
MDTHKKDHQVAVHFPEQEEILQFTIKNTARDVTKMVKKILKQAPGEVRFCYEAGVCGFDLKRRIEAQDICSCAVIAPSLVPRKPGERVKTDRRDALKLLSLFKAGLLTEVHAPNPQQEAARELTRCRQAAQEDLKRARHQLQKFLTRHGYVYTNGSHWTGKHLKWLRSLAIEDILLQDVFDSYFTQMQHCLQRLESLDKQVQKLADSEPYQKVVGLLRCFHGIDTLSAITVITEIFAFGRFASPGELMSYLGLTCSEFSSGDSEKRGPITKSGNKRVRRILVEAGWHYRHPCNVSHALKARRNGQPQWAIDIADQAGQRLRKRYRYLSHRGKMPCKVVVAVARELAGFIWALMQEYEVRKNSVKAA

SEQ ID NO: 165649 - protein, 454 aa, unidentified
MEHQLAQRNRGFSRAGIEVTHPNAAGVDVGGATHYAADYAAVRPDIDEPVRSFNCYTADLHAMADWFELCGVTIVAMEATGVYWIPLYEVLERRGFKVLLVNARQTKNVSGRKSDVLDCQWLQQLLTFGLLRGAFRPADHMCALRALCRQRARLLRDQGRYVQHMHKAMTLMNLQLSNAISDVAGVTGQKIVRAIVAGERDPQVLAAYRDCRIKATEEEIAASLLGNWRDEHLFALKQALAAFDFCGSQLAECDAEVERAMTLLHAHEGSPPARGRRSRNRNAPKFNLHEHLFKLCGVDLTRIDGIDVTTAMTILSEIGTDMSRFQTVKHFTSWLGLCPGTKISGGKVLDAASKRCRNRATQAFKLAAVALRSSRSALGAYYRRMCARMDKAKAVTAAAHKLARMVYLLLTRGQEYVDQGQQYYEERYRERVVRGLAKKAADLGMQLIPAVAPA

SEQ ID NO: 165650 - protein, 344 aa, unidentified
MQHYVGLDVSVKETSVCIVDKTGKVIREVKVATEPVAILAVLTEEPLAIERIGLEAGPLSQWLYSALAEAGLPVICVETRHMKAALSAQINKSDRNDARGIAQMMRVGLYRPVHVKTLASQKRRMLLTSRQLLQAKALDIENDLRGTLRNFGLKVGMVGTVKFEARIRELVADHPDLAAIVEPLLIARRVLREQLGVLYRQLLEIVRQDEVCRRLMTTPGVGPVVALTFRATVDVPSRFSNSKAVGAAFGLTPCRQQSGEIDRMGGISKCGDALMRETLFEAALVLMTHSRKWSWLKAWGMKIARHRGMKRAIVAVARRLAVIMHRMWVDGTEFRWTRKEVAAT

SEQ ID NO: 165651 - protein, 419 aa, unidentified
MSFKILKNNCCGLDVHKTWIFACIGITDSRSRTEYKQARFSSFSKGLQELCDWLAKYNCTDVCMESTGKYWIPVFNILEKNNVWVTLSHPKYTKPQKGNKTDRKDARWICDLYMCGMVKPSFIPPADIRELRDLVRYRYKLTCMITGEKNRAQNCLTVSNLKLDEVFSDVFGKSSRSITEQILQHPGEIFDVTPFVDGRCKTPIEEIQAAVDGAISKEQAVKLRQCLDHIDELQKHISEVEQEILRLSDKYEEALILIRTVPGFDKNPMTAIQVLSEIGGDMSVFPTAKNLVSWAGCCPRNDQSNQKIKSTRISRAGSYFKPVLVQVANALIKSKKNPEFTTRYRRIKARRGHKKAIIAICRMLLTAIWHILTDLKPYTPEGFLESRPVNESKVLTTSQALNLLKQRGYIIKDDVVPVS

SEQ ID NO: 165652 - protein, 437 aa, unidentified
MKHLAIVDPRAAFVDVGSEHMHVSVAGDEPVVFGTVTSQLHALRDWLKSQGVRSVAMEATGVYWLPLFGVLEAAGFDVRMVNGRQTRNLPGRKTDMQDCQWGATLHAHGLLHAGFVPPADIRRLQDYLRLRADHVASAATHVQHMQKALERMNIKLHDVISSLAGLSGLAVIRAIVAGERSPEALLARCDQQIRRAKAEQVKESLRGTWGAEHLFALRQALQSWEHYQRQILECDREIEATLPPHDPDTTPLARPKAVKRAGVNSPDIPKLREILAQMCGGRDLTQLPAHTHYGVLQLIGEVGTDLTKWPTEKHFTAWTGLAPGSHDSGKRKGRVKRGRNRAGRLFCMMAQCLARSKDIALGGFYRRMCARRGGLVATMALARKLAAWFWRVMVKGDDFVEQGIAHYEAQVLQTKQRALKRLAKELGQQLVPVVETP

SEQ ID NO: 165653 - protein, 352 aa, unidentified
MQTPQLFIGIDVHKKNWSVSIRTDLFDHKTFNMPSEPETLIKYVNQHFQGYPVECCYEASCCGFFPYRQLSQAGWRVKVLNPSDIPQSAKNKDQKSDRLDCRHLAKQLHSGHLTGIYVPDEQQEQLRSLFRQKDNLTKVVRKLKSQIKAELLYYGIKIPLQYDTPRWTMDLTAWLNSLEWKYSSGHSSMQSKLRHLEFARQEWLALNTELRRYVCANYKEDYYLLMTIPGIGPAIAIGLLAEIGNIRRFKKFDPFASYVGLIPSIYSSGETMQVRGLTYRSKSLLRSYLIESAWVSVRRDPTMQDYYRSHTGKQPNKIIIKVAHKLLRRIWHVIKTGEGYKIALKENSPEVR

SEQ ID NO: 165654 - protein, 489 aa, unidentified
MSKASQQQQAKKDATLKAQAPKRQARGSHRPQGEGNQRRSQLRITNPDAAGIDIGSQVHYVAVPEERAERTVRSFGAYTTQLEELAHWLKECAVKTVAMESTGIYWIALYQKLEEAGFEVLLVDARQAKHVPGRKSDVQDCQWLQQLHTYGLLRAAFRPEDSVCRLRTLQRHRKNLVECGGMFVQHMQKALNEMNLHLHHVLSDISGYSGLAIVDAILAGERDPRKLASLADYRVKKSQAQIEAALTGDYRPELLFVLNQSLQDYRQIQQQLAQCDLRIEKQLRQIADCTNPSQDCGPRQQGPESATGKRAKIKPKDALEVSLAGHLKRILGVDLTTIPGLNVLAILTLISEIGTNMAKWRNEKAFVSWLGLSPNNKISGQRVLSSRTRKVVNRAATTLRLAAMVLGHTNTPLGSFYRRKRAQLGAPKAITATARKLGCLIYRLIKNGQAYQAPDLHVYELKYKDQILNSLRKRANSFGFDLVEVPKAA

SEQ ID NO: 165655 - protein, 410 aa, unidentified
MNSISNKKINQVTDQTLVVGMDIAKKKHYACFVDERGRVLKKSFPVPQSREGLEWLYQCIVKAMEEFEKTEVIVGIEPTGHYWLNLAYFLDEKGIPLVMTNPMHVKRSKELDDNLPTKHDAKDALVIARLVKDGRFSYPRILKGMEAELRVGATFRSKLVEEQGAIRNQMIRWLDRYFPEFSQVFPSFGKMALAVLEYTPFPSDLAGKELEEVLALYRQSEGLQSPQKPKAKKLMELAQHSIGVTEGQQMARIEIATLVRRYRQLKEEIEALTEQLIELVQTSVEYEWLKTVPGLGDATIVELLSEIGSFSHYQDPRQLIKLAGLTLREHSSGQHKGQKRISKRGRRRLRALLFRVMMPMIRHNEAFRQLHDYYTTRPDNPLRKKQSIVVLCGKLLKVFVRSTKRSMRSE

SEQ ID NO: 165656 - protein, 457 aa, unidentified
MAKRRRKAMSRKFKITKLPAELQHINLNAAGIDVGSERHLVAVPEGRDVVSVRAFGTFTSDLEALATWLKKCGVTTVAMESTGVYWIPLFEVLERRGFEVKLVDARHVKNVSGRKSDVLDCQWIQQLHTYGLLAGAFRPPDEICVLRSYLRQKEMLTQASSMHIQHMQKALQQMNLLLHNVVSDITGATGMKIIKAILAGERDPQVLSRNRDERCKHSATTIAKSLVGNYREEHLFALRQAVDLYETYQTKIADCEQAIIKEVEKQPNVSDDEPPPADKETQARDRIRAGVDVRDMLYQKSGVDLFAIPGLAADTLLILASEVGFDMRPWKTEKHFSSWLSLCPGTRRSGGKVLDSKTKRNPNRAAQAFRMAASSLSRSTTALGAFYRRIKMRTSGQQAVTATAHKIARIYYAMLTKGASYIELGQQAYEQRYKQRRLDQLKNQAKSLGYQLIPCAS

SEQ ID NO: 165657 - protein, 412 aa, unidentified
MSVPEALFYVGIDWATETHAICVLTAAGRIKAQFMIDHTAAGFAELVRRLGRLTGSAGDVPVGIERPDGRLVDALLEAGFPVVPVSPNAIKTWRDGEVLSGAKSDAGDAAVIAEYLRLRAHHLRPATPYSGQTKALRTVVRTRDDVVDMRVAATNQLSALLDANWPGATAIFADVESAISLAFLTRYPTYLSAEHLGEKRLQAFCVKHGYSGRRSAAELLARLRAAPAGSTDEALTDAVRDAVLAQVAVLTALTAAEKKLDRSVVAHLGEHPDAKIFTSLPRSGQVNAAQVLAEWGDSRAAYDHPDAVAALAGVSPVTKASGKYRAVHFRWACNKRFRKAITCFADNSRHSSPWAAKVYADAIARGHDHPHAVRVLARAWIRVIYRCWNDGVPYDPNKHGNAGKLREIATAA

SEQ ID NO: 165658 - protein, 403 aa, unidentified
MAAVVIGIDPRKGSRTAVAIGAGEEPLGELRVRACAAQAERLLAWAAAWPERTWAIEGAAGLGHLPARQLLALGERVLDVQPKLGARVRLLAAGAVNKNDPNDARSVAVAALRSASRRPVTADDHAAVLKAWARRHRDLGRTRTQVACRLHAVSCEPTPGGVSKRISAAQAVQLLAGIKPPGAVEAARCELAAEFVEDLRRIDAQMRDVKKKLTTAVRASATTVTEVFGAGPIVAATVIGEVRDVFRFASRDHFAACNGTAPIEVPSGRRKICRLSRRGNRRLNHAIHMAAVTQISHHHSPGRAYYQRKLAEGKTPKEALRALKRRLSDTILAQLQAGPPRRHEPALRWGAREGNRGTAPSPARPAHTPGTGSSAKPLPDPATTLRPSPPAGQKAMRKPGRTS

SEQ ID NO: 165659 - protein, 415 aa, unidentified
MNPVVERGAGLDVHQATVVATVRIPDGGNERKKVTETFPTTTAGLLTLRDWLQAHGVTHVAMESTGVYWKPVYYILEDSFTLLLVNAQHLKQVPGRKSDVRDSEWIAQLLEWGLLRSSFVPPVPIRDLRDLTRYRKHQSRDRAREVNRLHRVLEDAGIKLSSVASDVMGVSGRAMLDALLEGTTDPEVLANLARGKLRKKLPALRQALLGRFRTHHGFLIGQILAKIDFLDEAIDQLTEVIDRLVLPFEPMLTQLDTIPGLDRKGAIIILAETGGDMSQFPTAGHLCSWAGVSPGQNESAGKRRYGKTRRGNANLRTMLVESGLAAARAKNTALQSRYHRVKRNRGHKKAVLAVGHHILEIAYYVMRDHVSYRELGPDYFDRRHRERALRRHVRQLEVLGYRVTVQPAAVPEAQL

SEQ ID NO: 165660 - protein, 425 aa, unidentified
MNYKQNEKINQVKESTLVVGIDIGSTTQYARAFDWRGIELGKVFTFSNSREGFEAFKAWMQRLQDKYRKSDVIVGIEPTGHYWFDLGAYLEDEGILLVMVNPYAVKQTKELDDNSQSKNDRKDPKVIAKLVTEGRYSAPYTPDGVYADLRIMVANRKRLIREMTQIKNRFARWFAIYFPEYTDVFGDYEAQSSMLLLKKVCTPEAIVELGAEKINQIWRDAKLRAVGMKRATTLCETAKRSIGLKKGSSAARYEMKLLLEDYEYKKAQLDAVMEEIEKLCRKIPESEQMLAIKGIGVITVAGFLAEVGDVRRFESPRQIQKLAGLSLRENSSGKHKGQTTISKRGRSKLRAVLFNAAIPLIAKNPEFKSLHEYYTTRANNPLKKKQSVIAISCKLIRVFYAILAKGVTYDAQKLISDIHRQPQVA

SEQ ID NO: 165661 - protein, 411 aa, unidentified
MDSGYKVAGIDVHKKMLAVVVTDVAVPGEYAFARRRFGAGSAELQALHDWLREQGVREVVMESTAQYWRPVWLALEPSFRLHLAQAQSNKAPKGRKRDFADAERLVRRHVAGELILSFVPNEEQRLWRTLARSRQQLTRERIRLRNQMETLLEDSRIKLSSHLSDLFGVSGKKMLRALAHGETDPAQIAALALGGIRATPQQLSDGLSGAAQLTPLRRQILRLFLERLDLIDRQIEELEQSLAGELRIQQEAVTRLAAVPGLGADSAHQIIAEVGPQAARFDSPGQLASWVGCCPGREESAEVSRSNRSPKGNVAMRRILCQAANAAVKAKGSVFQEVYRRLVPRLGHLKTIWAVAHKLCRIVWKVLHDGVTYQERGRTPDPQTIRRRIGKLLRQLRALGYPVPSAEAGTV

SEQ ID NO: 165662 - protein, 434 aa, unidentified
MGNLSKIFPNSAGIDIGSEKVYVSIEDQPVRNYKTFTVCYRDLGNYLKENNITHVAMEATGIYWITLYDVLEEMGFDVTLVNPADSKNLPGRKTDVQDCQWIQQLFSYGLLRKSFVPEDVVRKLRVYVRMREDKLQMAASHIQHMQKALIQMNIRLPEVLSQIHGASGFAMIRAILAGERNTKVLLSYCTSDLQKRKGADILLALEGNYKEEYLFELRQAYEGYMFYLEQVKKCDEETEKILKEYNQKSNKNFQDDKPIKAIRHNKPNIKDLHKLLLGINGVNPTVLPGLTDYSFMRLTAELGNDMKQWTNIKAFVSWLGLAPGKNQSGKMNKRSKKRAMNRAGLIFKQAAQTILLSKQPGLGAFARRIKARRGPAIAIKATARKLAELYYKMFSEGIQFVEEGVKMYEEKIKQQQIKFLIKKANELNLQLIQN

SEQ ID NO: 165663 - protein, 341 aa, unidentified
MKNKSFIGIDISKNVIDVSIFCEETPIKDFSHDVFNNSRKGFGEMCTWLKKNHVVLSNSLFGMEFTGSYSMELEKFRNTRNYQFCMLSTHVVKHYPMGPKDKSDKIDSAKIADFLYRYNGTECVKPYNMPDKTMQRLKALMNERKFLVEQRTCFMNRRQLCITKEDAQLYDGYIKKFSRDIENIELEEQKLLATDDSLLSTYKNLLTIPGIGFVNAINVIVITRNFTAFETARQYASYVGVAPHFRTSGTSVKWRPRPSARCDGQAKADLSMAATVVVQYDAELQSFYNRKLGGKQDSDTKRKALNAVKFKLVLRMFAIGKQNRKWEPLDSKSSNEKLAIS

SEQ ID NO: 165664 - protein, 308 aa, unidentified
MTSDIQYIAIDIAKQTLQVQSDLKSRSLNYDKDGLKKLRTFIKQHQKPMIIAEATGGYERPLMSMLFKYNITVALINPRLARAFALSEGIKAKTDPIDADMLLRFAKEKNPKPTEYIGAQREELIALMDRRAQLTEHIAREKNRMDKKVQAIRGSIQKMIRILEKELALIEGRIIRLIQSNEQMDAQSKAMQQVCGVGPNTAWSILAYLSEITQVNRNQIVALAGLAPFNRDSGKFKGKRRIQGGRAKVRATLYMAATCASQHNAVIKDYYQGLKARGKPSKMALVAVMRKLLIHLQAILKKQQLVLD

SEQ ID NO: 165665 - protein, 403 aa, unidentified
MQHVIAFDVSMGKSYMVIYNNQKQCIFESEINHSKPDFEELRKRIDQLMNENKKSPHIVFEATGVYSRQLERFMQDNKFEYFLLNPLEANLQCDSLRIHKTDRSDAHQLALTHFTASRREKTGTDNLFYQLKSLSRFYNELDDELSVIRSRMHKVVQLTFPELEQIFTTKSDLFLNFVQLFPHPDFVQNLSKTVMKNLIRKNTNKNISINIAEKKAIEVLEAARYSYPAVRQDDVLCEQLKSYAKRYQELLHQKEQCITKMVRLAESRTEYPIILSFPGIGPNTAIRLLAEIGDITRFENNKQLNAFAGIDIRRFQSGKTFFRDKINKRGNKHLRKLLFIIIQNMIKLRRYRKNHIVEYYDKLKTQPYNKCHKVASIACVNKLLKLLFYLITHNIHYDYRLTA

SEQ ID NO: 165666 - protein, 312 aa, unidentified
MADLFHGGIDVASDRLDVMLLPHGQCFWVGNNAVGWAELVERLRGLCIAAIGIEASGGYERGVLRALLAAGISVRQINPFKLRQFAKARGVLAKNDRLDARMIALFVATMPTRPAQRNEAAEQMAEIVTARRQLSDEKVAAENASRLFEDAILRRLYRRRLMRLALDIALLDKRLAAMVSANVALAQRYRLLTSMPGVGPVLAFTLIALLPELGQMSRRQVAAIVGVAPYDFDSGKLKGMRCIWGGRAPVRRVLYMAAVTACRYNPSLKAFHERLSAAGKKSKVAIVAVMRKIITTLNVMLRDNAAWNARFA

SEQ ID NO: 165667 - protein, 297 aa, unidentified
MQRPRQGQVIIGVDTHKEIHVAAAVDWQGTLVGEECFPTTRQGYRLLESWARSLGEVLRVGVECSGSYGSGLTRHLLKNGFAVLEVTFPDKTVRRKRGKDDFIDAEMAAEAAFTGARTVTPKSRDGMVEALRMLQKTRSTAVAARRVALQMIRADIISAPEELRDQLRGMTRMQLIRHLVATRPDSTDFRTPLGAAKIALKRLAKRYVDLDDEVSELDDMIDAILADAAPLLVQLKCVGAQSAAQLMVTVGDNPERLRSEASFAMLCGVAPVPVSSGMTYRHRLNRCLLYTSPSPRD

SEQ ID NO: 165668 - protein, 285 aa, unidentified
MNYSHFVGLDVGKKTFDASLMSADEKELSHKSFDNTPTGIQSLLDWIAGYHLSLSKLLFCAENMGSYVTELSVSSVSMGFSLALVCPLTIKKSIGLQRGKNDRIDAKRIANYAVLHYRKLELYKLPDKDLVRLRGWIIIRDNLVKQKVSSIKLLETFSWMAKLADVTESISFLEEQLKSIKERILEVEEDMEQLIAASTSLYTNYLLLRSIKGIGIINAIVLLCVTDNFQRFDNPRKFACYCGVAPFEHTSGISIWGKTQTSSLALYEGQKNGIIRYSAVCFYYK

SEQ ID NO: 165669 - protein, 369 aa, unidentified
MNTVKFIGLDVHKKTITIAIADQGRQNKPRSYGAIANDLGALDKFCRKMVSTASRLYFVYEAGPCGYGLYRHLTAKGFDCMVAAPSLIPKKSGDRVKTDRRDAAKLSQLHRAGELTAVYVPDPQDEAMRDLSRARHDAVNATQKAKQRLKAFLLRNTIAYGGRCAWSKAYFRWLADITMAYPAQQVTLQEYIDAVHEGLQRVERLTDQIRQLVPGWRLAPVVSALQAARGVSLVVAVTLLAELGDLSRFQRPSQLMAHLGLVPSEHSSGENTKRGGITKTGNSHARRALVEAAWAYRMPARVSRLLLKRQQDVPEQVCQIAWKAQLRLCTRFRRLVARGKLRKKVITAIARELSAFLWAMAKQVQPAVL

SEQ ID NO: 165670 - protein, 340 aa, unidentified
MEQVYGAFDLHSTNNHLAISDHEDKRLYKKKLPNYPDVILAELEPFRQRLAGIVVESTFNWYWLVDLLMNEGYRVHLANPSGIQKYKGLKYSDDNHDAFWLAHLLRLGILPEGYIYPKEDRPVRDLLRKRCHFVGLRTSLINSLQGIIERNTGQKLSANEMKQLSEDHVSPLLANQEDLALSGFASKEIIDHLTCHIKRIETVVKEKIKIRTPFDKLQTMPGVGNILALTIMLETGDIRRFSKVGNYTSYCRKVPTEWTSNGKKKGKGNRKNGNKYLAWAFSEAAEFARRFDESARRYYNRKASRTKAIVARGALAHKLARAAYYIMRDEVEFDHQKLFV

SEQ ID NO: 165671 - protein, 406 aa, unidentified
MKKRNIYQNRSQELWTLFESARDISKIMCIPMDYAKNHHVAMFCNGYGDIIRKPFSVKNSPEGLDYLVDQVRRSCSHRNIKLQHAFFGGEDVSSYSENFVHSLRSMGWLVASVNAYEAKKQRENLQASTDRLDLMGIASMLLSRRANTNPAQSGIYRNLRTIVRHRKKLVKMKTEIKNRIHSVIDHLFPGFLDETRSGIRPFSKSSLYLMSGRFSARQINRRKLAPLAKALRRFGTNKSDKAAVKLKGYAAKAFSAPEPHLHTLQLSLSCHVKHSSCLDECIQQLEKEIAFVLSQTQGAFLTSIKGIGIVLAAGICSEIGDPFIQGSAANLVSYAGVVPRVKQSGGPESEPRVGSVSKRNNHILKDYLVQASTHIGRHGPENLKQDFKRRQCQAQNAEFGMARRFI

SEQ ID NO: 165672 - protein, 355 aa, unidentified
MNQEKYIGMDVHAATISVAVMNAQGKLLMECVLETKAGTIVEFIQGLRGTLAVTFEEGTWATWLHDLLKPHVSRLVVCDARKNALMRDGNQNDRVDARNLAELLRTNQVKAVYHEKHGTRALKELGRSYLTLTQDSTRVMNRIKSVYRSWAIPCGGTKVYSRAHRGEWLAKLVEPGVRMRAQHLYEQLDSLQPVRQAARRELLRESGKHAAVKLLRQIPAIGPIRAALLVALLQTPHRFRTKRQLWAYSGFAVETYDSGEYRLVRGKLQRNRERITVRGLNHNHNHDVKNLLKGAAISAMERPGPLQDFYAALVEKGIRPSMARLTLARKMAAIALTMWKKGVSFDPKQLQPPAA

SEQ ID NO: 165673 - protein, 381 aa, unidentified
MFVAGIDAHTRYVVAVVLDRFGECVLRPTRVKVEQRERLLELLAPYRPLDAVMETSSSWPWLSEVLTGAGIHFVLAHARRLRAIAEANYKTDAIDADLLARMRLAGLIPAVYPTPVAQREWATLVRHRTTLVVQRTALVNRIHAQLHRQGLYLARGRLLTRAGRQWVRTVAYPGFGLEQRALVRSHLRVIAGLRPLIRACDRHIAEVAATIPEAQLVATVPGIGPHRALVICAEALPIRRFPTPGHLASYAGLVPTSCQSGQRAVRHGAIPAGANRWLRGALVHAVVSHVTHAPASWLSAYYATQKARLGWPTARVATARKLARALHAMLRTNTPWQHDQHDQHDQHDQHDQHDQHDQHDQHDQHDQHDPARVSSTDGMPH

SEQ ID NO: 165674 - protein, 345 aa, unidentified
MKITTVGIDLAKDVLQVHGIDERGKAVLRKQLRRAQVSVFFGNLPPCVIGIEACASAHHWARTLQRFGHTVRLMAPQFVKPYVKTNKNDVAVAEAICEAVGRTNMRFVPIKNIEQQAILSVHRVRQGFVKARTAQANQIRGLLGEFGLVIPQGIYNVAKRVPEILEDASNELPVSFRHLISRLTEHLKELDRQVKEFEQEIIAWHRSSELSRKLEKIPGIGPLAASALVASIADARSFKNGRQVSAWLGLVPRQSSSGGKPTLLGMSKRGDAYLRTLLIHGARSAILAAKNKVDNTQGWLTDLLKRRHPNIAAVALANKNVRTVWAILAHGREFKPGYVPTRVAA

SEQ ID NO: 165675 - protein, 430 aa, unidentified
MKKNNSNSQTNSDRAGKPGKARGPVQRDAKEVMAELVARLSQKLEPRSAAARAGEGRQQDLPGPNRDRLTVGVDLGDKWSNFCIVGLDGEKLTEGELRTTQEDFAEFFQSLAAARVVMEVGTHSAWARDVVAGCGHEVLVANPRQMEGPKRRKRKNDRIDAHKLARIGRMDPQSLFPVEHRSVKVRQDLVAVRARDALVAARTQLINTTRGLVKSMGGRLPKCSSPSFPHKVEESLPAEVREVLLPLVRLVETLSDGIAAYDKKMEKLGSEKYPQTKLLRQVKGVGPITALAYILTLENPERFAQSRDVGPYLGLVPKQEDSGDSQPQLRITKMGDMMLRRLLVGSAHYILGPFGPDTDLRRYGIRLSERGGKNAKKRAVVAVARKLAVLLHSLWVSGEVYEPLRHALPKATEERGVRHAPAEATEKEAA

SEQ ID NO: 165676 - protein, 337 aa, unidentified
MKYSGIDLHCNNSVVTVVDEEDRVVAEKRLPNELTKIVGFLMPWREELVGVVVESTFNWYWLVDGLQAAGFKVHLANTTAIRKYEGLKHSGDEADARYLAHLLRLGILPTGTILPPEQRAVRDLARKRMQLVRSRTAHILAVENITARQYGTRISSHQVKRLTAAAVDQMPLSAEVGLAVKANVAVIGTLSEQIGVLEQRLQEKVGARAEYGLLTSVPGIGQVLATTILLETGPIDRFATAGNFASYARCVDSVHTSNGKKKGEGNTKNGNQYLAWAFVEAAHFARRYCAEAKRFYERKQAKTNNVVAIKALAHKLARACFHILKERQPFDVTRCFA

SEQ ID NO: 165677 - protein, 371 aa, unidentified
MGRALIAVTEMSQSSWLVAGIVPGVERQPLKKLKADEGTLLKLLHRWREEAEKAGHRIKRISVAFEAGRDGFWLARWLRARDIEAHVIHASSVAVSREHRRAKTDRLDSELLKRAFLGWLRGERDHCKMVAIPTTKDEDAKRPNRERESLVGEQNRIVNRMKATLIRLGIRGFNPKLKKAAERLEGLRTPEGEPIPLNTLAELHRDMVRRRLVSDQIRQIENVRLEHLKQAPSDGPHAMVRLLARVIGVGIETADMLVQEVLSRNMRDRRAVARYAGLTGSPDESGTKRREKGLARSGNARVRRGMIQLAWRFLMFQKNSALAQWFQTRTKNARGTRKPMVVALARKLLIALWRFVREGVVPDGVVLRAAS

SEQ ID NO: 165678 - protein, 530 aa, unidentified
MSSRRSIRRRKVRKDSKVIAVQKPNGTLHPRVQEASPEHFGIVCFDCAKARSVWLMSDFYGRILVEPTPVEHQRGQLDAAIAMIRETAERHQIKDLVVAVERTGNYHTPIIRAFAKVEWQGKKIDKRIVHPFATKQHRQPANPDDKTDENDLAAIFRATVQGFGLLEPTWDDVYLQLQLLARHRRDLVEKRTAICCQLREQLDLLLPGYGALFDTQLWNSHIAMELVRHVASPAEFQRRGTHGLATILRTARVNFQQKTLQKIIAWSANAMTPADQASTRHRIVLALDEDRQRKTQEIRALERDLSQLLVSTPYLLLLCCPGINVISAAELAGEMGPIENYANANRITGRAGLYRSRYQSDEVDLQNGSLVRLCNRRLRAALMMIADNLVMCNPHYRGLAQLWKSKEQDERYIRTKIATKFTRLMFQLVAGRQVLRHPSMNGRDYILDKLLKFHQDHDTAPDVMLTNLQQAILQLPTHTYAEEAAPLAAVLEKTRAARRGVKPLADILPFVLARLGVGDLQSVGETREPN

SEQ ID NO: 165679 - protein, 402 aa, unidentified
MAAGQLWAGVDVGNEHHWVAVVDSAGTMVLSRKLANDEQQISKLVAEVDRLGAQVSWTVDLTTVYATLLLAVLAEAGKSVRYLSGRSVWQASVIYRGGEAKTDAKDARVIADQSRMRGDDLPVLHPDDDLVTELRMLTAHRADLVADRTRTINRLRQQLVAVCPALERAAQPAQDRGWVALLARYQRPKAIRHSGITRLTRVLADAGVRNAPMIAQAAVTAAKTQTVRLPGEEVAAALVAQLAQGVIALDERIKQIDADIEDRFRRHPLAEVITSLPGIGFRLGAEFLAAVGDPALINSADQLAAWAGLAPVPKDSGKRTGRMHTPQRYSRRLRRVMYMSALTAIRCDPHARSYYQRKRNEGKRAVPATICLARRRTNVLYALIRDNRTWQPDSPPITTTAA

SEQ ID NO: 165680 - protein, 355 aa, unidentified
MASITLLGIDLAKDVFQLHGLDELGRPQLKRTLRRRALVQFVAKLPACTIAMEACSSSHHFSRKFQQNGHEVKIISPQFVKPFVQGNKNDAADAEAICEAASRRNMRFVATKSVVQQDIQCLHRVRKRLVHNRTALTNEIRSIVGEFGIVFAKKRSALVEGIKGLLNGSCPREELSSEGLTLLQDLYSELLELEQCIENCELKLKKISSQPQCQRLFKVGGLGLLSVTALAVALADPGQFKNGRNFAAWLGLVPRHQGTGGKNRILGISKRGDMDLRTLLIHGARAKLRGINAKCRAERKLDPLEDWAYRLCQRQGYNKATVALANKNARIAWSISAHKTEFESHQAVASLKKGA

SEQ ID NO: 165681 - protein, 361 aa, unidentified
MPIMTDHAAQVMGGVDTHGHSHHAAVVDTLGRQLADKEFPANRAGYRGLERWLRSHGTVIAVGVEGTGAYGAELARALAQAGLRIVEVDRPDRKTRRRHGKSDPIDAYAAATAVTSGRAAGTPKTRGGMVEAIRALRVPYRSAIKARTQAINQARQLLVTAPEALRAALRDRSATDLARACARLRPADLTDPTSATKAALRRLGRRILALNEEIDELKIALHDLTARTAPDLLQLQGVGPDVAGQLLATAGDNPDRLRSEAAFAHLCGAAPIPASTGRKDRHRLNRGGDRAANRALHTIVLCRMRWDPRTRTYVQRRTQQGLAKKEIMRCLKRYVAREVYKILTTPPRSTSNPTPSHAETS

SEQ ID NO: 165682 - protein, 341 aa, unidentified
MNIVVLGIDLGKTLCSLVGLDREGAVVLRRRIRRPSLAAFVNKQPRCIIGMEACCGAHHLARQFASLGHDVRLMPPEYVKPYVKSHKNDDRDAEAIAEAATRLTKRFVPIKSEEQLDVQTLHRGRERLVGTRTALINQLRGVLFDRGIVIAKGRPKLNLWLRENLPDNTLLTTRMRQLVDGMVDELHALDRRIKQFDQEFEALAKSDQRARLLRSGPGIGALNATALAAAVGDVSAFAKGRDFAAWLGLVPRQITTGGKPRLTGISKCGSTYMRVLLIHGARATLPYLARMDTKLGAWLQALLQRAKRNVVVVALANKLARIAWAVMSHQRSYEAVAVPTS

SEQ ID NO: 165683 - protein, 339 aa, unidentified
MRHIGVDLHTNSFTVCYLQEGKPEHIQTFRLKDLDNFTKDLQETDEVAIEATGNSCFFYDAVSPYVKRIVIIAPGQFEVVRRSVNKTDKHDARAIAFFLSKDMLPEARYKNKQCQQLASLLQMRDQLVKSRVSLINKVHGLFNYHGIKIKKEVLTTKVGFERATQKHNWDPLEKVEIEVISYHLEAIRESLKKLEKEIIAFAKQLPGFSNLISIKGIGPISAAVFIVTIGDINDFRRPEKLTAYFGVVPRVSQSNQQCTIGRITKRGSKIARTSLVQCTWIAVRYSPYLKSFYEHIKKKRGSANAITATARKFLITIFYTLKNNWVFKDFTKFEISTGQ

SEQ ID NO: 165684 - protein, 341 aa, unidentified
MDNFYFIGVDVSKKKLDFCVLFEGKVLREEQVSNHQQAVARLIGELKNDLEMDNEQFLICAEHTGQYTFPLVCACKSVECKLWLENPSQIKYSSGMQRGKNDKVDAKRIAIYASRFGDKVKYYDRPTEEIERLKQLERERALYVTDLAKYKGQMYDQKDFMPAALYRKKTKRMKGLIQELQAAIDAITAEMEKIIGSTEVLARQMELLMSIDGVGKVVALNVIIETEAFSRFDNPRKFCCHAGVAPFSYTSGSSQHSKNKVSHRANKNIKKPHTQQTKQQKHTQTAVSVTHRKEGELKAYYMRKVEEGKNKMSVINALRAKIVARMFAVIKRNEVYTPIYS

SEQ ID NO: 165685 - protein, 357 aa, unidentified
MSVYVGIDVHRKRSQVAVVSQDGEVLANRNVPNGVEPVLSVIGGLPPGTPAAFEAAFGWGWLVELLEDYGFDPHLVHPLQCKAIASARLKNDKVDAAILAQLLRADLLPEAWIAPPPVRQLRALLRHRAQLVRLRTLLRNRIHAVLADHGHGRPAGCWSGPGRAWLVSLELPAVSREVIDDDLALIDALQQPIDRLDWEVHQRAKAEPAVKVLTRLPGVGPFTALVILAETGDVSRFGSARKLAAWAGLTPTVRGSDRTVRHGHISKQGSAWLRWILCEAAQTAKRHPDFAGSYQAIARRRGKKIATTAIARKLLTRAYHLLTDAQITAPLAAVPAPAGALTHREGPPSPGRARVSA

SEQ ID NO: 165686 - protein, 310 aa, unidentified
MNQPFVGIDISKDRLDVHVQPTEERFSLAHDEAGVAELGRRLQGLAPQLVVMEATGGYETTVAAALASAGLPVVVMNPRQIRDYARATGQLAKTDRLDARVIALFAAAVRPSVRPLPDAQAQQLGEVTARRRQLVDMLGAEINRRRLMRDQRLRERLNAHIAWLEQALREVDDDLRRLVRASALWRETDDLLRSAPGIGKVTSCTLIADLPELGHLDRRRIAALVGVAPFNRDSGAMRGRRLVSGGRASVRTVLYMATLTAIRHNPAIAVFYQRLRASGRPGKVALLAAMRKLLTILNAIVRDRRPWQPA

SEQ ID NO: 165687 - protein, 458 aa, unidentified
MYRELQPLRRTLSEELRSSLLPGLPGIQPDKLIDTYLDQLTLFVGADVADLTLSLLAIDASKEELGHLLNVANTPSGFRQITAWLEKLRSEHHLRIIAVACEATGVYYWGFWDALAEQPNLARILYNPRTTEHMGEVLSKRVRTELVDAYLLAEQLRLGSTPEVVLSQDADLLSARFCSRSARDLAQQINRKKNQLRALLRAYSPAFSQVFPGQKFHHPAVYALYAQHLFPDEIVAAGPEAIAAILTSHCRTAFDATVAQHLVELCHTVLLRPITRTVIRQRALDLADDITTAQSRQRYFIRTGYDLIKQRSEAKLLKQTSGAGLSNTLALVSEVGDVQRFPDGAHLASFLGLTTSKHISGATVYKATHITKQGAPNARYAAVNMADHLRHKVPYYHSMYQRITDRKPPHKGHFVALVAIARHFTTNVLYDMWRQQRPFFLETADYRQYLQEHPHTDH

SEQ ID NO: 165688 - protein, 392 aa, unidentified
MYIVGIDIGKNHHEASIVSPKGKQIGRSLRFATTHKGADSLMSFIFKNIGNSPCVFGMEATGHYWYPIYSFLKAKGYTIYVINPIQSDSLRKMYIRQTKNDSIDSFLIAEVIRFGQFGTTSMADENILAMRQLCRYRDSVISSRTEIKLRIGTIMEQIFPEYEKQFSSLWLSTSMGILEKYLTPENIENAPIDELFEIIKDKSHNRLTKAKAISIKEAAADTFGIKIAQDAFSFQLKQLIDRMNFLDKQIEALDCQILEYYEKFDCYLHTIPGIGMIAAATILAEIGDINRFKSSSALVAFAGIDPTVRQSGEFSSTHNHMSKRGSPYLRHAIFLAATTCSFHNSPLNAYYKKKRDQGKHHLTATGAVARKLTTVIYAVLRDSKPYEPKKFC

SEQ ID NO: 165689 - protein, 443 aa, unidentified
MSDLTVLDPRAAFVDVGSEKMHVSIAGGSPAVFGTVTSQLDALRDYLAEHQVRSVAMEATGVYWLPLYGVLEAAGMEVVMVDGRQTRNLPGRKTDMKDCQWGATLHAHGLLRAGFVPPAHIRRLQDYLRLRGDHIAAAAGHVQHMQKALERMNIKLHDVISSLTGASGLAVIRAILAGERDPQVLLGLCDIRIRNVKAERVVESLRGDWAEEHLFALAQAVQSWDHYQGLIAACDRQIAVVLGQMPDAKAPPSAASTKTGKPRTRPGANAPDIADLREILVQICGAKDLTTLPAHSEYSVLQLIGEVGTDLTKWRTEKHFTSWLGLAPGSAQSGKRNASVKRRRNRAGQIFCVMARALARSKYVALGGFYRRMAARRGGLVANKALARKLATLFWRVMVKGLDFVETGVAQYEARVLETKHRILHRLARQLGQKIVPNPAAVV

SEQ ID NO: 165690 - protein, 357 aa, unidentified
MKTIRQCVGIDCSKDTLDTAINFLDENFQSKVYATEIFENNDKGFKCLMKWMRKLCLKDMPYQVVVEATGVYHEQLTYALVSNGFSISIVLPNKIRNYCRSTDIRTVTDKISAKQIAEFGLVKKLDNWVIPDKIYTQLKALSRERIQLLDEKTAASNQLHAYKHAALISSSTAHRSAKRIRLIEQQIKQIEDEMKQLVNEHPTLKEKIDKICSVKGLGFITVVSIIAETNGFNLTRNQRQVVCYSGYDVIVKESGTSVKSKARISHKGNKYIRRALHFPAITAVKYNAPLENLFNRLYDKQQIKMKGYVAVQRKLLILIYTLWNKNEVYNPEYVHSSIKNLEQPKEAALTELDHVRS

SEQ ID NO: 165691 - protein, 395 aa, unidentified
MLYIGIDLHGKQMTVCVRDEAGNVILRQQVSTRPGKVKEFLARIHAMGDGRYVVILEVCGFHDWLVKSVKAEPGCVDVVLIQPEQASKKKTDRRDAARLSEILWVNRQRLLAGERVHGVRCVYQPTEDERQDRQVTSVRQRLGRRRTQTINQIRHILRRNNLEWERPTKGFQTKKVKAWLKKLALDETDRLEMDQLLEQWDLWERQIDQVDKRIEERFEKNAAAKVLATIVGVSCYMALAIASRIGKIDRFVRGRSLANFFGLTPGSHSSGETQRLGSITKQGSQMVRFLLGQLTLHVLRKDAKLRKWYKGIKTRRGSKIGRVAVMRRMTTIIWRMLSKGEAYRYEGVTEPRRPDPQSPSKACVEPGRAATLEAYAGKAKPKADQASTGSSSLSE

SEQ ID NO: 165692 - protein, 400 aa, unidentified
MISVGIDVSKGKSTVCILKPYGEIVSKPFNITHTQKDLSELSSMLFRLNDEVKIVMEATGIYHLPVLTYLQEKGFFVSVINPYLMKSYRNESLRKAKTDKIDSRIIANYGIDHWFKMKEFQTSGEIYEELKLLGQQYRHYMKLHLLSLAELTHLLDLTMPGIKNLLASWNETNRKDKRSDFVERFWHYDVITSMSEQEFTEEYILWAKEKKYVPSQEKAKVIYTLAQESIPTLPSETSSVKMLVTEAVRVLKEVDATLGLILSRMQEIAKTLPEYSVVREMGGVGNTLAPKLIAEIGDVRRFRNGKALVAFAGIDPPPYESGQFVGCNRKISKRGSASLRKVVYETMRSLKMRSRPEDPVYRYVVKKESEGKSKKSAKIAGLNKFLRIYYARVTELYKNI

SEQ ID NO: 165693 - protein, 429 aa, unidentified
MRTESTPGARGPVFCGVDTHADSHWLCVLDWRGRKVLSRQFPADAAGYEALAGAIAAAGEPACVAMEGTSSYGAGLTRHLASLGMPVREALSPARMQRRRPGQGKCDEADAERAARAAMSGSKLGTPKSQDGWVDGVRCMLAARSGAVKARTSAINTARSLLTTAPEGLRSRFRGMGGPRLMEELPSVRAEGALGAALGALADLWEAARDAALDMERAIEASLEENCPALLAMYGCGPVSAAKLAVAAGDNPGRLRSEASFAAICGACPIPASSGKTVRHRLNRGGDRQANSALHEIARQRVMRDPETAEYAERARGRGKSDREVMRCLRRYVAREAYRALMHPHEIRRPGDASGLVAARRAAKVSQVRAASILGTSEKYISMLERGQRELKPIRRAYEAWVEAGLPLDWDRRAFEAERKMDSKKHLAK

SEQ ID NO: 165694 - protein, 350 aa, unidentified
MKKFIIGIDFSKETVDASIVQKEQPETLIAYKKFRNNLKGVDGLIAWTKSKVAQDGEIIFCGENTGTYSTLFSDELTDRGFIIWIEHSMNIVRGMGDVRGKDDKTDSLRIASYAARFYDKMKPYVRPKDETRVLKTLLAKRDRLKSFLKAEITNTKENPLMLQDSNIASSINEFFKRLEESLRKELKELERMILDVVMSSSEYAKNFNILTSMKGIGLINAVALIVYTDNFTKFNFNHRKIATYWGVVPFKNESGTSVRRGTHVSPKCNSWLKALLTEATLCAIRYNSRIKAYHDRLMARGKAIGIVFNNCKNKMLKILVAMVRDSKIYSDMDVSKDPHTTTTTSSIVVC

SEQ ID NO: 165695 - protein, 360 aa, unidentified
MIILAIDLGKFNSMCCFYDTKTQKYRFQTVAMSRMYLTTVFEKHEIDLVVMEACGPSGWISDLCQDLGLKTFVCSTNDAAWEWKNVKRKTDKDDALKLARLAMMRQLTRVHMPQHQVREHRSLIKYRKKLVGRITAIKNAIRGLFLCHGIEIAKGLPAWYSGRDLINSYRKPLAECSAEELWRGQLDFELTLLDSLRKQITDVETRLDMLAANHKGIQRLRTIPGLGPRTAEVIVTALDDVHRFKNGRQVSSYIGWVPRQYQSGETDRNGRITKRGSRILRTMLLECAWVSLQYNDWSRATYDRIQGGQKTRKKKAAIALARKIAVVSWAMLKNETDWDPEKAKLNIKPTVEECLAGSTA

SEQ ID NO: 165696 - protein, 410 aa, unidentified
MISPILKRCCGIDVHKSSLTATLLKEDKQGTIKKGVKEFGTCKEDILKLKRWLIKEKCESVCMESTGIFWSAVYDILHGELDVRIVNARSVKNVPGRKTDVLDSEWLAELLRCGLLKSSFIPSKELRNLRMKTRYRVAVLKQYQAEKNRVTKVLEAAGIKLGNVASDIFGQSGLLILNDLLEGKKNVLEIAQSRGKRLRADTEHIAKAIDGNLDNDKKYLLNEMKKHLEWLARKLMKLNEEILVSMEPNKEEWKLIQTIPGIDAISASSVIAELGCNMQQFDNDSAHLSSWAGVCPGNNESAGKRKSTKTRKGSKHLRRVLCEIANAASKAKGTQFEYFYKSLLIRRGHKRAIMALAHKILRIIFSVLKNKKPYYEPNVNHEMLTTKRNSQRWMRALKKYGYIAPKEDNL

SEQ ID NO: 165697 - protein, 343 aa, unidentified
MQIVRIGLDLAKHVFEVHGVDAQDKVVLRKTLRRDGVPQFFADLPPCIVGMEACSGAHYWAKVLSDLGHEIRLISPQFVTPYVKSNKNDRNDAEAICEAVGRPSMRFVPPKSPEQLEIQAVHRIRQRLVSDRTRLVNQIRGLLAEHGVVIGREISRLRRGLKQIVDGDDINLGIIIRDLVRDVHEELAELDQRIALYNRRIRDLFRTNEMCQRIGKIEGIGPITATALVAAVGDRSCFKNGRQFAAWLGLVPKQRSSGGKARLSGISKRGDRYLRTLMIHGARAVLGKAGGKKDPRSQWLGRMCERRHSNVVAVALANKNARIVWSVLARGEDYRPAQAASDG

SEQ ID NO: 165698 - protein, 281 aa, unidentified
MKQEVVTVGLDLAKNVFQVHAIGCDGAVLVRRKLRRAELIDFFTDLPGCLVGMEACASAHHWARELIKLGHEVRLMPPAYVKPYVKRGKTDAADAEAICEAVTRPTMRFVAVKTVDQQAVLMLHKSRDLMVRQRTMLINALRGHLAEYGVVTGVGAGGVTAMLKALHEQQDKLPVHARSALHALAAQLRALSSEVDRLEAQILAWHRADETSRRLATIPGIGPITASAISAAVPDASLFRSGRQFAAWLGLTPRANSSGGKERLGGITKQGDGYLRRLEAT

SEQ ID NO: 165699 - protein, 344 aa, unidentified
MSKLPSDLSSVTTVAVDLAKHVFQVHGCDAAGRVVVAKALRRKDVLSFFASLSPCLVGMEACGSAHHWGRELIMLGHDVKLIPPAYVKPFVKRQKNDKNDAAAIYETLFRPGLRFVKVRSVANQAVLMSHKAREMLVQQRTQLLNGLRGHLAEIGIIAAQGACNMRSLGGLIHEGDASIPDAVRTSLMPLVTQIEHLDSAIKQIDAEIAAQAKADPVSNRLMTIPGIGPVTASALAATIGDPSAFSGPREFAAFLGLVPRQNSSGGKTKLGPITKMGNQYLRKLLVVGAHAVLVHQARHNDPLRNWARKLLETKPFKLVAVATANKLARMAFALMSQNTRYHAA

SEQ ID NO: 165700 - protein, 348 aa, unidentified
MPKFTVGLDIAKSVFQVHAIDRSGQVVIQRKLRRNSVLKFFAGLAPSVVGIEACHSSHYWGRELIKLGHTIRLLPTQYVKPFVVGGKNDANDAAAICMAVSRRDIHTVPVKSAEQQSLQSLHRMREKAIQERTAKSNQIRSMFSEEGHIFPAGLPSLHKGIITLMDDGEAELTPILKRLGQMYLEQMTVLKAWLDELDAMIDDNFKNNEICQRLATVPGIGPVIATAMVGLVGDPAQFKNGRRFAAWLGLTPRQHSSGGKTRLSGITKRGDGYMRKLLVQGARAVIYNVHRKTDARAEWIKALLARRPANIVAIALANKIARIAWAVFMRGEKFISAPVKVCCREKFV

SEQ ID NO: 165701 - protein, 397 aa, unidentified
MEKFTTPVGVHTSSSVAVLQAASLESAATHSLYIGLDVHKDTIAVATALPGRGAPQYFGEIANTPKALSKLVARLSEPVGGEAMLWCYEAGPCGYGIHRQLLSLGQDCEVVAPPRREPIKTDRRDALKLARKLRAGELTSVWVPDVEQEAMRDLSRCRDDFKGQEKKARQHLNAFVLRHGHHWPRSKSRWTRAHWEWLEHLSFAHAWQQQVHDEYMGAVRSATEQVKEVERRLLNEALPQWSLAPVVDALRALRGVDTLAAIILLAELGDISRFDSPKELMGYLGLVPCVHDSGARRGRHGSITRAGNGHARRILVEAAWCYRHPARQTEHLLRKAKKASGEAKAIAWRAQKRLCGRYRTLQSAGKNSKVVCVAVARELIGFVWDIVRHEMPKLQLA

SEQ ID NO: 165702 - protein, 344 aa, unidentified
MVYVGIDLHRKRSHVAVVDAGGHQLFSRRLVNDPDRFRELLGELGEDARFALEATYGWEWLADLLEGEGRELHLAHPLRTKAIASARVKTDAVDAQTLAQLLRADLLPEAYIAPRELRDLRDLLRQRFVLTQMRSALKNRVHALIARQGVQHGHSRLLGPGGRAFLAELELRPEPRARLDVLLRLISDFDREIDALAADIDQRARHDDRVRVLCEIRGIGRYIALLIIAEIGAIERFPSARHLCAWAGLTPTVRSSDAKARLGHISRLGSGALRWALIEAAQRNTQGDGPLAESFERIAERRGRQIAKVAVARKILTLCFYGLRDGEIRCLNPDRASAMKVMAA

SEQ ID NO: 165703 - protein, 320 aa, unidentified
MMAQNDLIVVGIDVAKDKVDACIRALALRQTCPSTAQGHRKLVAWLRKHKVTKAVMEASGGYERDWARTLRQAGIEVRIVDPKRVRNFALSAGRLAKNDAIDAEMIAWFAETFSEAPSQTQDAAHEELQTLVKARLGLIDFRMRLVSQSEHAAPGLVQKAHVHILKSLASEIAKLEAAISAKVKSTPDFAERADIIESVPGFAETSSANLVAGMPELGQVSDEIAAALIGVAPYDDDSGKRRGERHIKGGRRWVRNAIYMPCVGAATQNNPVLKAYYQRLIAKGKEPKVALVACMRKLIIILNTMIARRQKWDPSRYAVS

SEQ ID NO: 165704 - protein, 320 aa, unidentified
MASRESLFIGIDVSKQTLDVAFGADPHAPRETIPYTDEGVQLLVTRLQRLQPTLIVLEATGGLERMVFAQLLQAGVPTARVQPRRVRALAHAEGRQAKTDRLDARLLARFAERVRPPHHQATDEQRASVRDLLVRREQVIQMRTAEINRLTAAAPNLRPGIQQHIDWLDQEIRALEQERDNEAERTDEVRRKRELLESVPGIGAITARNLLLRLPELGTIKRTEAAAFVGVAPYANQSGAQHKPRHISGGRRDVRSVLYMATLAATRRRLVRRAFDQRLCQAGKPRKVAIVAAMRKLLTILGAILRQQKPWDPAVHTSAP

SEQ ID NO: 165705 - protein, 411 aa, unidentified
MRLFVGDDWAEDHHDVELMDQAGRVLAKRRLPEGVAGMARLHELIGQQLGEDDQDAEVVIGIETDRGPWVAALAAAGYTVYAVNPLQASRYRERHGVSGAKSDGADAHMLTDMVRTDSHQLRAVAGDSADAEGIKVLARTHKTLIWERTRHVQRLRHQLREYFPAALEAFEDLDAGDTLELLGKAPDPARAARLTRAQISAALKRGRRRNIPDKATAIMAALRGPQLGQPPAVTAAYAATVRSLIAVITTLNEQVKALQGPVEENFGQHPDAEIYRSQPGMGSILGARVLAEFGDDPHRYADGKARKNYAATSPITRASGKKKIVAARFIHNNRLVDALNAQAFASLNASPGARAFYDELRARGIEHNDALRRLANRLVGILHGCLKTRTVYDEATAWSHRENLPQSSVAA

SEQ ID NO: 165706 - protein, 367 aa, unidentified
MKKISTAGVKQTKNFSDQKLTIGLDLGDRSSWYCVLDEAGEVVLEQRLSTTPKAVKEVFGGMPRSRIALETGMHSPWVSRVLSELGHEVIVAHARNVRLIGESRRKDDRFDARTLARLARIDPQLLCPVQHRSGQAQAHLMVIRARAGLVRARTSLINTARGLTKSYGERLRGCSPRNLNAEKARQLGPELQAALEPLLAAIESLSQRIYEYNQQIAKIAKESYPQVARLEQVKGVGTLIALTYILTLEDPQRFRKSRDVGCYVGLQPGRRNSGQSEPQLHISKEGDPYLRTLLVQGAHHILGPFGADSDLRRWGLKLAERGGKNGKKRAVIATARKLAVLLHRLWVSGEAYEPLRNSRAVVLPVAA

SEQ ID NO: 165707 - protein, 373 aa, unidentified
MSFTSDTILVALELSNSLWLVGTRMPGAQKSHMHRINAGDTAVLLSLLSGLQSRQRAEGIPTPIAVCFEAGRDGFWLHRLLTAHDIPTHVVEPTSILVNRRARRAKTDRLDAEGLLRVLAAYLGGDSQICSMVHVPTPDEEDGKRVHREREYLVQERTRIENRISALLATQGIRSRPSLRSWERDMAALETGDGRKLPRHLAAELNRLRRRLVLVRDLICELDTERDEHLATTSGDAITTKVTALSKIYGIGDNFAAVLAREIFYRHFGNRKQLASYVGLTPMPHQSGNVDKDRRIGRAGNARARKTLVQAAWLWLRYQPESELAAWFRQRVGELKGRTRRIAIVAMARKLLIALWRYTEAGEIPAGTIFRAA

SEQ ID NO: 165708 - protein, 338 aa, unidentified
MKLYGAIDLHSNNSVLMLIDRQDKVRFQGRLPNEASYILETLRPYRPQLQGLAVESTFNWYWLVDALQEAGYPVSLVNTAAVKQYEGLKFTDDASDARWLAHLLRLGILPQGYIYPKEERAVRDLLRKRAQMVRQRTTNLLSIGNLVQRNTGGKLAGGEIKQLDESAVDEMLPESDLGLAVKCNLRVMQCADAQVAVLERAVLERVKLKPAFKYLRTVPGIGQILALTIMLETGDIRRFGGVGNFASYCRCVDSKKLSNRKKKGEGNRKNGNRYLAWAYVEAANFAQRYDPSIRRFYQRKQAKTHPVVAIKTVAHKLARACYYIMRDQVPFDATKAFG

SEQ ID NO: 165709 - protein, 322 aa, unidentified
MKQFYLGIDVAKAKLDCALLLPNGKFRTKSSLPNTPKGFAELADWLNAQQAGLVHVCMEATGIYWEGIAEHMSNAGHTVSVVNPFQIKSFANACLVRSKTDKIDARLIARFCAERHPEPWQAPSASEQTLKALVLRLDALQAMRVQEINRTEVARDAVRDGILAHIDWLDGQIKALLRKIREHIDNDPDLKAKRELLESIPGVGEHTIALLLAFCVHPGRFRNARQAVAFAGLDPRQHESGSTVRGKPRLSKIGHRVLRKTLYMPAMVALYKTHWGQQFHQRLTSAGKAPMLIIGAMMRKLIHVAFGVLKSGLPFNAALHGA

SEQ ID NO: 165710 - protein, 344 aa, unidentified
MEVKRILYAGLDIHKTTCQASIYTTDGKTIKKGKITNKPDKIQDFFKEFTELTIAIEACANWEPVFEALEHAGHRVVLAHPLKTRMIAESKVKTDKVDAAILAHLLRTGFLPTSYIPTKKMRDLRNQVRQRITLGKYRGKFKNKICGELLRRGIPYEAGGAIFTAQGRRWLRSLNIPTITTYLTILEATMKEIDVCEQALRDQGKDNKNVRLLTTIPGIGNYSALLILSEIGDIHRFPREEKLFAYAGVIPSVHQSGDHKYHGRITKQGSKYLRWILTEAVRIHLIWTRKHETETTISQFYDRVRKSKPENVAAIAASRKLLQIIYHMLKYQDEFKGYRSLPRF

SEQ ID NO: 165711 - protein, 365 aa, unidentified
MEKISTVKTKGKKILKGQLTIGLDLGDRSSCYCVLDENGEIIREQKIPTTPEGMQQAFGKMARSRIAMETGTHSPWVSRVLTELGHEVIVAHAQKVRLIVKSRRKDDRLDARTLARLARIDPELLSPVQHRSAQAQLHLAEIRARAGLVSARTALVNAARGLVKSYGERLRKCGTQQFGQETTSGLSAGLREALEPLMQEVESLNERIKEYDRRIEKMAKETYPETELLKQVKGVGDLIATTYVLTVEDPHRFRKSRDAGCFVGLQPGRRNSGESEPQLHITKEGDEYLRTLLVQGAHYILGPFGEDSDLRRWGLKLSARGGKNAKKRAVVAVARKLAVLLHRLWVSGEVYEPLRNSQKAMTAAA

SEQ ID NO: 165712 - protein, 449 aa, unidentified
MMEPQEIEDQEHEQVLERVAAVDVAKASGMVCTRVPHQARAGKRRTRVWQVDATTNAVLELGEHLAAEGIEKVTLESTSDYWRIWFYLLEAAGLDVQLVRAQDVKQAPGRPKTDKLDAVWLAKLTERGMLRPSFVPPSEIRQLRDYTRLRTDLTRERTRHYCRLEKLLEDALIKVSAVASKLDTKSVRDMLEAMIAGERDAQVLASLARGRMRSKHDRLVQALTGKFDDHHAELARMLLDQIDALSAQIGTLTTRIGELIAAIPAAQGVDADGTTGPAAGQGEGAPVLPAVDRLDEVTGIGREAAQAIIAEIGLHMSIFPTPGHLVSWAKISPKTVQSGAKNRSGKTGKGNPYLKGVLGEAAAAAGKTDTFLGERYRRLARRRGKLKALVAIARSILVIIWHLLADRATRYQDLGAGYHASRIDKNRKTRNHVRQLEALGYTVALTQAA

SEQ ID NO: 165713 - protein, 322 aa, unidentified
MTHTTLFVGIDVAKAKFDVALLNAEGKYRSKVFPNTASECLRFLDWLAKHDALGAHLCMETTGIYGRGLAHFLAQQQLLVSVVNPAQTHAFGKTELTRAKTDKADARLIARYCQMHRPAPWAPPAEEIATLQALVQRLEDLLGLQTMENSRLEAAAGPARESVEAVLQFIQQQIEMVRLQIHIHIDQHPDLKSQKERLSSIPGIGDNTAATLLAFLSPLERFHTVKQVVAYAGLNPRIRQSGQWAGKSPIAKTGNVLLRKALYLPAVVAKRHNPVIAAFCDRLLARGKRPMQVVIAAMRRLLHLAFGVLKSEQPFDPNFGVA

SEQ ID NO: 165714 - protein, 428 aa, unidentified
MNESIPAASLEGVAAYIGIDWADQKHDVVLRSAAEPNKVEHRVIEQKPGALMEWVGQLQQRFGGHGQILVCLEQSRGALIYHLMGYEFFELYPVNPLQLARYRETFSPGGAKDDRPDAELLCELLYCHHDRLRAWKPDSELNRKLAFFNEDRREAVDQRTRLSNAIKSQLKVYFPLALELLNHDTSTILAADLLVRWPSLEALQKQRAPTLRKFFYGHNCRGEAEMLRRLELVQQAQALTQDLAVIEPAVFRVQMLARQLKSLLPDIAHYDQKIAELFAAHPDRFLFENLPGAGPALAPRLLSALGSDSNRWESAQEIATLYGVAPVRRASGKKSGKNASVHFRQACPKFLRQSFHEFAGCSIRYCCWARAYYEAQRAQGKGHHVALRALAFKWIRILFACWKQRIAYDPQRYLQALQQRGSPLANAC

SEQ ID NO: 165715 - protein, 420 aa, unidentified
MNKITISKKGQYVNSDVLVVGVDIGKGFHMAVARRRDGSFTKALKFSSDAVGFNNLKVWLDQWYVQDSFSRVLIGLESTGHYWMTLAFWLQNQGIEVVQVNPLHTHKAKDLYDNTPGKTDKKDARIIADLVSQGKFLNCIIPQGHYADLRYLVLLRNRLIKQRTRELNNMHRVLDVLFPEFTRVFKNLKTQSSLYLLRYYYTPALLLSCSHKRLAKRLGKISHGKIQLDKLTQLYELARSSVGITEGINGLRIMLFRGLLRYGQLAQEISALEDRLEELVCGLPETVYLRSVKGIGLVTVAVILGETGGLQHYSSAEEVIKLAGLNLYELSSGKHRGKRRITRRGRSLLRAGLYRAAVGMVRRGGSLHDFYQRLRDRGKYGAVALVAVACKLMRLLFALVRDQRYYVADYTYSNVISRVA

SEQ ID NO: 165716 - protein, 407 aa, unidentified
MQEATQHDAVDVFVGVDVDVDVDVGKGRHHAVALRRNGKRLYNKALPNDEVKLRALIAELKTHRRLLFVVDQPSTIGALPVAVARAEGVLVAYLPGLAMRRIADLHAGEAKTDARDAAIIAEAARSMPHTLRSLRLADEQLAELTMLCGFDDDLAAQLTQTSNRIRGLLTQIHPALERVLGPRLDHPAVLDLLERYPSPSALAAANEKTLANRLTKLAPRLGKNLAAEIVQVLNEQAVIVPGTQAATIVMPRLAQQLAALRKQRDEIAAEVERLVLAHPLWPVLTSMPGVGVRTAARRLTEAAPKAFATAAHLAAYAGLAPVTRRSDSSIRGEHPSRRGNKVLKRALFLSAFAALRDPVSRAYYSCKIQQGKRHNQALIALARRRCDVLFAMLRDGTIYPPKSAPDA

SEQ ID NO: 165717 - protein, 357 aa, unidentified
MEQFIGCDAHKKFSLFVAMNEEGEYGRAIRVGHDREVFRAFLEDLPPGSQIALETSGSYYWLVDEMERAGHRPQLAHALTAKRRMEGRHKTDERDARGLAMLLRNGTLPQVWIPPAELRDQREMLRLRMSLVRMKTQLKNRIHGVLLRYNLCIQASDLYGDQGRAELLSRKGELPGWSRESVLEQLQMVDSVESQIVDCEKQLEAMLYPNAERDLLKTLPCVGKVLSAVIALEIGDVRRFGEVKFLVSYAGLVPSARESAERKRQGRCPRDCNVYLKWAFVEAANLIASKQKKWPERHVVRLYQRVKQNTKMHGKAAMAVARHLAEASYWILTKQEVYREPKSKAASSFVDARVSAR

SEQ ID NO: 165718 - protein, 397 aa, unidentified
MLYLAIDQHKHHLTINIRNEQGDVMQKGQISTNHADIDDFFVAFAKKARKHRGYMAIIEVCGFNDWLLEKLTKTRCSEIVVIQPDNSAVNKTDKRDANALGELLWNNRKRLQGGQRPNGIRRIFPADPADAQIRQLANFRQHLVKQRTRIVNKIKGIINKHNMAQDAPTEDYDTKKFRKWITSVPLPVVDRFEIDRHIQTWELYDKQILEVESELVKRSEARATDVFRLKAIPGISAMGAITLLSRIGDVKRFKNPDALANYFGLTPGCHNTAGKHCVGGITKRGNAVARHVLNFAVNHVIRKDPAMKEWHKKIKKRRGAKTARVAVMRRLATIIWHMLRWGKPYQFRYDPPTPAPKRSDLRSPKEVFQGISNRNHSQQRGQGKTPLKCRGKTKACP

SEQ ID NO: 165719 - protein, 333 aa, unidentified
MVEGTEGSHHKEGTTKMSKHSMVCAGIDTGKHKLDVALDGHPEQMQVDNTPDGHRVLSTWLRKHRAQRIGIEASGGYEQAVVATLRRNGFVVIVFQPAQVRAYAKFHLQRAKNDKIDAALIALCSAATKTVHAPPDPRLVPFAASLTMIEQITEDIARLKTRRESCRDQRLRRFWNEEIGRLKLLMRGELKQLIAAIRQHPDFAEQLDLIASVEGIGHRTAVAILVRMPEIGSLTREEAAALAGLAPYDDDSGKRLGERHIAGGRERLRTSLYAASLPAAFNWNPQIIALYRRLTAAGKSHKAALVACARKLLIFANTVVARGTPWVSKTATS

SEQ ID NO: 165720 - protein, 340 aa, unidentified
MTVIIGIDPHKLSHVACAIDNNEHELAQLSVRAGQRQLDQLLGWAQPFSERRWAIESAGGLGYLLAQQLVGAGERVVDVPATLSSRVRLLGIGRSNKNDPNDARAVAVAALRAPSLAVVRREDHITVLRLLAKAHLDAGRARSRACCRLHALARELVAGGIRKEVVVAQAESLLAAIEPTGAAQHQRLELAGELLDEIRALDTKLKCSKTRIATAVVASATTVTDLYGVGPIIAAMLIGYSGDVRRFPTAGHYAAYNGTAPIELSSAGRTVHRLSRRGNRTLNHAIHIVAVTQIRNLDSEGRAYYDTKIAAGKTRREALRALKRRISDRVYRQLVADARK

SEQ ID NO: 165721 - protein, 337 aa, unidentified
MRYVGVDLHKTQFSVCWKEEDGSDKFERYAMSAEGLRRFRERLDGETEVGVEATANSKYFYDQIVGSVNRVRVINPLQFKIISESVKKTDREDSRVIAEYLSKGLLPEVRVMEKERRELKSLIQTRDKLVKLRSSLKNKIHGILLEHGIQSKREMFSSQKALQKVLEAPVSETARFELEVIVKQINSLTEGIKELEGKIKDKGKGLKGQGNLQSITGIGELSSTIILCTIGDIADFENKKKLAAYAGLVPRVYESNETVRHGRITKRGDKIFRTTLVQVTLIAIKYNWYLRSFYNRLKTKKGSGKAIIATARKMLEIIYDTLMNEWVFEDFNNFVLA

SEQ ID NO: 165722 - protein, 420 aa, unidentified
MPNIEIGVDSMVKENFIYVGIDLHKETHTAVMIDCYNQKLGEITFPNRPAAFPKLVTKVKKCNTDGKEVVYGLENAYGYGRALAVWLIDKGYLVKDVNTAISHRQAKHRGAMYRKSDSDDAKAIALATLNMLDKLPDACPNDAYWSLGQLVHRRDNIMKQRTRLVNQLHEQLCIAYPSYKQFFNDISRPTALYFWEHYPSRKYLKGKSVEDLRAELVPVSHNKCSTKTCEKILDAVASDKVKNNAYQDARDMVTLSIVSDLQHYDSQLTEVDKMLEQMYKMLGCTLTTIPGVNVITAVKILAEIGDIKRFSNANKLAQFAGIAPLHLSSSGKGKDLATKQGNRRLQATIYFLAIQMVQISSKGTPRNPVVRAYYEKRKAEGKTSQQALICISRRLISIIYGMLKSGTEYRMPVVENAGEK

SEQ ID NO: 165723 - protein, 414 aa, unidentified
MELLHQRCAGLDIGKKDLKACVRTPSPSGKRSRRQEIRTFATTTNALLELRDWLVAEKVTLVVMEATGDYWRGAFYLLEDCLNVILVNAAHAKGLPGRKTDVSDAAWLSQMGECGLLKASFVPPEPIRQLRDLTRYRATLAAERTREASRLEKELEDAGIKLSSVATDILGASGRAMLTALIEGERDVHVLAEMAKARMRPKIPQLVEALTGNFGEHHAFLCRLHLERIDQLSSAILELSTRIEEQMRPFSRQLEQLQTIPGVGQATAEVIIAETGGDMSRFRTPEHLASWAGICPGHHESAGKRKSGKTRHGNRWLGGALGTAAMAASRTKNKTYLGARYQRLVPRLGKKKAIVAVEHSILTATWHMLTHDVDYHDLGGDYFTRRDPTRAMRNIIRQANALGFTVRFEAIQTA

SEQ ID NO: 165724 - protein, 408 aa, unidentified
MEPIYTSCCGLDVHKRSIQACIRRLGPDGRIHQETRSFGTMTRDILEMADWLAVAGVTHVTMESTGVYWKPIYNLLEGRFTLLLVNARHVKNVPGRKTDVKDCQWLAQLLQCGLLKGSFIPPRPQRELRELTRHRTQLVAEKTRAANRIQKVLEDANIKLASVASDILGASGRDMLRALIAGEQDPAKLADLARRQLRSKIPQLGLALEGQVTEHHRFVLGELLDHLEYLESQIERFTRRIEEVSHPFASAIDLVTQVTGFEQRAGQNVVAEIGATMEPFPSEHHLASWSGVCPGSNESGGKRKSGKTSKGNRWLRSALVQAAWSAVRQKDSYFQAQYRRLAARRGKKRAILAVAHSLLTVIYHMLKTGSTFKDLGGDYFDKLNKNRLLPYLVRRIKDLGYQVTLEAA

SEQ ID NO: 165725 - protein, 435 aa, unidentified
MGLIGAATVVGGWLRLGGLPGGSGLTYEPADTLLCCLVNDASAGSSGGPGTHRSGGATSVGLLRQFDVVGVRRPGGACHPLPICREKGMAMTMVSVGSITGGVDTHLDVHVAAALDPIGGLFGVESFDTTRAGYEALLVWLLSFGPVERVGVEGTSSYGTGLARFLMDQEIEVIEVDRPNRQERSRRGKSDPIDAVEAARAALSGRATGLAKSKDGPVEAIRALLVARRSARNHRISALVQMRHLVFTAPQRLRERFFGLSKTQLVNQAAALRPRDTSDVVTYATKVALKLLAQRVQLLDAQIKQIRTMLEALINTAAPDLLSVYGVGVDNAAILLVAAGDNPQRLRSEAAFAHLCGVAPLPASSGKVIRHRLNRGGNRQANHALYQTVLSRLAADPETKRYVERRTKEGKSIGETVRMLKRYVAREVFKHLPAG

SEQ ID NO: 165726 - protein, 351 aa, unidentified
MTSLQQIAEVVIGVDTHVHTHSAAVVDARTGGVLAEITVTADADGYQELIDFAGQHSGQRAWAIEGTGGHGNGLARVLAQRDEPVIELDRPERAKRRNGAKSDPLDAVRAAREALSRDNLGTPRSHGDRQALSVLLAARQSAVQGAGDAQRQLFSLVIAAPETLRKRFRGHKLPAMTRLAAQLRGSPRWDTETATTAAVLRALARRALDLAAEAAQHEKDIRAIVTAWRPDLLTQRGVGPITAAVILCAWSHPGRVRSEAAFAMLGGVAPIPADSGSGTAPKRFRLNRYGDRQLNRALHTITLSRLRYDPTTQAYAKRRTAEGKTPRDIKRCLKRYIARDLYRLLEHPAAT

SEQ ID NO: 165727 - protein, 341 aa, unidentified
MAHCIGIDLHKATSYVTTVDETGRILDQRNLRNEPETLRAYFAAQPADARLVVEATGHWMWLYELLEDRYPDLVLAHPLKTKAIASARIKTDKLDSTVLAQLLRADLIPTAYIPPRAVRDTRELLRYRAALVTQRTVLKNRIAAIVTKTGLKLPTKTAVGVKSRRVLATAPVRPCDRAALDGWVRLLEALTTEIQQATATIEAQAQADPQAQRLQTIPGIGPYSALLILSEIGDVHRFPDSRHLCSYAGLVPSVHASGGKTRLGRITKQGSKWLRWILVETAVHAVNGAPQFRSLYWRVRRKHGANTARVAVARAVLKTIYAMLKTEQVFEARSRRVAVAG

SEQ ID NO: 165728 - protein, 368 aa, unidentified
MANLSNWIGIDDHADKWSIAHYEGQKNAPSREWELQPGDSGYRKLIGWLKELKGPVRVAYEAGPCGYELYRRLRKSGIECAVAAPSLTPRKPGDRVKTNRRDAQKLARLLRAGELTLITVPDARQEAVRDLIRAREAANKDLLRARHQLSKLLLRYGYRYQQGRAWTKRYWEWVNQVQLSEECSRVVVHQQIVVIEQRLEVVAEYDRHIEKIGQSAQYAPMVAALSVLRGVDRLTAMTIAAELGDLRRFATAPQLMAALGLVPSEYSTGDKTMRMAITKTGNAHVRRVLVEAAWHYQRFANRTGPTVRRRRAGQPRESVAIAERCDARLHRRFIRLTSRGKRSTVAAVAVARELAGFIWAIGQDIHQR

SEQ ID NO: 165729 - protein, 446 aa, unidentified
MSKGAKKSKKGNVSMPLVHVNAAGIDIGDSLHVVAVPSGRDPVNVRRFGAFTEDLENIANWLEECSIDTVAMESTGVYWKNLFAVLIERGIDVYLVNAKHTRNITGKKDDESDAEWIQKLHSCGLLKSCFLPDDRTETLRTLVRHRRSLTQDSSRYVLRMQKALELMNIKIHTVIADITGKTGIAILKAIIGGERNAQNFLPLVDNRIKANPETILKSLQGHWREEHLFLLKQCYNLYQHMQLQIELCEREIEKVLQLMANVKDKEVAQQGVGKKRKSKNQPRFNTVSYLKGIHKVDVTQIYGISEISALEILSETGSDLSKWATENRFVSWLNLCPNNKITGGKLISSQLLKKKPNAACQAFRMAANSLKQSQHWLGDYFRRMRSKGGQKYAIVATAHKLAIIYYKMVRYKEPFIPFNLDKYREKYRLARIKYLEKVLHQLKQAA

SEQ ID NO: 165730 - protein, 322 aa, unidentified
MSQPNPLCVGVDISKATLDIAANSDIAQFTVSNDSDGFDAIIAELRKHTVALVLMEATGGLEAAVACSIQTEGFAVAVVNPRQARDFARAMGYLAKTDRIDARVLAQMAEVINRHPERERFIRVLPDAERQVLAAMVVRRRQLIAMLVAERNRLHPAHPQSRKSINTIIKALEDELARIDEDMNDHIRDHFKELAERLSSIKGVGTMTVAALLAEVPELGSLSRREISALVGVAPVNRDSGTMRGRRTIFGGRAGVRTALYMAALVATRFNPVIKDFYTRPLAAGKAKKVALVACMRKLLTILNAMLRKNEEWNESYHHVAP

SEQ ID NO: 165731 - protein, 411 aa, unidentified
MNNTLFVGIDISKRSNVATFMNCEGKVVGRLAFSNNGSGADRLVAKILSYYEKGDFEAIRIGMENTSVYSKKLVWFLYEHEALNEHKLSIIPLNAIMVANYKKSFLDMDKDDITDSFAIADFIRIRPGLLPFKLDDRQEALKIMTRSRYNYVQALSRMKSQFLTRLFLSFSEMEAGKPFYSIFSKTSLSLLEEEFTLDELAEKPIPELVEFLQEKGGGKFQNPEEIAKVLKKAASSSYRVPAMVRESLNRTMASDMEIMRILENEIHNCDKNIEKLMKSVPAILVSIPGIGPVLAAGIMSEIGDISRFQKQESLGKMAGFKWKRNQSGKKESEDKAAVLSGNKKLRYYLVEAANRVRIHDPVFEAYYRKKYAESKTHAHKRALILTARKLVRVIFYLLKENKLYKPDVGIS

SEQ ID NO: 165732 - protein, 373 aa, unidentified
MEIERTFVGLDVHARSVVACALDDRTGELSKARLVPENETVLAWLQQLAGPVAVVYEAGPTGYGLARFLTGRGVRCVIAAPSKLHRPSGDRVKTDAKDALLLARLLRLGEITPVTVPSLAQEAARDLVRVREDVRADLMRARHRTSKLLLRQGIVWSGGTAWTGAHEQWLGQQRFELAGLQAAYDTTLETVLLATSRRARLDKAIVEMAHEPQWWPTVSRLQCLRGVSTLTAFGLAVEVGDWTRFSGSTIGAFLGLVPTESSSGEGRQQGSITKTGNTHARRLLVEAAWHHRRPYRPTKTMRDRWDLAPAAARARGHAGNQRLHERWVRFNERKKRTVIANVAVARELAGWCWSLATLTEDTPPARGPRGGRR

SEQ ID NO: 165733 - protein, 343 aa, unidentified
MQTITTIGFDIAKSVFQVHGVDAVGQVIVRRQLKRRQVIEFFQKLPPCLVGIEACASSHYWSRELQALGHRVRLMPPAYVKPYVKRQKNDMADAEAICEAVTRASMRFVPTKTPEQQSGLILHRTRHLFIRQQTSVINAIRAHLAEFGVIAPVGRKGVEELLRVVADPNDKRVPEVVRACVAALGSQLLSLKKQILDFDRMIMAWHRSNQTSKRLNCIPGVGPLLATALVASVADPKTFRSGRNFSAWIGLVPKQHSSGGRDRLGSISKQGDRYLRSLFVAGALAVIRYAKIHGSKHRPWLTALLARRPTKLAAIALANKLARMAWAMMATGARYNYPASLRV

SEQ ID NO: 165734 - protein, 339 aa, unidentified
MAVYAGIDLHSTNNYLGIINENDERLFKKRLPNDMETILSALHPFREQLSGIVVESTYNWYWLVDGLQDHGYTVHLANPAAIKQYEGLKHTDDRWDSFWLAHLFRLNILPEGYIYPKEARPVRDLLRRRMMLVKQRVTHILSLQSMITRNLGIKMPGNEIKKLREETIETLFDNAHLILSATNSLSIMRFLQEKIRLIERDVLSHVRIRKEFEPLLTIPGIGTILGLTIMLEVGDINRFPQVGDYSSYCRCVKSERLSNGKKKGAGNRKNGNKYLSWAYVEAANFAIRRSPSAKRFYQRKKAQTNGIVAIKALSNKMARASYFIMRDRVPFDHEKLFRS

SEQ ID NO: 165735 - protein, 340 aa, unidentified
MRFYTKQHRYYCGIDLHARSMYVCVLDWQGEIVLHKNMPCTPDLFLKAIAPYREDMAVAVECIFTWYWLADLCGKENIPFVLGHALYMKAIHGGKAKNDKIDAHKIAVLLRGGMLPMAYVYPALMRSTRDLLRRRMHLMRKRSELLAHIQNTNSQYCLPQFGKKIAYKANRQGVCEHFTDSSVRKSMEMDLSLIDHYDKLLTEVELYITKTAKVHNVNAFFRLRSVHGIGKILALVILYEIHDINRFPTVQDFVSYARLVKCAKESAGKRHGTSGKKIGNVHLKWAFSEASVLFLRGNPAAQRYLDRLTSKHGKPKRYRSSLTNWAGRSITCLRGNKLST

SEQ ID NO: 165736 - protein, 371 aa, unidentified
MYTIVYVGMDVHKESYTLCCYSYDRDKVEFKQTIPSDYRLVLKYMERVREQYEGEVKFVCGYEAGCLGYSLYHQLTDHAVDCKILAPTTMAITNTNRIKTDRRDAGNIARCLAFHTYSEVYVPDDKDNAIKEYIRMRDDQKLMLKKIKQQILAFVLRKGKRFEGGKTYWTIAHLKWLKNLELEGLDKETLSEYMITYEYLTDKIQRLDERIQSLAEGERYCEQVQNMSCLLGIKTHTALSLLVEIGDFDRFEKASKFAAFLGLVPGENTTSDNVIRLSITKAGNSHLRRLLVEAAQSYTRGTIGHKSQDLKRRQSKCSPEVIAYADKANERLRRKFYRMTLQKNINRNVAATAIARELACFIWGMNTGNIA

SEQ ID NO: 165737 - protein, 404 aa, unidentified
MHKKMLAVVVRVERGEQVEYVKRKFGATRAEILHLEAWLRAQGVSEVVMESTAQYWRPVWYGLEPHFKLHLTHPLKTRAPRGRKSDFRDAQRLADRWSSGDRQDSFIPGAEQRSWRWLTRTRVQLRKKLCIIHSHVEGLLEQGGIKLSSVAVASDLFGVSGWAMLEHIAKGVTDVDVLVKLARGVLRKKDSALKEALAGRLEPIYQLLLRQHMEQVRLLRKQIEELNKAIAEAMKYHISALLRLSKMPGVDLYSGQELLAEIGPKAAAFPSAEQFASWVGVCPGSQESAGVNYSRRSAKGNRYLRRLLCQVAWAAIHTKQSFFAGLFARLKPRVDGKGAAWAVAHRIAKVIWLVLHEEVEYKEKGPALPNERTLVRKLRRMVKEFGQLGLDVRALLEQQLANPA

SEQ ID NO: 165738 - protein, 406 aa, unidentified
MELIAIHKCVIGLDVHQAQITACAIIEDSNGATRIEQQQFGAFKRDRLALAEWAASFLPDEVVMESTGIYWKSPYAALEKVGIQAQVVNARHVKQVPGRKTDVGDAQWLAMLARAGLLRGSFVPPAKLRELRLISRHRQKLVAQLSSEKNRMHKVLTDGGIRLGVVVSDIHGQSARAMIKAIITKRPIHEVLDLAHRRLKASHEELFNALQGDLTESHLFVLTELMQHIEELETRIARFDLRLLDELADQKNALELLQTLPGIDLIGAAMLLVEIGSNMDVFGSADRLASWVGICPGNNESAGKRKSGRVRKGNHYVRRLLCEFAHAASRTKSAFQSKFKSLIVRRGHKRSIIALAHKMLRTIFFMLKRGKHYRDSATDYEALSVQRNAPRWIKALTRFGFLPASS

SEQ ID NO: 165739 - protein, 400 aa, unidentified
MFQTIDQSKKCLNAFEQDSTLVAVVELSQKSWLVAGIVPGVDRHPLKKFDADENRLLALIQRWKQEAIKAGREVKRIVVAFEAGRDGFWLARWLQARGIEVCVIHPTSVSVPREQRRAKTDRLDTELLKRATLGWLRGEPDHCRMVAIPTLEEEDAKRSNREHQYLVGERTRLINRLKAALARLGVRNFNPKLRKASERLRALVTPEGKPLPPNTLAEMERDMQRLQFVKQQIKAIEQTRFERLKKAPKTRLNMMVLLVARVLGMGIETADMLVHEVLWRDLRDRRAVARYAGLTGAPDESGARRREKGLARAGNARVRRGMIEFAWRFVRFQKNSTLAQWFRAHRRRPRSDPEDHDRGASSQAAHCAVAARRDRRDTHQSHAASGRVSFGLLVSCRSSI

SEQ ID NO: 165740 - protein, 319 aa, unidentified
MSKRVLGIDAAKKKLDVALMFDGKVLLKKFDNIPKGFKLLAGWLASLHIEQVHACLEATGPYSEAVAEFLHESGHRVSVVNPFRIKSFANSDLQRNKTDEADARTIAAFCLAKDPDDWQPVAPEIKQLRDLTRRIEALERMLGVEKNRLEMAPAATRPSIDRMIDNLSKEIDAVQRLIKDHINKHPDLKQQSELLQTIPGIGEKTARLLLGEIEFRGFDSARALAAHAGVTPRRFQSGSSLNRTQLSKLGNGRIRKALYFPAIVAVKCNEVIKLFAQRLSRNGKTPMQIVCASMRKLLHIAFGVIKHNRPFDPDLAFHI

SEQ ID NO: 165741 - protein, 375 aa, unidentified
MRPVVAIDAHKASCTYVVRHWDQTHAGPRRIPSTRDALTKLAHAYPEHDFVLEVCSVHEWMMDLFRAEGIHAMAVIPPKKGPVGKKSDDDDSTRLAKKHQAGELEEVYVAVPEIRVMRDQVRQHEFLKRKWVSVNNHIQHALNRWNFHPTASDSNRQVGIYSADTRHQILSRFPHLDALFEVADVLDQRMRTSRKRIEELGKSIPEVQRLQSVPGFGPIITLALYTQIVDITRFDRAEQLVRYMGLDPVHGSSGDSHWDGHRISKKGTSFIRGLLAQGAWSHVTFCPDSDISVNYRRLVLRGKSKQQALMMVMRRLVKTSFWLLKENRDFTMNGPARSAICRTPRGAALTSVEMEAPAAMRRMQPLAGTQLGCRE

SEQ ID NO: 165742 - protein, 484 aa, unidentified
MLMLGTPFETTYTAILMRCGLCRITLFFGMFSGLFDFFERHLCLENLIYIAAQSCLMKGALFMNHPKMRYTYVGIDSHKDTHTAVFIDCFFEKLGQLQFSNLPSSFDGFLRQAQRFLTPDTTFMFGLEDISSYGRMLTVFLKNQGLQVKHVNALLVARERKNQSVVQKTDSVDAECAARVLLSKFSVLPDADTQDLYWVLRALVARRDALVKQRAMAKNQLHTFITQHYPDYRRFFVNIDSKTALTFFMRYPSPALLNSTTVEELTAFLQDIGGAGNYSLAFAKRLLASLQDTTVQHQEVRDSVVISVIRQLRYIMEEIEQLEEALINFLPKFNCTLTSMSGIDTVTAARMLAYIGDIRKFTSSAKLARYAGIAPVPYSSGKKDTQYANERGNRQLNSLFYNLAVRLCYATGPSRKVMNSFFYDYYNRKISEGKTKAQALKCAQRRLVNIIWTMLTNGEEYVSPPLFDLPDKEPNEECKLGEVV

SEQ ID NO: 165743 - protein, 369 aa, unidentified
MKDYITVVGLDVHKDSIEVALADTFGNREIRHYGKIGGDMASLDKAVRKLSRGSRLEFVYEAGPCGYEIYRHLKKQGYQCAVVAPSMIPRRSGNRIKNDSRDAEALARLYRAGELTTVYVPQEEDEAMRDLIRGRQDAVKGLRTVRQQLGAFLLRHGIRYGGKTTWGPSHTRWLADVSMAHPAQQLALQEYINAVRERTDRVERMTGEILKFLPQWRMAPVVEALQALRGVAPIVAVTVVAEVGDMRRFENPRQLMAYLGLVPSEHSSGSTVSRGGITKTGNTHARRVLVEAAQTYSYSARMSRPLLKRQEGLAQPIRDIAWKAQVRLCGRFRRLMGRGKSRNTVIAATARELAGFMWAIAHQVKTPTV

SEQ ID NO: 165744 - protein, 343 aa, unidentified
MDTYIGLDVSLREISVCMVDEAGAIQLERTVAADPDAIAALVHAQASSVRRVGMECGPTSVWLWRELARRGLPVICVDARHPKAALSMQINKSDRNDAAGIARIMQTGWYREVQVKSPHSHAIRGLLNSRSLLVKVQRDLENQVRGLLKSAGLIVGRAKDGVFSARTKYLLAAHIDLAAIALPLLEAREAIHQQLVQLERRVRQLAKEHRQTSAFMTVPGVGPMTALAFMATVDDPTRFRRARSVGAYVGLTPRRYASGEVDWTGRISKCGDTMLRTYLFEAAGVLLTRVQKWCALKAWGLRLAKRSGMKKARTAVARKLAIILLRMWRDGTQFHWTAAPAGS

SEQ ID NO: 165745 - protein, 573 aa, unidentified
MSRLSWQLRDAALGYASRGIPVLPLHYPLPHHRDLQALTSDHPLPSPAVGTGCSCRDPGCGQIGKHPLGSLAPHGVKDATTNRARILAWWTRHPQANIGLATGHLFDVLDIDGPTGKRAIRQLAAAHGLASSGPLVRTGGGGWHFCEGEQGRCARRRPRPGLTLGTSGVLPSDRSVDQIPGTPPGATSADGVTSEEPGIGPRRSTVRRRAVAAFLATHRAGRDDMASLPAVAPQITVGVDSHKDVHVAAAVDQVGRVLGTIWVPTTTRGSAQLLGWATRLGAVQRFGIEGTGSFAAGLSRWLQQQGYQVVEVNRPNRQARRRRGKSDPVDAEAAARAVLAGEATTPAKTANGTVEMLRVLRVARRSAIKARGQAANQLHSLLVTAPDPLRQQLRGLPLARLVQTAAAFRPGPLTDPQAATKFALRELARRYQLLTAELHRLDAELAALAPKAAPRLLTRRGVGAQVASALLVVAGDNRGRLRSEAAFSMLCGSSPLEASSGKTIRHRLNRGGDRDANNALWTIAMTRLSCDERTQRYLARRTAEGKSKREIIRCLKRYIAREVYRDITAAVLS

SEQ ID NO: 165746 - protein, 321 aa, unidentified
MTYVGIDVSKATFVVAYSSAKTSRTRTFKNTVKGVHEFIQTISPATHHCVLEATGNYSALLVYLLSEAGVTVSLENPLKIKNFARVMLTVIKTDEIDARLIALYGEKMQPAPYRLHNDAILVLKQKRTVLRQLKKQLVATCNLKGSMEVLPFFDPKCKKTIEKTIAFLEKQIKGMEEELASLAQGEYKKQMDLLTSIKGIGVTLATALIVATGGFTYFDNAKQLTRYLGLSPTYQQSGTSVNVKGHINRNGDSNLRSQLYVAAFSSLRCNTECKACFDRLKSNGKPGKVAVIAVANKLVRQAFAVVTQGKPYVDGFKSEKP

SEQ ID NO: 165747 - protein, 321 aa, unidentified
MQEWYLGIDVAKKKLDCALRQPDGKHKHKVFDNAPNGFKELQQWICSFDVPQLHVCMEATGVYWEAVAEYLANYQYVVSIVNPMQIKAFGASRLVRTKTDKVDAKLIADFCKENRPEPWKAPSLQEQELRAMVLRLDALQEIRTQESNRLDVAREAVKDGIASHIVWLDEEIANLSKKIRDHIDSDPDLKDRKALLDSIPGVGERTIALLLAFSLAPGRFANARQVTAYAGLDPRHHESGSSVQGKTRISRVGHNLIRKGLYMPAMVTLYRTNWGKQFFARLSSAGKKPMVIIVAMMRKLLHVAFGVLKSGQKFNPDLHVA

SEQ ID NO: 165748 - protein, 336 aa, unidentified
MEKKSFKETVGIDISKDVLDVTLHLAKLHHQFSNHLKGFRELLKWIKAHSGYPLEQVLICFEHTGMYSLPLATFLSKNKIAYVMESSLQIKRSLGIARGKNDKIDSRRIAQYAYMRRDSLKIYQLPSASLQKLQELLSLRERLVKQRNGFKSALKSQKQMLTRKNNPLIFSVQEKMIEQLSIQIKAIEKEMKSIIEADPELKSIYKLVISVKGIGFIIGTHLLVNTQCFTRFENARQYACYCGVAPFEHSSGTSIRGKTKVSHYANKKIKSLFDLAARTAIQNDPELKYYYESRVEKGKSKMSVLNAVRNKLVHRVFAVVKRGTPFVPLFRPNVAA

SEQ ID NO: 165749 - protein, 412 aa, unidentified
MDIYGGIDWAEDHHDIALVNRDGQLLARRRISDDAAGLAQLLALLAEHGDTAGDPVPVAIETPRGLLVACLRATGRAVYPINPMAVARYRDRHSVAGRKSDHGDSFVLANVLRTDIAMHRPLPADTELAQAIAVLARAQQDAVWDRTQAHNRLRSHLREYFPGFLAAFASAKGGIMRPEARTILAAAPTPADAAKLTLTQLRGLLKRAGRSRSLDAEATRLRDAFRVPQMRQLPLVEQAMGRQAIALLGQLDAACTSAGDLEQAVTESFNQHPDAGIITSFPGLGPLTGARVLAETGDDRSRFQDAKGLKAYAGAAPITRASGKSRSVTHRRVKNNRLASAGYIWAFSALTASPGARARYDRRKDAGDRHAAAQRNLFGRMLGCLWHCLITGQEYDETIAFPVPAKKLPQAA

SEQ ID NO: 165750 - protein, 432 aa, unidentified
MKYKLKEKQNQRITRINEKTLVVGADIAKKIHVARAIDFRGIELGKECNFSNDQEGLMKLTTWMKDLQQVQDKTEIVFGVEPTGHYWFPLAAFLQDEGIKVVLVNPHHVNKSKELEDNSQTKSDYKDAKVIADLIRNGHYSETNLPTAAFADLRILMNLREKLVESSNQVKARIHNWLDRFFPEYPRVFKDWTGKASLMTLHQFPFPQDIASIGARGVLVHWKTEIKQGVGIKRAEKLYEAATRSIGLTEGIVAARIELITLLQQYKLYNEQIETMIEHVISILDEIPGTAQMLSIPGVGITTVAGFLAEVGDLSKYDHAQQIIRLAGLNLTENSSGIRKGQTGISKRGRSRLRGLLFRCILPMVAKNPEFKALHKHFTTRSQNPLKKKQSLIALCCKLIRVLFTLGTKQKEYNANDVLGPVRLAQIQQNAA

SEQ ID NO: 165751 - protein, 337 aa, unidentified
MDYFAGLDISMDETRICVLDREGAVVYEGKSASTAEAIGDELAKAPSCRRTVFETGRMAPILFHSLSQLGLPVVCVESRQAYQALKSLATHKTDRNDARGLAHLARTGFFKPVHVKSLSAHAVRSLIIARKKLVGQRVTLENQIRGLAVVFGVRLPRALTTAFIDQALKASEGVAGLSAAMRGLIAARTAVMTAVAAIDADIRRMTGASEACRRLMTIPGVGRLTALAFVAAIDDPSRIRRSRDVGAYLGLVPKRYQSGEVDYVGGISKRGDRRVRTLLYEAANVMLTRTKGQLKLKDWAFAIARRSSMRKARVALARRLAIIMHAMLRDGTEFVAA

SEQ ID NO: 165752 - protein, 344 aa, unidentified
MDHFAGLDVSVKETSVCIVDDTGRIVREVKVASEPEALLQVLGNPAYRFKRIGLEAGPLSQWLFSALAEAGLPVICVETRHMRAVLKAQINKTDRNDARGIAQMMRAGLYRPVHVKTLRSQKLRMLLTHRKLLQSKAIAIENDLRGTLRNFGLKVGMVGKVRFETRIRELVENLPDLAILVEPLLIVRRTLREQFCILHRRLLAIVRDDEVCRRLMTTPGVGPVVSLTYRATVDAPARFRRSKSVGAVFGLTCAKYQSGEVDWSGRISRCGDEMMRVMLYEAAQAMMRSKKWSWLKAWAMQIARRRGMKKAIVALARRLAVIMHRIWVDGTEFRWTREQAVAAA

SEQ ID NO: 165753 - protein, 355 aa, unidentified
MNAIKYIGMDVHLATISIAVLNAMGKLIMEVTIATEAQALLDFIRGLSGTLQVTFEEGTSAHWLYTLLEPHVAKVVVCDPRQNPRRLGEKKSDRLDARKLAEGLRLGALKPVYHGNSLGAALKELVRSYLTLVSDTGRVMNRLKALYRARGIRCAGTRVYSSRFRHQWLAQLSEPGARGRAERLYKQMDLLMPLRQEARAAMLAESRKHPAHKILCSIPAIGPVRAAILMALIQTPFRFRGKRPLWTYAGLALVTRTSADYQMVDGQVTRARKPALVLGLNANHNHTLKGIFKDAAASALAHPGPFKDFYTTRVAQGMKPELARLTLARKIAAIVLTLWKKGECFNAEHVEARAA

SEQ ID NO: 165754 - protein, 310 aa, unidentified
MDAIYVGIDVSKDRLDVHVRPTGEAYAVSRDGKGLEELIRRVAGLSPALVAVEATGGYETIVAAAIAGSGLPLAVVNPAQVRHFAQAIGKRAKTDPVDAAVIAHFAEATKPEPRSVPDEQAQLLCDLVTRRRQIIEMIVAEKQREKRAINKRVRKSIARLIAVLEKELSAVDTDIDDLVRGSPVWREKENLLASVPGIGSITARILLAELPELGSLDRRCIASLAGLAPYTRQSGRWRGKSMIAGGRGPVRSALFICAMVARRYNPSLKAFYERLLAAGKPKMVALIAVARKLLTILNAILRDNKPWQSA

SEQ ID NO: 165755 - protein, 344 aa, unidentified
MPIITVGIDLAKAVFAVHGVDEAGNATLVKPKVARDQLVPLIAQLPPCLIGMEACSGAHHWARVFAEHGHTVKLMAPKLVSPYRMSGKRGKNDAADAAAICEAVTRPSMRFVPVKDEHQQATLCLHRTRQGFIEERTSTYNRLRGLLSEFGVVLPQSPERLRKEIGPCLDTLPGWARRCMSELLEHTSHIEDRLVELDRAINQIAREDDRSRRLLQLRGVGSTTASALVASIGDGHDFRNGRQVAAWLGLTPSQYSSGGKQRLGSITKAGDAYLRSLLVLGARSVMANLGNKQDPLSRWIRNLMERRGYWRAAVAIAAKNARMAWAVLHYGDTFKPEQAEPTGA

SEQ ID NO: 165756 - protein, 351 aa, unidentified
MSKVDDVDLTVGVDTHRDTHTAAVCDARGRVVAQLQVPSTPGGYGELLTWACAVAAGRQLAWAVEGTRHYGLGLARHLAAAGQHVAEIDSTRHVGKRRAGKSDPIDAVRAARELLARPRAGQMRADGDREALRLLMIDRDNAVQSGKTARTVLTSVIVTAPAVLREELRHLPAVRRVRACAALACPPGADQLTRVVHQTLIRLGQRAAALTEAADDLEKQIAAIVDKMIPGLAAAEFGLGHLTAAQILLSWSHAGRIATEPAFAMLSGTAPVPVSSGRTDRHRLNRLGDRQLNRALHVIAVSRMRSHPPTLAYLQRRRAEGKTDREIRRCIKRYLARHFYRTLTNTTISQP

SEQ ID NO: 165757 - protein, 318 aa, unidentified
MPPAASVFLGIDVAKAELVMAIRPSGERWTATNDDAGIQRLLPRLREAAPALVVLEATGGYERAAVAALAAAGLPLIVANPRQVRDFARATGQLAKTDRIDADTLALFAERVRPDPRALPNESAQALDALLTRRRQILGMVSAERNRLEHAVPAVRRGIVQHIRWLERQLHDVDDDLDRTIQASPVWRAKENLLRSVPGVGPVVSRTLIGDLPELGTLPGKQIAALVGVAPLARDSGTLRGKRLVWGGRAPVRAALYMAALVATRRNPVIRAFYQRLLTAGKPKKVALTACMRKLLTILNAMLHANTVWRHPAQTATT

SEQ ID NO: 165758 - protein, 317 aa, unidentified
MAALICGVDVSSISLDARVGSQGSEARFENTPEGVGRLIAFCHEHGVELVAMEATGGYERLAFGLLWGSSVPVALLNPRAVRRFAQGMGLEEKTDRIDAGVIAWFAEVKKVVPTEPASAAQARLEAMVTRLRQLTELHAAQRNQRLLVSEPSVLDSFCELLALVKAQIRALETAIAELIAADPLWQQLDAAFRSIKGVAGRTVSRLMAEMPEIGTASNKAVSKLAGLAPLAQDSGKTKGKRLVRGGRGNVRTILYVVADIVRRYNADFAAFADRLRAAGKPKRVIRIALAHKLLVRLNAKARDIRLRYASAPCCQTC

SEQ ID NO: 165759 - protein, 370 aa, unidentified
MNPIYIGVDFHSREQTICYLKTETGELVIKELKHQDKEQLRAFYQQFLGQVIVGLEASGYSPWFEALLEELGCEVWLGDPVEIRRRARWRQKSDRRDAELIWDLMVHHEFPRLYQPPLASREVLRMLRYRQKLIKMRTMAKNSLQAIAMQAGLAKGSRLFSTAGQEEFGKATMSPVLQWQRDHWFSLLKPLNEQLLETMVWFKAQSKDDNQIKRLRTHPGIGLLTSLCLRHTLQPVSRFRNQRKVVAYAGFDPMIRTSAERAIYLGISKAGSRMLRYLLVEAVHTAVRYDEDLKRFYKRVAERRGRAKAKVATARKLLIRAYIMMRDEIDYAEFRRRAVAVRLARRSQVNPPTSGGLPGVLIGQSTSPGV

SEQ ID NO: 165760 - protein, 377 aa, unidentified
MTAMTHSTVGSVSEPVLYVAFELSAKQWKLAMTSGFGVAPWVRTVPAKDLRAVERAIAQGRQRFHIALDCAVVSCYEAGRDGFWIHRALTQLGIRNRVVDSASIEVNRRARRAKTDRIDALKLVRMLVRVCNGERDVWREVRVPAASDEAARHVSRERMALVQDQTRLVNQIRSWLATSGARWPARRRAAWWTLVTDWQGHALPRTLQARIARADARLAQLTAQIDELETQQQAAVAAAAPDSAVQRLVHLKGVATTGASTLLDEGLVWRDFRNRREIGGLLGFAPLPYQSGEVARDQGMSRAGNERLQAISIQLAWNWVRWQPLSALTQWYRHRFAEGGTRARRIGIVALARKLIIALWRYATTGVVPAGAILKGA

SEQ ID NO: 165761 - protein, 607 aa, unidentified
MLPRNAPTPQSPSPSADDGRPVRIGVGIDTSRYGHYATFLRDDLQPAADELQVAESADGYAQFRQRLERIAQRYPAVIFVIRLDAAGQYADNLLHFLHGLATRRADVPPLGAVTVSCGDPQRNKNYRAALFGSKKSDPVEARAAARFALSERPTPTPPLPTELRTLRQVAGRLQAVVRQRTRLINQLHHLLALTFPELALLVQDLSLGWVLELVHRYPTAPHLAAATPNDLGKIPYLPDERRDALLEHARSSIASLDGPDVAELVRDQVRQLRDARARQKRLENLLIQAYRRLPEPNHLDTIPGIGAVTAAVLTAFILDVGRFDTPDKLVAYFGVLPIEMASGVDRHGQPRGPRRYVMSKRGNDLVRRYLWMAALSALRCNPAVRALYRRVVAKHPQRKAVAVGHAMRKLLHLVFAIWKTGKEFDAAHYPWEGAAPAGGTASDSHMSAEPQAALPTDRDLSAKEQAAGHKPALGPAEPVVTAACAPTVPHEPAAGEATFLDFAHLKQQLPLAQVLDHLGLAARLRGSGPQRRGVCPIHRGDGRGRTFSVNRDDNVFQCFDKSCGHKGDVIDLWAALHGLSLRAAGLDLVQTFHLEPAPQTGTEKRNG

SEQ ID NO: 165762 - protein, 320 aa, unidentified
MSASSVVVGIDVAKAHVDVSVLGAKLDAQRFDNQAEGHSALTAALKPLDVALVVMEATGGYETELTCALQAAGLPVAVVNPRQARDFAKAMGRLAKTDTVDARMLAEFAAVLLRREDLARFLRPLADAQQQWLAALVTRRRQLLAMRLSERQRLQITPKGLHPSIEAIVAAIQAQLDDIEGQMVGHVRTHFGELDRLLQSARGIGPVASATLIAELPELGRLNRREIAALVGIAPMANDSGSSKGRRRIQGGRFDVRRVLYMAALTASRRNPTIKAFYERLIAAGKLPKVALVACMRKLLTTLNAMVRTNQPWNKPLHGA

SEQ ID NO: 165763 - protein, 368 aa, unidentified
MVTRFHGIDRHKKYSTVSVLDRDGHETRFLRSCQMEAYLGELGPEDAVVMEASCGSFYWAGRVEATGATCYILDPMRFRIITDSWNKTDRQDARNMAKALWVFLVTGEFGIPTVYKPSETIRTLRRLFASYTLLNRQIRMLKNTIQAMLAEDGVVLCSADRSRLFKGKESVIDILAGHHLSEVIVEALQIQVDLLCTIAESKERLGRRIVEASAPLDKQIQLLITIPGITPLTASAFLADVGDVHRFPSLRRMNAYLGLVPRCHDSGGKSRPGHITRESRKLSRTILTQSIYQTVKGTPGWERDYEELKTRRGSGRARIAMIRRLCGVMRRMLIQGKQFHWLKEELYRRKLVEYQKTLEERKKEQDAA

SEQ ID NO: 165764 - protein, 368 aa, unidentified
MIVIGIDPHKATHTAAAVASQTGELRGELTVSARERGHEELVAWARGLGEDRLFALEDCRHVSGRVERFLIGSGERVVRVPPKLMGKTRKAARRFGKSDAIDALAVARAALREPDLPAARLASAELEAKLLLDHREDLVAEATRINNRLRWHLHELDPELEIARGRLDRTAWMERLARRLARLGEGVRARICRHQLRRLKGLAREIKATEAELGGLVRAEAPALLELPGCGTLTAAKLLAEVAGVERFSSDAKLAMLAGVAPLDASSGRQRRHRLNRRGNRQLNLALHRIAATQARVHAPARAYLERKRAEGKGRREALRCLKRHLARVVFKLLRAIARHRHRVDKLPLENERKIVEMPGQISEPALT

SEQ ID NO: 165765 - protein, 417 aa, unidentified
MKKHNNFPMKSEQQPSKRARSRGPVQREAKEVMAELMGKLAQKLGGNSVSASVGAKNRNGLRPNLDRLTVGVDLGDRWSHYCILGLEGETLSEGQLRTKQQDFAEFFQALLAARVVLEVGTHSGWVQEIISRYGHEVLVANPRLMEGPKRRKRKNDRIDADRLARLGRVDPKSLHPMQHRSREVRQDLVMLRARDALVAARTELINATRGLVKSMGARLPRCSSPSFAPKVEEAVPAEIREALLPLIGLATTLSECIKVYDQKIEKLGSEKYGVTALLRQVKGVGPITALAYVLTLENAERFAKSRDVGPYLGLVPKQEDSGDSQPQLGISKAGDAMLRRLLVGSAQYILGPFGPDTDLRRYGLRLCERGGKNAKKRAAVAVARKLAILLHRLWVGGEVYEPLRHAMPVTTEQPLAA

SEQ ID NO: 165766 - protein, 343 aa, unidentified
MQVVRIGLDLAKYVFEVHGVDGQGNAVIRKTLRRGLVSTFFANLPPCLVGMEASNGAHYWARLLTELGHKVRLISPQFVAPYVKSNKNDRNDAEAICEAVSRPTMRFVPPKSPEQLAIQALHRIRQRLVQSRTRLVNQIRGILAEHGIVIARDIWRLRRALAEITGHATDDLNTLVRVLILEAQAELMELDRRIASCDRRIRELYRTSELCQRLGEIEGIGPVTATALVAAVGDRSCFKNGRQFAAWLGLVPKQRSSGGRHRLFGISKRGDRYLRTLMIHGARAALGKAGGKQDPRSRWLASLRQRRHPNIAAVALANKNARIVWAMLASNVSYEPARSVQAA

SEQ ID NO: 165767 - protein, 356 aa, unidentified
MSHHAMSAAIPNVTIGLDLGDRTSRTYEVSAAGECVREATVVTTVAGITRYFEQRPRCRVVVEVGTHSPWVSRLLEQLGHACVVANPSAMFVGRPRRRRNDRLDARFLARQGRTDVELLYPLTHRSADAQRDLEYLRARDQLVAVRSKLINHVRGTVKSSGARLAKCSAEAFAKRAPSELPAAIAPALMPLVDVIADLTRRIAAAETQLAALIRERHPVAERLQQPAGVGPITALAFVLLIEDPTRFQKSRDVGPYFGLVPRLDESGTSSPQLRISKTGDAFGRRLLVSAAHYILGPFGPECDLRRYGVAIVQRGGKNAKKRAVVAVARKLAVLLHQLWVSGATYDPDYQRTRRAA

SEQ ID NO: 165768 - protein, 409 aa, unidentified
MCIIGLDIHRAFAEAVAWEDGKLRRLGRVDMRRNLLEAFARKLSPDDVVVIEATGNASSAAAVVAPYVKKVVIANPKQVRIIAHAKIKTDTIDAGVLAQLYASGFLPEVWIPDEPTQALRRQVTRRNQIVRQRSRLKNVIQSILHSHLIPSCPHADLCGTKGRSWLSEQIVPEDERLAIDRHLREFDRLGDDLQVIERDLARSALEDEGVKRLMTIPGIDMTVALAMKAAIGDVSRFDEPQKLVSYLGLNPSVRQSGPGPAYHGRITKQGRGHARGMLVEAAWAAARAPGPLRAFFLRVRARRGQHVAAVATARKLAVVIWHLLTKGESYAWARPSLHAKKLRDVELKAGSKTARGQKGAAHAYNIKSHREEERRWVEQAEGAYARFVAGWNRRGPKKVRTDAANEVRR

SEQ ID NO: 165769 - protein, 417 aa, unidentified
MRKVSEKIERITENTLVCGIDLGKYKCCARFVDYRGKEVYRKIWFDRTGDLDIIGSHITAAMAKENKTDVLIAFEPTGHYWLNINKYFNDVGRETVLMPTYTVKQEKEVYDQNPTKCDPKDAYLIAKLTTEGKYVKPIERNELYQDIYSGYGIYEDIGKELNRIKNKIHVWNDKYFPEVEKVFKIDSVGIKAIYENEMLPKEINDMELTEFKELMTKNNSYAGKGKITKLKELCNKTIAIDADSFTKKEIKRLYERYLELEEEKITIKKELIELASQIDYVEKMVEMSGVDYVSVIGIIAETGDLNNYDHAKQVLKMSGLSLKENSSGQKKGKNHISKRGRAKLRRNLKQTGISLIRNNEFFLQLHKYYTTERKEPLIKLISVNAIIRKFVYVMMAIVKTGESFDIEKAKKESRIFS

SEQ ID NO: 165770 - protein, 392 aa, unidentified
MTYFIGIDLAKYKHDCFIMDENGEAIRDSFSFNNDKEGFNTLLNVLNSLDSNQEKRIGFESTGHYGSNLKIFLERNGYSFMEFNPLLVHRHFKSETLRRTKNDKVDARKISSYLYTREYKPNPNSSYHLNCLKSLTRTREALIKDRTRHIIHMTNVLDKMFPEFKLQFGNQGLNAASAMYLLENYGSPSKMSNMTRASYDKMKSELRRTISYAKFLRIKELARNTIGNEDEILVFELNTYLELFKELDKKILEVEDKITKEFSIMKCHIASIKGIGIITAAGILAEIESIDRFDNPGQLCAFAGIEPSENQSGTHDGGGKMVKHGSPHLRNYLMQSAGYMLIHNPVLYEYYLKKRNEGKCHTVALSHVAKRLTRIIFYLEKNDTDFNIDKMR

SEQ ID NO: 165771 - protein, 328 aa, unidentified
MALTIVETRAITGGVDTHADVHVAAALDPIGGLLGVAEFPATPAGYARLLGWLGGFGTVCLVGIEGTGSYGAGLSRHITTAGVRVVEVDRSDRQDRRRQGKSDPLDAVSAARAAQSGRARGAPKGRDGAVEAIRALMVAKRSARSERTQTINQARSLIVTGPDDLRTRFARHTAAALVAETASLRPRPGGTVGYATRIALRELGRRAEFLDGQLERLDELIVPLVTAHAPGLLALYGIGPGTAALLLIAAGDHPGRLRSEAAWAHLCAAAPIPASSGKRTRHRLNPGGDRQANHALYAPRGALSYSRCSREKLGGRFLGLMANLASKD

SEQ ID NO: 165772 - protein, 412 aa, unidentified
MQDILTCVMGLDVHRDIIVACLVKGAVDAEPEAETRTFSTLIPEMQKLRDWVIEAECRNIAMESTGIYWQPIYEMLESCFDGEVSILVVNARHMKNVPGRKTDMKDAQWIATLLRAGLLKGSFIPDKTFRELRHLTRYRKSVVHDITAQKNRIDKFLQSSGFRFTAFLSDTFGASGRNIIRHLIERGSIDREALDKCLKTKTRNRIDEILVALNGSLSVHQRRFLNIVFLHLEDLEAHKHTIEDEITEEVLKHTDALNLLCSIPGIDVTAAAAIVAEIGTDMSAFPDSQHVCSWAGLSPGNNESAGKRKSVHINKGNPYLKSMLCETAWIMASHRKLYLSGWYWKVKQRKGAKRATIALARKVLSIIYTMLKTGTPYSEECFEQRRQRCERKRANRMVNELQKLGYTVVAPD

SEQ ID NO: 165773 - protein, 335 aa, unidentified
MDNYIGIDVAKASLQIFIPKGQLDLDYANTKAGLNNLYKRLKTIYKESLSDLVFVYESTGSYSRPLEQYCQEKEINCFKVGAYQSASFSKTIKNRNKTDKVDARMLCAMYVIIKAGDVKVPYRDEDAHKLRSYIKYYQSLNKEKTRLKNYLEGAAFNQEDQYVLNQVKKRIKQIDQEQDKLMALCMVVIKANSEYFNAYENMTSIKGVGQKSGIVLLYLFLRYPNASRQQITALTGLDPIRNESGTSVKRMTRISKQGTNLVRGILYMPMLCIVQYNDEMKCFYDRLVGTGKPKMSAQIAVMRKVILLAHSLYKNNKKYDETKYLDYINVDKRAA

SEQ ID NO: 165774 - protein, 358 aa, unidentified
MKIIGCDYHPSFQQIAMLDLDTGEYIELRLLHAGGEAQRFYQSLSGPVRVGVESSGNMLWFERLLQKLGHELWLGDAGVIRAKAPRKQKTDVRDARHLLQLLRENNFPRIWVPSMAERDLRQLLKHRHTLVQMRTRVKNQLQHIALNQGLQKKQKLWTRAGQELLRGLELDCWTARRRDDLLHLLEYLEKQIEALDQAVKAEAEQRPEVRLLMTHPGVGPVVGLATVLTLGEVGRFPRGRQVAAYVGLIPSEDSSGQRRRLGAITKQGSSFLRFLLVQAAASAVKGDAEWARAYKRLARKKHHGVAKVAIARKLVVRLYWMLRTQTRYPEVVRMSGSPSHPVARLQAGRLSGHPASRR

SEQ ID NO: 165775 - protein, 382 aa, unidentified
MTGTEPHAWGTGLMDDIIFVGLDVHKATVCIAVAEGGRGGDVRQLGVFENRPEILSKVVSRLSKGGRRLSFCYEAGPCGYGLHRLLTGYGHECVVVAPSLIPMKAGARVKTDRRDALMLAKLHRAGELTAIWIPDAAHEAMRDLVRARATAVRVLVKARQHLQGFLLRHERIYRGARAWTLAYRRWLSTVHFEHPAQQIVLQDYIHAVQEAETRRDRLTQQIEELLPNWSMAPVVAALQSMRGVALIVAVTVVAEVGDFRRFANPRQLMAYLGLVPSEHSSGPSVRRGGITKAGNALARRVLIEGAWTYRMSARVSRKLYDRLEPLPAAVRDIAWKAQLRLCARYRRLAAIGKPKVVVTTAIAREMVGFIWAIARLAQPALV

SEQ ID NO: 165776 - protein, 428 aa, unidentified
MTTDRVPCRKFILGGAIMDKIYDSCCGIDVHKKLIVACLRKGNRQEVREFGATTRELLELADWLKTSDCKMVAMESTASYWKPLYNILESSDLNAMVVNARHMKAVPGRKTDVKDAEWIADLLQHGLLQPSYIPDKDQRELRELVRYRKSLVGERTRELNRLQKMLEGANIKLSGTVSDINGKSARSILEYLLTGECIDGAKYDEMYEQKVIAHNLKATKEQIIDDLNGVMTPLQRRMMKELLSHLDELNTHIKNLDDEIDNFMKPEEKQASQAIQDVTGIGNTSAQAIISVIGTDMERFFTDRHISSWAGLCPGDNESAKKRKSGKTRKGNSLLRTTLITCAHAAVKNKKSYFYAQFMRISAHRGKKRAYVAVAHSMLIAIYHILKDGVIFKDLGADYYNQFNKERKINAYLKKLKALGWEAPVVAA

SEQ ID NO: 165777 - protein, 356 aa, unidentified
MQNDRKSSVIVILGVDTHLDVHVGAVISQAGKLLGTHIIQTNQAGYQELLDWTRSFGILERAGIEGTGTYGAALTRYLIKNGIYVVEVNRPDRSKRRLEGKSDPLDAENAARTVLSGSSKAIPKMQSGACEALRIISVARRSAEKARTQAINQLRALLVSAPQDVRDKLWKSKPQECVTACINSEVSEHSPLRIALCSTLRSLAKRWMALTEELNELDESLDKLTRKYASNLRSQFGVGPQTAATLLAVAGDNPERLKNEAALASLCGVNPLPASSGKTVRHRLNRGGSREANNALWTIALVRMRSDPRTRIYVDRRTGEGLSTKEILRCLKRYIVRELYPLILSDLAYANRPLLT

SEQ ID NO: 165778 - protein, 341 aa, unidentified
MSELAMVGIDLGKHSFHLHGQDKTGREVFRKKLSRQQMMRFFSNLPACTVAMEACAGAHFVARQLMVVGHEAKLISPQFVRPYVKGNKNDFVDAEAICEAASRPSMRFVSPKTEAQQTLSVLHRLRESLVRDRTKTANQMHGFLLEFGVSLPRGLAIMKRLPVILTEHELPTRLMTLLDRLREHFNYLDAQIKDLDKDLACQLADDDLGSRLLSMPCIGPITASLLAVEMGDGKQYAGSRDFAASIGLVPRQYSTGGKANLLGISKRGDKNLRRLLVQCARVYLQQLKSQHGALAEWVRSLLIRRHSNVVACALANKLARIAWAISAGHGVFNAGPDAVAI

SEQ ID NO: 165779 - protein, 465 aa, unidentified
MKSNIRKSQKKKKKIVIDPAWELINPEAAGIDIGSKEHWACVPAHSAQKNIRSFGTFTADLEALAAWFQECGVKTVAMEATGVYWIPVFQILERRGFEVILVNARQTKNVAGRKSDVQDCQWIQRLHTYGLLQGSFRPQDQYCVVRTYLRYRDELVSARSTQCQHLQKALQQMNVQLHHVLSDVTGVSGLAIIQAILAGQRDPVKLAAMVDRRVRASQQTIQKALVGDYRTEHLFVLKLAFELYHTYEAKIKACDEQIVLAVAQLPDQVDVQTKPLPARKEGRPARADQMFGQDLRAGLYPKFGVDLTAIEGIGILTELVILTEVGPDLSRFPSEKHFASWLGLCPDQRISGGKVLSSRTRRVINRVSDALRVAAMTLERSQSALGAFYRRMKARLGAAEAVTATAHKLARLIYRLLKHGEAYVRQGMADYEKRFQQRKLYALQKMAKTMGFELVANQPITQGVS

SEQ ID NO: 165780 - protein, 460 aa, unidentified
MTLLEKLGDRLPRRYYLGVDVGYKEHVAVVISLKTFVRGDERWKQTRCVHFPSTQAGLRKIQRYLDRFSADPGEFLGLCEPTGGYYGATVFQYLLDRDYDMHLVENATVKHMREKIFPGLPKTDEMDGRVMARIGYLHEAVGEEFTLRPLGLPDPDSSHLLALCRDSWKLNTTITRARNQFTQLMAVTFPELKLFFTSSVSTVGPVSLVAAYPTPALLAETAKEEVYQVLWKAGCYQHARRVAELQALARDSSGLLPDPGRVWRLEWLTGFLLTNFRYQASLDKRVQELVKQRESYELIVNVPYSGPNTLGVILAVTGDVSRFSNYRKYVAYTGYFAGLEKSQTIDRTKMSRRGNRNMKRALFQIAAPLVWFDKGDNPYKQLFQRKMAEGREWYKAMPFVCAALARHIYHCLKFNDPYDVEKAFRGSVHSPASEEEWLSLGADLDEKFEVMEASLCLMEG

SEQ ID NO: 165781 - protein, 329 aa, unidentified
MKRKSFIGIDISKKTIDICLYTPGSTSPKKFFKTENSLKGFKSFIKELKILKIKLKETFVCLEYCGVYGLELGFFLEGKIEYCFCNPLHIKRSLGLTRGKSDKLDSFKIARFNYLFRDELNPMSMPSECMLRLKSLMAERSRITKAIVIDKQVLTDLQKTLGINARLRAERRLDMLQTDRKAIDKEILHLIESEERILINYKLLISIIGISLVNATMMILCTNNFEGITNPRSFACYCGVAPFEHTSGTSIKGRTRVSPYANKKVKANLTNAAKSAVQHDPEIKIYYKRKRAEGKDHGTVMNAVKFKIITRAFAVVKRGTPYVKLRQAG

SEQ ID NO: 165782 - protein, 370 aa, unidentified
MIVIGADTHKRSHTLAALNEPNGRVLANRTVAAKQRAFDDLLLWARGLNHPERVWAIEDCRHVSGALERFLLVRGERVVRVPPKLMAGARNAARERGKSDIIDAVAIARAAIREGLDTLPVARLAGRELDVRLLVDHRERLVAQRTALINDLRWQLHDLWPEDEIPPRALTTTRWQDRIARRLTRCNRTARVRIARDELRRIRELTAAITQLEHELATLVGELAPRLLAETGCGVLTAAKLIGEIAGVSRFATDAKLARTAAAAPIPASSGRIDRHRLDRGGNRQLNCALHRIAVTKARVDPKTAAYLARKQAEGKSPREALRCLKRHLARRIFKLLQAPPELTAHRPPVIANPGLMIHCNTPAGTPTLT

SEQ ID NO: 165783 - protein, 381 aa, unidentified
MRFYNQPHQPHRFYCGVDLHARTMYLCILDHGGAIVLHKEVPAEPGAFLEAIAPYRDGLVVACECLFCWYWLADLCQAENIAFVLGHALYMKAIHGGKSKDDKIDSRKIAQLLRGGNLPIAYAYPKGLRETRDLLRRRMYLVHKRAEVVAHTVNTNSQYNLPAFGKKLIYARNRQALKIAERFGDASVRKSIEVNLRLLDSLDDLIGDVELYLERTVKVDDADTFYRLRSIPGVGKILALVLLYEIHDIRRFGGEGEFLSYARLIRPLKTSAGKVTAGGGAKIGNAHLKWAFSEAACLLVRESDQAKRFLAKKEKKHGKPKALGILAARLGRSVYHMLRQKRAFDPVRFWNGEPGITPAQLKKSAVKRPGHRKGSRCVLEA

SEQ ID NO: 165784 - protein, 402 aa, unidentified
MKASKQYLRFCGIDMAKQKHVACIIDKNGQYLQRPVSIRNDANGFHKILNCLKQTGRTKSTLTGMEATGHYWYSLHDFLTRNGYDVAVLNPIQTALQAKQAIRKCKTDKYDAFHIANLLRTGQHKPAVIPDELAMTCRQITRLRYRIVKQGAMIKQLVNSRLHPAWPEYEGLFSDKFGKTSMKLLHTASTPKELMELDPDDLSELIHKASRGRFGPAQTQKILHCAKNSVGMQRGQYGMSVGIKFLLEQIEALKPVRNKMDAEIAKLTAKIPEYLFTLPGATDLTIVSLYGEISPIEAFEKPSQLVAFAGLDPKVFQSGQYDAPRRRISKRGSPYLRRSLWQMAYRAICTEGDLRDYWRKKHRQNKHHLVIVTAVANKLCHIVWRIMTDRRDYVRKDYNPKS

SEQ ID NO: 165785 - protein, 339 aa, unidentified
MLIIGCDFHPGFQQVAIFDNQTGEVSERRLLHREEAQEFYGSLRGQAVRVGMEACGHYPWFERLLAELGMELWIGDAARIRAMEVRKQKTDRRDAAQLLQLLVEQRFPRIWVPSLEERDVRQLLVHRHQQVQARTRIKNRLQALMLSQGVQKKRKLWTAAGRAELEKLELLPYAAVRRERLLAALDQVEAEIAELNRQVEEEVKRRPAAVRLMTHPGVGPVTALAMVLTLGPAERFGNARQVGSYFGLIPSEHSSGGRQQLGRISKQGSSFLRFLLVEAGQTAARYDAELGRFYRRLAVRKHRALAKVAVARKLAMRLYLMLREDWDYAQLCKAVCRQA

SEQ ID NO: 165786 - protein, 343 aa, unidentified
MHTITTIGLDIAKSVFQVHGIDAVGQVVIRRQLKRRFVLSFFEKLPPCLVGIEACASSHHWSRELQALGHTVRLMPPAYVKPYVKRQKNDTTDAEAICEAVTRPNMRFVPTKTVEQQSCLMLHRARHLFIRQQTAIINSIRAYLAEFGIVAPVGRRGVEQLLEVVADAADHRLPDVARMCLVALGSQLRALKAQILEFDRRIMVWHRSNATSKRLDAIPGVGPALATALVASIADPKAFRSGRDFSAWVGLVPKQNSSGGKDKLGSISKQGDRYLRSLFTAGALAVIRYAKIHGTRHRPWLTALLARRPTKVAAIALANKLARMAWAMMARNERYKEPAALAA

SEQ ID NO: 165787 - protein, 400 aa, unidentified
MTGSQLWAGVDVGKEHHWICVLDASGTVVLSRRCDNDEATIRAVITEIDALAETVSWTVDLTTAYVTLLLTVLADAGKPVRYLSGRSVWQASSVYRGGEAKTDARDARVIADQSRMRSDLPVLRPDDELIRELQMLTGHRTDLVADRTRTINRLRQQLVAICPGLERVAQISSDRGWVVLLARYQRPKAIRRVGAARLAAMLTGAGVRHAESIARAAVTAAKAQTVRLPGEDVAAELVAELAQAVIDLDARIRAVDAEIEARFRRHPLAEVILSLPGMGFRLGAEFLAAVGDPALIGSADQLAAWTGLAPRPRDSGKRTGRLHTPQRYSRRLRRVMYMSALTAVRCDPASGVYYQRKRAEGKRPVQATICLARRRVDVLYALLRDHRTWQPTVPVTAVAA

SEQ ID NO: 165788 - protein, 315 aa, unidentified
MIIIGVDFHPEFQQIASVDTDTGEFQEKRLAHPGEAEEFYRALTGKKVRVGMEASGHARWFERLLAELQFELWIGDAAEIRTKRVRKQKTDRQDAQLILRLLLEDRFPQIWVPSWENRDLRQLLWHRHRMVQARTRIMNQLQAVALNEGLRCKKRLWRERGRQQLESFPLAPQASRRRDDLLELLDRLNPTIAELSHAIEQEAEKCPAAQRLMTHPGVGALTALAFVLIIGEANRFHCGKQVASYLGLVPLEDSSGNRRRLGHITKQGSSILRFLLVEAAQVTVRSLPEWRSKYCRDGAETRRLPVLDVAQGMEL

SEQ ID NO: 165789 - protein, 426 aa, unidentified
MNATTDFAATIGLDWADQKHDLWLRPADGAKAEHLRLEQTPEALHEWVAKLRERFGHRRVAIAIETSRGPVISALLAYDFIVFFPINPKALKDYRAAFSVSGAKDDRTDAMLLEEFVRLHRDKLRALEPDTELTRKLGGLTEVRRRLVDERTRVVNQVHSALKTYYPLAETLLDGRLPQPLAAAFLTRWPDLPTLKKADPKTLRAFFYQHNSRGAKKMEARLDAVKKAQPLTTDEAILAPARQLVSALAGMLKPLHQAIAGLDEAIAQAFDQHPEAALFRSLPGAGPALAPRLLFAFGTQRSRFASADEVAQFYGLAPVVKQSGNTQTTHMRSRCPKFGRQTFHENAGCAFKQEPWARAYYDAHKARHEGKHHQACRALAYKLIRIYYACWKQNSLYDGQRYLQALEKHGSPLHKQLPTPNPNASE

SEQ ID NO: 165790 - protein, 338 aa, unidentified
MSLYAAIDLHSTNSVLAIINDAGQPVLQCRRPNDLPRLLDDLHPYQSELTAIAVESTYNWYWLVDGLMDHGYPVQLVNTLAVPQYQGLKHGDDHSDALHLAQLMRLGILPQGYIYPREQRSTRDLLRRRFLLVRQSTQLMLAIESSFSRETGHPLTSNHVRHLTAKQVESAFPDPVTRYGLLVQLKLWSALQTQITALEHWVQHNLAHPELLVRLRGVPGIGVILGMTILLETGAIDRFASVGDYASYCRMVPSVYLSNGKPKGHGNRKCGNRYLCWAYMEAANYAIRFDPAIRRWYDRKRARRHRVVALKAVAHKLARACYCLWLEGTAFDTTRAFG

SEQ ID NO: 165791 - protein, 380 aa, unidentified
MQTILRQCVGIDIAKSSFTSCISQQLSSGEIKLSAPAEFENCRHGFNQFLKWVRKNADASPKATFVMEATGIYYESLAYHLHQLKESVCVVLPNKVKHYAKSLNTKSKTDEIDARVIAQMGAERALELWTPPAEVFRSLRALTRLYTDLKVEKTVFVNRLHSMEAAHEPLPFIVKSTKELVRKLDCEIEKTEKEIEKLISSDQWLKQKVERLLTIKGVGFITIAIVLAETQGFKLITNLKQLASYAGYDVVQRESGSSIKGKTRISKKGNSRIRAAMHFPALVGCRHNPEFKATYERINAGKSSKMVAATALQRKILGLIYTLWKNNDVYRPKLKMTSSAHQNNECEDNETTAIKKAGKPKSPPAQDELLTVQQTEALLH

SEQ ID NO: 165792 - protein, 344 aa, unidentified
MSKQVVRGGDVAELLERFARLREKARARTGKVFPFVVIQEAGLDGFWIDRALQNEGIESHVVDPASIATSRRRRRAKTDGIDGEALVRALLAYKRGEPRVCAMVKAPTPEEEDRRRLCRERKVLIGERVRHVNRVKGLLFSQGISGYEPLRRDRRRRLDTLQTGDGRLLPVHLKAQVCRELDRLELLLEQIKAVEAERDVLLAAQQVAAPAPAAMLLDIKGIGPEFAAILWSEGLFRHFDNRRQVASYAGLAPTPWQSGSVDREQGVSKAGNPRLRTTLIQLAWLWLRHQPQSALTLWFEERVRRNGGRLKKTTIVALARKLLVALWKYVTAGVVIEGAVMKRT

SEQ ID NO: 165793 - protein, 401 aa, unidentified
MPRQGFIGLDVAKDTFTAAFLIVDALSGQILHEQIATFSYDHPGWQRFLATWEPLHADFWWIGLEASGPYSALLEAHLLRLHRPNVSLHRLSPLQVRDFARARSRRRTKTDRLDACTIALFLRQPLTVQALPAPLQDHTPLRALAHLDQHLAQELTHTQNQVRQLLHFLFPELERAYARFPKALRTLLRHFPSAPAIAQAPLQDLHALLPPRHRLDLEALQALARASFGLHDPIRAQTLQLLLDRWAFLETLRARCFAALQQAVRPHHPQAWRLLRTIPGIGPRLAALFLALTGPLDRFPDRKALIADAGLDVTLHPSGRFAGRCRLSKRGDPLLRHVLYLIAAALKRYTRRFAQAFAYYRHQGRAVRETLVILSRKALGMLYHLLRHQVPFQDLPQPAPT

SEQ ID NO: 165794 - protein, 348 aa, unidentified
MRFYTRQHKFYCGIDLHARTMYLCILDQEGKIVLHRDIKTDPDIFLKTIAPYREDIVVAVECIFTWYWLADLCSKENIPFVLGHALYMKAIHGGKAKNDKIDAYKIAALLRGGMMPMAYVYPSDMRSTRDLLRRRTHLARKRAELIAHIQNTNHQYNFTDMGRIARKCDRIKIGVADRFTDPSVQKSIELDIALIEHYDKLLNHLEHELSLIAKVHDADSYFRLRSIPGIGRILGLVILYEIHDINRFPSVQDFVSYCRLVKSAKESAGKIIGSSGKKIGNAHLKWAFSEAAVLFLRRNPEAVKYRAKLERKHGKAKSLTILAHKLARAVYNILKKKEVFHPKVFFAK

SEQ ID NO: 165795 - protein, 323 aa, unidentified
MQGKVSFEEDAMPVVYAGVDVSKEWLDVHLHPLGESRRFCNDKTGIRQLKRLLARHRLASIVMEATGKFHRPAHRSLWLDGFAVAVIDPLRARMFARACGYLAKTDRLDARFLALLAESLRPPADTPPSPHIEALQELVNARSVAKCDITALQNRSKTATTAFLRGELNRLVRRLEQYVERLDKEIERRVGEDPQLCRKAEILTSIPGIGRVTALALMAGMGELGTCSGKQAAMLAGLAPIANDSGARTGRRSIRAGRPAPRRALYMAALSACRYNPALARFADTLKAAGKPAKVILVAVMRKLLVLANCLLSQDRLWTPTPP

SEQ ID NO: 165796 - protein, 434 aa, unidentified
MIKVVYPNCAGLDVHKKFVTVCRLTVDRQSVVQKELREYSTMTADLQAMADWLAEGGVTHVAMESTGVYWQPINNILEGHFEVFLVNAQAVKRMPGRKTDLKDAEWLATLMQHGLLQRSFIPERQQRELRELARYRLSLVQERSRFANRLQKVLEDTNIKLSAVATDMQGVSAQAMLRALIQGETDPSVLAGMAKGRMRKKQNELARALVGKLTEHHRFMLSQLLDQLDVLDQQIAKIEGRIEEQLAQMPLFQSAVTLLDTLPGVDRQLAITIVAEIGVDMSRFPSDRHITAWAGVAPGNNETGGKQRSGKTRKGNKYLRRALVLAAWGAVRSRANYLRSMYYRLAARRGKPRAAMAVGRTILQAAYHMLLRGEPYNELGTDYLDQLDRERTAKRLLKRLDSLGYDISSVKDRLTLPPTIPEPAPPRQPLPVPG

SEQ ID NO: 165797 - protein, 397 aa, unidentified
MYIVGIDIAKRKHEAAVIDGEGTVIIKPFSFTNNCSGYNRLLAMLTKAKLPLDEVSFAMEATGHYWLALFTRLQKEGFRVQVINPVQTNSIRSFYIRQAKTDPRDALLIAEVIRFGHFSESTLHPENIYELRELCRGRHAIVSMQADVKRKVIALLDQVFPEYETAFTNMFSDTSMAILQNCPTPKELSEMPLEELCHLIEVSSHKRFRMAKARELQELARNSFGFAMAGDVFSTMIRLYAKHLDFLKQQVREMDRKIAEIMDTLDTPITTITGIGPTLGAYILSEIGDISRFSSAAKLAAYAGIDPTMRQSGEYNGVRNRMSKRGSPYLRHAIWLAASSAVLHDPALKLYFQKKRDEGKPYMASVGHACRKMVSIIYAVMRDNKAYTPCIPNEISA

SEQ ID NO: 165798 - protein, 366 aa, unidentified
MHVQGREPVNSLLSLIPLLQSIMPNIQFKDIDPESKPVLFAGIDVGAEELILVIRKNGKPFDPQKFANTPADRTRLVKKLVKLPGIIVCLEATGVYHFDLSLALHDAGVLLMVVNPKAAHNFAKVLMKNSKTDAVDANTLAEYAARMDFVPWTRPSNETIALRSFARRIDALTRQKAAAKNHLHALTATSETPKAVLKDVKLAITQLEKRIDSLTAGALILISKHPDLERILALLIGIKGIGNTSAIALMGELLLLPPDLSHREWVKFAGLDPRAFDSGKSVHKKTRISKAGNRHIRSALYMPALSAKQHDKHVKAYFQHLMDNGKTPLQGVCAVMRKLLHAIHGMLKHNEPFDNTRFYAIPASAE

SEQ ID NO: 165799 - protein, 314 aa, unidentified
MDKITVGIDVSKDRLDVAVRPSGEVFVVARNAAGLEEVVERLCSLGPHLVALEATGGFETVAAAALAAAGLPVVIVNPAQVRAFAKAIGQRAKTDPIDARVIAHFAEATQPEPRPLPDEATRLLADLVARRRQIIDMIGAERQREKRAPARLKKSIVRLVKALEKELTSVDGDIDDAVRGSPAWRETEDLLASVPGVGSTIARTLIAELPELGRLDRKQIAALAGLAPHTRQSGQWKGRSFIGGGRANVRTALFMGAMVAKKHNPVLKAFFDRLVAAGKPKMLALIAVARKLLTILNAIVRDHRPWQGTVVAAS

SEQ ID NO: 165800 - protein, 317 aa, unidentified
MNTQNNQNEINVGVDTGKTQIDIYIRPLDIYFTVTNDEKGINKAVKEIKKHNPTRIVIEATGRLEQAFIIACAKETLPFVVANPVRIKKFAGSAGQLAKTDKLDAKLIAHYSQALKPELSTLKPETLREMSDLLSRRCQLMEMRTMEKNRLQILPKSLASTINPMLTAINNQLTKIDKKMAKLIEQCDEYKIKNDIIQSVPGVGNVVAFSLLSNMPELGYINNKEAAALVGVAPINRESGAFKGKRMIRGGRHQIRTAMFMSMMSAMQCNPVFKATYQRLVAAGKPKKIAIIACVRKMIVILNSMVRDGVYWDPKMN

SEQ ID NO: 165801 - protein, 413 aa, unidentified
MRVHYTVCCGIDVHKNSVTACLMWGPADREPQSEIRRFGTMSSELQKLAEWLKQARCEVTVMESTGAYWKPIWNILDGHVKLILANAQHVRALPGEKTDNKDGKRLASLMRHGLIRPSFVPSRDIRELRDLTRYRKKLLANGAAERNRIQKVLEDANIKLGSVLTDVFGVSGQRMLHALVENERFDVDQVAGLAHWSLEPKMETLKKALQGRLTPHHRFMIEISLGHMEYIEKQILRLDEQIANHLVPYRKQYELLQTIPGIGENAAAVILAEIGPDISQFPDDSHLASWAGICPGNNESGGKKFSSATRNGNPHLMANMVEGAWAATRKKNCQFKSTYYALRARRGAKRAIVAVAHSLLRTIFAVLKSGQPYGEPMQRPLPGRQRVMKAERLCARLRNMGFDVMLKPKAQPA

SEQ ID NO: 165802 - protein, 371 aa, unidentified
MNNIRFVGLDVHKQSISVAVADGGRSGSVEYLGEVDNDPGAIGKLCERLRRPGKALSFCYEAGPCGYGILRQIKGLGHRCDVVAPSLIPRKPGDRVKTDRRDATMLARLLRAGELTAVWAPDADHEAMRDLIRLRGVVRQVVTRARQNLQGFLLRHGRKHGRGTAWRMAYRRWLSTLAFEHPAQQIAFQDYVDAVTDGERRLKGVEEQILKLLPAWNLCPVVDALQAIRGIALVTAVVLVAEVGDFTRFANPRQLMAYFGLVPGERSSGETTRRGGITKTGNSHARRALVEGALAYRMKPRVGRHKVDRIEALPKAVRDIAWKAQVRLCARYRQLAARGKTANVVTVAIAREMVGFVWSIACMVQSTPKAA

SEQ ID NO: 165803 - protein, 373 aa, unidentified
MKKVRFLGLDVHAETIAVAIAEPDGEVRSLGIIPNREESIRKLVKKLGVAEQLQACYEAGPTGYVVYWQLTALGVKCEVVAPTLVPVKAGDRVKTDRRDATKLARSYRSGDLTPVWVPNEEHEALRDLVRAREAAKQDQLRARHRLSKFLLRHGRRAPAGIKLWTQKYQAWIQEQVHFEQPAQEYTLLDYLHEVEHMADRIRRLEQAIGEAVKLAPPRMQEVIQALQALRGIAQISAVTVVAELGEISRFQGARELMGYSGAVSGEHSSGKRIQRGPITKTGNAHLRRIAIEAAWAYRHRPTIGPVLRRRQEGLSEAVKEIAWKAQHRLHKRYRTLTAAGKEKQKVITAVGRELLGFIWAIGVQVERKGQPIA

SEQ ID NO: 165804 - protein, 387 aa, unidentified
MSDAITLIKAADKLFIGMDLHKNTSTFVVKDREGKLIDSAKILTDKNDVTRYINAIKRNGDGKELSLVVEPVSQWYYYADLIENLGVDVHLAHPMEVKAIAHAHIKTDKIDAGVLADLLRTNFLPEAYFAPAEVRGWKEQCRFRASLINLRTQVKNKIHAILFKHSLKHNFSDLFGKGGRRWLASLELKEPFKSNLDKYLSLVDYLTNETGYAEERITNTVINCPQAKLLISIPGISYCSALTIMAEIGDINRFISVKHLQSYAGLIPSTYNSGDKQIHGKITKRGSKWLRWIMIESAYHQMNCKRIPGFGSYYNTLKKRKGSKTAAVATARKLLAVVWRLLKDNRPYEVADPRLSAIALATAGCWKSGPIASNISSVSNSAEAGND

SEQ ID NO: 165805 - protein, 370 aa, unidentified
MLDTTTFVGLDVHARSIKAVSLDVMTGEVRCATFGYDAGAVAGWVRSVDPKARCVYESGVTGFDLQKRLSGLGVDCVVGAVSKMIKPSADRRRKNDRNDAEFLARMLSVGNVVEVWVPDDECEAARDLTRALEDARDDLSRAKQRLSKFLLRHGLAFDERTPTGRRKGNWTRAHWSWIESIRFAEGADNDVLAYYVDAVRRAAEEKARLEGLVEAEARKPRWRRRVDSLRCLKGVDTASAADLVFEAGEFSRFGNARSFAAWVGLTPSEHSSGESDRRGAITKAGNKHLRKALVEAAWHYLTCSGRPKDLAKGQAPDRVARRHAAKGVRRLVERREALLARGVHNNKANVATARELACWVWAVGLMAEEA

SEQ ID NO: 165806 - protein, 438 aa, unidentified
MSNKVFFNLDELFISVGIDVGADFSWMSIALPNQQFVGKPYKILHSSIDSLTTAVSKIKEAEELYSLESRIFLESTGIYHYPLFCYLRDKGFNCSVINPIITKNSTNINIRKVHNDRFDSKKAALVGLKPDLKVSLMPSDLALNCRNLCREYYDLMDNRSAYVNKLQGELRMAFPQYLGIFSKVTINTSLTLLETYTSPSAFLKADKQEIIDIIKSTARFGLTYAQNKYNAIIQAATDANQFGYIIDSNIKRIRLYISFIRKYDEEINSILESLHELVDANEDSDFVKQIHLIETFKGAGFLSAVSIMGEIGDFSAFSKPKQLFAYFGLDPAVKQSGKFEGTKVQMSKRGSAIARRVIHTLTLQSISISRNGEAKNPVLREYYLKKCDSKPKLVAMGAVSHKVCNMIFAILRDNKPFKIIAPQEHIKQYNSAKCDIAA

SEQ ID NO: 165807 - protein, 467 aa, unidentified
MGKGKLGLRGRLFHNLLGDDFNPNQLLIMTIDSAKYQPKASVFNYFGEMIHDSFFFTPDRRGVEILCQTAEKVLQDTKKQNLIFGIENTGHYHELIVKLLKERHQIVMLINANTTSEERKSFLDYSKTDDIDLCAIASAIAGGKVIYNQGTSDLEAELRFLTRTRRTLVREKSRVLVTIRTILDHYWSQLQGVTKVVDGKVIVEQIFEDLSAPMFISFLRLLPTPADVLALGTDGLLEFSREHKLRLGATRVELIEQAARLAEPVYVNLLQLYVQYVKELLDNLERLNHRIESFEEQMEAILVRTRGILLLSTGQIGVVSAAEFMAEVGLKIDKYSSSSAVIKLAGTNPVPDESAGHKGQMKISDQGNPWFREVVYTIGKNLSEGRYTNPYFVKFRNQLSCRFPKQKRIAVGNKYIRVAFAMLTKGELFNPETWGGPCLTVDPLRKLKSSNREIARQTLAEITVSKA

SEQ ID NO: 165808 - protein, 407 aa, unidentified
MRLFVGDDWAEDHHDIELMDGAGKVLAKRRLGEGVAGMAALHELIGAELGGDGEDAEVVIGIETDRGPWVAALIAAGYTVYPVNPLQAARFRQRHAVSGAKSDDGDAHMLADMVRTDSHQLRPAAGDTPEAEAIKVVARAHKTLIWERTRQVQRLRHQLREYFPAALAAFEDLDAPEALELLGKAPDPAAAAKLTRAQVSAALKRARRRGIAGKTDAMLAALRSPQLGQPPVLAAAYAASARALIAVITTLNEQVKVLQGQVEAHFGQHPDAEIYRSQPGIGAVLGARVLGEFGDDPHRYADAKSRKNYAATSPITRASGKKKIVAARFIHNDRLVDALMAWAFSSMKGSPGARAFYDELRARGIEHNDALRRLANRLVGILHGCLKTRTLYDEATAWSHRESSLAA

SEQ ID NO: 165809 - protein, 337 aa, unidentified
MEYFAGLDVSMAETQVCVVTRNGSVIHKAKVPSTPADIAAELARLPTCRRIVFETGRMAPMLYHGLRQLGLPVICIESRQAYQALKLLATHKTDHNDARGLAHLARTGFFKPVHVKSLPAHAVRSLIIARKKLVGQRVTLENQIRGLAVVFGVRLPRALSSTFIRQALRASEGIPGLSAAMQGLVAARTAVLAAIVAIDGDIRRMVRASDACRRLMSIPGVGQLTALAFTAAVDDPGRFRRSRDIGAYLGLVPRRHQSGEIDYTGSISKCGDRRVRTLLYEAANVMLTRYKGALKLKEWAFAVAKRSTMRKARIALARRLAIIMHAMLRHGTEFKPI

SEQ ID NO: 165810 - protein, 381 aa, unidentified
MSVSASPKIHVGMDVHKDTVMIAVLPEDAATPTIVKQLPNDEAKLRRFLARVAEDGELRCCYEASGAGYVLHRAIEGWGHTCEIIAPSLIPPRPGHRRKHDRFDAVELARQHRAGMLVPVRVPSEAEERVRDLVRCRETFQREILKSRHYILKFLRRRGRVFRDGNNWTQKHLAWIRSLLNDDQLVHEDRDVLGEYLALFEYKLDRRDELDRKIEKLALSPLYKEAVGRLRSLRGIDTHGAMVLRSELGDLRRFATPRQFMAFVGLVPSEHSSGSRENRGSITKAGNSHCRHVLVQAAWSYRHPPRVGAGLRERQEGVPAHVVAHSWKAQHRLHKLFRRIEQRRGSTIAVVAVARELAGFAWAVLQDLESQSVLTSHAEAA

SEQ ID NO: 165811 - protein, 448 aa, unidentified
MLTVPVDEKAVSPSNGSELVSEMVYHREETAVTTNSLMQRRSAIKPDTLIVGVDVAKFHHVARTLVPGGAIGQPLEFSNSREGFIALSAEIEARKPTPVSTVIVGLESTGVYWINLARWLTEHGCQVVQVSGLYVHRAKQLTDNSRGTSDGKDALLIADLVAQGKYLSFVRPVGVLADLRQLVGLRQRLVRERTARYSLLHQSVDLLFPEFPTVFKDVTGPGARRVLRRFPAPAAALAHPPDEMRRLLAEDGRVQASVAKLTQLQVVARQSIGTLEGTAGLQYALNDTLLELDSLDTRVKQVEAEINRLLAQIDETPILTSLVGPMTAAIILGETGGLRQYSCAAAVLKLAGLNLYQISSGQYHGDRHISQMGRPLLRQALYLAVLQHTHPGTPLYPYYAELLRRGKPKPVALIALCCRLVRLLYALVRDGRCYSAQPPERNQQAQAA

SEQ ID NO: 165812 - protein, 316 aa, unidentified
MNTINHSEINIGIDTSQTVLDIYVRPEGSFQSFDNTPGGIKAAIAFIKPFKPTRVLIEATGRLEMAFFCAADKAGLPVCVCNPIQVRQFAKATGRLAKTDKLDAKDIAYFGEALKPVLTQLKPEKLRHISDLLTVRSQCLDMSTMQKNRLQRMPKSVHKPIANVLKSIKKEIASIDQQLDNLIAKIPQWQARVDQLTSAKGVGKVLAYTLISELPELGQLNRKQIAALVGIAPMNRDSGDHEGKRYIRGGRHKVRTVLFVSMMSAIQCHPRLKPMYLRLVAAGKPKKVAMVACMRKQLIILNTMVKNGTMWDENMV

SEQ ID NO: 165813 - protein, 313 aa, unidentified
MEAAFAGREKPELIGKFSADLDRFLAGLRKFQKKHELGKEDMTLCYEAGPTGFVLARRLIKLGYDCIVVAPSLIPQKSGDKVKTDRRDARKLAGLLRAGELTAVHIPAVDDEVIRDVCRGRTDAVSELMRCKKQLLSFLLRNGYRYSGTARWTEAHMRYLRELVLPHPAQKLILEEYIQRIDTTLLQIARIEDQMDLLLKTWSRRPFVEALMGFRGFQRTAAMVLVSEIGDFKRFDHPKKLMAYLGLVPTEDSSGGKRRQGGITKCGNSHARWMLVECAGHYRMPPKISRALLRSRGNHTGLPRLPGHGQSAR

SEQ ID NO: 165814 - protein, 345 aa, unidentified
MKKVMAGIDLHSNNLVIGIMDIDGKRVAHQKLECRLSEVVKFLTPYKKRLEQVGVESTYNWYWLVDGLQALNYPVVLANPAGMQQYSGIKHADDTNDAFFIAELMRLKILPTGHIYDEHLRPVRDLLRRRMSLVHQRTSLMLSFKSLYTRTTGQEMTLSRLKELEIKEAQELYDHPANQLIAGMQIRHIEQLNESVEKIEKGVLGSARELPYYSKLTTLPGVGRILGMTITMEVGDIKRFAGPGHFASYCRTVQAQCISNSKKKGENNSKCGNRYLAWAFVEAANFARRYDEQCRKWYDRKAAKTSAVIATKALACKLAKAAWYLMARGTDYDPKRMFGQPAKIK

SEQ ID NO: 165815 - protein, 369 aa, unidentified
MGEDSTVFVGLDVAKNRHAVAVAEAGREGEVRYLGEIGADTVSVRRLVARLAKRHGKLHFCYEAGPTGYGLYRMLTAMGHGCSVIAPSLMPRKPGDRIKTNRRDAVQLARLLRAGELTEVWVPDGAHEAMRDLLRLRDAAVNDVRRKRQGISSMMLRTGRVFEGKTSWTRKHRQWLQRQRFDYPAQDLVLQDMLVALQQAEARLEQVEDKVREFVPQWSLAPVVAALQALRGIRLVAAASIMAEVGDLGRFATARQFMGYLGLVPGEHSTGDKVRRQGITKAGNTRARRTLIESAWSYRHLPRTSPRQRRAQEGVSPAIKAIALKAQSRLCGRFRKLAAKGKPLTVANTAVARELAGFVWAIGRAALAV

SEQ ID NO: 165816 - protein, 371 aa, unidentified
MKSIIYIGMDVHKKTYSLCALLKETGEIIGETKIPADVSLIIKFIENAKKSVDSDDVQIKTGYEAGCLGYSLYWQLAEKGIECDILAPSTMHRSAKNKVVKNDRRDAKNIATNLANGTYKSVYVPTDEDVEIKEYIRMMHDFKIELKKVKQHINAFLLRFGHQYPGKSKWISAHIKWLKELELSDMYREILDEYLSQLEILTEKIDRFKYRLEELSQKETYNEKIGQLRCIKGIDTTAAMTMHAETSDFDRFPTANAFASYCGLTPGEDSSGESYHRLGITKQGNSMIRTTLVEAAQVLVRGTIGKKGKKVKSKQKDQDVKVIDYADKAVIRLQQKYHRMIFRGVKRNVAITAVARELACFVWGIETGHIS

SEQ ID NO: 165817 - protein, 414 aa, unidentified
MEIIHPRCAGVDVSKKDAKVCIRIQGSGGRATASTVTTWPAVTSRILELRDHLLNEHVTLVVMEATSDYWRPFYYLLEDDEFEVVLVNARDARNVPGRKTDVSDAAWLADLGAHGLVRASFVPPPPVRELRDLTRARTIITRERTREVQRLEKLLEDACIKLSSVASNITGVSGRLMLQALIDGQDDPAALADLAKKKLRAKIPELTEALTGRFSDHHRYMAALYLHRIDAHSTDINDLTARIEQAIAPFRLARELLISIPGFSNTIAEVFIAETGADMSVFPTPQQLASWAGTSPGANESAGRVKSAKTRPGNRYLKGALGIAAMSAVRSSGTYFSAKYRRIASRRGPAKALVAVEHAMLTAAWHMLSTGELYRDPGADYFTRRTPSKTKARAIGQLESLGYQVILEPLHQTG

SEQ ID NO: 165818 - protein, 403 aa, unidentified
MEGPVITVDVSKGSCHYQPFLENDHPMRKPKMLDDTIEGFSRIPRLIEDMEKKTDVKSLPVVFEATGVYHRPLQKYLQDQGIPYYIISPLLSATYRKTTLNGNKTDSLDCSHIAKAYYSENLIPYYEQSSEYLRMMRLNRYYEGELVHLRKRKVTLRSYLDIIYPGIDRKFSGNQNLYDQLPMEVLKQFPHPSLLLKHREDVIVKRICKPAGHKKKYAEKIVHKIYEAAKECYSGCNPDDIESIELPAMIRSMQEQSCESILSSIVTLAKTSPNYEPIASVPGIGENLASRIIAELGDIRRFRNRSALVAYTGLNPKILQSGDMDGTHLKISKKGNKHLRCLLYLAASCNYRLKKNDPIYEFNHKKRQQFGSSNRSKAATIATAHKLLIVIYAMCKNGSLYQF

SEQ ID NO: 165819 - protein, 356 aa, unidentified
MTIVAQTRPFVIGVDCHARTHTYALFEASSRRQVASEQFPTTATGISRALAWAGRRTDGDMACLWAIEGVGTYGARLARAVTDAGYEVAEAPRMNARGRRGIGKSDPLDAAAIGTAVLALEESQLRAPRRDEGVRAGLRILSAARDQLTRDRTLNSNALIALLRAHDLGIDARKPLAPAQISTVTRWRERQEQIELSIAREEAVRLARRVLEVTTQLAANQKRMTELIQQSPAAPLLEMVGAGAVTVATVLTAWSHPGRVRSEAAFASLAGVNPLPASSGNTVRHRLNRGGDRRLNRALHTITMTRMVHDAGTRDYVAKRTQEGRSYREIRRSLKRYIARTLYRQLNVLYATAEPG

SEQ ID NO: 165820 - protein, 367 aa, unidentified
MKKVSTVAAKVPKNFSQAKLTIGLDLGDRSSWYCVLDDSGSVLLEQRLSTTAKAMREVFGSMPRSRIALETGMHSPWISRLLTELGHETIVAHARNVRLIGESRKKDDRLDARTLARLARIDRQLLSPVKHRSAQAQADLTVIRARAGLVRARTALINTARGVTKSYGERLRGCNARNVNPEKAKGLSPELQAALEPLLAAVESLSEQIREYNQRIEQLAQQSYPQVALLKQVKGVGTLIALTYLLTLEDPHRFRKSRDVGCYLGLQPGRRNSGQSEPQLHISKEGDPYLRTLLVQGAHHILGPFGADSDLRRWGLKLAERGGKNGKKRAVIATARKLAVLLHRLWVSGEAYEPLRNSHPITMPAAA

SEQ ID NO: 165821 - protein, 318 aa, unidentified
MNQSFETLQVEERFAANRESLARWAEQWRGRVEAVAIEATTGWRWVSRELVECGFEVRLAEPVQTRALLGRGRSAKTDRLDARWLARLLAKEMLPQSWIPPEQIQQLRDRTRLRKALAEDRRRWGQRLHAYLLHEGWPCSRSNLLRPPGLRWAAALQLSTHARPQVDSLLAVTAALQEQLDTVDGELRRFARADERCQALQSIYGVGSILACHLLAEIGEARRFQRAEQITRLAGLDPVVDESGESRRRGHLAKAGSPHLRWALVEAAVHAHRPTAPDLALYRATRQRRDTTVARLTIARKIGKRAFHTLRELELTAA

SEQ ID NO: 165822 - protein, 337 aa, unidentified
MDYFAGLDISMDETHVCVLDREGVAVHESKTESTPEAIADELAKAPRCRRIVFETGRMAPILFHGLNQLGLPVVCVESRQAYQALKSLATHKTDRNDARGLAHLARTGFFKPVHVKSLGAHAIRSLISARKKLVGQRVTLENQIRGLAVVFGIRLPHALTAAFIDRALKASEGIAGLSAAMRGLIAARTAVMTAVAAIDADMRQMARASSACSRLMTIPGVGQLTALAFVAAIDDPSRIRRSRDIGAYLGLVPRRYQSGEVDYVGSISKCGDRRVRTLLYEAANVMLTRYKGQLKLKDWAFAIARRSTMRKARVALARRLAIIMHAMLRDGTEFAFA

SEQ ID NO: 165823 - protein, 447 aa, unidentified
MPLDCCERARGSVSWQRFPPDRRRQARVASRTGRRDVMEVMFDRVAGLDVGKDSVTVCVRTPGPRGGRRSVTRTFKTMFGSLRVMRDWLVETGVTIAAMESTSTYWKPPFYCLEEVMEVWLLNAAHMKAVPGRKSDVRDAEWIAQLLEHGLLAPSFVPPPEIRRLRMLTRYRDQLMGDRVREIVRLELMLEDASIKLSSVVSSLKTVSARAMLTAMIDGESDPLRLADMAKGKLRRKIPDLAQALTGHFDANHARLARSMLRRLDLVEQALAELDAVIVDACRPWQRQIELLQTIPGVGPKVAQVIIAETGGDMSRFPTAAHLAAWAGLAPAMHESAGRQTPTGKRHGNKWLAAMLVEAAGSVGRMHGKNYLAAQHARLLKRRGMGRAQVAVAHSILIAAYWMLKRDEPYHDLGADWHRRRNDDAHTRRLVAQLEHLGHTVTLSPAA

SEQ ID NO: 165824 - protein, 451 aa, unidentified
MTKRRKKKIQKIQPVINPHAAGADIGAREIYVAVGVELSDEPVRRFGTFTEQLQQLVAWLVELKIKTIAMEATSVYWIPLSELLEEAGIEVCLVSARCVQNVSGRKSDVMDCQWIQYLHSVGLLRGSFRPPPQVRGVRAIWRHRAALVRQSAWFIQHVHKALDQMNLQVHHVLTDITGLTGTSIVEAILNGERDPRVLAAFRDKRVKASEQTLVAALTGDYRREHLFCLRQAYEAYQFIERQIAQTDQHLAEELARLDPTPASPAPAQTEQPRKAPAKQPLPYPAQARLAALCGVDLTTIPSIGVLTAHTVWAELGGDLSAFPTSKHFCSWLSLCPDNRTSAGKCLSTKTRASANRVAHALRMAAQGCHHAKHPFGEYYRRMRAKLGAAAGLVATAHKLARTVYAVLTTRKPYDPSLHEHALAQTQRRRIRRLHTLATDLGFQLVANQHPV

SEQ ID NO: 165825 - protein, 345 aa, unidentified
MQSKTIAVDLAKSVFQISFADERQRITQRQRLNRSQFKRLITQSPPSRIVMEGCASAHYWGRLAIDHGHQPKLLHAKYVSAYVRRNKTDSADADALIRADGDETLVPIAVKSVDQQALQSLHTIRAQWRGALTASINQAKALLAEFGLIVPRGSQALGQRLHDAMLDLPDLLQPAFSDLIIHIDQQTQRLATIDQQIKGLAKTHPDAQRLTTILGVGPMIATAMVARVPDIHGFKRSRSFSSWLGITPKEFSSGKKRRLGAISLKGDVYLRTLLIHGARAALLACRRNEKAGRPLTQLQRWALATQARIGHNKATVALANKLARIIWAVWTRGTTFNGDDALRFN

SEQ ID NO: 165826 - protein, 400 aa, unidentified
MISVGIDVSKGKSTVCILKPYGEIVSKPFNITHTHKDLSELSSMLFRLNDEVKIVMEATGIYHLPILTYLQEKGFFVSVINPYLMKSYRNESLRKAKTDKIDSRIIANYGLDHWFKMKEFQISGVIYEELKLLGQQYRHYMKLHLLSLAELTHLLDLTMPGIKNLLASWNETNRKDKRSDFVERFWHYDVITSMSEQEFTEEYILWAKEKKYVPSQEKAKVIYTLAQESIPTLPSETSSVKMLVTEAVRVLKEVDATLGLILSRMQEIAKTLPEYSVVREMGGVGNTLAPKLIAEIGDVRRFRNGKALVAFAGIDPPPYESGQFVGCNRKISKRGSASLRKVGYETMRSLKMRSRPEDPVYRYVVKKESEGKSKKSAKIAGLNKFLRIYYARVTELYKNI

SEQ ID NO: 165827 - protein, 346 aa, unidentified
MNNSVVAFAPCGIEVSQLTLVVALRAHDHDEALREFPNTSEGHQAVLRFFERAAGPVRVALESTGLYGLDLALCLHQARVAVMVANPRAVRHFATALMQRSKNDQLDAAVLREFAARMPFQSWRPPSAVALKLVAVARRLEALTDMMAAEKNRRHAASLSEALPAIIRRDLQRSIQTQQRAIDRLTRAAQEFILADLELARRYELLLSIPGFGATSTVHILAELTLLPAGMDVRQWVAYAGLDPREYTSGTSVHKKVRISKAGNRHLRRALYMPALVAVQHEPHLRAYYEHLQARGKTKMQALVATMRKLLHAIFGMFKHDQLFDGAKVFALAPASHSTLVPLEVA

SEQ ID NO: 165828 - protein, 429 aa, unidentified
MNSTQNKKIEQVKETTMVVGVDVGSEKHYFRAFNWRGIELTRKPVAFSNSMEGFNSFYNTIVELMQKSELEEALVGIEPTGHYWFDLGQFMVEKNIKFVMVNPHHVHKTKELDDNSPSKNDRKDPRVIAGLVRDGRYFYSYMPTGVYAELRNASNRRFVLVEEQTRAKNRLQKWIAVYFPEYKGIYTHIDAKGGLMVLKQAATPEEIVRLGVEGIIKIWKDAKLRGNGHKKAMLILNAAMKSIGLKAGLTEARMEIQDLIEDYELQTKRLELVNDLIKELCQQVRYADKLLEIKGIGITTVAGFIAEVGDITRFDSTKELQKLAGLELVADSSGKHNGKTKISKRGRKRLRYLLFEAAISVVGKNEEFKEIHRYYTTREKNPLKKMQSLIAVACKLIRVFHVILTKGISYDATKMLKDIRHPGEQLKAA

SEQ ID NO: 165829 - protein, 344 aa, unidentified
MSIKVVGIDIAKNLFQVCVLSSDGQILSNRKVKRDKLLDTVRQLPEKTAIAMESCATSHHWGRIFQELGHSVALIPAQHVKPFVGRQKNDANDARAICEAFSRPDIHFVPVKSVEQQDLKAIRSVRKRLVENRTALSNQIRGLAAEYGVVFPLSIKALRSHLPIALEDAENDLSPVMRNLLQTLYCDFVSLSEEIDEMAQSVTMLSQQNPRYEAIRNIPGFGPILTAALISEVGAGHQFQNGRQFSAWCGLVPEQNSTGGKSCLGSLSKNGNCELRALLIHGARAVVRCGANKVDSMGAWLRGLIARRGKAKAIVALANKLGRVAWHILVKNSEYDINQAFKPV

SEQ ID NO: 165830 - protein, 312 aa, unidentified
MTITPVVIGIDVSKHHLDMFDIARGQAEQCPNSCEAVEALAARFAPADAFVVFEATGCYDRRLRLALAAAGVRFARVNPRRARDFARAAGFLAKTDRLDARMLAAMGQALGRQMPGGSRVSAERERLALLHKRRDQLVAMRQQERTRLSECGDAEIAADIEHHVAWLDTRVRAMEARIRDCIAASRELARAEALLRSVPGIGPVAAASLLACAPELGQRPAKSMGALAGLAPLNADSGLRHGRRRIRAGRKRIRDALYMAALAAVRCSTRFGDFHRRLRAAGKPPKLALIAVARKLLVTANAVLRDQVAFHA

SEQ ID NO: 165831 - protein, 424 aa, unidentified
MNLTQNDRLKQVTSDTLIVGVDVGSQTHFCRAFDWRGFELSRRVFKFSNTGMGFLTFLRWAEELMNKTEMKKVIVGCEPTGCYWLTFQKFLQDHDIQLVTVNPFTVNRSMELDDNSPEKSDLKDPKTIALLVKDGRFSTSYLPSGVYAEIREASVCRDQIMKQHVRLSNQIQGWLQKFFPEYFECYTDWDSTSGLMLLREAPLPQDILKIGAGGINQIWRDAKVRAAGIKRAQTLVEAAQNSVGLEAGEAARLEIWVLVNDYILKAEQLKRLDEYLEEKIKEVPNVEKLLAIKGVGMSTVIGFIAEVGDIGRFTDPKQIQKLAGLEIVKKSSGKKKGQPRISKRGRRKLRRTMYESARALMTWNPAFQDVFLYYRNRTKNPLGGMQAKIAVACKAIRIFYVVLQTGCDFDEEKFRKDIIRPEAA

SEQ ID NO: 165832 - protein, 355 aa, unidentified
MLIIGCDYHPGFQQIAFVDTDTGELGERRLGHREQAEKFYQECKQRNVAMRVGMEASGHARWFERLLRDLQFELWIGDAAEIRSKRVRKQKTDRQDAQLLLQLMLENRFPRIWVPDAANRDMRQLLWHRHRLVQMRTRVMNQLHVVALNEGLRRKKALWRAAGRKELESIALARWATRRRQDLLDILDQLTPKIQELTCALEQEVEKRPVTRRLMTHPGVGPLTALAYELVIGTPERFHCGKQIASYVGLVPEEKSSGDRRRLGHISKQGNVLLRFLLVEAAQVTVRSQPEWRSKFFHLAMRRGRKIAKVAMARKLAVHLYWMWRQGCDYGQRQKFGSQGRKSGSHAGAPTDSTR

SEQ ID NO: 165833 - protein, 375 aa, unidentified
MQKKVRFLGLDVHAETIAVAVAEADGEVRSLGVIPNRDESIRKLMKRLGPAEHLRACYEAGPTGYVLYWQLTELGVECEVIAPTLVPVKAGDQVKTDRRDALKLARSHRAGDLTAVWVPDAASEALRDLVRAREAAKQDQLRARHRLSKFLLRTGQRATAGVKAWTELYMAWVRQLRYEQAGQEATRLDYLHEVEHMGARVKRLEEAITEAVKLASPQVQEVVRGLQALRGIAEISAVTIVAELGQIARFETARQLMGYSGVVPRENSSGQRQQRGGITKTGNAHLRRIAIEAAWSYRLKPAVGPGLRKRQKDVPESIKEIAWKAQLRLHKRYARLAAAGKDQRKIVTAVGRELLGFIWAIGVKVETAARQSIAA

SEQ ID NO: 165834 - protein, 400 aa, unidentified
MQCTDQHAYPRTTVREEDSSLFMALELSKSVWLIAASAPGSEKVSKYRVAVGDVAALLALLARLKARAERYRDAPMQVVSIHEAGLDGFWVHRMLEANGVESHVVDAASIAVDRRSRRVKTDRIDVERLLRTLMGWARGERRICSMVRPPSPADEDERRLTRERRTLVTERTRHVNRIKGLLATQGVSGFEPLHKNRRQRLEELQQWNGRPLPPRLKTELVRELDRLELVMSQLAALEAERDRALQVRGMAFRNTTKAPSSGAACAGEVGSQLLQLRGIGPEFASVLSLEAFYRNFNNRREVAAYSGLAPSPWKSGGIDVEQGISKAGNARLRTTMIQLAWLWARHQPGSALSRWFHERVGDKRGKIKRIAIVAVARKLLVALWRYVTQGVVPEGAELKA

SEQ ID NO: 165835 - protein, 323 aa, unidentified
MTYIGIDISKDSFVAAFPKVSGYQTQTYPNTVKGIRKFIGLLSVTEHHCVMEATGNYGFMLLYLLDRQGIAVSMVNPKQIKHFSRMMMTVTKTDPKDACMIAMYGEKMNPPVYKMPSETVMLLKQKKTIIRQLKKQLTASKNLKGSLVALPFQDKNGIKALDKTISFLASQIESLESELADLASSEFDRQVKLLTSIKGIGITLATALIVATGGFSYFNNAKQVSRFIGICPTYQLSGTSVHIKGGINRNGDASLRSLLYVASWSALRSNTTCKECYVRLKANGKPSKVALIAVANKLVRQAFAVIKSDAPYVDGFVSTRQTK

SEQ ID NO: 165836 - protein, 344 aa, unidentified
MLYVGLDLSRKRLDWQALDLYGERVAVGAVPPDRDGLAKLGQRLGDAAVLAVIESMSGARFVHDQLERAGWDVRIADALKARGLAPLACKTDKIDCWVLAELARLNLVPEIWLPDPEVRAERERARFRLHLVKHRRALKNRVHSILFQHGVANPHSDLYGVGGRRLLERLALPEPWASTVESSLSLIDTLDEQIHACEREPRRLGADHPYIPLLVTCPGIAWTLAYTIAAELGDLSRFASPRKLVGYTGLCPKVEQSGERDRRGPLRKNGPDYLRWALIEAAHVAGRNPRYQPIVERMRARHGRTRGSKIAAIEIARRLTESIWHMLTTKQPFAPAGAPCPLAA

SEQ ID NO: 165837 - protein, 316 aa, unidentified
MVLGVESFDASPRGYKAMFEWMGTFGTVSKVGVEGTGAYGAGLGRFLRRAGIEVIEVDRPNRQARRTSGKSDPADAVEAARAVLSGRATGTPKSRDGNVEAIRALLVAKRSARDARLRALHQMRQLSYTGPDQLRSRLKDLSITDLVAETAAMRPRSSGDPVVYATKVSLAALGRRVLSLEYELIGIDELLTTLVTTCAPEMLELFGVGIDTTATLLVTAGDNPERLRSEATWAHLCGVAPIEASSGKVTRHRLDRGGDRNANQALWRIVMTRLACDPRTREYMERRTKEGRSKREVIRILKRYVAREVFKYLPRA

SEQ ID NO: 165838 - protein, 331 aa, unidentified
MRRPKDKLIAGLDLHSNNVMIGIINQDGKRVAHRKLDCDLKQVTEFLEPLKPQLQSMAVESTFNWYWLVDGLRAQSYRIDLANPAKIEQYSGMKHADDKDDAFHLADLQRLNILPKAHVYDPQLRPVRDLLRRRTNLVHQHTALLLSFSSLYTRTTGQKLDMSEAKKMEPKQAPKLYEHPANQLIAQVQAEHIQALAKSIRRVEKAVLGCAREIPLYERLLTIPGIGRILGMTITMEVGDIKRFRSDGDFASYCRLVDAKRLSNGKCKAENNVKCGNKYLAWAFVEAANFARRYDENCRRWYDRKAARTNKILATKALACNLARDGQAVQL

SEQ ID NO: 165839 - protein, 343 aa, unidentified
MQTITTIGLDLAKSVFQVHGVDAGGQVIVRRQLKRRYVLTFFQKLSPCLVGIEACASAHHWSRELQALGHTVRLMPPAYVKPYVKRQKNDATDAEAICEAVTRANMRFVPTKTSGQQSGLLLHRARHLFIRQQTSVINAIRAHLAEFGIVAPVGRHGVEELLNVVADSNDKRVPEIARACLSAFGAQLRRIKEQVLEFDRLIRAWHRSNELSMRLDEVPGVGPVLATALVAAVADPKSFRSGRNFSAWIGLVPKQHSSGGKNRLGNISKQGDRYLRGLFVAGALAVIRYAKIHGTTHRPWLTALLARRPTKVAAIALANKIARMVWAMMARGERYKEPFALAR

SEQ ID NO: 165840 - protein, 342 aa, unidentified
MNSIKNVVGIDIAKNVFQVHEVSLETGEIVSLRLKRARFLAHFVNRQPCLIGMEACGGAQHWARQLVALGHAVKLLPAKQVRPFVGGNKNDQADARAIWTAVQQPGVKTVAIKTEVQQAVLAMHRMRQQLVKFRTAQINALRGLLTEYGEVMPQGRAALKRQIPEVFERLHDRLPKVLIETLREQFARIGQLDERVAEIECRLQVWHREDAACQRIAKIPGVGMLTATAAVSTMGDPGTFRSGREFAAWLGLVPRQVGTGGRVKLLGISKRGDTYLRTLLIHGARAVLSHAKKNPPAWIEKLLQRRPLNVAIVALANKMARTLWALLAHQRTYQPEYACRPV

SEQ ID NO: 165841 - protein, 422 aa, unidentified
MVQVETTKEKERRKAMISVGIDISKEKFTICALEQGSKIIWKPFDVSLNKRKVEEFLEKLEKLKKKVKITMEATGKYHLPILYELKDRGYFVAVINPLKMKQFCRALNFRKAKNDNIDAKQIAEYGLMYWKELEEYKIDEDNYMVLKELNRNYQHYMELRINQINFIDQTIHQTFPGIKKLIPHNSGDFSKDKLLDFLEKWWHKDLVLEKTEEEFIEEYKTWAKEKRYHPNANKAKAIYKLAEDSISTQPSHNSKIETNIREGINLIKQINQILNSILSQMIEISEPLEEYQEAKKFSGISEKLAVQIVAEFGDLSKFKNKKSLISFIGIDAPPYESGNFKADQRKISKRGNTILRKVGYQAMKCMMSAKDPENEIYKYMIKKEKEGKAKKVCKFAGLNKFLRIYYARVMESKAEKKELKAA

SEQ ID NO: 165842 - protein, 330 aa, unidentified
MKNYEEAVGIDVSKKTIDVSCHLAQQHRVFTNDVKGYHSMVIWVKKKTKGVSVFYCFENTGNYSMKLAIYLSYKGISYVEESPIKIKRSSGLVREKTDKVDSGIIARYAWLYREELVQSEVKSEVYQELGRLIGLRDQLVRSRAGLLGTLKEVEQLLSSPSTDTSCTVLKRSVDNLSKQIKKVEYRMDSLMKEEESLLKNYNLLLSIRGIGFVVACQLLYHTENFKRFDTWRQFSSYCGLAPYEYSSGTSIHRRKKCHYLGDRKMKSLMSMSSISAIQHDPELRMYYKRKVSEGKPKMIALNNVRNKLLARVFSVIKRGTPYVVLQQHAA

SEQ ID NO: 165843 - protein, 335 aa, unidentified
MNYRLFAGIDVSKMKTDVVFFLTENPDEQFHGTFSNNEEGCKEMVAWIQELTGLSIAEMLFCAEDTGLYTLPICTYFDGQGGNLWVENALRLKRSLGLKRGKSDKADAAEIANYGFLHRRKAVLFKLPSKTISKLKHLLSCRKQLVKQQTALKNASGELEAFDGDSADFTLEIRKSLIKEYDKKIDMIEAELIRCVKADKLLEKQYRLVNSVYCIGPQTAMFIVVLTQGFSLFEDPRKFACYCGIAPFGNTSGTTLKGKPKVSHLANKRIKTLLTMCALNTIKKDNEFKRYYDRKIQEGKHHSAVLNVLRNKLVSRAFAAVLKDRPYKKDLYNAA

SEQ ID NO: 165844 - protein, 366 aa, unidentified
MAMTTMTHPPQPTLRVLGGVDTHKDVHVAAALDDTGRLLGTATFPTTTVGYRQLWRWICSHGDVVAVGVEGTGAWGAGLARDLTAQGADVREVMRPNRQHRRRYGKSDEADAIGAARAVLAGEALGTPKAGTGQVEAIRLLRVARRSAMKARTQAGNQIHAVVDTAPEELRRRLVSRPTATIVAEVARFHRRLPDTPLEAARFTLRSLARRWQYLDDELAALDAQLDELTATAAPTLRAMNGVGPQVATALLAAAGDNPDRLRSSSSFAALCGVSPIDASSGRQQHHRLNRYGDRQANWALHVIIISRLRWHVPTKAYMARRLAQGRTPKMIMRCLKRHVVREVHRAITLDLGHQTERTRAQPIAA

SEQ ID NO: 165845 - protein, 382 aa, unidentified
MSEGTMFVGLDVHKDDIAVAVARAGGGAPESRGTIPNRPEAVRTLVRRLGSAATLRCCYEAGPCGYGLQRQLTGLGVVCDVVAPGLVPVKPGERIKTARRDALKLARLSRSGELTSVWVPDVAHEALRDLTRARGDARADQHRARQRLGKFLLRLDRRPPEGVNAWTARHRQWLDGLRLGEPAQRTVLREYRAAVEEAGARLARLEDEIAEVAQTGPHAALLGALQTLRGVALVTAATLVAELGDRRRFAHPSQLMADVGLVPSEHSSGGRPRRGAITKTGNAEVRRVVVEAAWQYRHAPSLRGALRRRQLGQSAEVRRIAWSAQERLHKRWRRLLGRGKLKQQAVVAVARELVGFIWAIARAVATEAAGAQPTGEAVGLAA

SEQ ID NO: 165846 - protein, 347 aa, unidentified
MNLYAEQHKHYCGVDLHARSMYLCVIDHDAEVLLHRNLRARPEPFLKAIEPYRDDLVVATECVFTWYWLADLCAEENIRFVLGHALYMKFIHGAKTKNDRIDSRKIAALLRGGNFPLAYVYPPKMRATRDLLRRRMYFSRKRAELLAHIQNSNSQYNMDPFGKKIAYKSNRAGIAEQFQDPAVRKSIEVNLELIEHYERLLKDLERHILHNAKLHDPNAFYLLSTVDGIGDILALVILYEIHDIRRFPRVQNFLSYARLVKCPKESAGKRSGTSGNKIGDPYLKWAFSEAAVLFLRNNPQAQKYMNRLRSRHGKAKALSILAQRLGRAVYYMLLRQKAFDKEKFLRT

SEQ ID NO: 165847 - protein, 456 aa, unidentified
MARKSKSKGKSSGRMLPVMHPDAAGVDIGAEEIFVAVPAERDADPVRSFGTFTRDLCEVADWLQRCRVQTVAMESTGVYWIPLYQILERRGFQVFLVNAQHVKNVPGRKSDVSDCQWIQYLHSVGLLKASFRPPDEICVIRSLWRHRESLVQMAAEHTQHMQKALSQMNLQLHHVLSDITGVSGMAILDAILAGERDPIKLAGLCNRRVRSSRETVAKSLEGDYRVEHLFALRQSLAAYRFQKLMAEADQEVELRMRELPRAKEAPEKRPPGSKKRIYQRAGNEPTFDLKAELFRIAGVDLTDVPGISTLTAHTILVEVGADVSRFRNGSAFASWLGLCPEKQVSGGKVLYTRTRKVKNRAAIALRLGAHCLYHAQNYLGEFYRKMKWRLGAPEAVTATAHKLARIVYHLLSTKEPYSESVFVRCDQQTNARAEMRLRKQAANLGFQLSPIPESSL

SEQ ID NO: 165848 - protein, 407 aa, unidentified
MPRDYIGVDWADTEHAIWVEDESGTQVAALTVPHTAAGLSEFGRWLYERQAQGIECWAAIERPEGRVVDFLLDHGVVVYPVNPKALDRARDRFRMSGTKSDPFDARVLAAFLRTDHPHLRPLRPSSELAQELKLLTRDAQRLIRQQTRLLNQLTATLKEYYPRPLEVLGELTTPLARAFLTAYPSPDALAALSRAQWRRFARTYRLSEARTMALWTALQPPQLPVPAHVVRAKARLVRVLVDELSATVRAVEEYRQAVDDFFATLPAAEWARSLPGGKSGTTVPTLWAELGDAPDRWQSFSHVQAQAGAVPVTARSGKSQHVRFRFACNTHLRAATHTLAFLSLRQSEWARGYYKQYRARGHRHHEALRALGAKWLKIIFVMWMHHTPYDEQYHLANMARQHLRQAA

SEQ ID NO: 165849 - protein, 326 aa, unidentified
MKKKYFGVDVGSKELVLAYFPSGSSGKVRTYKNTVTGIKKLLKLVGKFENAHIILEATGTYSKRLVYGCLQADVPLSMLTPSQGKSIGLVLGKSNKTDAEDARSLARYGEMANPSVYVHPSENEEHNRQIIKYISYLNKEKTRISNKLHALSFEQYPNAYVVKELEEELIKREQQIKEAMEELENLQGDELQEAIEKAETVVGIGRKTALCLILLTGGLRDFETPKQLANFLGICPALYESGSSVRKRANISKKGNKMIRSLLYMCARSATQHNPSCKALYDRLRKKGKAHKLAMVAVGHKLVRQIFAVVKNNVDFDKQYKNEKFA

SEQ ID NO: 165850 - protein, 429 aa, unidentified
MKIIYPRVCGIDVHKQFIVAVICISESVEPIYLKKRFSTFHNDLIRFRDWLIQNDCQNVCMESTGKYYIPVYNVLESHISNIVVANPKWVCAVKGEKDDDKDAKWIADLFKFGIVRSSFIPQKDFRILRELTRYKYKLVNMRSSEKNRYQNALTSGNCKLDMVFTDVFGKSASNIIDLILSDNPYTDEDILSKVHKNCKASPDMILNSINGTDLTPVQKSRIELVNDHIKQLSSNIQRLDKLIDLMIEPYEDYISFLCQIPGVSRNSAIIILSEIGVDMNQFTSTRRLTSWAGLTPSSNQSAGKKKSVRISRAGVYLKPCLVEVAHAAVKDKNHPYYANKFNKISKRRGKKRAYIAIARKILVAAYHMLLTGEIWNPADLSEVETPVEQRIKYVKNNLKSDIKQLLDIGLTVEELTLMIQQNANTMTAQ

SEQ ID NO: 165851 - protein, 419 aa, unidentified
MAFKILRKNCCGLDIHKTWIFACIGITDSNGRTEYKQARFSSFSNGLRDLADWLAKYSCSDVCMESTGKYWIPVFNILEKTCWVTLAHPKYTKPQKGNKTDRKDAKWICDLYMCGMVKPSFIPPPDIRQLRDLMRCRVKLTNMLTGEKNRAQNCLTVSNLKLDDVFSDVFGKSSRSIIQYILEHPGEQFDVTPFIHRRCKHPVEEIQAAVDGVVSREQAAKLKECLLHIDQLNAHRERIEAEILRLAEPYPYQLELIRTVPGFAAAPLTAVALISEIGVDMSVFPSAKHLASWAGCCPRNDQSNKKVKSTRISRAGCYLKPLLVQIANAVIKSDRHPECRERYRRIKARRGHKKAIIAVCRMLLTAIWNILSKLEPYSAKGYLADKLTEHSVVISKAEGLALLRKRGYIFKDELAVESG

SEQ ID NO: 165852 - protein, 411 aa, unidentified
MQVIHPRCCGLDVHKKIIVACLMILAADGRLSKEIRSFGTMTQDLLDLSDWLLATGCTHVAMESTGSYWKPVWNILEGNFELVLANAQHIKAVPGRKTDVRDCEWIADLLRHGLLRGSFVPNREQRELRELTRYRTSLIDERTAEVNRLQKTLEGGNIKLASVATDLMGKSGREMLAALVAGSTDAEAMADLARGKLRDKLPELRKALTGQFGHHQRFMLAEQLAHIDDLDDRISRLDAEIEERMRPFSEVMQRLDVIPGVGTRTAEVMIAEIGTDLSRFPTAGHLASWAGMCPGNNQSAGKRKSGKTRKGDSALRRALMEAAHAAGKKKDSYLRAQYHRLVARRGKKKGAVAVGHTILVIAYHLITNKESFYQDLGVHYFDERDRQRVERRLVHRLEALGYTVSLQPVAA

SEQ ID NO: 165853 - protein, 350 aa, unidentified
MRTAISVLGIDIGKNVCSLVGLDVSGNVVLRRGVKRETLIALAAKLPPCIVAMEACCGAHHLGRVFAARGHEVRLMSPEYVRPYVKAQKNDDRDAEGIAEAATRPTMRFVELKEQAQLDLQTLHRARDRLVGERTALINQLRAILLERGMVVAKGKRNLEKFVAGLFEGSDDQRLSERMRTLVADMRAQWTELDRRIRAFDAEFVAFLQQNADARLLSTIPGIGPLIASALAAAIGAGETFEHGRDLAAWLGLTPRQATTGGKPKLLGISKRGNRYLRRMLIHGARAALPFVAEYDTSLGRWLKGLLTRVHRNVAVVALANKLARIAWAVLRRKEAFMAKEQPSKAVAAA

SEQ ID NO: 165854 - protein, 337 aa, unidentified
MKYIGLDVHKANTVACAVSAGGKAVMSAEVRTNDAGLSEIHARMNGAEYAVMMESSTYSYAAYRFFERLGVEAHVVHARSLKMITDSDKKTDRTDAEWIGRCLRLWKNGEIELSMSYIPTDVEAELKDLCRYKEELSNKLGDEVRRIRSHMHRNCQELPSQFQNLTTRKSREFISTAYSNDYTLLQRVSGYAALLKESEQVAKEIERRGTNDRNVELLESIPGIGRQTAVQLMSMIVDISRFVDPEKLCAYFGMAPRVRDSGGKENHGRMTKSGDPMMRSIMERVTLSHVRHCDSTITAYFRRKSKEMGTKKALMSAARKMLAVIHAVLKRGTPFTA

SEQ ID NO: 165855 - protein, 351 aa, unidentified
MPRTATVHAVTAIGIDMGKNTLHMIGLDSRGTIVLREKVSRGRITSRLANLPPCLIGIEAGMATHYVARELAVLGHDVKQVPPAYAKPFRQGHKNDFRDAFAVAEAVQRPTTRFVPAKTNEQLDLQALHRVRSRLVSERTAVINQIRGFLLERGIIVRQGLRFLRQALPDILAKRTDVLSPRMVRIVADLANDWRQLDERIEPVTDEIETLAKSDNSCRRVMTVPGIGPIISSAMVAAIGSGAAFARGRDFSAWIGLVPKQMSTGDRTILGRISKRGNSYLRTLFMQAARVILLRPVSWPKHGFGVWLARAAQRLHPNVLAAALANKLARIAWTVLVQERSYEARFTKAAA

SEQ ID NO: 165856 - protein, 428 aa, unidentified
MSNQELIRRKQYCQIVKEITGSDQYMVVGIDVGKDNHHAFMGTATGKSLFRKLIFENNRDGFSRLLRTADEIRSQNDLSKIVYGLEPTGNYHKPLAKHLIRFGSNLVLVSGEAVKKNRALLDGRWDKHDTKCAANIADLVSRGRCLYYDSPSSDIIELRSLLSLRRRLKKEEHSLRMRIRNNLLALYFPELDRFYSACENETLAIVKWCPDPDQIAGMDFEPFFQMVTRTRRGTAQLLRLRKIHQQASESIGCPMGSSATFEAQLLVDKLKQVRQQLKETEAAIKDVALEFTEYSYLLTIPGFGPYISARVLASIGDPFRFKNRKQLIKMAGYDLCANRSGKTSDKAVPVISKKGNSELRYALYQAAKVATARVDLFRTYFTELLRGRERERGIKTKMCVKLAAKMLIIAWTLMKKKEPFDPEYLTIE

SEQ ID NO: 165857 - protein, 397 aa, unidentified
MKGFCISLDVSKGSSFYQGFKGLDEPITKPKKIEHNLEGFKELQKLKENIRKEYDSDCIVIFESTGIYHKALQTYLDEHDFKYTIISPLLSAKVRKSDIRGTKTDAKDCASIAKVFYLKELRIYSKTDEIYDDLKEKSRYYDFLVDEMKRWKVAFRRLLDIIYPGFDKIFENLYIDYVQELLLEWPHPEIIRKKRLDTIAKFIEKHTCHKESFSLKQAQALKDYAENCASGCSYKSYLVSQFDTVIHTLNSQIKHLETTLDEIVEIAKKLPNYEIIRSIPGIADNLASRILAEIGDIDRFDNASQLVAYAGIDPQIYQSGQISGLHLKISKKGNKKLRCLLYLAVTCMIKTNRDTKIVEFYKRKKADGLPARSALVASMNKLLRIIHSLCKNGCLFK

SEQ ID NO: 165858 - protein, 347 aa, unidentified
MLIIGCDFHPGFQQVAIFDNQTGEYQEERLSHRAEAEQFYRSLAGQKVRVGMEACGHYPWFERLLAECGHELWLGDAAKIRATVVRKQKTDRRDAEQLQVLLREGRFPRIWVPTLEERDARQLLVDRHKQVQARTRTKNQLHALALSQGVQKKRKLWTEVGRAELEKLELLPYAAVRRERLLAALDRLEEEIQQLNRQVEEEVKQRPSAMKLMSHPGVGPVTALAMVLTLGPAERFTSGRQVGSYFGLIPSEHSSGEWQKLGHITKQGNSFLRFLLVEAGQSAARYDAELGRFYRRLAARKHRALAKVAVARKLALRLYLMLREDWTYAQLCKALVQASPSHSVVEG

SEQ ID NO: 165859 - protein, 324 aa, unidentified
MAKRTMICAGIDTGKYKLDVAIDGSSEQLQVENTPEGYKMLSDWLRRHRVKRIGIEASGGYEQAVVAELRRKRFVVVVFQPAQVRAYARFKGQRAKNDKIDAALIAACTAAVKTVHDAPDPRLLPFAEQLTMIDQIGEDIARLYNRLESCRNVRIQQVWKEDLAHLEKRKRAELKALVAAIREHRDLAERLELIYSVSGAGMPTAVAILVRMPEIGKITREQAAALAGLAPYDDDSGQRVGGRHIAGGRERLRRALYTAALPASMRWNPQLIALYKRLIAAGKEHKRALVACARKLLIFVNTVVARGTAWRNQPPQRNEVPATA

SEQ ID NO: 165860 - protein, 356 aa, unidentified
MPSITPEDAAIEVVGGVDTHLDTHTAAVIDTVGRVLGTEQFPATAAGYTALLAWMRGFGRLSRAGVEGTGAYGAGLARRLRKEHFEVIEVDRPNRKTRRFHGKSDPIDAIAAAKAALAGERTGQPKQRDGRVEALRNLRVARRSAVSQRADTQRQIKSLIVTAGDELRAQLRGLKVKQLIATCANLRPDRADAGSPATATKIALRSLARRHQQLSAEITDLDELLEPLVAAINPDLLAVNGVGPEVAGQILVTAGENHDRLTSEAAFAMLCGAAPIPASSGKTTRHRLNRGGDRQANSALYTVVVNRLRWNPRTRAYAERRTKEGLSKKEIIRCLKRYIARELYHLITAKHPEMAA

SEQ ID NO: 165861 - protein, 391 aa, unidentified
MIYVGIDVAKDKHDCFITNSDGEVLFKAFTITNNLDGFNELHQKIASVMDDVTKVKVGLEDTGHYSYNLLGYLIDKGLAAYVINPLHTNLYRKSLSLRQTKTDKVDARTIASMLMSDVNLKSYSDISYHNEELKSLTRYRFDKVKERAKLKTSVSRLVCILFPELEKLVPTLHITSVYALLSEFPGAKHIATAHLTRLTNLLSEASKGRYGKDTAITFRDAARASIGSNMPAKSLELKHTIKLIQELDSEIAEIEDEIKITMDEINSPILSIPGINYRMGAMIIAEIGDFNRFDSPDKILAYAGFSPSTYQSGQLDGAYAHMEKRGSRYLRYALYNATKYVCHWDPTFAAYLAKKRVEGKHYNVAISHAVKKLVRVIYHLEKTKQQYIKAA

SEQ ID NO: 165862 - protein, 313 aa, unidentified
MDHDSAFVGIDVSKNKLDSFVSTTGQVEQFFNTPEDIQRLAKHLKAQMPALVVLEATGGYERLAAAELCAAGLPVVVVNPRQVRDFAKATGRLAKTDALDAQVIAEFAQAVKPEIREMPDEHARELADLLTRRRQLIDMIVAEESRLKQAVFKALRRDIKAHIVWLQKRLKSTDDDLHEAIKASPAWKANYDLLREVSGVGNVLALSLLAMVPELGKVNRKQVAALVGVAPFNCDSGLYKGRRRIWGGRTEVRSVLYMAVLSSKSHNPVIERFYNRLLAAGKTKKVALVACMRKLLTILNAMVRDQKHFAEMA

SEQ ID NO: 165863 - protein, 310 aa, unidentified
MERFIGIDVAKATLDIASLPDGESWTVTNDDDGIHELAPRLVALAPTLIVLEATGGFESAVAAALAKLGLPVVIVNPRQVRDFAKALGRLAKTDALDATILAEFGQKVRPAPRALPDEAAQLLDALLTRRRQLIEMLTAEKNRLGFARGPVQRDITQHIRWLEKRLADVDGELHDAVTASPLWQAKDDLLRSVPGVGRVTSVTLLAELPELGRLSRREIASLVGVAPLNRDSGALRGKRLVWGGRAPVRAALYMAALVGLRWNPVLRTFYDRLRAAGKPFKVAATACMRKLLTILNAMVRQQRRWEPRMA

SEQ ID NO: 165864 - protein, 336 aa, unidentified
MDYCGLDLGKTSSRLCVVDRARNILREQDVATREKALRKAFGRKQKLRVVIEASNNAFWVAELLEELGHELRVVDPNRTKAIGASLIKTDKLDARWLAYLCAADLLATVRVPTREERIARMPVTARDGLIRARTRLINAVRGITTSEGIVVQQCKPERLLEMVEACQDQLPEGMYEALLPLLDGIDALNICVDTGTVALRERADTDPALQRLQTIPGVGPITASIYAGAIIDPSRFSSGRDVGAYLGLVPSLYQSGATMRRGRITKRGNRQARWALCMAGNAVLNCKKSTPLVDWAKGLEGRIGRKKAIIATARKLASVMWAVWSKEVEYDARLVA

SEQ ID NO: 165865 - protein, 339 aa, unidentified
MRYFIGLDVHSNNTVIAVLDEKGKRVYSRRVKNFIKLVLEELEPFKGKVQAIALESTFNWYWIADGLRDQGYQVHLANPSANKQYEGIKHTNDFSDAFFLAELLRLGILKEGYIYPRRERAIRDLLRKRLMLVRQRTAHILSFQSLYNRVKGCSFGGVMYVKRLKEDEMDDYFEDENFALAAKANIASIRFLTQQIEKLEKTVLKKIELLPEFEKLKTVPGIGNILALTIMLETGDIRRFPKVGNYVSYCRCVPSERSSNKKKKGENNRKNGNKYLGWAYVEAANFARRYCSKAKRFYQRKSAKTNNIVATKALAHKLARASYFVMRDRVNYEPERLFG

SEQ ID NO: 165866 - protein, 403 aa, unidentified
MNRNAVGIDVSKGKSMAAILRPYGEIVSSPFEIKHTSGNIQSLIQQIKSIEGESRIVMEHTGHYYEPLARELSLAGLFVTAINPKLIKDFGDNSLRKVKSDKADAVKIARYTLDSWTELKQYSLMDEIRNQLKTMNRQFGFYMKHKTAMKNNLIGILDQTYPGVNTYFDSPAREDGSQKWVDFAAAYWHVDCVRKMSLNAFVDHYQKWCKRKKYNFSRDKAEEIYGAARELVPVLPKDDLTKLIVKQAIAQLNTASKTVEELRTLMNETAAKLPEYPVVMGMKGVGPSLGPQLMAEIGDVTRFSHKGAITAFAGVDPGVNESGTYEQKSVPTSKRGSSSLRKTLFQVMDCLIKTKPQDDPVYAFIDKKRAQGKPYYVYMTAGANKFLRIYYGRVKEYLMSLPE

SEQ ID NO: 165867 - protein, 311 aa, unidentified
MDIVVERGAGLDVHKESVVGCIDGSGIKKEVQTFGTMTNELIRLKGWLKDNKITHVAMESTGVYWKPVFNVLEEDFEVILVNARHIKNVPGRKTDVLDSEWLCKLLRCGLVRGSFIPMREIREMRDLTRYRGKLVNVIDAEKNRVQKVLEDANIKISSVATDTFGVSGSAIIDALIKGEKTIEEMTALVKGRLCKKKKEMQEALVGYFREHHKFMIKASLEHIKQVEKIIAELDVRIDTIIEEKYAEEYKLLQTVPGIKEHGAATILAEIGNDMNQFPSEEHLSSWAGLSPGNNESAGKKKVEGQPTGTNA

SEQ ID NO: 165868 - protein, 290 aa, unidentified
MTTTGINQILKELKRNETQLILMEATGGLESGVAGYLQSEGFDVVVINPRQARDFARAMGYLAKTDQIDARVLLQMAKVINQHPEREKYIRPLPDVHRQLLAAMVVRRRQLTIMLTAERNRLHPSHPQNHESIRFIISVLKSEMARVEAEMSAYISENFSELSALLSAVKGVGAATVALLLAEVPELGTLSRREISALIGVAPINRDSGTMRGRRTVFGGRASVRTALYMSALVGTRHNPVIKEFYTRLVAAGKPKKVALTACIRKLLTILNAMLKNNEAWDPLYHQHAS

SEQ ID NO: 165869 - protein, 373 aa, unidentified
MPKHSTAFGMDVHLRSTTVCALDADTGEAVTRRFPGNPWGEIAGWMDGFPGPSLAAYESGYPGFAPQRELAGLGVECVVAAVSKIPRSAADSASKNDRNDAARMAKAILAHDISPVWVPSPEVEGIRDLAGAYDGATARLATAKQRLLAFLARRGFVYGGTTPAGNPRKYWTYDFLRWLDKVRPEDDGGVRALAALRNEVEAAAEARADLLSEYRAAVDASPIAAEAAALQSIKGCAFALAAAFSAEVGDFTRFRSGRQVTAYFGLAPSQRSSGDSVRLGGISGAGNALVRKLAVEGSWCYAAARHQPKLMPRDTGVPLEIRMHGRKGSERLLRRREEMLARGMPAAKANAATAAELVRWLWALGMMCREGAE

SEQ ID NO: 165870 - protein, 337 aa, unidentified
MNNIESTIEYSLGIDISKKDFHAAILRHVDRKIIAEKSFLNTAKGMKEHIQWLTKHCGKEMLIQACLEATGTYGDSVATHLHKHLSKVSIVNPRAIKNFGAMQLRRDKSDKADARLIAQYCQNQQPSAWQPPSEAQAQTKALARRLSQLKCDLTRENNRLEATSDKATRTDIKDHLKSLTKRITKLEKQLEDLIKNNPENKQTLELLTSINGIGKKSGSQIISELPDIKNFPTGRELSAYAGVTPRHFQSGTSGKTRTPMSKAGSSQLRKHLFFPAMSAMRYNPICKEFAARLKAQGKPQIVIIGAIMNKLLHIIYGVLKHQKPFDPEYLKKHEKSA

SEQ ID NO: 165871 - protein, 324 aa, unidentified
MAPIYIGIDIAKASFTVALPLTNGHFLDYSLPNNPAGFSQLLDLLPAHSQCVLEASGPYYLPLALWLTHQRIPLSVLNPLVVRRFAQMLLRRTKTDKADARLLSQFGANQTPPCWQAPTTLMSQLTQLQTLLEQYINQRTALRNQQEAFTHSGVPNPILEQSLQKSLEHLDEQIQTLEQQLDQLANTEYTKLYAHLQSIPGIGRKTALCLLVLTRGFSRFESAKQLVSFVGLAPRVFESGSSVNGKGHICKLGNNRIRQLLYMASMQAKKANPACRSLYDRLVGAGKPKLVALIAVAHKLVRQCFAVARSGLNFDQKLASPIAS

SEQ ID NO: 165872 - protein, 405 aa, unidentified
MTDIEQHDSVQVFVGIDVGKGAHHAVAVDRKGKRLLDSALPNDETKLRALLGKLKEHGPILLVVDQPATVGALPVAVARDEGVFVAYLPGLAMRRIADLHAGEAKTDARDAYIIAEAARSLPHTLRSLKLADSQLAELTMLCGFDEDLAGQIPQVSNRIRGLLTQIHPALERVVGSHLDHPAMLDLLERYPSPAHLAALSQKQLANRLVKLAPRMGKTWAAEILQALSEQTVVVLGTQAASIVLPRLAQQLAALRIQRDEVAKEVERLVLAHPLHPVLTSMPGVGVRTAARLLIDVVSRAFASAGHLAAYAGLAPVTRRSGSSIRGELPSRRGNKQLKRAMFLSAFAALRDPVSRAYYTRKIAQGKRHNQALIALARRRCDVLFAMLRDGTFYSPPRPQILLTRT

SEQ ID NO: 165873 - protein, 313 aa, unidentified
MKEEKTFIGIDVSKEKLDVGVRPQVDFMTFANTEDGISLMTDFVKSKQPELIVLEATGGLEMAALRSLVVAKLPAVCVNPRQVRDFAKAMGVLAKTDKIDAHVIARFADSVRPEIRPLKTEETEILDAFNTRRSQLIIMLTAEKNRLTIASKWTKKDIEKSIKGLEKALAKINREVENLIKKSPHWRHMDKILQSVPSVGPVMSLTILADLPEIGTMNRRQIAALVGVAPLNRDSGKYKGRRAIWGGRARIRSVLYMCVISGICHNPKIKAFYNRLISSGKKHKVAITACMRKLMIILNTMIKNDTCWNESGC

SEQ ID NO: 165874 - protein, 316 aa, unidentified
MVPSPLFVGIDVAKATLDIAVRPTAETGRAPNDAPGIDALVMRLGALAPTLIVLEATGGYQGPLVAALVAAALPVVVVNPRHIRAFAQAVGILAKTDRIDARVIAHFAEAVKPAPRPLPDAETQELRALLVRRRQLVEMVSAERARLDTAPPSVQDAIQAHIAWLTTQITGLDDTLTHARQTHPAWQAKDDVLQSIPGVGPVLARTMLGQVPELGTLGAKPLAALIGVAPFNRDSGTLRGRRTVYGGRAEVRAVLSMGALVATRHNPVIKAFYERLLAAGKAKKVALTACMHKLLTIMNAMVRDLKRWQPREVPIA

SEQ ID NO: 165875 - protein, 360 aa, unidentified
MFTERTSVGLDVHARSVAAAAIDGVTGELFQARLTPSHDHIQSWIRELPGPVAVTYEAGPTGFGLARALRAAGTRCVVAAPSRLQRPAGDRVKTDAKDAVHLARLLRLDEVTPVVVPTLAQEAARDLVRAREDCRGDLMRARHRLSKLLLRHGIVYSGGRAWTGAHDAWLRRQRFTSPAVRMTFDSDYDAVLTVQARRDRLDEVIAVMAADSEFTPLVRRLGCLRGVSTLTGFALAVEIGDWHRFTGKSIGSFVGLVPSESSSGASRTQGPITKTGNTHIRRLLVEAAWHHRARYRAGKTMRDRWDLASPAARARGDAGNQRLHTRWIAFNLRRKRHVIANVAIARELAGWCWSLAVMND

SEQ ID NO: 165876 - protein, 399 aa, unidentified
MINGHDQFAVFLGLDVGKGEHHAVAQSRPGKKLLDRALPNDEAKLRELYRRLRKHGPVLLVVDQPATIGALPVAVALDEGITVAYLPGLAMRRIADLHPGSAKTDARDAAVIADAARTMPHTLRALKLDDERIAELTVLSGFDDDLAQQITATSNRIRGLLTQIHPALERVLGPRMDHPAVLDLLETWPIPADLTKAGKSKVRSRLLKRAPRIGARLTEEISAALAAQTVVVTGTNAAAVVLPRLAAQLASLRAQRAEVAEKVEEVVAAHPLSKVLTTMPGVGVRTCARLLTEVVGKGFPTAGHLASYAGLAPVTRRSGSSIRGEHPPRGGNKVLKRALFLSAFAALSDPVSRAYYDRKIAQHKRHNEALIALARRRCDVLYAMLRDGKPYVQPPAAAA

SEQ ID NO: 165877 - protein, 396 aa, unidentified
MTVNSLAQKRSAIKSDTLVVGIDVAKFGHVARGLWTGGAASRPYPFPNTREGFLALATQIEAWKPTPTSAVVVGLESTGIYWVNLARWLTEHGCKVVQVSGLHVYRSKELLDNCRGTSDSKDALLIADLVAQGKYLGFVQPTGVLADLRQLVGLRQRLVEESTARRKLLHQSVDLLFPEFASVFRDVTSPSARRVLARFPTPGRVLAQSAAKMRRLLARDGRVWASIAKLGRLQAVAEQSIGAKEDTAGMECVLADTLLELDSLETRRQQVEKEIDLLLAQIDETQIITSVPRIGRMTAAIVLGETGGLKQYSCAAAVLKLAGLNLYQLSSGIFQGKRRVSKRGRSLLRQALYLAALQHTKPGAPLYSYYAELVRRGRDFVSIDAPLACVLNEALH

SEQ ID NO: 165878 - protein, 312 aa, unidentified
MTHYTIGVDISKAHLDAHRLPDGEARQFSNDKRGMKAFIGWIGEGALERIVYEPTGAYHRSFQETLSAAGLPIARVNPLQARRFAQACGARAKTDKADARSLAAMGQALQPQLYTVPSEKLRDLKELQVVRQALIKDATAAKNRQKSLSLPLPKKQNTLRLRQIERDLKAVEKAMCELVADDTAMARTFEIVCSIPGISTITALILLAEIPELGTLHSKQIAAMAGLAPFNRDSGQWKGKRFIGSGRKHLRHALYLPALVASRFNADLKAKYTQLIDAGKPTKVGLTAIMRKLIILANALVKADRKWVDKMA

SEQ ID NO: 165879 - protein, 411 aa, unidentified
MHNRQNYLYVGVDLHKEHHTAVIINCWQEKLGEIQFENKPSAFSKFLLEVETYVSDGLSVVFGLEDVGGYGRALAKYLVDHERVVKEVNPALSFLERKSEVMIKKNDSWDAECVARILVSKFNQLPDAKPHDLFWSIQQLVSRRNALVKAQAALKNQLHIQLNHHYPSYKKFFSEIDGKTALAFWQQYPSPSCLEGTNIKRLTAFLLDVSNNTCSVKKASDILKLVKEDGQTMKEYQETRDFLVRSIVRDIVFKKQEMKYIERELKQLMNVLDYQLDTMPGIELVTASALIAEIGDVRRFPNANKLARFAGIAPVYFGSGGKGKAHKSKQGNRALHALFYNLAVQQVQVAKGSKMPRNPVFHAYYQKKLKEGKTKGQALVCIMRRLVNIVYGMMKHKTAYELPVVQEKEVV

SEQ ID NO: 165880 - protein, 360 aa, unidentified
MSFNGTSVGLDVHALSVVAHAVDEETGWIERARLCPDHGEILDWLHRLRGPVRVAYEAGPTRFGLARALADAQIDCVVAAPSKLIRPSGDRIKTDARDAAHLTRLLRLGEITTVTVPEADVEAVRDLVRAREDARADLMRVRHRLSKLLLRQGRVYSGGQAWNGVHETWLRRQRFDDSHTKAAFDHHFDAVLSATAARDRLDEQIVTVAASPRWSDPVDRLGCLRGISALTGLALTVEIGDWTRFTGSSIGAYVGLVPTEYSSGASRVQGSITKAGNAHVRRLLIESAWHHRAAYRNPGPTMRARWAKVDPALKDRGHAGNRRLHQQWCRFNERKKPHVVANVAIARELAGWCWSLATLD

SEQ ID NO: 165881 - protein, 343 aa, unidentified
MQAVTTIGLDIAKSVFQIHGVDAAGNVIVRRQLKRRYVLPFFQRLPPCLIGIEACASSHHWSRELKALGHTVRLMPAAYVKPYVKRQKNDAADAEAICEAVTRANMRFVETKTPEQQSCLMLHRTRHLFIRQQTAVINAIRAHLAEYGIVAAVGRNGVEELLGVVADPSDKRVPEIARACLAALGAQLRMLKAQILEFDRMITAWHRSNETSKRLDAIPGVGPALATALVASVPDPKAFRSGRNFSAWIGLVPKQHSSGGKDKLGSISKQGDRYLRSLFTAGALAVIRYAKIHGTKHRPWLTALLARRPAKVAAIALANKIARMAWAMMAKGERYKEPVALAV

SEQ ID NO: 165882 - protein, 352 aa, unidentified
MIAIGVDAHKGIHMAVAVDEAGREVARWRGPNSVEGWQQVAAWASALGSAHRWGIEGAWNYGRGLAQALVAAGAEVYEVNPRWTAAGRQRARRRDKNDRLDAHAIALLVWREGAALPRVAADDETVALALLVAERADLVAETTRLYNQIHQLLLQLDPQYAAHLPRLQTQAALRALEGYVAADAGTVPQHRAAAVRRLAQRLALALAQAKALTAQIRALAAPRFAPLAQICGVSLLTAGTLAAILGPGRRFASDAQLAAYAGVAPLEASSAERVRHRLNRGGNRQLNAILYRIALTQSRCSPAAQAYLARRISEGKTRREAVRALKRYLIRAIWRKWEECQLQPVAAAEIAA

SEQ ID NO: 165883 - protein, 327 aa, unidentified
MHAFIGIDVSKEKLDLGWLRDPVTNKKKSKVFRNRREELQKVCDWILTNTKAQPQDVLVTVEPTGVYHEALLYFLHERGFNIYLPNPSQVKAFMKALGTVHKTDKSDALMLARYGAQSHDRRLWEPEAPEIRELKAMMRRLEALEKDRQRELNRLEASEITGASERVLRSLKDMIEVLEAEIRDLQHDIDEHIDRHPPLKKNRQLLESIKGIGPVMSREMTYLFAAKSFRSAKQAANYTGVIPKIQESGKWVGRSTLSKEGPARVRAKLYMAAIVAKQHNPVIRLQYQRLLAAGKNKMQALGAAMRKLVHICFGVVKNQQEFQPQPL

SEQ ID NO: 165884 - protein, 416 aa, unidentified
MKREQKTREMRYIGLDVHKHYITVGGMNAQQEIVLRPRDVEMERFKRWAEENLRRTDEVVLEATTNTWEVYDTLVPMVKRVVVAHPAEVKQIANSRVKTDNQDVIRLLRLLIADLVPEVWVPPVEVRELRAMISYRWRLVKMATAIQNRMHSLLHRHNIQAPDGKIDTGENREWWEKLKLSELETLRMKQELKTLRLVREHIVEVEAELGRLSTSERWGDQAVYLMQIPGVGIIVTMTILSAIGDIQRFESPRKLVGYAGLGAGVHDSGQKHREKGITKFGRKELRWALVEASWQTVRSNPRWRAQYDELSKRKHPNQAIVAIARKLLVTVWYLLNKHESYNGSSDEDLAYKMLTWAWHMDKRARNGMTNQQFAKYGLIQLGRGADLTRIVKGGQPRRIASKEEVLALKPDLRPPL

SEQ ID NO: 165885 - protein, 385 aa, unidentified
MAPPRRPEIVIGLDVGKSSHWACVATRDGEVLASKPVANRENALDSLFAEFPGALVVVDQVRNIGALALSRARAAGMPSAYLPGLAAHEAARLFGGDAKTDERDAMVIAKTALGIPDALLPVPHPDPAIAAARALAAQRDFLTRESTRSKNRLRSILLESCPEFESLVDLSDVSELRLMAALGGPWSVADAGRRRAAALARGARRGKVDALVGSVGSSARPDAAAIAAEDRAVRFLARRIAENAAELQAATAEISALLERDETYRCLLTVPGIGPKTASELAISVNIDDFPNHDRLASYCGLAPRNRQSGTSVSSVSASRQGNKRLKNLLIFSCNCLARTDGRWGEYYARCRDRGMPHGKALKAVARKRLKVIYAVMRDKVPYVA

SEQ ID NO: 165886 - protein, 419 aa, unidentified
MYNTRTKNPSEYQVIIAIDWADQKHDLRILKDCEEECKVISSDLLTLKNFFDTLILETVNGSIAIVIESCQSALMNLLISFTEFDIYVVHPTTASKFAKTFHLSGAKSDRADTKSLLELYLKHPDKVQKVDSSFSKGKLKRLNIKRRDLVDDRTRLTNQLTALLKIYYPNALKVVGNHLYADMFLDFLDKYPSPQDVINAHQIGITKFFNKRSTNHSKTKERVQILRSSVIVVNDEDELDYYIFEIQQFCHRIRSLNKVIKAYDEKIEQAYRSNEDYEMFQSFPGAGPSIGPRLMAFFGDDRDKFKSVNEVLKISEIAPVTIQSGKMNIVRRRFLCDRFTQLSFVEFANNSIRSSIWAHEFYYHKKALNIPHFTILRALAYKWIRIMYRCWKTNTPYNEKTYLEVLEKRQPAWFQKFVN

SEQ ID NO: 165887 - protein, 372 aa, unidentified
MNNTTIFVGMDVHKESFTLCEYQIETEKASHFRHTPADYKEVLRYLEFLRTIYGRDTIFVCGYEAGCLGYTLYHQLTNHNVNCVILAPTTMLEKKSGKRIKTDKRDAELIAKCLAQHNYSPVHIPTATDEETKEYLRMRDDHKLALKKIKQQILSFCLRHNYRYEGKSHWTVGHIKWLKNLNPEALYKEILDEYLLTYTTLSDKIERLDKRIEELAAKDEYRESVKKLCCFIGVRTHTALSVLVEVGDFKRFPSAEKFAGYLGLVPGENSSGDSTTRLGITKAGNRHVRVLLTEATQGYTRGAVGYKPKALKARQEGNTPQVIAYADKANERLKRKFFKMVLGKSKKHNVAKTAIARELACFMWGMMTDNIA

SEQ ID NO: 165888 - protein, 330 aa, unidentified
MEREYIGVDLHKQFFHACAVTETGTRVWEQRFPRNDGGLVMFRARCSSMTAIAVEAMGPTWAFVDALLPSGAPVCVVDPRKTRLKAGYAAKTDRLDARRLADALRRDSIVSVYVPPPAVRELREVCRGRYQVVRLRARVAQMIRALLLRSGCDDVPVTRVFSTRGLAWLSEVQLPSEAGASLERWRRVLVAVHAEATIADATVRARAAADSIACSLDAMVGVGPVLALTLRAEIGEIHRFAGGPALASYAGLVPRVEASADRYWSGRITRDGSPWLRFALVEMAVHAMRRQDAIGRWARQLAMRKGAYKARVALARRLCDEVVAMWPRCA

SEQ ID NO: 165889 - protein, 363 aa, unidentified
MIVIGADTHKATHTCAAVAAATGQLAGELTVAARKPGFAELLGWGRDLDAERVWAIEDCRHVSGALERFLVASGEKVVRVPPKLMGQSRRGERSAGKSDPIDALAVARAALREGPETLPAAHLDEAALELKLLLDHREDIVKVRSADQQRLRWHLHDLWPELELPAGCLDRATWLDRLARKLARAEQGARVRVARELVVEIRRRARRAKELEGEIAALVSRRAPELLELKGCGTLIAAKLVAETAGATRLASDAKFARLAGVAPVPASSGKRVRHRLDRGGNRQLNCALHRIAVCQGRVHPPAREFLERKQAEGKSRREALRCLKRHLARRVWQLLIDSEREIPPAPVDPQRGTPASHFAVAP

SEQ ID NO: 165890 - protein, 339 aa, unidentified
MKTITIGLDIAKNIFHAVHMTSHGKILKKKKLNRTAVLSYFAQIELSCIVMESCGSSNYWARELVNLGHTVKLIAPQHVVAYRRKNKNDYNDAEAIAEASQRDSMTFVPIKTREQQDAQIVLRIRERLIRQRTQLSNQARGMLLEQGISINRGWSAFRKVLPEVLEDANNNLTSISRELFNDLYEEFKALCERIERVEQRIKSFTETNDVCQQAQTVVGIGPITAIALYAAIGQGKHFQNGRHFAAWCGLVPRQHSTGGNQTMLGITKKGNIQLRTLLVAGARSALSRMDKKEDKLSQWAIKLKATKSFNIACVALANKLARIVWSVICNDKAYELKGA

SEQ ID NO: 165891 - protein, 341 aa, unidentified
MVEGTEGSHHKEGSTKMAKRTTICAGIDTGKRKLDVALDGSSEQLQIDNNPEGYKVLLDWLRRHRVNRIGIEASGGYEQAVVAELRQQRFVVVVFQPAQVRAYARFRSQKAKNDKIDAALIASCTAVVKKIHGPPDARLLPFAEHLTMIDQIGEDISRLKNRIETCRDARFRQIWQDDIDRLEGREKIELKALVAEIRAYRDLAERLDLINSVDGIGLPTAVTILVRLPEIGRITREEAAALAGMAPYDDNSGERVGARHIQGGRKRLRRALFAAALPASFRWNPQLMALYKRLIAAGKEHKRALIACARKLLIFANTVVARGIPWGRERPLNVSGPSLAV

SEQ ID NO: 165892 - protein, 455 aa, unidentified
MPRTKRSRMAMSPVHVNAAAIDIGATLHIAAVGPDRDPEPVRSFGTFTGDLHRLADWFKQCGVSTVAMESTGVYWIPVFEILEQLGFTVVLVNARDAKHVPGRKTDVTDAQWLQRLHEYGLLRASFRPERRIAALRDYLRQRERLLDYAASHIQHMQKALMQMNLQLHHVVSDITGATGMRIIRAVVAGERNPVTLAALRDQRCKESAETIRQALVGNDREEHIFALAQAVELYDAYLAKVDACDKRIEAVLTELKATCPPPPAPLPAPRHRTKQPNALSFPAREALHRILGVDLTQIHGLGPYLALKLVGECGTDLSAWPSAKHFTSWLCLAPSNKISGGKVLSSRTRRSSNRASALLRLAAVTVGRTETALGAFYRRLAGRIGKAKAVTATARKIAVLFYNTLRYGMGYVDPGASYYEDRYRQRVLANLKRRAKSLGYALQLTEPTPAGAEVS

SEQ ID NO: 165893 - protein, 451 aa, unidentified
MEREERRLEQYRQLRKESRGSQEYLVVGIDISKDRHDALMRTVSGKILYKRLTFNNTREGFEMLLLAVEAVRVQHGLKEVVFGMEPTANYHKPLGEFLINRDYQVVLVSPQAAKQNRSLLDGRWNKHDGKDCANVADLICQGKCLYYEYPSADLRDLRNLLSLNRKLKKFEQGLRLRLRNHLVAQYFPELDQYCHWGASEGLALVQWCLDPTVMASLSDEEMTKRLGRMGKTIAQRKRLSALKEKAPTSIGCRFGSSVAFEGQNLVKLLKEVRQRRSDTQEQIEGACQKFKEYSYLLSIPGFGPTLSAMVLGAIGNPGRFANGAQVLKMVGLDLSASQSGKSQGSPVVSKKGKAEIRYALFQAAMVASTRDKYFVAYFTDQLRGREKEKGIKTKKRVKLAAKMLMIAWTLMKKQQRFDPQYLSADPPSIAAGKRAKTQNGGIPKVQPEAAR

SEQ ID NO: 165894 - protein, 357 aa, unidentified
MVQNKQLDFSGTTIYCGVDMHKKNWRINIQDNEFELEDYNQDADAVLLYKHLNRKYPGAHFKIGYEAGFSGFSAQRYLSSKGVECLVINAADVATTDKEKRQKSDKIDARKLCEHLQSKKVKSIYIPALPWEHGRSLIRARARIVNNQTRCKNRIWQLLHFSGLSLPKNYQAGQYWSRSFIQLLENLECNSQALRTALQLYIKDYQQTRTLLLEVTRAVRKLCRQNEYEKQIRLLLSIPAIGEVNAAVILFELQDVKRFRHFDQLCSYAGLIPNTGDSGDTKITKGITNRTNHFLRVALVESSWLAIRKDPALLIKYKTYCRRMDRNKAIIRIAKHLLSRINYVLKNEKEYVTGVVA

SEQ ID NO: 165895 - protein, 427 aa, unidentified
MSYRIAGIDVHKRMIVVVVADVDVAGDYEFERRQYGSTPAQLRLLAAWLVEQGVEEVVMESTAQYWKPVWASLERYWKPICEKWEGTSPMSGSLHLAQAQSNRGARGRKNDFADAERLVRRLVAEELTLSFVPDAEQRLWRTVMRTRYQLKCNQVQLQNRLEALLEEAHLKLSSLVSDLLGLSGRRMLQAMAEGETDPAVVAARADCRLRATQEQLCDALGACRELHPVYRRLLKAALEEWERIEAQIAQLGQEMASLIGPQQEQVQRLAEVPGLGVDSGQQILAEVGASAATFPSGRALASWVGACPGEEETAGVNRNRRSPKGNRHLRRILNQAAHAAVKLKGSIFALLYRRYVVRFGHNQTIAVIAHRLCRLIWKILHEGVRYEERGPAVSQRAKQRRTARMIRQLRSLGYSVELLHAAAGVPA

SEQ ID NO: 165896 - protein, 441 aa, unidentified
MDTYQKGTVFMSSLKPFISVGIDVGADISYMSIALPNQLIVGKPFKITHFNLSSLEKAVSAIKEAEEVYSLESRIFLESTGVYHYPLFCYLRDAGFHVYVINPIITKNSTNINIRKVHNDKFDSKKVALIGLKPDLKTSVIPSGLALDLRNLCREYYNLMDSRSAYVNKLQGQLRMVFPGFIKIFSKITANTSLAILDKFSSPKSFLDADKEDIIALIKQTARFGIKYAQTKYNAISSAAKAALTFGHSVPSNLILIRLYISFIRRYDDEIAAILSAMNKLVAANEDELFVKQIRLIQTIKGAGFLTAVTIMCEIGDFSVFRKPKQLFAYFGLDPDVKQSGNFTGSQHKMSKRGSALARRAIHTIALISIGKSKKAAPHNHVLHSYYQHKCKSKPKMVALGAVMHKVCNIIFAILRDNKEFAIISPDEHNRDYQLRLSQAA

SEQ ID NO: 165897 - protein, 429 aa, unidentified
MNCTQNKKIEQVKETIMIVGIDVGSEKHYFRAFNWRGIELTRKPVLFSNSMEGFNSFYNTIVELMQENKLEEAMVGIEPTGHYWFDLGQFMGGKNIKFVMVNPHHVHKTKELDDNSPSKNDRKDPRIIAGLVKDGRYFYSYMPTGVYAELRNASNRRFVLVEEQTRTKNRLQKWIAVYFPEYKGIYTHIDAKGGLMVLKQAPTPEEITKLGEEGIIKIWKDAKLRGNGHKKAMKILNAAMRSIGLKAGLTEARMEMQDLIEDYELQTKRLERVNDLIKELCRQVRYADKLLEIKGIGITTVAGFIAEVGDITRFDSTKELQKLAGLELVADSSGKHNGRTKISKRGRKRLRYLLFEAAISVVGKNEEFKEIHRYYTTREKNPLKKMQSLIAVACKLIRVFHVILTKGVSYDASKMLEDIRHPKEQLKAA

SEQ ID NO: 165898 - protein, 373 aa, unidentified
MRYYIGVDWADEEHAVWVEDEQGQRVSAGMVRHSPVGFSEWGRQLDEWRAEGIVLWAAIERPEGRVVDVLLDHGVRVYPVNPKALDRARDRFRQSGAKDDLFDARVLAGFLRTDHAHLMALEPSSEAVQELKLLTEDYQRQVRTQTRLVNQLTATLKAYYPRALDVAELTTALAPAFLQAYPTPATLMTLTERQWQRWAKAHHLSVARTTELWTSLQQPQLPVPPHVVRAKSRLMQALVTELAAVVAAVASYRQAIDDFFATMPAAAQARTLPVGEHGVTVPTLWARLGDAPGRWQSFRHLQAQAGMVPVTVRSGKQVVVRFRFACDKQLRYAVDQLAWLSLQRSEWARAYYDEQRGGAIGIAGRCEPWERNG

SEQ ID NO: 165899 - protein, 354 aa, unidentified
MNTKTILKQCVGIDVSMKKVDCCLAVYTQDLQVKVVSTSRFENNGKGLLKLRQWIEKKSDKAVYLHVNMEATGVYHEEAAYFLSDLGFKLSIIQPAKGKQYARSLDEKNKTDRIDAIMLARMGLERDLPLWNRPTENLRILKRLSRERISIIRDRNALTNQLHALNHSHKAYAKSIKRLKQRVKLATKQLAEIEVQMQELVAESPVLHEKMKHVITIPGINFVTAATVIAETDGFSNIGNRRQLVSYAGLDVVIRESGTLAWRPRISKRGNAYIRAALYMAAVCSIIHNQTLRIYFNRMKENGKPGKTGVIALERKLLILIYTLYKNNTDYVLGHTNNSQKNIVLQDSQEPVAV

SEQ ID NO: 165900 - protein, 344 aa, unidentified
MNKLSRVGIDLAKNVFQLHGVDRHGKSVWRRRLTRDKWLKALLEKVEPGCQIGMEACAGAHHWARQLQSRGFTVKLIAPQFVKPYVKSNKNDANDAEAVCEAMSRPSMRFVSVKTVEQQDIQATHRVRTELIGHRTAKANQVRGLVAEYGLVAPQQLARLRAAVPDWLEDAENGLTSRFRRLLSDLWDDLKTLDQRVAELDREINTIAQSDPVAIRLQQLRGVGPMVATALVATVGNVEQFANGRQMAASLGLTPKQHSSGGKDRLLGISKRGDAYLRSILIHGARSVIRTAKVKDDRLSQWVTSLAERRHPNVAAVALANKTARIAWAMLRNGTDYESDYVAA

SEQ ID NO: 165901 - protein, 379 aa, unidentified
MEIITRNEKILYIGIDVHKDTYSLCCFDFFRNELSDEMTVKATTKSVVKYLEAIKKKHREEILFACGYEAGPTGYGLCRGLQKAGYGCVVMAPTTMSNPEGKKRVKTDRIDARAIARILAYKSYSQVHLPSEEMEALKEYTRARDAKKRMFKKAKQELLSFLLRNGKTYPESGNYWTEKFFKWIKTVQFSEKWMQEAFNEYLAEVYSLKAKIELMDMKIREIAELEIVKDKVDKLICFSGIDVITAVETVVEIHDFTRFATAAQFVSYLGLCPGEDSSGKTKNMLPLTKAGNKRVRALSCESAKAIKRTNPYGQKSKRILERQKNASPEIVAYTDKATKRIRTKMRHLEERGKNYNVSSAAGARELACFVWGMMNGKIA

SEQ ID NO: 165902 - protein, 467 aa, unidentified
MAKAGKSKSRSGRKQRYPAKLKPQDWTLGLTVVHPKAAGIDIGNEEHYVAVPPSMDAEPVRVFGCFTSDLIALADWLKKLGMETVAMQSTGVNWIALYDILQERGIKVFLVNARDTKNMPGRKSDVQECQWILKLHVYGLLKNSFRPEGDILVMRTIWRQRQQHIADASRSIQRMQKALTQMNLQLANVISDISGTTGQAIIGAILKGERDPLVLAQHRDPRVKAKAAVIAKSLEGTWQEELLFVLGQEFDSYQGYQKKMAECDEKLQEHLGKMEQKADPKTLPEYKRNKRPHGNVPEKFDLRDELYRIVGVDLTAIDGINGLTAQTVIAEVGYDMSRWASEGNFTSWLNLAPNNKISGGKVIGRDKRKVVNRAGQALRQAASTLLRSQSYLGAQYRRLRAKLGNPKAVKAMAGKLARLIYRSLKHGQVYVDKGSEFYEQKYRQQQIKILTKKAAELGLQLVHSAQV

SEQ ID NO: 165903 - protein, 348 aa, unidentified
MSCYLGVDLHRNCFTVCTLKEDGQSELRKWSIHALGEFAQTVQATDAVAVEATGNTRYFCQSLKDRGCRLVVVNPQQFQVISRSVKKTDTHDAKTLAQFLARDLLPEVRQKDALLAEIASLLQTRDKLVKLRTTLKNKINNLLAGRGILIRRESLSSDKGLEQVLQASVIGLERVELEVLIGQIRHLNGSIQKLEAAIKKQGPKLPGYQNLKSIKGLGDIGSSTLLSTIGDINDFASEGKLAAYFGIVPRVTNSNATARSGRITKRGNKLGRTTLVQCALIAMRYSPYLAHYYARIKAARGTGKAIIALARKFLGIIYRTLKNGWVFEDFPRFVIAPAEGKTSLLKQG

SEQ ID NO: 165904 - protein, 368 aa, unidentified
MNEVITYVGMDAHKKDLFIAMLIGREKTPVTWQLANEPGAVRRLIRKLEREAPGRVEMCYEAGPCGYALQRQLTTARVSCQVIAPALIPRKPGERIKTNRRDARKLAELLRAGLLTEVRPPTPDEEAVRDLCRARDDVREDVQRCRHRLGKLLLRRGLHSSGRNWTRAHRRWIDSLEWAHPAERVVVDDYLLAIDQQEARLVELDARLTEIAQTEPYREPVAWWRCFRGIDTLTAILILAELHDVRRFPSAPELMAYLGLVPGEDSTGEKQRRGRITRTGNALVRRLLVETAWHYQHRPGVGVALARRRKGQPSRVIAIADKAQQRLCRRFRKLAAEHKPAPKIAVAIARELAGFLWAALQPASGSAS

SEQ ID NO: 165905 - protein, 406 aa, unidentified
MQGPVITVDVSKGSCHYQPYVSNGHPMRKPKVLHDTVEGFQSLSDLIDTMKDRYECETIPVIFEATGVYHHCLQKYLDDHQIPYYIISPLMSASYRKTTPNSNKTDDLDCSHIAKAYYGECNLFPYDKLSKSFHNLRELNRYYECELNHLRMRKNTFRKYLDIVYPRLDKCFKGHSSLYDEIPMEVIKQYPHPSLLLKHKEETIVKKIEKKTSHNASFIQNIVHEMYECSMHCYSGADVTDVESMILPELVDDLQSQEERCDEILKQLVSEAQKTPYFTSIVSIVGIGDNLAARIIAELGDMSRFSCRRAITAYAGLNPKIRQSGDMDGIHLAISKKGNKHLRCLMYLAVSCNYRLKKGDVLYEFNQKKRQQSFSPLKPKAATIATAHKLLLIIYALCTNGTVYHS

SEQ ID NO: 165906 - protein, 318 aa, unidentified
MNDVSMVVAGIDIGKARLDVALHGAANRMAFDNSAAGHRRLIRWLRAAQVVRVGLESSGSYSQEVTGALRKAGFEVAVLQPLQVRAFAQYRLQRAKSDPLDAALIATCTALLDKVHEAPDARLAPLAEHLRLIEQLEEDVVRAKTRLEGAHLAHVRRALRREVERLERREAAERALLLKSIAAEPDLLARLQLIQSVDGIGERTALSLLLLLPELGRLEREPITALAGLAPFVRQSGKWKGHSRIGGGRVRVRRALYAASLAAAFRWNPAIKNLYQRLKAAGKPHRKIMVACARKMLIQVNAVVARGTPWISARNAAA

SEQ ID NO: 165907 - protein, 455 aa, unidentified
MPIKRGSQGFSVVHPHAAGIDIGATFHIVAVSSDCDPNPVRRFQSFTTDLHTLSKWLHEVGVTSVAMESTGVYWIPVFEILESDGFEVILVNAREVKQVPGRKTDYNDAQWLQKLHQFGLLKASFRPSEHIASLRAYLRHRERLIEYSAAHIQHMQKALMQMNVQLHHVVSDITGATGMKIIRDIINGERCAATLAGHRDIRCKQSQQTITAALTGNYRDEHVFALKQAVELWDFYQERIRECDVQIEKVMAKLNQNRTSSGVPMPKARHRTKQPHEPDFGVRSALYTLTGVDLTQINGFGPYTALRLIGECGDNMAKWPTEKHFVSWLSLSPGNKKSGGKILLNKTGRTKNRATTLLRIAAVNVGKTGTALGAFYRRLAARVGKAKAVTATARKMAVLFYAIMKHGKAYVEPGAAYYETQYRNRVLANLKKRAKRLGYELVANPVPERLHGEVS

SEQ ID NO: 165908 - protein, 420 aa, unidentified
MSEAPYAYYVGVDWASEAHRVCLLDAAGQRLGERSVEHTGPGLSTLVDWLLTVSRAEPAGIAVAIEVPRGAVVETLLERGFPVFAINPKQLDRFRDRHTVAGAKDDRRDAWVLADALRTDPHAFRLLMPEDPRIIRVRELSRVADELQQEARRLANRVRDQLLRFYPQLLRLCPAADEPWFWALLSQAPTPAQGQRLPRRAVERLLRTYRIRRLTAEAVLAEVQAPALRVSPGTVDAATTHVALLLPRLQLVHEQQAQVERHIEGVLTELASAEEGAEGPGREHRDVEILRSLPGIGRLIAATLLGEAAQPLATRDYHTLRAVTGLAPVTMQSGKRWRVAMRYACHGRLRQAVYHWARVSVQCDPQSRAHYAALRARGHNHPRALRGVADRLLAVLIAMLKTDSLYDPTRRHGPYAPVAA

SEQ ID NO: 165909 - protein, 401 aa, unidentified
MPTVRENSQRIKRFRELKATLRTDRTRLLVGIDVAQAEHVIHLRHAHTRVVVPTLTIPNTPRGFTALWTRIQQAQHSTGCREVVVGLEPTGTYHQAVATFLEAQGADVVFLSSSVAAWNRRTQDGTWDKNDRKDAANCADLLEQGKVLFYSQPTGPLAELRQLVRCLRRARTELAACKARWRTTLRPALAPAGASLPPRLRAELPAVLQAWERAAPGRPAGPKGRLSLGLATACADLGAQVTAVQARIAALEQTLTPVAERLPAYGLLRSIPGIGATVTAILLAEIGDIAWFTQFSQLRKLAGLDIVRVQSGRYAGQHRISKCGRGLLRWALYHAAMGLVRTAAGQARFAAAKAKRRGDRYAGFKAITELAAKQLRVVWGVWRSGRAYDPARAAGLRRQPR

SEQ ID NO: 165910 - protein, 337 aa, unidentified
MNDTIYDHYVAIDWAAANMAIARMTKKSNQITVVDVPSDIKELQLYLKSLKGTIILAIEETSTSQWLYTELVDHVDEIFICDPHRNRLLSEGAKTDKIDAAKLVQLLKADLLKEVFHSTDRFIYLRRLVSGYEDLVKSGVRLKAQRYSLLRVCGKDGYERGEVNLDSRNEEFVLDGLDRQIASYEEEKKAYEKEFRSLSKKHPEIGHQMSLPGIGVINAVKIVARVVTPWRFANKGHYLSYAGLIKLLQVSGGRNYGRKNPRYSRQLKNVYKTGALAAIGGNNPLNDYYEHLVQEKGYAPHIARHKACRRLAVLSYGVFKSGQSYQPYGEESIGLTG

SEQ ID NO: 165911 - protein, 315 aa, unidentified
MRDVPCCVGIAVAKAQLDLAVRPSGERGAVPNDANGVATLVERLQALHPTLMVWEATGGLERIATAALATAGLPVVMVHPRQARDFARATGQLAKTDALDARALAHFADVIRPTPRPLPDTQTQELRALLGRRQQLIGMRTAEQNRLAGTSGRLTQDIEAHLAWLNTRIATLDDDLETLLRASPLWRENDDRLQSVPGIGPVCARTLLLERPELGTLTRQQIAALVGVAPLNCDSGTLRGRRMIWGGRAHVRTVLYMGTLVATRFNPQIKAFYQRLLAAGKLKKVALTACMRKLLTRLNAMLKHRMSWQAQEVQN

SEQ ID NO: 165912 - protein, 344 aa, unidentified
MEEYIGLDVSLKETAIAIRRNGKRIWRGKCKSDPSCIAALLHERAPAAKRVVFETGPLSIWFYHALTDAGIPAICIDARHAKAALDMAANKTDANDADGLAHLAEVGFFREVRVKSYDSMLTRTLVAARTRLVTICTELSNQIRGLMKTFGLVIPAGKGATFGANVRILLDGQLSLSKIILPLLNAWRSMREQASDLSKQLMAVARASQSCRLLMSVPGVGVVTATSFVTAIEDPENFKKSRSVGAWLGLTTRRYQSGEVDYDGHISRRGDAHLRGLLFEAATVILTRSSADSGLRTWGMKLRERLGFKRAAVAVARRLSVIMHAMLKTGQLFDRAIGMGVANG

SEQ ID NO: 165913 - protein, 360 aa, unidentified
MKIQRTSVGLDVHARSVVACALDGDTGEVFQRRLTPDHGEIVGWLGDLPGPVAVTYEAGPTGFRLARALTAAGIVCEVAAPSKLIRPVGDRVKTDTRDATHLARLLHLGQITAVTIPPASQEAARDLLRARDDCRTDLMTARHRVSKLLLRQGIVYSGGQAWNGKHESWLRAQRFDNPALHISYEAAFDAMLACVDRRDRLDDAISAMAADSEFTAVVHRLGCIRGVATLTAFGLAVEIGDWHRLTGRSIGAYVGLVPSEYSSGDSRTQGGVTKTGNGHVRRLLVEAAWHHRSRYRPGAELRRRWELASPAVRARGQAANRRLNSRWAGFDARKKRPVIANVAIARELAGWCWSLATMPE

SEQ ID NO: 165914 - protein, 451 aa, unidentified
MKKKKVSLEVVNPYAAGIDIGSRSHFVAIGQDADEVREFGVYAEDLQKLAAWLLEHGIKTAAMESTGTYWQNLFSTLQAFGIEVFLVNGKFTKNMRGKKSDVMDCQWIQKLHTMGLLSSSFLPDSTTETIRTYTRHRLSLIQLAADTSKKMQKYLRLMGFRLDVVVNDICGLTGIAIINDIWNGNLNPKLLSVHRHYNCKKSIEEIEKALHGNGRKDYMFALIDEFEMYQILKTKIEKCDKEIESLLKEIIEKNENKKYHIAEAKPHKRITKNTNKQLDLNQVAFQYFEGIDLMKIEGVSHATVMTIISEIGLEGFSKFHTSKQFVSWLRLSPNNKISGGKVLSNQIARGSNRLKIALRQAANCIGNLKETHLSDFFRRICIKRGRASAVSATARKLGVIIWTMITKKIQYAPPKEYLMLDQKRKLGLVSRIRKSIAKFDLKPDDLGFATV

SEQ ID NO: 165915 - protein, 412 aa, unidentified
MDRWIERCCGLDVHKQTVAACVRVPGAQGRRTQEVRTFGTTTPDLLALQDWLAAHQVTHVAMESTGVFWKPVYYVLEARFTVLLVNAAHIKQVPGRKTDVRDCQWIAELLEHGLLRGSFVPPPVIRDLRELTRYRRTQIQERTRVANRLHKVLQDANVKLSNVTHHVLGVSGRAMLDALVAGTTDPDVLADLARGQLRKKLPALRQALTGRFRAHHAFLLGQILAHLDYLEEAIAAVSAHIEEQLRPFAPQVERLMTIPGVQRRTAETILAEIGTDMAVFPTAGHLASWAGMCPGNDESAGKRRSGKTRKGSKWLRTSLIEAANAAARTKATALGARYRRILPHRGHRKAIVAVGRHILEISHHLLRTNRTYQELGPDYFDRRHAERLQRRCIRQLEQLGLQVTITPASAAA

SEQ ID NO: 165916 - protein, 359 aa, unidentified
MASNEGTEHMIVIGADPHKRQHTVAAVDAATGELRGSETVKATSAGHGDLLAWGRALSPERVWAIEDCRHVSDRLERFLVARSERVVRVAPKLMAGQRRSSRQAGKSDPIDATAVARAALREGLGTLPAAELDERALEIKLLLDHREDLVRERTAIQGRLRWHLHDLWGEDGVPVGGLDRAKWLDRLARRLARCEQTVRVRICREEVARLRMLARRSKELEREIALLVRAHAPRLLELPGCGALTAAKLVAETAGIERFATDACFARHAGIAPIPASSGRSDRFRLHRGGNRQLNCAIHRIAVTQGRVHPPARDYLARKQAEGKTRIEALRALKRHLARTVWRTMIANANAPAPTLVLT

SEQ ID NO: 165917 - protein, 341 aa, unidentified
MDKITTIAIDLAKHVFQVAAENARGEEVWQKRLRSRAALHAFIEGLSPPLKVGLEAGLGAQAWARVLAARGLEVHVLPAQRVAEHRSGAKNDCNDARAILRALHDRSIHPVPVKSTVQLMMQALLRVRAGWQRRHTAVANQMRGLLLEHGVAIAQGDAALTRALERVLPDAQVPIPDRVRALLAELAGEWEGLSQRVQAMDPELAELARADPVARRLCTIPGIGPVTATALVCKGLDPVRFRNARQFAVYLGLIPDQHSSGTKLRLGRMSRRGDRYLRGLLVSGAHAVLRHTRRDALDAGHRRILHWQQRHGSKAIAVRLANHNLRVVYALLRDHADYHAA

SEQ ID NO: 165918 - protein, 366 aa, unidentified
MKKNSTVATNRNEIFKEPKLTIGLDLGDRSSHYCILDEAGKVILEHNLPTTPKAIQHVFHKIPRSRIALETGTHSPWVSRQLTELGHEVIVAHARNVRLIGESSRKDDQLDARTLARLARIDPGLLGPVRHRSAQAQIHLTVIRARAALVGARTALVNAARGLTKSYGERLSKRGTGQMNRAIAKGLSQELREALDPLLGEIESLNERIAEYDRRIEQIATEVHPEVARLKQVKGVGTLIALTYVLTLDDPHRFRRSRDAGCFLGLRPGRRNSGNSEPQLHISKEGDCYLRTLMVQGAHYILGPFGQDSDLRRWGLKLAERGGKNAKKRAVVAVARKLAVLLHKLWVSGEVYEPLRNNHKVVSAVA

SEQ ID NO: 165919 - protein, 399 aa, unidentified
MLIVGIDWSKSKHDLALMEPDGTVLQYLVVKHSLEGFEALAVAIGRHESDPGEVHISVEQHDGALLAWLRAQGYIVHGINPKSSQRARDRYRPAGAKDDRSDAYILADMLRQDRGNIRPLGRESQTPAELRTLGRLRARRVQERTSPMQQLRALLDDWCPELGSLCNNFGNIAWQRDFLRRFPLLEDLATAHVRTVNAFIRRHRMRATTADRIRELRKCRGLPIPAGREPALRLDIAFLVDQVERLTEAIRTIELQLQQLIDQHPDAEIFQSLPVKGLVSISGLLGGFAGQDAPRHAELAARWGVAPVTIASGRSRFVKYRRACDGYMREVLMFFAFNTAFRPDCWAHDYYRRKRAAGATHYGALRCLAQRWLKIICRMWTDKTTYDEQLHRRRLSLVS

SEQ ID NO: 165920 - protein, 418 aa, unidentified
MDTLFVALDVGSKSNSVVFTNQAGEVLHRYNKIPNNIPGLNSVWEQAQSIFSAHGFTDVLFGLESSGPYWFGLYWELQARCSQLNPNHFKVHALNPQIVAGFKSRFPLKKQKTDRKDARSIGRRMRFGEYEPSYVPQGNLLALRFYTRQRLHLILSMVKEKNRFASTLFLKFSEYKKTVDDMNLFYDTFSKCSAALAVKYPSCDVLAKVPVDELIALFKSQDPTNNALRTIDRKYELIKLIAQNSFHMPLEAVEPINFVLAQTLQNINFLEKQIKEVESKICGIMESIDDPAKSIKGLGPVFSAGIIAETPDPKVFHYRKGHASLANYLGIIPSMNDSGEFKSLSNKMTKTGNPYGRYYYIESARTLSQFNPTFKQYYQRKIKELHPRRHKRVIGLVARKFIRVYYHLKVNNLAFRYV

SEQ ID NO: 165921 - protein, 378 aa, unidentified
MKRINRTDNHIKGTSQAYQEQMILDMLGERNPIQPQEAPMKLYAATDLHSSNNYLAIIDENGERRFKQKLPNNPALILEALMPYKKEIAGIVVESTYNWYWLVDMLMAEGYKVHLANPVAVQKYSGLKHADDKHDAFWLAEMLRLGILPEGYIYPKEERPIRDLLRKRGHLVRLRTSLIISLQNIISRNCGKELDCNSMKRLKTNHVAPLLKDNEDLALAGSVSKESIDFLTRRIKEIESAVENKVKLQEPYSNLQTIPGIGKIIALTIMLETGHVERFADTGNYVSYCRKVHTKWMSNGKQKGKGNRKNGNKYLAWAFSEAAELARRFDSKAKAYYQRKKQQTNFMVAHNALAHKLARAAYHIMKDNVSFMPEKLFA

SEQ ID NO: 165922 - protein, 344 aa, unidentified
MHATEAQDRLYCGADLHGNNVFLTLCDGQGQRVMERRVKANLVAVNAALAPYGDRIKQIAVESTYNWYWFVDGLRSQGRDVRLANPAKMDQYSGLKVGDDASDAGWIAEQMRLGILPESYVYPPEVRPIRDALRRRMLIVRQRTQSLLSLESLFARHGLPGPRADELKGWTEAEVAGLKLDRFTQLQVESLLGVLRQQDQVARRIEEAVRQAVKPKAEYARIQQVPGIGPVLGLVVALESGDFGRFASAGDYASYCRTVKSERRSNGKKKGENNRRNGNPYLGWAFAEAAVYAIRFYPRIAAWYERKKRRRNVPVAMKALACKLAKATWHVMRGKDFDEALLFG

SEQ ID NO: 165923 - protein, 425 aa, unidentified
MNPQPSECAAFVGIDWADDHHDYCLFDPATGERQQGRFDQTPEALNEWINRLRERFSGRPVVVCLEQSRGPLIYALMAHAFFVLYPINPKTLAKYREAFTPSRAKDDPTDADLLCELVAQHRERLTAWKPDDAQTRQLAALCEQRRHVVDVRTQLIQQVTSALKSYFPQALAWSGSELHTLMAAEFLLKWPTLESVQRAKPQTLRTFYYVHNCRSETLIQERLDEIRTARALTTDPAIVEPLALTVQTLARLLRDLYTAIAQYDRQIRALFRQHPDAFLFDRLPGAGAQLSPRLLVAFGTDRDRYQEAAQFQAYSGIAPVLERSGKQTWVHWRWQRPVFLSQTFYEFAQKSIEFSAWAAAYYRLQQARGKSRHASIRALAFKWIRVLFRCWQERRPYDESVYLAVLKQHASPLMAYMAETAPAAL

SEQ ID NO: 165924 - protein, 363 aa, unidentified
MRDYNGKTVYVGIDVHKKTYSCVSICNNEVVKRDSMPGKPEVILNYLNNAFKGAKIESVYEAGFSGFHLHRFLVSNGIENRVVNAASIEISSRDRVKTDKRDALKMGVQLSVGRLKGIHVPDENREEMRSVTRLRATMMKLRNQVGNQFKSLLFTQGLIDVNDDTTVSEKWVERKIFEVKDKGFLEDFIFTAEQYQDQWMQLNNRVKEITKRMKAQSKQEQGLQDIYESVPGIGPIHARQLINELGDMKQFKNERRLFSFTGLTPCEYSSGENIRQGHISRQGNPVLRKILVESAWVAIYRDPDLKETFDRIAHRRGKKRAIVAVARRLVGRIRSCVLSGSLYEIKLIEEACSLQNGLHDPAV

SEQ ID NO: 165925 - protein, 345 aa, unidentified
MEQVSRIGMDTSKHVFQLHGVNASEEVVLRRKLRRKEMVAFFEKLAPTVIAIEACGASHHWARLLRSFGHEVKLIAPQLVKPYVKRGKNDAADAEALCEAMSRPTMRFVPVKTAEQQAALMLMGLRDQLVASRTQLSNAIRGYAMEFGLTAAKGKAHLEPLLERIQADDSLPVLARELFAIQAEGYRRLQVQIDEVDAKLAAWQKSDECSQRLIKIPGVGPIGAALLKMKTPAPELFKSGRQYAAWIGLTPKDHSTAGKVRLGVITRAGDETLRSVLVVGATAAIQQAQRRGKASPWLAALLKRKPPKLVAVALANKMARIAWKLMVTGQSYAAKSAPAALANAA

SEQ ID NO: 165926 - protein, 358 aa, unidentified
MNERTSVGLDVHARSVVAAAIDGLTGELVQERLVPDPQVVIEWIRGLPGPAAAVYEAGPTGFGLYRAITAAGIDCTVAAPSKLVRPAGERVKTDAKDAVLLARLLRLGEITAVAVPTVAQEAARDLVRAREDVRGDLMRARHRVSKLLLRHGHVYYGGQAWTLAHDAWLRRIRFEQPGTRAAFEADYEHVQLALARRDRLDAAISAMAAGSEYTEVVHRLGCLRGVNTLTGFALAVEIGDWHRLSGASIGSYLGLVPTEHSSGDRRVQGGITKTGNTHARRLLIEAAWHHKTRYSPGKTMLERWALAPAPAAARGDAGNRRLHHRWNVLNARKKKHTVANTAIARELAGWCWSLATMD

SEQ ID NO: 165927 - protein, 344 aa, unidentified
MKYYAGLDVSLRSCALCIVDTNGKLIFERELPCEVEDIAECLEGFPNEIERVGFEAGAMSQHLYFGLQSKGFDVVCMEARQVNAALSAMRNKTDRTDARGIAQILRTGWFSPVHMKSRVAHGHRALLSTRKALLKKTMDLANEVRGLLKIFGIRLPQTVKHGSFDDVVRPMIEIDDILAHALVPLLDARVVLYQHYLELDRRVKRAASHDKVCMLFMTVPGVGPITALTFKAAVDDPTRFKRSRTVAAHFGLTPRRYQSGEHDNPGRISKAGDRDVRATLYAAANALLMRTMAGSQIKSWGMRLMRTKGRRRAVVAVARKLAVLLHRMWIDGTEFRQEQVGGKA

SEQ ID NO: 165928 - protein, 342 aa, unidentified
MEAKRYIGIDLHRDCFTVCLRLENGREYLKAWKLEDMAKFTAKLRPTDEVAVEVTGNTRLFHDAVAPHVGRMVAVNPSQFKVITHSVKKTDPNDARNLALYLAKDLLPEVRMKDKTQAQIASLTQTRDTMVKLRTALKNKVNNICSAHGVNLNKESLASEKGLKAVLEMQFEMLVNLELQIIIEQIRSLNQSVAKLEETIGKEGQKLEGHKNLTSIKGIGGLGAGILLSIIGDIRDFADEGKLAAYFGIVPRVSNSNESEHSGRITKRGSKLGRTTLVQCALIAQRYSPYLKNYYEKKKSRGTGKAIIALARKFLGIIYRTLKNKWVFEDFPNFVLAEPATA

SEQ ID NO: 165929 - protein, 341 aa, unidentified
MDIAVLGIDLGKNICSVVGLDDGGRVLVRRRLKRPAVIAFARQSPGCVVAMEACCGAHHLARQLAAQGHEVRLMSPEYVRPYVKAQKNDDRDAEAIAEASLRPTMRFVPLKSEAQSDLQSLHRARERLITERTALINHLRAVLLERGIIIAQGRRKLEKALPGILADAASGMSPRIRQLIGDLCEEWHMLDRRIANFDAELVSLARTDEAARRLASVPGIGTITATALVAAVGDGSAFGRGRDMAAWLGLVPRQATTGGKPRLLGISKRGNRYLRKNLIHGARSVLPYLVRRDTPLGRWVMGLMTRAHKNTVVVALANKLARIAWAVLVRGRGFDPAHVGA

SEQ ID NO: 165930 - protein, 408 aa, unidentified
METLHRRCAGLDVHQKEIVACRRIVSGKKVRSELERFATTTLGLVALSNWLIEAKITHVAMEATGVYWKPVWHVLCGDFQLILANAAHVRNVPGRKSDANDATWIADLLAHGLIRASFVPPQPIQELRDLTRTRRELTREIVRHQQRIQAVLEEANIKLTSVISDILGMSGRRILKAMVSGQSDPRRLAELGSSRLACTPEALAAALDGRVRDHHRFLIGQHLKTIEQIEVTIGEFDARLEAALTPFHDAVERLKDIPGVSDNVAATLIAEIGADMSAFPSAEHLVSWAGLCPRLEESAGRKRSRRLRKGAPWLKPVMVQAASAASKAKSSSFKARYHSLKGRIGPKKALIAVAAAQLRTVYHMLKDGTFYKDLGPDYRKPRNPKRTAQNLANRIRALGFHVEIKDAA

SEQ ID NO: 165931 - protein, 343 aa, unidentified
MNLKYSVGIDVAKDKFDACLVIIDETQSVTIKATKSFTLKRDYKPFLVWVRSHQKENLRTCFTMEATGNYFEKLAFFLFENGCFVSVVLPNKAKNYFRSHGIKSKTDRIDAKGLATMGAEQKLKSWQPFSKKIYKLRTLTRQHENLTKQKTVAKNQVHSQKYNMYEIKEVIKQLEAVIRLLEKQLEKIEYLIQELIDEDIVLKSKVDNLMSVPGVGLLTVATIIAETNGFYLIENVGQLISYSGYDVVESQSGTRVGRTKISKKGNAHIRRVLYMPALNVVRLKVGMFKAFYERLYERNLIKMKSYVGVQKKILILMYTLWRTDMPFIPGYYQTIGIKAVVPA

SEQ ID NO: 165932 - protein, 322 aa, unidentified
MKYIGIDVSKATFVVAYSSDKGGEIRTFNNTTTGIKQFIGALPKDGSIHCVMEATGNYSALLLYMLNVAGITVSMENPLKIKNFARAMLSTVKTDKIDARLIALYGEKMNPQPFKIQGEAILRLRQKRTVIRQLTKQITAMSNLRGSLAYLPVPDKGATHTVDETVKFLKKKRDRLQAELTDLVKVEFSRQLALLTTIKGIGITLATALIITTGGFTYFQNAKQVSRYLGICPTYEQSGTSVNIRGHINRNGDAYTRGLLYVAAWTASRFNTKCGETYTRLRQNGKPGKLAMIAVANKLVRQAFAVVTHDKEYVDGFVSNRP

SEQ ID NO: 165933 - protein, 344 aa, unidentified
MQITTIGIDLAKTVFQLHAVDADGTTVIRKRLRRAEVLSFVSGLEPCLIGMEACATSHYWARELAKSGHTVKLMPPAYVKPYVKRGRNDPTDAEAICEAVTRPNMRFVPVKSADQQAVLMLHRARALLIRQQTMLANAFRSHLAEFGIVVPQGIRHVRALIERVFGEGEDPIDLPALARTALRPLVAQLMELRLQIKTIEKELLAWHRTSQESRRLETIPGVGFITATAIAATVADPSHFRSSREFSAWLGLTPRQNSSGGKDRLGRVSKMGNGYLRSLIVVGATAMIRYAREKGAVSARWINALLEKKPARLVSVAVANKTARIAWALLVRKEAYRVPVPVAA

SEQ ID NO: 165934 - protein, 343 aa, unidentified
MYTVSVDIHSASFTMAVFNEKKNLCRTFTCSTTVENLIEQVSEIPNPKTVVVEECHLAQLVKEVLEEHVDKVVVADPVQNRWIAEAEFVNDKKSAIKLGKLYLNDDIREVFHPDADGASIRSEFLHYRDLDGHLTRSKNKLKATFKQGGVKHPSDWGEIFTRKKQLLGQLGERPHLQFRARHFYEMVSSFGHMKQQTYTKLLKRAKKEPVFKLLNGIPGIGALSAIGYMAIIITPHRFSRRNKLWRYAGLGNQYHVSDEQVYRNRASRSGNREMKWLIRQQFNAGVLITKKQNRFKGKYARLLQEGHSKKEARREVQRSMLSVVLAVWKKGEPYQDKHVSRRG

SEQ ID NO: 165935 - protein, 394 aa, unidentified
MLQNVMANVPIGAGLVEEASAASRRDQTGRREIEPSLAHEAVKKHDPRRPCGNSPDSRLSRRRTTRLSSSHRQDREIAMSEPLYVGIDVAKESFDVASIPAGLVLSLPNDPPGRQHLLEALQKHPVALIVLEATGGYERSLVADLLGAGHPVVVANPRQVRDFARGIGRLAKTDRLDAQVLAQFAGMVKPRPRQASSPQAVNLAELVTRRRQLSDLMTQESNRLPHARHPDVRRSLKKSLRALQQQIDDLDKLIRQNIDSDDDLRRKDEIVQSFKGAGPGTSAMLLSQLPELGRLNRQQIAALAGLAPWDVKSGQWAGQSRIWGGRRPVRNMLYMAALSAIRSNPIIRKFYQRLASQGKKFKVAITACMRKILVILNTLVRNDCLWSPPLPENV

SEQ ID NO: 165936 - protein, 363 aa, unidentified
MPGTMTFVGMDVHARSIHAAAIDVMNGELTRWRFTGGELETPVAWLGSLPGPVWACYEAGPTGFGLYRAAVAAGIRMDVIAPGKTPRGRSDRIKTDRKDAELLARCLIAGSLTAIPVPSVAVEAARELVRAHDMCRRDLMNARHRVSKMLLRHGRVYPKPSSTWSRDHRLWLSRQQFPDPISELTYADLLACVDGLTARKQALAERISRLATDEQWWPIVARLRCFRGVDTLTALTVHLELGADWERFEKAHRLGSWLGLTPSRSQSGESDRQGSITKTGSTLARRLLVESAWQYAREPRIGATLANRQQGQPDHILQISNRAQQRIHRVYTRMRSRGKPHNVTVVACARELACFLWAAATAP

SEQ ID NO: 165937 - protein, 356 aa, unidentified
MASSSCFRRFETVPKKSDKIKVGLEATGHYSYNILGFLLDNDLAVYVMNPLHTNLYRKSLSLRKTKTDRVDARTIATMLLSDVDLKSYTDTAYHNEELKSLTRYRFDKVRERAKLKQSVSRLVTILFPELEKLVPSLHIASVYALLSEYPGAKQVSEIHLTKLTNLLATASKGRYGKDKAIQIRDAARTSIGSVMPAKFLELKHTIKLIRELTSEIDEIEVSIQKIMDELNPPILSIPGVGIQSAAMILAEIGDFSNFESPDKILAYAGCSPSTYQSGKLTNCYAHMEKRGSRYLRYALYNATKYVCHWNPVFAEYLAKKRAEGKHYNVALSHATKKLVRLIYALQKSGKAYLVAA

SEQ ID NO: 165938 - protein, 338 aa, unidentified
MSITTVGLDIAKQIFQVHGADAGGRAVLRRKLRRCQVATFFANLPPCVVGLEACCGSHYWVRVLSRHGHTVRLIAPQFVKPYVKSNKNDANDAEAICEAVSRPQMRFVPAKSVEQQDIQCLHRVRSRLVSSRTQMANQIRGLLSEYGIVLPEHVSQLRRGLPLVLEDATNELTAFSRRLFASLYEELLSLEEKIAALDEQIGAVYQASEPCQRIAAVEGIGPLTATALIAAMSDGKAFKNGRQFAAWLGLVPKQHSSGGKARLLGISKRGDPYLRCLLIHGARSVVYRASHKTDRRSLWIADKQRRLGTPKACVALANKNARIVWSLIARGEVYRRAA

SEQ ID NO: 165939 - protein, 413 aa, unidentified
MDVLHPRCCGLDVHKSSISACILLREAGRVQKHQRRFGAMTQDLRELAEWLHQFGVTQVAMESSGVYWKPVWNILERQFTVVLANAQHIKNVPGRKTDQKDAEWIAQLLQYGLLRPSYVPCEIIRDLRDLTRMRASLSQEASRISSRIQKVLEDANVKLASVATNVLGKSGRAMLEDIITGEDDPEHLASLALGHLRVKIPQLRLALEGKIRSHHRFLLRRLLDQMQFVEHEIALLEERLEDIGRQRPELSQAVARWDTIPGIDRVAAWALLAEVGDNMAQFPTAEQLASWAALCPGNHESAGKRLRGATRQGSPWLRRMACQCAWAAARTKNTYLSSQFRRLAARRGKKRAIIAVAHTLIVIGYHLQKNQSNYDELGGNYFDRIHSDGLKRYLVKRLRQLGHKVTLEPIEAA

SEQ ID NO: 165940 - protein, 409 aa, unidentified
MEVIHPRCCGIDIHKESVVACLRLQEGRRVKTEVRRFGTTTAELLRLHEWLSHAACTHVAMESTSVYWKPVFNLLEGSFEVVLANAYHIKAVPGRKTDVKDCEWIANLLAHGLIRASFIPPAPIRDLRDLTRHRKSLIRDRVQATNRVHKLLETANIKLANVVADVLGVSGRAMLDALVAGETDPQRLAKLAKGSLIPKVKPLAEALRGGFTSHHAFLLGQMLTQLDQLAALVARCDARILEVSKPFEANIQRLQTIVGVGRRSAEVMVSEIGVDMSRFSTAGHLASWARICPGSYESAGKRRSAGTGTGNNWLRTTLLESAWAAAHTRKSYLGAQFRRISKRRGPKRAGIAVAHSILVIAYHMLRDGVDFNDLGADYFDRMNTAKLTRYHLRRLAELGCDVSALAVSA

SEQ ID NO: 165941 - protein, 335 aa, unidentified
MWHLGIDLHRHTVVIAAINDVGEVRPAVRFQCSESAEILSHCRQFHPFRAVIEATSTYRWLHELLSTAGTVVLAHPFRLRAMVQRRSKTDRLDAMLLAQLLRIDQIPLAYVPSERYQALRESTRQRSRLTHAQTQVKQAFRWLLARHNMNPPYKCPFGPRGRYWFARQDFGAVDNPIRDELLERLGHFDRQLAAMDARLAELRPEYPEVEALLDLYGVGLFSALVIASEFGDVTRFRTAKQAGAYTGLTPRVDQSGSHCYVGHISKQGSPWLRHILVEAAMKIVRDDVGLANFHQRIRKRSSAKIARVATARKLAEICWKRLRRWHREHAQVAAA

SEQ ID NO: 165942 - protein, 347 aa, unidentified
MRFYIRQHKYYCGIDLHARFIYVCILNQEGEVLVHKNLRANPQAFLAVIAPYRDDMVVAVECMFTWYWIADLCAQEGLTFVLGHALYMKAIHGGKAKNDRIDSLKIAHLLRGGNVPFSYVYPREMRATRDLLRRRNFLMRKRAELLSHIQNTNSQYNLPEFDGALRYPANREDLAQRFTDDSVKKSVETDLALIEVYDKHLKEVELYLARHARIDDPNTHHLLRTVPGVGQILGLVFLYEIHDIARFPSVQDFVSYCRLIRCQKESAGKKLGTGGRKIGNAHLKWAFSEATCLFLRGNGAAQKYLQKLTARHGKGKALGILSRKLATAVYYMLKRQEAFDMNKFFEK

SEQ ID NO: 165943 - protein, 386 aa, unidentified
MQKLNDLSRSLTALELDSTLIAVIEMSLSSWLVAGIVPGIERQPLKKLAVDESALLKLLYRWREEAEKAGRRIERTAVAFEAGRDGFWLARWLKAHSIEAHVIHAASVAVSREHRRAKTDRLDSELLKRAFLGWLRGERDHCKMVAIPSIKDEDAKRPNRERENLVGEQNRIVNRMKAALVRLGIRGFNPKLKRAAGRLDGLHTPEGEPIPPNTLAELRRDMERRRLVSNQIRQIEEARLERLEQVPGDGPHAMVRLLARVIGVGIETADMLVQEVLSRNMRDRRAVARYAGLTGSPDESGRKCREKGLARSGNARVRRGMIQLAWRLLMFQKNSALAQWFRARTENARGTRKTMIVALARKLLIALWRLVREGVVPDGVVLRPTQ

SEQ ID NO: 165944 - protein, 450 aa, unidentified
MEILYANCAGLDVHKKTVKVCLLRRPSTGQPHKEFRTYLTTTEELLQLGDWLKEQGCTHVAFEATGVYWKPVFNLLESSFELLVVNAHHIKQVPGRKTDVKDAEWIADLLQHGLLKASFIPSGPQREVRDLTRYRVRLTEEKAREVNRVQKTLEDTNLKLGDVVSDIMGKASRLILQAIADGESDPGRLAALAVGRVRAPQEQLEAALRGHVTDHHRFLLSEHLTQIRHLEQAIERVSAEITRRFTPPPPDEAPPSHKEEEARQELSLASPSPQESASASQATVSWAAAVVLLCSIPGIGERAAMGILAEIGINMQQFPTAAHLASWAGVCPGNHESAGKRLSGKTRKGNPWLRCLLVQAAHSASHQKQCYLAEQYRRIAKRRGAKRAAVAVAHTILVIIYHLLRNQTTYQEKGESFLEEQERQGAEKRLVRQLARLGYHVELQPIALAG

SEQ ID NO: 165945 - protein, 332 aa, unidentified
MNAVSTLGIDLAKNTFSVHGVDADGVVTVRRTVSRAKLAELIARLPACLIGMEACSGAHEWARRFAAAGHTVKLMAPKFVAPYRKSGKNDGNDAEAICEAVCRPNMRFVPIKSVQQQADLSLHRVRQGFVEERTATFNRVRGLIAEFGYVLPNGVEQLRRQVLDLIDRLPARVAHCVRDLLEHAERLRSKALEYEREIRLTVRDNELAHRAHTRPGIGPITASALVATVGNGHDFKNGRQFSAWLGLVPCQYSTGGKTRLGHITKRGDPYLRTLLVMGARSVLQRAYRESDPLSRWALALQQRRGYHRACVAIAAKNARVAWALLAKESAPA

SEQ ID NO: 165946 - protein, 357 aa, unidentified
MAKVEHTSDARVLVGIDISKHRHEVLIAVPGKTRRRRLTITNSTEDFMRLIAILREYGLPVRIGFEATGNYHRVLMYHLGVAGFDLKLVSSVALARTREALHNSWDKNDPKDAQVILHMLQIGAVQIFQDPMAADTNDIQELSKTHDAVSRSKTKLWHRILTHYLPLYFPEADRFHRSSRTDWFLAFLEMFPSPHMISALTKEEFIKAAWEVVGCKVEKSLVLSDIYETAKVSAGLPVLPDSDAIRMFRMMLAEGRSLIRQRNAIEDRAVELLAERPDYQLLRTIPGIGPINALTILAETGDLRRFHHHRQFLKFCGIGPAPVSFRSGAHVMRPFVRRPRGISSRGLSVCGAGCRSR

SEQ ID NO: 165947 - protein, 409 aa, unidentified
MRQYQVVFEQVVSRGCGLDVHKDNVVATIRGDGLSEETRTFSTFTSGLLLLVEWLKCCGVTHVAMESTGVYWKPVFNVIESHFELLLVNARHIKNVPGHKTDCKDSAWIAKLLVSGLLKGSFIPPQHTRELRDLYRYRRKLIGQRTAEYNRLQKVLEDANIKIGSVMSDVFGVSGCAMIDAIINGQTDPAVLAALAKGSLKKKSQQLTEALQGHITEHHRFMLRLSKNVIDNFNTLMAEVSLRIDRYLADYEKEMSLLQTIPGVQLQTATAIVAEIGTNMEVFPDQHHLASWCGICPGNNESAGKKKSERITHGNKSLKTALTEAAWAASHAKDGYFKRKYYSLAARRGNKRALIAIAHKILTAAYFILKNKVAYQQPDNTAWVEKRKQAQIRMHLKRLHELGINVPSQ

SEQ ID NO: 165948 - protein, 358 aa, unidentified
MNYIGIDLHKKFSQVTVLGEGGEIKERVKIDNREEVLNRHFNNFDEPSKAVIEATFSWGWLADYLQSRKIEVMLAHPQKVKAIASAQIKTDKVDSLILAKLLRADMIPTAYFCPKPLREVKEVLRSRASLVGLKTQVKNKIHSLLHKYNIREDEKFSDLFGKRGKEFLNSLELGEYTTPVLKRYLETLSFLEEEIKKTSVDLRQVFEKDEVAQFLERLPGIGFYTAIILSKEIGNIGRFFSAKHLCSYAGLVPSTYQSGEHTRHGKIKQGNKYIRWVLIEAVPKTIGKDKVLNAFYQKIKAKKGHNKAKVATARKMLGQIWYLLKTKQSFVDPETGSPVFFSGASSFPLKGIEVNSHR

SEQ ID NO: 165949 - protein, 350 aa, unidentified
MRFTGLDVHKAFIYANVVDEKGKTVIERKLMNTTQALDYFLESVPEGTQFVLEACGMYEPVYDRIEQQGFKVKVAHPLKTRAIASARIKTDAIDAKVLANLLRVDMIAESHVPNKEVRELRSLVRRRTGLVRQQSQLKNQAHSILLKNGINAPITDIFGKGGKKFLAQVELPYAERLALDNILAIADSYDERISLSDAAIEGVAKNNPEIKLLTTIPGIGDFSALLIYADIDDVKRFQDAKHLCSYAGIVPSVYQSGDTVRRGRITKTGSRLLRWVLVQAAHKAVVTDPHLNRFYEHLKGKKGSQKAIVAVARKILTYIYVMLTKGIEYQVLSFNRKVQADMPVEPLSSS

SEQ ID NO: 165950 - protein, 388 aa, unidentified
MPKMFACPTVAAAVDYDATLILAIELSTQSWVLAAQVPGLRQIKARQTIAPSAEALMAAIDGYRQRAAAAGHAFERVIAIYEAGWSGFWLARWLTARGVETQVVQPSSVLVDRRMRRAKSDGIDAELLLRTLLAWLRGEPRVCSMVPTPDEADEDARREVRERAELISERVSLVNRIGAILATLGAGDYNPLLQSRRRRLDELRTIFDLPLPARAHAKITRMLTRLELVLTQIAEIDQRRDAVLEDTAPDAAGQMIQQLTGLRGIGVQSATILVREAFVRRFANGKALGSYAGLTSTPYSSGGLEREQGIGKAGNRRLRTVMVELAWIWQRYQPDAAQVRWFRERAGAAGRRMRKVMVIALARKLLIALWRYATDGVVPEGAVLKPQT

SEQ ID NO: 165951 - protein, 346 aa, unidentified
MWSVGLDFHQRSSRICILDENGKTVKEMPVRGAWPEVIAALKELKHGFAICYEASCGYGHLYDQLKRIAQHVVVAHPGQLRLIFRSKKKNDRVDARKLAMLLLMDQVPQVHVPSVEVRSWRSFIEFRHREVAKRTRVKNSLRSLMRGHGVLLPAGKRLWTRAGLALLRETELPSPMAAVQRDLLLEELSHLEEQIHRVTRELDAIARRHPGVELVRTIPGVGPRTGEAVVAYINEARRFRRNKCVGSYFGLVPCQDASGPANRLGHITREGPAVVRKLLIEAAWQGVNRSARIRAFFERVQGQDPDRKKIALVATAHYLVRVMQAMLRTGEAWWDEEPAVPEPEAA

SEQ ID NO: 165952 - protein, 348 aa, unidentified
MIAIGADVHKRMCTLAMQGEDGQLTMLPSMENTRENWLHRLAKLPPQAEIALEVSTSGHFVMSVLEEAGWRERAHWVHTAGIDSLRKQKNDRLDAKRLARKLSVAERDPLPEAWFPPPPIRELRLRARQRCWTAVGRAQCRNRLRSLLQMYGLRPKGSPFTPQGRAWLEKQPLPPAAREYVERTWRVHDFLSAERESSEASLVAASASFPEIARLQTIPGLGHILAAVIWSEIGDLRRFASADALVNYTGLVPSLYESGEVSHHGGITRQGPAWLRWALITAAHAVTRSKSPLARRYWRLRRRKRPNVAKTAVAGSIARCVYGVLKHGGAYQEERWGRQTGDELKQEA

SEQ ID NO: 165953 - protein, 334 aa, unidentified
MKNRYFMGMDVAKATFDFCLLSRTEACLWRGQFSNDARGIERFFHQLRARGWKLEQIHFALEATGVYGQRLIAALHQAGLAVSVLNPAQVKYFALSVLRRTKNDTVDAQIIGRFCRERKPLATRPLRPIETQLKLLVRERESRVVEQTREHNRAKKDPYQIELPKLIGRQRQQRLKQLQKQLAQLDAEIDSLIASDQRLKTQSQLLCSIPGIAKLTAAKWLSELAGKEFQSARQLGAYAGLTPAECRSGYSLYGKTRISKIGNAFLRKALYMPAAVARRWCKPLRLWIAILENRKLHDLAIRGAIMRKLLHIAFGVLKHQQPFNPMLVSVPKTV

SEQ ID NO: 165954 - protein, 412 aa, unidentified
MERIYDNCCGIDVHKKLMVACFIRGREQEIREYGATTRELLEMADWLQQGNCEMIAMESTGSYWKPLYNILESVGLNAMVVNARHMKAVPGRKTDQKDAEWIADLLQHGLLKASYIPDKAQRELRELVSYRKSLVADKTRELNRLQKMLEGANIKISGTISQINGKSARNLLELLVKGQRIDSKKLAWMKENKQLANNLKATPEQLAEDLNGVLSKLQRQMMKELLRHIDELDKHIANLDDQIDDHMKPEEKQAVEAIQNVTGIGPDSAKAIIAVIGTNMERFPTDSHISSWAGLCPGDHESAKKRKSGKTRKGNKLLRSTLVVCAHAAAKVKTSYFYAQYKRISAHRGKKRAAVAVAHSMLIAIYHMLKEGVAFEDLGADYYNQFNTERKINAYLKKLKALGWQEPTTTAA

SEQ ID NO: 165955 - protein, 399 aa, unidentified
MSIPQSLQLRVGVDVGSRCHNVAVGLTDGDLLEEFEIPHTAAGFQDFFARIESHAKRHPYPIAVAMEGYNGHARPLDSLVRARGWRLFNVNNLKLARFKEIFPAAAKSDRIDSAKTLELFQLRDHLPMAGDVLQEVMATPEENDILKRLSRRRRRLVNERGRVVNAMHADLQAVAPGLLQITRDVGNLWFLNFLTCRKGLLKLARVRRASMLKVPGIGATYTDAVQAWQSRAFFAPDACLVGDMIQQDAARILELKQQIKALEEQMAHVAERSSIASQLASIPGYGSVCSPELAGEIGTIARFRSEASLALYLGMATLDNSSGKYRGSKAPKHVNARAKAAMMIAVDHHRKLVPQSQRYYEKKRAEGKRHNQAIRALGRHLCRVIFKMLSQERPYWIDP

SEQ ID NO: 165956 - protein, 459 aa, unidentified
MAQDGETVEVEEPEEIVARVAAIDVAKASGMVCTRVPYPAKPGRRATKVWQVPATTNALIELAEQLAGQGIQRVVVESTSDYWRAWWYLLEARGLVVWLVNARDVKHLPGRPKTDRLDAVWLARLNERGMLRPSFVPPAEIRQLRDYTRLRSDLTAERGRQVQRLEKLLEDALIKLGTVATDIMGVSGRAMLEALIAGQRDPKVLAELARGRMRGKRGALVQALTGRFDDHHAELARMLLDHYDALTGQIDRLTVRIQELIGAIPAAQAPGDGAGATRRRDGGTSGVGAHPQAAQPPLGALERLDEVPGIGAKAAQVILAEVGLDMGQFPTPGHLVSWARLAPRTIQSGAKHRAGATGKGNPYLKGVLGEVAAAAAKTDTFLGQRYRRLVRRIGKLKALVAIARSVLVIVWYLLADPTARFHDLGADFYTSRIDKDRKTRNHVRQLQALGYSVTLTPAA

SEQ ID NO: 165957 - protein, 340 aa, unidentified
MSTEYACGQYVGIDLHRRRSVIVRMDKDGVRLETVRIVNDAERLRWVLARAGESPEVVLEATYGWYWAVDVLAEVGASVHLAHPLGVKAFEYRRVKNDERDAADLADLLRMGRLPEAWIAPPATRELREVVRHRAKLVGLRAHCKAEVHAVLAKCGIQVVMSDLFGLEGNALLDSVALPGPYRARVDSLRRLIEHLEFEIEVFTKLSRGRLARDPGYLAIQAIPGIGGVLAAVFVAEIGDVTRFPGPSQLASWAGLTPKHHESDTHVHRGRITKQGSRLVRWAAVESVQILPKTTRIGAFRDRVGARRGRNIAVVAAAREQLGLVFYGLRDHEVRALRAA

SEQ ID NO: 165958 - protein, 316 aa, unidentified
MTQAGGFVGIDVAKAELEVVVRPSGARWTVTNNASGLAQLQERLQAAAPSLIVLEATGGYEVAVVAALATAALPVVVLNARQVRDFARATGRLAKTDAIDAGVLAHVAEVVRPPVRPLPDAMTQDLQAWLTRRRQLVDMLLAEEQRRSRAPRAIQRQIDQHVRWLRAQLGAVEKDVAQTLRESPVWREKEDLLRSVPGVGPILTTTLLGDVPELGQLNRKQIAALIGVAPLNRDSGTYRGRRAVWGGRARVRATLYMATLTAARYNPLIRAFYERLVAAGKPKKVALTACMRKLLTILNAMIARRTAWKPPAAVSA

SEQ ID NO: 165959 - protein, 373 aa, unidentified
MPKYSTAFGMDVHLRSTTVCALDADTGEAVTRRFPGNPWGEIAGWMDGFPGPSLAAYESGYLGFAPQRELAGLGVECVVAAVSKIPRSAADSASKNDRNDAARMAKAILAHDISPAWVPSPEVEGIRDLAGAYDGATARLATAKQRLLAFLAKRGFVYGGTTPAGNPRKYWAYDFLRWLDKVRPEDDGGVRALAALRNEVEAAAEARADLLSEYRAAVDASPIAAEVAALQSIKGCAFALAAAFSAEVGDFTRFRSGRQVTAYFGLAPSQRSSGDSVRLGGISGAGNALVRKLAVEGSWCYAAARHQPKLMPRDTGVPLEIRMHGRKGSERLLRRREEMLERGMPQAKANAATAAELVRWLWALGMMCREGAE

SEQ ID NO: 165960 - protein, 353 aa, unidentified
MKEPTNNERVVKVVGIDLAKRSFHVYGVDERGERVISRTLRRTRLREFMANLPACTVAMEACGSAHYWARRFRDQGHEVRLIAPQFVKPFVKSNKNDAIDAETICEAAQRPTMRFVAIKSVEQQDIQATHRMRSLVVERRTAQVNQIRGLLLEYGIEIPQGRAAVSQRLEEILEDADNGLSECFRAELRGLADELRHLDERVGHYDAQIETIAQRHPQAQALMTIPGLGAKGATALVAAVGEDPRLFKNGRGLAAWLGLVPRQHSTGGWERLLGISKRGDVYLRQLLIHGARAVLRWVERKDDSTSRWATGLKTRRHPNVATVALANKIARIAYAVMTTGQPYDPARGALVEA

SEQ ID NO: 165961 - protein, 343 aa, unidentified
MQTITTIGLDISKSVFQVHGVDAGGQVIIRRQLKRRSVLAFFQKLSPCLVGIEACASSHHWSRELQALGHTVRLMPPAYVKPYVKRQKNDMADAEAICEAVTRANMRFVPTKTPEQQSCLLLHRTRHLFIRQQIAVINSIRAHLAEFGIVAPVGRRGVTELLHIVADTGDKRVSEVARACLTALGTQLLSIKKQILELDRMIMAWHRSNQTSKRLHYIPGVGPMLATALVASVADPRTFRSGRNFSAWIGLVPKQHSSGGKERLGSISKQGDRYLRSLFVAGALAVIRYAKIHGTGHRPWLTALLGRRPTKVAAIALANKIARMAWAMMAKGERYKQPAALAR

SEQ ID NO: 165962 - protein, 324 aa, unidentified
MNITTIGLDIAKNVFQIHGVDANGKVVLRKQLKRNQVLAFFANLLPCRIGLEACAGAHYWARELIKLGHDARLISPQFVKPYVKGNKNDANDAEAICEAVGRPNMRFVPVKSIEQQDIQMLHRVRSGLVKERTALANRIRGLLGEYGIIIALGLVKLRQQLPEILEDAENGLTMAARQIFADLQEQLIELDKQVSAYGEKIQVLHRASEVSQRLGEVPGIGPITATALLASLGDGKAFESARQVAAWLGLVPRQDSSGGKPKLLGISKRGDVYLRTLLIHGARAVVKAAAKKDDAQSRWINEDAMATLQRWRLPTKTPGSFGHC

SEQ ID NO: 165963 - protein, 385 aa, unidentified
MSSSTTAVTGAAARSIIHLGMDVHKESLTIAVLPADAKAPTRLDRVPNELPKLKRWLDRVARDGEIRACYEASGAGYVIQRAMKEWGYACAVIAPSLIPKRSGVHRKHDKRDAVDLARLYRAGELTAVRIPSEADERVRDVVRCRETFQREILKSRHYILKFLARRGFVFREGTNWCTPHLKWLQHLTTDHSPLGPEDRLVYREYHALLMYKLQRRDELDRQIEQLALLPSLAPMVTRLQCFRGISLHSAMVLATEIVDWRRFERPAQLACYLGLVSREDSSGDRQRLGSITKAGNSHCRHVLIQAGWSYRHRPQTSVDLKRRQQGQPPAVVTHAWKAQQRLHQRFNHLSYRKRPQIAVVAVARELVGFLWAVMQEVPVAEQQFA

SEQ ID NO: 165964 - protein, 391 aa, unidentified
MIYVGIDVAKDKHDCFITNFDGEVLFKAFTIANNLDGFNDLYQKIVSVTEDITKVKVGLEATGHYSYNLLGYLIDKGLPTYVINPLHTNLYRKSLSLRQTKTDKVDARTIASMLMSDVNLKSYSDTSYHNEELKSLTRYRFDKVKQRAKLKSSVSRLVCILFPELEKLVPTLHIASVYAMLSEFPGAKQVANAHLTRFTNLLSEASKGRYGKETAIAFRDAARTSIGSNMPAKSLELKHTIKLIQELTSEIDEIEHEIKLIMDELNSPILSIPGINYRMGAMIIAEIGDFTRFDSPDKILAYAGFSPSTYQSGQLDGAYSHIEKRGSRYLRYALYNAAKYVCIWDPTFAEYLAKKRSEGKHYTVAISHAVKKLVRVIYHLEKTNQQYIKAA

SEQ ID NO: 165965 - protein, 351 aa, unidentified
MQRFIGIDVHGQSCTLVVMGPSGRRLGEHVVETSAKALIERIRSIPGDKYVCMEEGTQSEWLYEVLESHVKQIVVTQPLKRAGSKSDAIDAWALADMHRRDALERTVFKSPKTSTALRQAARGYIAVRRDMVRAKCRLNALYRSRGHNPKAEIYDPDTRNSWLAKLPPAYRTLGELLSEQLDGLCQSHQAAESWLLKEAERIPVARRLATAPGIGPIRAALLVAIVVTPTRFRTSRQFWSYSGLAIVTRSSSDWVRDGRGWTRKLTAQTRGLNRNRQPELKAIFKGAATTVIQQMPNHPLHKDFQRMTDAGIKPNLAKLTLARRIAAATLAMWKHQEDYDPSKQTRAPQSQ

SEQ ID NO: 165966 - protein, 463 aa, unidentified
MGHEPASEHDPDAYRNNQLSPPLWDEHARGPRLLLSGVHCLPAEEEITVQILYPRCCGLDVHKSSITGCCLWFDAEGQRREEIRKFGTHTAELRRAAEWLRQHEVKNVVMEATGSYWRPVWNVLEVEGFELNLANPQHMKAVPGRKTDTKDAHWSADLFQHGLIAPSFVPNQQMRHLRDLTRMRTKVTQDRTRVVNRIEAVLEDANIKLSSVVTDIMGVSAQAMVQSLLRGERDTAQLAELAQGRMRAKRSQLQTALEGNLQPHHVFVLQRLLMQSRFLQQQRQAITRQIEHRLDKEMRQAIALWDSIPGVDEDIATVMVAEMGICTEQFPDGPHAASWTAICPGNHESAGKRQSGKTRQGNRWLRGALTQAAWAASHTKGTYCSALFRRIAARRGAKRAIVAVAHSILISAYYMWKNKQLYHELGDTFLDKLKPEKTANRLLKRLAKLGYIVTVTELPNPVA

SEQ ID NO: 165967 - protein, 326 aa, unidentified
MESVVGIDVSKDSLDVVFVNDGRHLHKIFSNHAIGHNHLHNWLVAQRSGTVRVCLEATGQYGEGVTEYLYQRGYPVSVVNPARIKHYGESKLHRNKTDKADAALIAEFCQKENPALWRPLPAEVKHLRALVRRLYDLQNAYQQERNRTLAGEQNAWVLEDLKAHLSYLQDRIRTARQAIQQHIDQTPSLKSQQELLVSIPGVGQLTAARLLAEIGDISAFEDAPQLAAYAGLNPKGFRSGASVHKKTRISKEGRAFLRYILYMPAIVARQHNPIIKEFCKRLADRRLANMAIVVAAMRKLIHIVFGVLKNQRPFDPDYGNQFAFTS

SEQ ID NO: 165968 - protein, 339 aa, unidentified
MNKFNTVGIDLAKNVFQVHINDPHGKKLSSKQIKRNQLLNYLVQQPESLVAMEACCGAHYWAREIRKLGHQVKVIHPSYVKPFVQLHKNDQRDAAAICEAAVRPNIPAVAVKSAEQMDLQAIHRVRERVVKERTAIGNELGGILLEAGITIAQGVAALRSQVPLLLEDAENGISHRLRLLIQDLMDQWRIADDRAQRYKVELEQIATVTPLCKLLMKIPGIGPINATLLLSHAGDAKHFKSSRHFSAYLGLVPRQYASGGKEQLGGITKHGNGHVRKQLVHGARSAYRSLLKEPQSTRLGRWLAGLEGKHPNKIIIALANKLARIIWVVLSREVAYQAN

SEQ ID NO: 165969 - protein, 420 aa, unidentified
MVRQLLFVGDDWAEDHHDVEVDVEVMDEAGRRLSKTTLPEGIAGITRLHSMIAAQLDPDADLDAQAGQVKIGIETDRGPWVQALIAAGYQVYAVNPLQAARYRERLSVSGAKSDPADADLLADMVRTDSHQLRVVAGDTDLAEAVKVVTRTHKTLIWERTRHTLRMRSTLREYFPAALEAFEDLTAPDALELLAKAPDPASAARLTTTQIMAALKRARRHHRDRRSGEIQAALRTPQLRQPAVVTAAYAVAVRAQVAILGVLNEQIEVLQGQVEAHFGQHPDAEIYTSQPGLGQILGARVLAEFGDDPTRYTDTRARKNYAGTSPITKQSGKKKVVLARYVHNDRLLDALGGQAFAAISRSPGARAYHDKQRARGLGHRAALRQLANRLVGILHGCPKTGTLYDETTAWSHHNQDQQAAA

SEQ ID NO: 165970 - protein, 355 aa, unidentified
MDHIGIDVHKRESQIYILAEGGAVVEQRIRTDPERFAAVLGARHRARIVIEASTDSEWVARCLEDLGHEVIVADPNFSPMYATRTRRIKTDRRDARALADANLLGAYRPAHRLSEPQRHVRGRLLVRDALVRTRTRYISLIRALLRQHGYRVPSGSAESFVRRVQDLPLPGRLRSVVAPLLALMRPLNRQLTYSDERIEHLAVQDPRVPRLRSVPCVGPVTAAAFLAAVDDARRFRHAHQLEAYLGLVPREYSSGETQHRGPITKAGHSRTRWLLIQAAVSILRRRPPQAEALRTWALRIAARRGKQVAVVALARRLAGILYALLRDGSVFEPHHVRPPRSTAPVLVNMNASTPP

SEQ ID NO: 165971 - protein, 346 aa, unidentified
MRFYNRPHTYYCGIDLHVKTMFVCILDEAGQVLVHRNVPSTPEAFLEIVAPYRDGLVVAVECMFTWYWVADVCAAEGITFVLGHALAMKAIHGGTAKNDRIDSHKIAILLRGGMLPQAYVYPAAMRSTRDLIRRRLHLVRKRGQLLAHIQNTRAQYNLPIFGRKLAYRTNRAGVVEHFPDPSVQKSIAVDLALIDQYDALIIDIELTIVREAKRHNADAFHRLRSVPGIGKVLALTILYEIHDVTRFDRVQEFASYARLVKCQRQSGGKTLGTSGAKMGNVHLKWAFSEAAVLFLRHTEGKKLIARIEKQHGKGKALSILAHKIGRAVFYMLSRGTVFSMDKFLAA

SEQ ID NO: 165972 - protein, 344 aa, unidentified
MNCKAISIDLAKNVFQILGVNERNTPLFNQKIQRKKFLSFMVRFSATTIYMEACYSSSYWARQLQALGHTVKLIPAQHVTPFVRGNKNDANDTIAIFEASQRPYIRFVPIKTEYQQEISCLHRIRERLIKTKTAVCNQTRGLLSEFGVIFNTGQSEFIQGMNSFLDSDQHRHGLKVMMKAQFEEYNALRERISIIDKELTRFVCDSPSGKILMSIPGVGPIIASAILAAIDKGQAFKNPRDFAVWLGLTPQQYASGNTSKMGGITKRGDRYLRKQLIHGARSVVNNTQDKVDQLNVWVRQLRERKSYNQTAVATAHRMARLIWVLLQRQELYVPQPAICGVRHA

SEQ ID NO: 165973 - protein, 412 aa, unidentified
MRLFAGDDWAEDHHDIEVMDAAGKVLAKRRLPEGAAGMAQLHRLIGQFVPEDDIDSAEVVIGIETDRGPWVAALVAAGYTVYPVNPLQASRYRERHGVSGAKSDAGDAHMLADMVRTDSHQLRSAAGDSPEAAGIKVLARTHKTLIWERTRAVQRLRHQLREYFPAAIEAFDDLDAPDALELLGKAPDPGRARKLTRAQVSAALKRARRRDIPDKATAILAALRSEQLGQPPALTAAYAATVRSLIPVIATLNEQVKILQGQVGEHFGRHPDAEVYLSQPGMGKILGARVLGEFGDDPRRYRDGKARRNYAATSPITRASGKKKVVAARFIHNDRLVDALNAQAFAALNASPGARAFYDELRAREIEHNDALRRLANRLVGILHGCLKTGTLYDEATAWGHRENLPQSSAAA

SEQ ID NO: 165974 - protein, 437 aa, unidentified
MNNGTEKQNVPEKKVPAKDIVLWVGVDWADQKHCVVSCLPDGSDSKLHWVDQKPQKLDDFFLELRKKHPTGRIGVVLEQSRGALLYALLKYPFLRLYPVNPRCLADFRKAMVASGAKDDPSDADLLCELGCKHGERLRELELEDEATRQLVLLNEHRRGIVDEQTALSNQLGSALKCYYPLILELFADDLVAPIALDFMKRWPNLAAAQKAKPGVLRSFFHKHNCRSEEKIQARMNAIGEAKALTEDAAVLSCTQLLVQTLIARLRPVQSSIALYDERIKVVFASHAKAQVFASFPGAGPVLAPRLAAAFGTSEANFPDCYSILCWSGVAPVQIQSGKTKVVNWRWARSKFLHQTFVEYARTSVLFCPWAREFFRSRTEKGWSKFRIYRALAFKWIRVLWRCWKDNAQYDEAKYLAGLQKRGVQLYATLYAAPATKN

SEQ ID NO: 165975 - protein, 345 aa, unidentified
METMYYIGLDVHKKTISYCVKDGSGRIHTEGTIPATRLDLDIWMKTLPQPWTAAMEATIFTSWIYDHLLPHAAAVKVAHPLMLRAIAAAKKKNDRIDANKITDCLRCDFLPECYMASTEIRERRRTLRYRNLLVRQAVQMKNKIAVLLMEAGVSYNKQKLHKVGYFRELLATNQDIDEGLKPLLRLCRETVVRLGKTESALVRSLERDSLLVERVERLMTIPAVGPITALTWALEIGDVQRFSSIKKAISYCGLCGAEKSSANITMRTPLSKQRNKHLQTVLIEAAKMAPRNSPELAMVYDQEKQKGNANRATLAVARKMVAYLVAVDRRQKGFLVVENKNRTAA

SEQ ID NO: 165976 - protein, 402 aa, unidentified
MIFINCLGIDIGKSESVVAHYKDEVLVKEMVIQNNQNGYRYLKNYIKHLDSLFILFESTGIYSRGMKRFCEIHKIDYLEMNPLEAKFKTSSLRSWKTDKSDAHKLALLAFRMKDSKVQRQSEEIYFELRERARFHLEMEINQNRLKVELVETLHQTFPGLEKLFTNRYSKIALSIAKAFPHPDFVSTLTHDELVEKVLHSTDKGISVNKAHKYVQKLIEIQINSFPNVDKSSFLLQKVQYLCDKLLIGIEEMKEFDQEMIDLAKNTTEFENIISIPGIGELTAALLIGELGNIREFKTNKQLNAFVGIDIKRYQSGTSKSRDTINKRGNKKARRLLYLIIMNIIKGRNHYQSHIVDYYYKLREQPHGKTHKTAVIASINRLLKTIHYLLVNNKLYDYQKAPH

SEQ ID NO: 165977 - protein, 426 aa, unidentified
MMNSQIKKIEAVTPKTLIVGVDIAKNIQWAQFTDFRGREVSKHISFENNLSGFKSILEKITEIKSENFFDYVIVGLEPTGHYWKTFATFLEDNNIKVVLVNPYHTKRAKELDDNSQTKNDKKDALTISKLVKDGRYSEMYLPKEEYAELRNLSNTRLEIIRSMNTCKNRIHAFVDEYFPEFPTVFKTFITGKTALYLLKKVPFPSDILEVQLQDIIDLMKEATKKTVGEKKAKQLVEAAKMSIGIKNGLGGARVRITSLLEQYELYLKQLVNIELEMEKQLEVTGYREILLSIPGIGIVSAASFLGEIGNPKRFSSPKQIIRLAGYNLVENSSGKIKSKTTISKRGRKILRSILYKIALVMVAKNNEIKLLYRYLLFRNNNPLKKKQALVVIAEKIIKIVFALMKQNKRYNPDLVLGEYRVKQIAA

SEQ ID NO: 165978 - protein, 317 aa, unidentified
MQKIINFVGIDMAKNDFYACLSDMIEPRKFNNDTKGIKSFFNHLKRHDFQKENTLLGVESTASYHLKLCIESTESNYEIKVINPLIVKKQNQTNLRRVKNDKQDSRLIRFCLIGGAGYLFDNDPEAMILKSLIRQRDSLVFSKLKFSRQQADIRLKEKCLKQNISPIYAEIINVLEDKINLLKADLKLYRPKEQYLLQSIPGVGPITAASFISEVGDINRFSKPEQLVAYAGIDPRVHQSGTSINGKGYISKRGNKIFRTRLFNAASVAVLHDNMFKAFFQKKKSEGKPYRVALVATMRKMTHVIHAVWTRGTPFIK

SEQ ID NO: 165979 - protein, 308 aa, unidentified
MGVDVASMHLDAAAHGGSGVVRFANTDGAVSKWLRTLPAGSTIALESTGRYHERLAFAAHAKGFTVYLLNPRDVRHYARAMGMRGKTDKLDAQILARYAAHECTELRAWVPPSPELRRLEDLLRRRGTLVKHQVAIRQSLADSAGLRASAKTLMKEFAQLLDSIDQQIAQAAADLNLDSEGFERITSVPGIGLLSGSVLLGLFQRLAERGADAVIAFLGLDPRPMDSGKKVGLRRLSKRGPAEWRRLLFNAAMSASRTKAWSATYERERAKGLPRTAALNVLARKLVRVAFGLFKSGQHFDSSKIAPA

SEQ ID NO: 165980 - protein, 328 aa, unidentified
MGKSSFYIGVDVGASELVAAVDGRKPRCFKHSRPGIKAMVKWAKKVALETRLHFCLEATGVYGYSLACCLHREHQIAVSVINPAQIASYGKAQLRRTKTDNVDSQIILSFAQSQNPPLWKPESSTIRKLYYLVVESARIGKALAQWGNRKHAQNYLKDIPKVIKQTQKALDRTMLRQLEKIEQAIIELCKQDSELKEDVELLCSIPGISDHTAVRVLAYGKNTLRDYSRNALTAHAGLAPAQKQSGTSIHGKARIAKQGDRRLRTTLFMPALVAAYHNPILKTFYQRLLKKGKPKMLALVAVMKKLLLMIQAILKNRIPYNSKYQLDT

SEQ ID NO: 165981 - protein, 412 aa, unidentified
MNNSPKGIFNLFVGIDVSRASNTVTIHSSDASLIEPVFTLPNNQLGVDTLIQKLGQYLTKTPELQLIIGCEATGIYSFHLLQALACANELNSFSVALYHLNPKLIHHFRKVLNKQQKTDLVDASVIAERLRFGHLPEPYSPQPPLLVLQRLTRFRFHIIEAISKEKTYILNTIFLKFNTFSQEKPFSNAFGKTAEALLTELTCEDIASMTLDDLIAFLMKHGKSRFRDPEDIALKLKKIARESYRLRPELAKSVTFVLALAFRNIRALQQNLKELDKAIIEELKAFPNTLMSVHGIGLVFSAGIISEIGDISRYPSDAQIAQAAGLVWRQHQSGDFHAEHTPMTKTGNKYLRYYLIQAANSLRHHNAEYRKYYSLKFHEVKLHPHKRALALTARKFVRLVYALLSKQQLYHA

SEQ ID NO: 165982 - protein, 350 aa, unidentified
MSMLAELVEVVIGVDTHSQTHTAAVLDARTGGVLARATVTADPDGYAELVALAQEHAGLRAWAMEGAGGYGAGLARHLADAEELVIELDRPKRPARRAGAKSDPIDAERAARDALARAQLAQPKTGAERAALQMRLTARRAAVEAASAAQRQLLAMVITSPEAVRGRFRGQTTRVMITTAAGLRPGASSGDVEVITALTVLRELARRIRFLETEALDHEKAIRTIVGSWRPDLLELTGVGPIVAATVLTAWSHPGRCRSDAAFAMLAGVAPIPASSGKTVRYRLNRSGDRQLNRALHTVVLSRLQRDERTRAYADRRRAQGKTDREIKRCLKRYIARELYRRLESIPAAA

SEQ ID NO: 165983 - protein, 348 aa, unidentified
MRFYTQQHRYTCGIDLHARSLYVCILDDTGQKLIHKNTKASPEALLKLIADYQDDLIIGVECMFSWYWIADFCEDYGIEFVLGHALYMKAIHGGKAKNDKIDSEKIARLLKGGMFPYAYVYPRSMRSTRDLMRRRIKLTRERGDLMAHIKNTLSQYNLPAHPENLRYAKHREPMRSAFPDPSVQRSIDLDLARIDFYDGQLAKLEWYLKRTAKSVDANTITRLQSIHGIGDILSLVMLYEIHDINRFPRVQDFVSYCRLVKCQRESAGKKHGAGGAKIGNPYLRWAFGEAAALFLRGNPDAQRWLEKMTRKHNKAKAMTILAHKLGRAVYFMLKRETLFDPDRFLASR

SEQ ID NO: 165984 - protein, 340 aa, unidentified
MGEITTIGLDLAKNVFQVHGLDEMGAPVVVKRLRRSQVIGFFASLRPSLIGMEACATAHHWARELTKLGHAVRLMPPQYVKAYVKRNKNDAADAAAICEAVRRPSMRFVPVKTIEQQSALLMHRTRDLLIRQRTMLVNALRGHMAEFGFVEAQGLHKVAGLIAIVTNDGDERLPNLARQALNLIAEQITELQNRISALERQILAWHKNNPVSQRLATIPGIGPIIATAIAATVADASVFSSGREFAAWLGLVPRQSSTGGKARLGGISKRGDSYLRRLLVNSAHTVLLCSKAAKVDPWVVSLRSRKPRLVVAVALANKTARVAWAVMSRHDTYRRIAVAA

SEQ ID NO: 165985 - protein, 417 aa, unidentified
MNKNSNSPTKKEQKAKRAKAQRPVEREPKAVLAELVEKLSGKLELKATSGSQAEADPGGELSPNVDRLTVGVDLGDQWSHFCILGLQGETLSEGRLRTREAEVAEFFQTLPPARVVMEVGTHSAWMQEIISGEGHEVVVANPRLMEGSKRRKRKNDRIDAKKLARLGRVDPQSLHPIRHRSREVRQDLVVLRAREALVAARTELINATRGLVKSMGTRLPKCSSPSFGKKVKDAIPETVREALTPLVQLADALSDCIQSYDQKIEELGSEKYGHTKLLRQVKGVGPITALAYVLTLENPEHFAKSRDVGPYLGLVPKQEDSGESQPQLGISKTGDTMLRKLLVQSAHYILGPFGPDSDLRSYGQRLCERGGKNAKKRAAVAVARKLAVLLHRLWVSGEVYEPLGYTISRAIVQQAAA

SEQ ID NO: 165986 - protein, 356 aa, unidentified
MKGQKAKLDFKGQDIFVGLDIGKKSWKTAIYTEKFEHKTISQPPKVDVLVNYLKRNFPGATYHSVYEAGYFGYWIHEQLQKAGVNSIVVNPADVPTTHKEKTNKRDKVDARKLARNLRNTELKAIYVPEENALQDRSLVRMRHHFVKKQTRCKNQIRAQLRFYGAEIPEELVDSHWSRRFITWIEELSSEQESSNIALNALLDELLHLRQTITTLSKEIRSLATKERYKSRVSNLVTIPGISTLSAMILLTELVDIDRFASLDQLASYVGLVPGEHSSSESEVTTGISPRRNSRLRALIIEAAWVAVRKDPALMMTFNTLTKRMTKNKAIIRIARKLLNRIRFVLKNNCPYQTSVV

SEQ ID NO: 165987 - protein, 355 aa, unidentified
MTSMTETPPDVSLTIHAGVDTHKHTHHAAIVDHLGRPLADREFPAPDAGYHQLLSWLAGTGIIASVGVEGTGSYGAGLTHVLHDAGLTVVEVDRPDRRSRRRHGKSDPLDAYAAATAALTGRATTVPKTHGGDVEAIRFLHNARRSVIKSRAEAITTLKAMIVNAPEPLRAALRGLSDPALFAACAALRPGPIVPGDLTAAVKTALRSLARRIRALTAEGRALRTNIAALVAHTAPRLLERCGVGVETAAQLLITAGDNPGRITSEGAFANLCGVAPIPASSGQTTRHRLNRGGDRQANRALHVIVLSRLKYDDRTRAYRDKRLAQSKSKRDIIRCLKRAVAREIFALLNPANPG

SEQ ID NO: 165988 - protein, 409 aa, unidentified
MRYYIGVDWGDEEHTVWVEDEQGQRVSAGMVSHSPVGFSEWGRQLDEWRAQGLGLWAAIERPEGRVVDMLLDHGVRVYPVNPKALARARDRFRQSGAKDDLFDARVLAGFLRTDHAHLQALEPSSEAAQELKRLTEDYQRQVRTQTRLVNQLTATLKAYYPRALDVAELTTALAAAFLQAYPTPATLMTLTERQWQRWAKGHHLSEVRTTDLWTKLQQPQLPVPPHVVRAKSRLMQALVTELTAVVAAVASYRQAIDDVFATMPAAAWARTLPVGEHGVTVPTLWARLGDAPGRWESFRHLQAQAGMVPITVRSGKLVVVRFRFACDKQLRYAVDQLAWLSLQRSEWARAYYDEQRARGHRHRRALRALGAKWLKIIFIMWQRHVPYSEEHHLATMARQALRHPEKKIA

SEQ ID NO: 165989 - protein, 384 aa, unidentified
MNTAATRTREYSVEGPVLYLAFELGNMEWKLGFSVGFGQRPRVRTIPARDVEGLQREIDLAKTRFGLPATARVMSCYEAGRDGFWLHRYLVEAGVENLVVDSSSIEVNRRFRRAKTDRMDVAKLVDQLMRFERGEKKVWHVVRVPGAEAEDRRHLHRELEDLKAERTQHINRMKGLLAGQGVRLEEIGSGFPDQLNAIRLWDGRPIPEGLKARLEKEYERLQFIQGQIRELEAQRVEAIRRSADPEVEMVRQLLRLKGIGLNSAWVDTMEFFAWRDFHNGKEVGGLAGLTPTPYQSGDSSRERGMSKAGNRHVRALAIEIAWGWLRYQPESELSQWYQRRFGDGSSRVRRIGIVALARKLLVALWRYLETGLIPQGAVLKARLI

SEQ ID NO: 165990 - protein, 407 aa, unidentified
MFAGIDWASQEHAVCVHDGAGRKLASFSITHSAVGFEDLVGRLARFGEPAELPVAIERPDGRLVDRLLEAGHPVVPVSSNAIKAWREAEVTSGAKSDPGDAETICEYLRLRIHRMRPLQPYSQHTRALRAAVRARADLVSQRVAANNQLEATLDAFWPGAKAVFADVTSKIALAFLERYPTPTSAAALGEKRLGAFCAKHGYSGRRSPRELLERLRAAPPGIADGAESAARKEIVLAFVQVLRALNQAIADLDRAVIASLAEHPDAGIFTSLPRSGQISAAQILAEWGDCRDAYDNAESVAALAGVSPVTKQSGKYRSVEFRWACNKRFRNAIVTFADNSRHASPWAAGVYRSAIERGHDHPHAIRILARAWIRVIYRCWVDRAPYEPTKHGAAALTEATPEQEHAA

SEQ ID NO: 165991 - protein, 414 aa, unidentified
MESGYRLMVGIDWATEAHQVCVLDRQGRLLEQRRVEHRAEAIAAMTDRLIGLAGGDPASIAVAIEVPRGAVVEALVERGLSVFAINPKQLDRFRDRHTVAGAKDDRRDAFVLADSLRTDLAAFRRVHLDDAWTIRIRELTRIEENLNTEINRLANQLRDLLLRFYPQLLRLCPAADQPWLWALLKLAPTPAKAQRLRRSSIQRLLHQFRIRKWTADQVRTELKTAPLCVAPGVTEATSTHIALLLPRMELLMAQLKLCSKAVQTALDEKIAEEEQRREHRDVEILLSLPGVGRVVAATMLAEASQLLAQRNYHALRTLGGVAPVTRQSGKRLAVRRRYGCNHRLSNAFYHWARTSSQCDPRAKHHYQTLRRLGHSHGRALRGITDRLLARLVAMLRDQTLYDSTRTLTPNHIAA

SEQ ID NO: 165992 - protein, 429 aa, unidentified
MNYTQNEKIEQVTDSTIVVGVDIGSQIHYARAFDNRGRELTKRVFSFHNDLEGFNSFNLWAETLKSENKKTAVLIGCEPTGHYWFAFAKYVKEHQKRLVMVNPFSVKKIKELDDNSPKKTDSKDPKTIAKLVVDGRYSIPYVPEGIYAEIRDLVYSRDRIMKQHNISANRIQRWLAIHFPEYLGLYTRFDAASGLAVLEKAPTPKDVIALGVNGIRKIWHDKKMRGRGVTEDRAKTLVEAAHNSVGLDGGIGTKSELYMLLEEHRLWTSQLEAVNKVLEEMILKVPHVEKLLAIKGVGSITIAGFIAEVGDIRRFDSPKQIQKYAGLELVENSSGKHKGRTRISKRGRRKLRKILYQVMVPLLARNREFREIYDYYVTRVKNPLKRRQAMVAVSCKLIRVFYAVLTKGMEYDRFKMMSDIHRKSDIIAA

SEQ ID NO: 165993 - protein, 429 aa, unidentified
MKIIYPRVCGIDVHKKFIVAVICISESVEPVYLKKRFSTFHNDLIRFRDWLIQNDCQNVCMESTGKYYIPVYNVLESHISNIVVANPKWVRAVKGEKDDDKDAKWIADLFKLGIVKSSFIPQKDFRILRELTRYKYKLVNMRSSEKNRYQNALTSGNCKLDMVFTDVFGKSASNIIDLILSDNPYTDEDILSKVHKNCKASPDMILNSINGTDLTPVQKSRIELVNNHIKQLSSNIQRLDKLIDLMIEPYEDYISFLCQIPGVSRNSAITVLSEIGVDMNQFTSTRRLTSWAGLTPSSNQSAGKKKSVRISRAGVYLKPCLVEVAHAAVKDKNHPYYANKFNKISKRRGKKRAFIAIARKILVAAYHMLLTGEIWNPADLAEVETPVEQRIKYVKNNLKSDIKQLLDIGLTVEELTLMIQQNANNIATQ

SEQ ID NO: 165994 - protein, 346 aa, unidentified
MDATTVAVDLAKSVFELAIADLQWHITARQRLNRTQFARFLRQTEPTHVVMEACGTAHYWGRVAQGHGHTVTLIPPSYVRPYVRRNKTDRADAEAILEAVRSAQIPGVPVKRIEQQALVALHRVRDQWMTTRTARINALRGILREHGILLPVGARAAVQAVPTVIADADTPLPAHLRHVLTCIHEEVRDIEGRLATLEHELRALADADPVVTQLRTIPGIGLLTATALVGTVGHIHAFRRARQFASWLGLTPREHSSGARRRLGGISKQGDVYLRCLLTHGARAVLLSAQRRRRNAQPMTRLHEWAVRVQERRGHNKATIAVANKLGRIVWAVWHKDVPFAIPASL

SEQ ID NO: 165995 - protein, 387 aa, unidentified
MIYVGIDIAKLKHFAAAANSDSEVLVQPFGFENNSEGFKLLVSRLNTFKKDDLVIGLESTAHYGESLVFYLFNLGYQLTVINPIQTSSLRRTNIRKTKTDKVDTFLIIKSMMVNGYRLFTKADADTHRLKSLCRFRDKAKRSKAKFKIQLVAHMDVIFPELQYFFKSGIHSNTCYTLLKKHQCPDEIAALHLTYFGNLLRKASHGHFGKEEAIALKSLAKSSVGTSDTSVYIRITQTLEKIELLEEQISKLDENISSIMYELDSVILTIPGIGFLNGAMILGEIGNISRFSNPAKLLAYAGLDPSVHQSGQYMANSARMSKRGSKILRYALINAAWNASMNNKTFGDYFELKKSQGKGHFAALGHVAHKLVRVIFKMLKDNVAFNLD

SEQ ID NO: 165996 - protein, 377 aa, unidentified
MGDYSEAFVGLDTSKLRNAVAIADAGRGGEVRFFGEIENTPAATAKLVRKLSAKYKRLTFCYEAGPTGYGLHRQIKGLGFECVVVAPSLIPKRPGDKVKTNRRDALSLAKLLRADELTAVWVPDGGHEAMRDLTRARETAMLDLRTKRQHVSAFLLRLGRPYPESRKTWTKAHANWIASQKLEHPQQRLVLEEMMLAIRQAQERLARLEQAIAAAVPEWSLAPLVTALMAMRGMDLVSATTLLAEIGDLSRFRTPTELMAYLGLVPSEDSTGDTVKRGPITKAGNRRARRMLVECSWSYQHPPRVGQAKQSKVDAAPPAVREIAWKAQCRLYRRYRALVRKGKRKVVAIVAIARELAGFIWAVARAALTMPSAAASA

SEQ ID NO: 165997 - protein, 322 aa, unidentified
MRYIGIDVSKATFVVAYSSDKGGEIRTFNNTTTGIKQFIGALPKDGSIHCVMEATGNYSALLLYMLNVAGITVSMENPLKVKNFAKALLSTVKTDKSDARLITLYGEKMNPRPFKVQGEAILRLRQKRTVIRQLTKQITAMSNLRGSLACLPVPDKGATHTVDETIKFLEKKRDRLQSELTDLVEVEFSRQLALLTTIKGIGITLATALIITTGGFTYFQNAKQVSRYLGICPTYEQSGTSVNIRGHINRNGDAYTRGLLYVAAWTASRFNTKCGETYTRLRQNGKPGKLAMIAVANKLVRQAFAVVTHDKEYVDGFVSNRP

SEQ ID NO: 165998 - protein, 316 aa, unidentified
MEPCGIGLDVAKATLELACSTNPTARWQTTNDEAGWAALVAHVRTLPPGVVVLEATGGFETGAASALVAAGLPVAIVNPRQVRAFAKALGLLEKTDAIDAGVLAAFAARIQPTPRPLPDDLQADLHALVTRHRQLVEMRTAERNRVPLARGAVRKNLLAHIAWLDKQLGKTDRDLRARIEASPIWRVRDQLLQSVPGIGPTTSACLLACLPELGTLTHREISKLVGVAPLPDDSGTRRGYRRIQGGRGDVRTALYMATVTAITHNPTIRAAYRRWRGAGKLPKVAVVAAMHKLLIHLNAMLKHQTPWHPIPTAPTA

SEQ ID NO: 165999 - protein, 400 aa, unidentified
MISVGIDISKDKSTVCMLRPYGEVVEAPYNIEHTEQALNALIERIKSFDEDVKVVLEATGGYHQVVVTKLLSAGIFTVVVNPYIMKKYCAAALRKAKTDKIDSIRIANYGIDHWFSMTAYCPPDEIYAELKLLGRQYDQYVRLKVSCKIQLAHLLDGVMPGIKTILQGTVPANSTKDKLCDFVEKYWHYDNIKKMSEKRFIEDYGKWAKKKGYRCSESQAIAIYQLSKNNIPTLKSSTPSTKMLVLQAVKSVRDAEITLSLIISQMQEIASTLPEYSVVREMKGVGDVLSVRLIAEIGDVRRFHNGSALVAFAGIDAPPYESGKFVGTKRNISKRGSSTLRKIGYEIMHSLKVVKPTEDSAVYDFIIKKETEGKPKRVAKIAGLNKFLRIYYARVMQIYC

SEQ ID NO: 166000 - protein, 335 aa, unidentified
MLYAAIDIHKRMFQAAVLDVETGETVERRFGATREELSDWAMPLQGELAAVAIEATNGWRWVWRELSARGFDVRLVDPAQAKALRGRIKRAKTDRLDARWLCVLLAKEMLPESWLPPAEIQALRDQTRLRKALAEDRTRWAQRLHALLAHEGWPCQRARLLTVEGRRWVNALSLSPAARSQVERLLRLIEAVEDELRSLETELRRFARSDRRCIALQTIYGVGPILACHLLAELGEASRFRRARQAVRAAGFDPVVDESGETRRRGRLAKHGAPALRWALVEAAQHAQRANSPDRGLYTQAATRVGGKRAVLTVARKIGRRAYHVLNELETQAAA

SEQ ID NO: 166001 - protein, 345 aa, unidentified
MNIIRVGVDIAKSVFHVHGVDRHDQPQWQGKYSRTKWLDALSQKVPAGAEIGMEACASSHHWARELQRRGYRVRLIAAQFVKPYVKSNKNDRVDAEAICEAMSRPNMRFVKPKTVAQQDIQAAHRIREELVGQRTAKANQIRGLVGEYGIVAPLGIQQLRRALPEWLEGVENGLTDNFRTLLIGLADDLRHLDDRITALDQRIADSVKQDPVARRLMTLRGVGPLTASALSGALGDGQAYSRGRDFAASLGLTPRQHSTGGRERLLGISKRGDSYIRKLLVHGARAVLHHIDGKDDGLSRWMKNLKSRKHANVATVALANKTARIAWALVQNGTTYDEKLAAASA

SEQ ID NO: 166002 - protein, 391 aa, unidentified
MSMYFIGIDISKYKHDCCIISAADQKVVSKVTIKNNKAGFNELLTIIHSLANPADIRIGFESTAHYALNLELFLENANHSFMEVNPVLIKEYKKSTTLRRTKTDSVDCESIARWLMTVEYKPHSKGFYHAYSLKSLSRLRDRLIRQRSIYLVKITKVLDHTFPEFKPFFNEHFSKTALYLLENYSSAEKMSRMNSASYEKLRSISKGNFSIQQFLALKELASNTVGVNNSIFDVELNSLLTLYKTLVTEIDSLEKEINRLIKEVHPHYLSVPGIGPISAAIIYSEYGDISNFDNPGQMLAFAGIEPGINESGTESHGGRMVKRGSSQLRYSLINCCLPLIRFDMTFATYYAKKRAEVKSHRVAITHVAKKLIRVIYASERQDTDFCIQKLR

SEQ ID NO: 166003 - protein, 391 aa, unidentified
MIYVGIDVAKDKHDCFITNSDGEVLFKSFTIANNREGFETLFQRIQSVSDDLTKVKVGLEATGHYSYNLLGFLLDNGLPTFVINPLHTNLYRKSLSLRHPKTDKVDSHTIASMIMSDVNLKSYSDTSYHNEELKSLTRYRFDKVKERAKLKSSVSRLVCILFPELEKLVPQLHIASVYALLSEFPSAHAVASAHLTRLTHLLSESSKGRYGKDMAIIFREAARNSIGSNMPAKSLELKHTIKLIRELTSEIDEIEIEIKSIMDEINSPILTIPGISYRMGAMIIAEIGDFNRFNSADKILAYAGMSPSTYQSGQLDNCYSHMEKRGSRYLRYALYNATKYVCHWDPTFAEYLAKKRAEGKHYNVAISHAVKKLVRVIYAMEKSGQVYNKAS

SEQ ID NO: 166004 - protein, 360 aa, unidentified
MAKARTLVGLDVHATTIVAAVLDAETGELRTFRMSGEGKEAAAFCAGLPSPVRAAYEAGPTGYGLARELSKRGVECVVAAPSKIPRASGDRVKTDRRDAEHLVRLLLAGKLHAVRVPGDEEEALRDLVRARDSVRADLMRCRHRLSKLLLRHGIRFDDGAAWTQRHRDWLATVTLQWPAAQATLLDARGAVDALAHRREQLEREIVAMLPSSPWVVQVGRLRCLRGVDTLTAVGLCAEIGDFERFARAEQLMSYVGLVPSESTTGQQRRLGSITKTGSGHARRLLVEAAWHYRSRPSIGRALSDRQENQPPEAIAVAWSAQRRLHRTWTRLEARAKRRTIVAVAAARELAGFVWAITGIE

SEQ ID NO: 166005 - protein, 426 aa, unidentified
MKYTQNEKIMQIKETTLIVGIDVGSESHYARAFNFRGVEYGKVLVFSNNAEGFAKLKEWTRRITGSKGFTEVVLGMEPTGHYWFNLAENAMKSGMRIVLVNPHHVKKSKELDDNNPTKNDRKDPKTIAMLVKDGRYIEPYIPEGIYKELRSAMDSRWRLVRELSAVKNRISRWICIHYPEFTKVFGDWEGKAALLILNECPTPKKVVEKGIEGIIAIWKKHKIRAVGIKRAVRLLESAKTSIGTSEGLVSAENELSMLLEDYESKMRQLERTMALIEELAMQIPGFEKMLEIKGVGLVVAAGFLAEVGDIFRFSHPKQIQKLSGLSLKENSSGKHKGQTTICKRGRKRLRYYLTFGIMPLLSKNEEFRTLHQYYTTRKERPLKKMQSLVALSNKLIRIFYTILTKDIAYDPQKMMSDIKRPEIKAA

SEQ ID NO: 166006 - protein, 315 aa, unidentified
MVVGIDVAKAALDVAVRPQGEEWHLANDAAGIAEIVGWLRALNPHVIVVEATGGYEAPLVAELGGASLPVAVVNPRHGRDFARATGRLAKTDRLDAQALAHFGQAVRPTPRPLPDEAAQALVALVERRRQVVAMRTAEENRLGATRVALVRARIQAHLAWLEADLGEIDEDLRQRLRASPLWREQDDLLQSVPGIGPIVSLTLLAELPELGRLSHGQIAALVGVAPLNRDSGTLRGRRGLGRARSRPRSALHGHLARDPLQSRHPAVLRPSPGSRQSQEGGLGGVHAQAADHPQCDGQASGTLAGSGGLSLPVCG

SEQ ID NO: 166007 - protein, 337 aa, unidentified
MDYFAGLDISMDETHICVVDRDGAVVYEGKSASTAEAIADKLSEAPSCRRIVFETGRMAPILFHGLSQLGLPAVCVESRQAYQALRSLATHKTDRNDARGLAHLARTGFFKPVHVKSLSAHALRSLILARKKLVGQRVTLENQIRGLAVVFGIRLPRALTAAFIDQALKASEGVAGLSAAMRGLIAARTAVMSAVAAIDADMRRMTRASEACRRLMTIPGVGQLTALAFVAAIDDPSRIRRSRDVGAYLGLVPKRYQSGEVDYVGGISKCGDRRVRTLLYEAANVMLTRYNGQLKLKEWAFAIARRSSMRKARIALARRLAIIMHAMLRNGTEFVVA

SEQ ID NO: 166008 - protein, 403 aa, unidentified
MNSVGIDISKGRSTIAVMRPFGEVVISPFEVRHTGSELSKLAGLLKSLDGETHVVIESTGNYHAPVAWLLHDAGLYVSVVNAMLVHDYGNNSLRRAKTDKKDAVKLANYGLDHWLSLPRYVPEEDTRLMLKTCYRQYQQYSKVQTMLKNNLISLLDTVFPNANRLFSSPIRGDGSEKWVDFVAEFWHCRCVSEKSERAFTSKYLRWCRKHGYNFREAKAHTIYAEASGHIGVMPKSETTKLLVEQAVAQLRATSTALAALKHEMQSLASQLPEYPVVMDLFGVGPTLGPQLIAEIGDVRRFYSKKALVAYAGLDAPPNDSGDVTGRHKSMSKIGASSLRRTLFLVMSVYLQTAPLDEPVYQFMDRKRAEGKPYRVYMMASANKFLRIYYATVKAYLESLEHTA

SEQ ID NO: 166009 - protein, 319 aa, unidentified
MQSKLTIGMDIGKAQVVVACHESAFAVLKMANAVPVLRRWLATLPAGSRLGLEATGGYHEPVAELAHSLGFTVYILNPKDVHHYARALGARGKTDRLDAQVIAAYVAEHNARLHAFVPLSADEKLLRELARRRATLVNAKSMLQQSLRVLPGFEREGRELLRAMGSFADRLERKLAEIAARSSERAALVKRLQTIDGVGTLTSIRCATLFTRVPLHRSDAAVAFFGLDPRPHDSGQHRGRRRLSKRGPSEDRRLLYNAAMSAIRTPTWGPLYQHLRNRGLASTEAIIIIARRMVRIAFAMYQNHSDFNPRLVPRPSCPA

SEQ ID NO: 166010 - protein, 358 aa, unidentified
MAVTGGTRRIVGGVDTHKDLHVAAVVDEQDRVIGTRSFATTRQGYRQMLAWMRSFGELQRIGIESTGSYGAGLLRFMQQAKVAVLEVTTPDKQDRRRRGKNDDLDAQNAAHAAFAGQRTVTPRSRDGMIESLRILVACRKTAVSARRVALQMIHNTIVCAPDGLRDQLRSLTRMQLVRTLASWRPDLTAYRDLDSAYRIGLKSLARRYLELHDEIADLDVMIAAIVDELAANLVARNSIGHIGAAQLLLTAGDNPERLRSEASFASLCGVSPVPASSGKTVRHRLNRGGDRAANSALHIIAIGRLRTDQRTKDYVARRIAEGHSKLDAIRALKRYLAREVFTLITQRRKEINATRIAA

SEQ ID NO: 166011 - protein, 346 aa, unidentified
MNQIIRIGMDTSKHFFQVHGVDAAERPVLRRKLRRNEVLAFFAKLPPTIIGMEACGAGHYWARELRKLGHEVKLIAPQHVKAYVKRNKNDGRDAEGLCEAMSRPTMQFVPVKSEEQQAALMLAGVRQQLMTRRTQLGNAIRGYAAEFGLISAKGLDKVEPLLADIAQDESLPELAREMFAVHGREYARLQLELKRVDARLMVWHRGNDDSRRLAKIPGIGLIGATALVMKAPDPRLFPSGRHFAAWIGLTPKDHSTAGKTRIGKITRAGDEMLRSVLVAGATAVIQQAKKGRGHPSPWLLALLVRKSPKLAAVALANKTARIAWKLLTTGESYDGARMPVASALAA

SEQ ID NO: 166012 - protein, 375 aa, unidentified
MGEITRVAIARVGVDLAKRVIQVHAVNAAGQRVVSRALKRDQFMAWCVQLPPGCLIAMEACSSAHHWARKLRALGLDARLIAANFVSPYRMEGKGGKNDATDAAAVCEAASRPSMRFVPVKSCEQQGVMSLHRVREGIKEERTSCINRIRGLLAEFGLVFAQSPKALRAELADVIEDASNELTAMARQVLLRAFDHWRELDEHMRWCDRQVGQHVRSSPQARRAAKVTGIGELGASALTAGVGDFHQFKGAHQFGAWLGLVPSQNSSGGKASLGRITKRGDDYLRTLLIQGAKSAVMSAGKRDDPTSRWLVQLIARVGWQKACVAMANKNARILWAVMTRDEGFDARHVSVKPLGKAPVHERVASASPPGLACPA

SEQ ID NO: 166013 - protein, 368 aa, unidentified
MEKIGVSEGVRQEGVPAPKRPPEGTAVWMAIDISRSKAVYCLRWEGSEQRRLSTPLGIEHVRAVVEHYRDCQLHVAYEACGFGYELAWWLQEHGVAVNVIAPSRVERVPGLQVKTDRVDVGKLARKLEKGDLKAIYIPSRTVHEQRQIGRTYAQSLKERKRAQVRIRSLMQEQGRLGPLPAGGWTVYHAWLSEQHLPEPVRLCVQAHEQMRRVADQQAQRMKAELYKLARRAEYRPLVTALSAQAGVGWQSAIRLVLELGTIDRFRTTDALPHYLGLTPSQYSSGELDHRGHILKCGPGVLRALLLQCAWSAVRQGRDTELQERFANLAPRIGRKRAIIAVARKLAIKLRGRWRDHLLASEPAQAVAV

SEQ ID NO: 166014 - protein, 377 aa, unidentified
MHSENIAAYVGLDVHKETLAVAIAAPERLGEVRYYGTINNEAQAVRRLFQKLQGLYGNILSCYEAGPCGFGLYHQLTAMNIKCQVIAPSRIPKSPTDRIKNDHRDAISLARLLRAGELTPVWIPDLTHEAMRDLIRARAAAKRDSRVARQRILSMLLRTDKHYAGKHWTGKHRTWLANQSFSQPSQQIAFQHYCQSLEQIEDRILQLDQEISRLLPEWSLCNLVCQLQALKGVGQLIAITLVAELGDFSRFSSPKQLMAFLGLVPGEYSSGNSIRPRGITKVGNSELRRLLYEAAWSYRTPAKVGAWLIYYRPDSVTQYSKDIAWKAQQRLCSRYRSLTAKGKKSQVAITAVARELTGFMWDIALAAQSSFSQQKQN

SEQ ID NO: 166015 - protein, 352 aa, unidentified
MKKIFIGIDFAKEKFDAAIIEACGLKEFGDRQHGTFPNDKKGYRQFIKWIKDNCRGTVEDEWLFCGEDTGSCSIGLSKWLYGKGLDIWIENAYSIRHSSGIQRVKTDKADASMIAEYAWRHQDKALLFEPLSESLTQLREIFLYRHKLVQQRVAMEVRKKDKESSGEASRAMSFIKRKSKHLMAEIDKSIKECDEMIDHIISEDPELAENYAIVTSIKGVARQNGACLLIYTNNFKRFDMDARKIACYYGVAPFGKESGTSVHSPAHTSHFANKLIKSLLGQAAQIARIHNPEIREYYERLRTKGKKHSVAINNVKNKLLRIIVALVKKRTFYDPESYKFYRDRLNAQFKPS

SEQ ID NO: 166016 - protein, 397 aa, unidentified
MDPTYAVFCGVDVGKGEHHAVGLDPAGTRLFDKALPNDETKLRAVFDRLAEHGPVLVIVDQPNTIGALPVTVARACGHAVAYLPGLTMRRVADLYPGQAKTDARDAFIIADTARTMPHTLRRVDVGDEALAELGVLVGFDDDLAGEATRISNRIRGLLTGIHPALERVLGPKIAHPAVLEILSKCGGPVGIRKAGKRRLTALATKHAPRMGARLAEEILTALDAQSVTVPGSNAAEIVLPKLADSLKDILQQRKSIAEDVERMLDDHPLSQVLMSMPGVGVRTAARILLEVGDGSAFASAAHLAAYAGIAPVTHRSGSSIRGEHPARSGNRKLKRALFLSAFAALHDPTSRAYYDRKRAEGKKHNAALICLARRRCDVLYAMLKNKTFYRTPAAAAA

SEQ ID NO: 166017 - protein, 360 aa, unidentified
MPVPARSDAEVPVTVGVDTHLDLHVAVALDHLGRRLDDLTVPTTEAGYAKLLRWAEALGNLERVGIEGAGSFGAGLARFLRERGVEVLEVGRPKRRDQHRSGKSDPIDAELAARAVLAGTAIGEAKDSEGAVEMIRVLRAARRSAVKARAQAAKQLKALLVTAPENLRTELRGLSTAKLVRRAAGFRPGDLPEDVAAATKFALRSIARRYRTLSEEIRELDGHLARLVTDTAPALVAVHGVGVDTAATLLVAVGQDPKRLKSEAAFAHMCGVAPIPASSGKVVRHRLNRRGNRDANRALHVVAAERMSPDERTRAYAERRTSEGKSKRETMRCLKRYIARELYKVLVSTVVPTTTSLSAP

SEQ ID NO: 166018 - protein, 360 aa, unidentified
MKLDAAFDTAAATTAICIVNSRDGTVVLETSAPTDPDDLYRVLEPYLPRLHRVGLEAGAWSPWLYRELVARGVPMVLLETRHAAAALKAQRNKTDKNDARGLAQLVRSGWFKTVHVKSEESHRVKLLLAHRRTLKRKLLDLENEVRHSMKAFGFMLGRRVQRGSFMQRVRNLVAADPLLAGVTECMLRAWLALWTEYKRLHTLLVQVAGRDELCRRYMAIPGVGPVTALTVKAGIDDPTRFRKSKTVGAHFGLTPKREQSGTSIDRDGHISRCGDGEVRTVLYEASSAMLTRSRKWSTLKAWGIRVGAKRGHKRAVVAVARKLAVIMHRMWRDGTEFRFSTADQPPFDPDTGEVTELSAA

SEQ ID NO: 166019 - protein, 412 aa, unidentified
MPDDQSLPNLSNLSWEVYVAFKIFRKNCCGLDVHKTWIYACMGITDTNGRTEYKQARFSSFTKGLQELADWLAKYDCNDVCMESTGKFWIPVFNILEKTCWVTLAYPKYTKPQKGNKTDHKDAKWICDLYMCDMVNPSFIPPPDIRQLRDLMRYRSKLTNIMTSEKNRALNCLTVSNLKLDDVFSDVFGKSSRSVIRYILEHPGETFQVAPFIDRRCKHPVEEIQAVIDGTISHQQAVKLRECLQHLDELEVHKTNVEKEILCLVQQYPYQLELLQTVPGFSGNIMTAIALISEIGADMSVFPSAKHLVSWAGCCPRNDQSSKKVKSTRISRAGVYLKPLLVQVAIQPFTANADKLSAAGALEIRCQICDGRFLSMWAALFIFLSCSLPSRPKNLHVHNGRIVILASVAWIF

SEQ ID NO: 166020 - protein, 388 aa, unidentified
MRLLAQARNPYSLSWLLVWTAPYGIALCQDEAVERSQTREPSVNQIIRIGMDTSKHIFQLHGVDAAEQPVLRKKLRRSEVLTFFAKLAPTVVGIEACGAAHYWARMLIGLGHQVKLMAPQLAKPYVKRNKNDGRDAEGLCEAMSRPTMRFVPVKTPEQQAALMLIGVRERLVARRTQLSNAIRGYAAEFGLTAAKGLDKIEPLLAEIAANEALPKLARELFAMHGKEYAHLQAELKKIEARLMAWHRANADSRRLAGIPSIGLIGATALVMKAPDPHLFPSGRHFAAWIGLTPKDHSTAGKLRLGKITRAGDEMLRSVLVAGATAVIQQAKLGRGRPSPWLLALLSRKSPKLAAVALANKTARIAWKLMVTGESYHAERMPMASANAA

SEQ ID NO: 166021 - protein, 441 aa, unidentified
MAMRKREEDEVFPNAAGIDVGGSSHWVAVPRQADDEPVREFGAMTDELNAMADWLLSCGVDTVALESTGVYWIPVYEVLERRGLVVWLVDARQMKYVPGRKSDVQDCQWLQKLMSLGLLRAAWRPGDEVCVVRAVVRQREVLLTEQADWVQRMQKALVQMNLQLTEVLTDVMGMTGQAIVRAIVAGERDPKVLARHRNGRVKASERDIERALTGNWREEHLFVLGQALAMVDSLAQRVLECDAKIEALLAPLGCHEVELSGPGKRRGKNTPQFDARTALARWAGVDLTRINGLAVTTVMTILSEIGPDLSRFANVKHFCSWLGLCPGTKVSGGKVLSARTRRSTNRVRQALKLAAMSLSRNDSALGAFYRRLCSRMDKPRANTAAAHKLARMVYFMLTRGEAFVDQGQQHYEQQQRQRSIDALRRRATALGFQITPAAQTS

SEQ ID NO: 166022 - protein, 337 aa, unidentified
MKRYLGVDLHRTQFTVCTRLENGRTYLRQWPMRELKLFAAQLRKDDEIAVEATGNTRLFHDAVERQVERVVVVNPSQFKVISQSVKKTDRNDAEMLALYLSKGLLPEVRMKDKQHRSMAHLAQTRDLLVKQRSALKAKINNLLSAEGINLKKEALSSNKALDRVLAMPLPPVLAAEARVLVAQIRSLTGSIAELEELIEEEGPKLAGHENLMSIKGIGPVSAAVLLSVIGDIRDFSDPGKLAAYLGLVPKIQNSNETEHSGHITKQGNKLARTALVQCALIAKRYSSYLQQFYQRIQRRRGGGKANIALARKFLGVIYHTLKNNWVFEDFPNFVLAS

SEQ ID NO: 166023 - protein, 459 aa, unidentified
MQNYYLGVDVSKGYSDFVLLDSAKRCIEENFQLDDTFDGHQTLYEVLSKFCTHYPKAQIYAAVESTGGYENNWFNALVKFQSSLPLNTARLNPCGVHNNSKAGLDRNITDKISADNVAKYMIEHPEKILYQQQDALASLRKQWSFIKMLTKQKTQLLNQLESNLYTANPEILVYCKSGVPAWILSLLSRYPTAVKLAKARKSSIALIPYVTPKKAKELVETAKKSVASATDQITEQIIKATVKQIKLILKSIETQTKIMADKCSVPEVKLLKTFNGISDFSAIGLILEIGSVERFASAKKLASFFGLHPVYKKSGDGVWGFHMSKKGRTVPRQILYMVAMNAIQTNPLIRDIYLKHTEKGMEKMAALGLCMHKILRIIYGMLKHNKPFSPEIDLKNRATSTQGKSKSRKEKNRRYQTLDANAPISRRQTQKRKERKQSQSDNNAKNGIIKKATVPSFST

SEQ ID NO: 166024 - protein, 414 aa, unidentified
MPLPRWVGRAIGLDVHRDFCVVAICEDGKVRSAGRVPTTPEDLRVLADSLQPSDRVALEVTGSCWEVARILRPHVNRVTVVSPDDTGITAARAKTDKLDARTLALLLWRGELDAVWMPDERCQILRRRLARREQLVRARSRSKNEIHAVLQRRLKGKPPCSDLFGVKGREWLAGLELPVEERESVDAGIRHVEFLDAEVAAAERLIAQQALAWPEIQRLMTVPGVNLVCAASFMAAIGDHTRFITSGKMVAYLGLDPKVKQSGEAPARSGRISKRGSASARWALVEAAWTAVLQPGPLHAFYERTKARRGHGKAIVATARKLTVLFWCMLTRDEDYAHQQPSLTKKKLRRLEITAGAPKYTPGAHGIWSANDAVRDAERALAEQAEASYKRMVQDQRAGGPARRVGASVSMEHA

SEQ ID NO: 166025 - protein, 345 aa, unidentified
MATYYIGADVHSNNTELAVEQRGKIVSRYSVPTTIPAISTVINSLQGKKIFAMEEGPMAGWLYRNLCESVDELVVCEPRRNKLITCDGDKDDKIDAVKLAVLLRGKFLKTVHHTNDNKRAYLKHWVNLYHDRVRDAVRYINKIRACCRMHGVATPRKVIHNNADLNDWLSSIDNSVLQTQLQMLWIGYEATREQVVIAREQLNSSARKYPTIKHWCRLPGIGLIRAATIFAYLDTPWRFKKKSKLRKYCGVGLERTTSGTDKKGRIKPARLRLPNTVNKRLKDAVLGAATSAINKYSHNGFKEYYERMLLNGVTPANARHSVARKMISVMSGMWKTDSKYDPKML

SEQ ID NO: 166026 - protein, 458 aa, unidentified
MKGKRASGTTHSRMVMVHPNAAAIDIGSTMHMAAVGADRTSEPVRSFGTFTGDLHRLADWFAECGVETVVMESTGVYWIPIFELLDERGVDVFLVNARDAKHVPGRKTDVSDAQWLQRLHSHGLLRASFRPKGEIAELRAYLRQRERLLDYAASHIQHMQKSLTEMNLQLQHVVSDITGATGMRIIRAIIGGERNPAVLALLRDTRCHASVDTIEKALTGHYRAEHLFALEQAVALYDEYQQKVSACDMRIEAVLKQLSSRRGRKEEAIRLPRRRTIRQSNGPAFDVRAALYALLGKDVTQIHGLGPYVALKLVAECGDDLAAWPSAKHFTSWLCLAPSNKISGGKVLSSRTRRSGSRAAALLRLAAVSVGRTETALGAFYRRLSARIGKAKAVTATARKIAVLFYNALRHGIDYVDPGASYYEIRYRERVIYNLHRRAKAFGYVLQAHTPAPEPAVS

SEQ ID NO: 166027 - protein, 409 aa, unidentified
MTGKPEVTVEIRWDEKAGLRTGCGVRSQVIDVLKAQIKRRPAKKKVSTAAAKATKNFSQPKLTIGLDLGDRSSWYCLLDEVGEVLQEQELGTTPKAMRGMFGVMPRCRIALETGTHSPWVSRILIELGHEVIVAHARNVRLIGESRKKDDRMDAQTLARLARIDPQLLCPVKHRSAQAQADLTVIRARAGLVRARTSLVNTARGLAKSYGERLRGCNVRNMNPEKAAGLSPELPRALQPLLAGIESLSERIRECNEGIENLAQKSYPQVALLKQIKGVGTLIALTFLLTLEDPHRFRKSRDVGCYLGLQPGRRNSGQSQPQLHISKEGDPYLRTLLVQGAQHILGPFGVDCDLRRWGLKLAERGGKSGKKRAIIATARKLAVLLHRLWVSGEVYEPLHNSNRVALPAAA

SEQ ID NO: 166028 - protein, 271 aa, unidentified
MKVTTVGIDLAKNVFQVHGVNEYGKAVLKKQLKRQQLIEFFANMPPSLIGMEACGSAHHWARKLQALGHTVRLMAPQFVKPYVKTNKNDAADAEAICEAVARPNMRFVAIKNAEQQAVLALHRVRQGFVKARTAQANQIRGLLAEFGLIVPQGIAHIARRVPELIEDATNELPGSFRLLVQRLLDQLKELDRQVSEIETQVVAWHRDNDISSKLARVPGIGPITASALVATVGDAKNFANGRQLAAWLGLVPKQNSSGGKNVLLGISDHAT

SEQ ID NO: 166029 - protein, 370 aa, unidentified
MQSRSFVGLDVHKATISISVAEEGRSGPVRYIGVIANTPEAVGKMAKQLAKHGELEFCYEASNCGYGIYRQLTGLGHGCTVAAPSLIPRKPGERIKTDRRDSEKLATLHRSGDLTAVWVPDSTHEALRDLVRARVDASMHLMRARQQLLAFLLRHGRTYSTGTYWTKRHRSWLATQTFLEEAHQAVFQDYLEAVWTAQRRRDALVERVAAMVASWSLRPLVEALRGLRGIDLISAATFIASTGDLSRFESPRKLMAYLGLIPSEHTSGETIRRGGITKTGNREARRMLIEAAWSYQYPARVARDKAEILIRLPKNVRDIAWKAQTRLCTRYRRLISRGKKPTVVVTAIARELAGFLWAIGHEVRITMAAG

SEQ ID NO: 166030 - protein, 314 aa, unidentified
MVNAGTAKQLLGWAAQWSERRFAIEGANGLGRRIAQILVAGGESVVDVPSTLAMKVRVLSTGGGRKSDPADAFAVAVTALRQEHLRPVAAENQSTILRLLAERREDLGHERARLLNRLHRLLRELIPGGVEPGLSAEKAAAAMRTIRPATATDAVRRELARELLADLRRIDAGIKNNEAQTRDALAASATTLQEIPGVGVVLAAKLLGHVGDITRFPSASHFASYTGTAPLAASSGQQNRHRLNTGGNRQLNSVLHTMAVCQSRDPGPGREYYLKKTAEGKTPREARRALKRRLSNVLYRRILHDHHQAQKLAA

SEQ ID NO: 166031 - protein, 335 aa, unidentified
MVCFYDTNSNEHSFQLASTDRRYLHKVLTTHACDLVVMEAYSASGWISDLCDELGLNKLVCSTHEEAWRWRSVKRKTDRDDALKLARLAAVDQLKPTHVPNREMREYRCIIKYRKQLVGQVNRLKNSIRAVFVGQGIPIGRGERTWFTGREQINSYRKTLEDCSMAELWKGQLDQLLTQLDHVTELLAVVERKSNTLAREDDRVQRVMKIPGVGRVTAGAIVTAIDDAKRFESGRQVSAYAGLVPRQYQSGETDRRGRITKRGSRLLRTLLVECAWCSLRYNQWSRTTYERIHAGKQVRRKKAAVAIARRILVIAWAMLKDHADYDQTKLLPEST

SEQ ID NO: 166032 - protein, 340 aa, unidentified
MGEVTTIGLDLAKHVFQVHGVDAEGSTVLRKQLRRAQVVAFFSRLPRCVVGMEACATAHYWARELRALGHEVRLMPAQYVKAYVKRNKNDAADAAAICEAVVRPTMRFVAVKTAEQQAAVLLHRGRERLVRQRTGLVNALRAHLAEFGIIAPQGLRNVGRLIAIVRDEDDARLPDLARQVLEVLAAQIEQLEAAVAAIEKQLMAWHKSNPVSQRLATIPGIGPIIATAIAATVTEPSGFRSGREFAAWLGLVPRQNSTGGKVRLGGISKRGNRYLRRLLINGASANLLRSKATNADPWVIGLRRRRPSLVVAVALANKTARIAWAVMQRKENYQRMAAAA

SEQ ID NO: 166033 - protein, 325 aa, unidentified
MPYLGIDLAKDSIDVTLLPQDDYGQFSNKGSGHKQLLKWLKKREPELREIHVVMEATNIYWEEVAQYLHQQGLVVSVVNPAAVKGFAISQLQRNKTDKVDSRVIALFGQQTQPRTWQPPLPHQRKLRALVRHKQALIKSRTQQRNRLVSCLDPDVKESLQGVITALEQQLADIQQKIETLIDDHDDLRNNHRLITSIKGLGSDTAHLILAEFYDLDQYANAKAVAADAGVTPAKYESGTSVRRKARMSRIGKAAVRGALFWPAQTAIRWNPIVADLADRLRQRGKPFGVILVAAMRKLLHLVFGVVKNNTPFDPDFEANRSSLAT

SEQ ID NO: 166034 - protein, 411 aa, unidentified
MYYVGIDIAKSFHVVSIIDETETMVIKKPFKVLNNLDGYHKFIDKLNDISTNSAEFIIGLEATGIYGENLWEFLSSKGYNVKLLNPFQTSRYREQITMKKVKNDNIDSRIIALLLKDGKFSSGYVTDDEYQSLRTLYRNRASIQSDMKEVKKRILTQVTVTFPELENFIDIFTISGLALLDKYPTAKHYERSSVDRILKIFRHIQGNNFNQTKALEVLNLSQVSVYSGKAKDARAIAIRSSIRLLKMYQSELSILENEINILLDKKSIQSSQDDTTEPNSLIDNLKTIPGVADKTIAAILSECGDIARFNNVTKFIGYLGLFPTENSSGNSTKTGHLSKRGSSLVKHALYMSSVSCLIHNSQLKQLYDTKRSQGKSKQEAIVTVSRKLATIIYAIFRYNTPYNPARVFAKS

SEQ ID NO: 166035 - protein, 339 aa, unidentified
MSKPKQPMQDTVFCGIDVSAASLAVAVQQEDKRFEERVFDNSASGHKALIAWLHKRKARARVSLEATGIYSLDLALALDGADGIEVAVLNPKLIHRFAQTLRRSKTDSADAQVLAEYSARMPFAPWCAPGLSGLQLRSISRHIQGLTVEHARANNRLHAAEKSTSTPRCVVNDLKRSMASLKLRIARLRGEALELVRSDEAMQERFALLIDIPGIAAISALQLLGELAPLSPEMSVRQWVAHSGLDPAHQVSGTSVHKPSRISRAGNRHLRRALYMPALVAVRRDPHLKAFYEALLSRHKAKLQALIAVARKLLHAIYGIFKSRTPYDGSKLFPRLETA

SEQ ID NO: 166036 - protein, 426 aa, unidentified
MKKQEVPIVAWIGLDWADQEHYICLQAEGCERVQSRVLKHEPEAIQQWVQQLRRLFPQGRVALALEQSRGPLIYALMHYEFLILYPVPPKMLAKYREAFRSSGAKDDPSDAALLLEILRYHRSRLRPWKPDDEQTRFLQRLVEYRRKTVDQRTALTNELTSLLKEYFPQVLHWAGSLKKRRALDFLTRWPTLQVLQRTPPEQIREFYRTHRCRGQAVLKERLQEIRQALPLTQDRVVLEASQIRVRILVQQLECLRLALEELEEKIAQCFQQHPDRCLYESLPGAGEALAPRLLVAFGSDRSRYPSAQELQQFSGIAPVTTRSGRSCWVHWRLACPKFLRQSFHEFATHSIARSLWARAYYQLQRERGNGHHAAVRALAYKWIRILFRCWQSRQPYDENIYLRALQRRQSPLWARIVQPSSMRVVA

SEQ ID NO: 166037 - protein, 402 aa, unidentified
MLHDHLKHPTAIRVQFGAIFVSLELSRKTWLITSLSPGKGEKMSKHSVTAGDIAGLVVRFAELRRKAEMRTGKTFPIVVIQEAGLDGFWVHRVLQQEGIESHVVDPASIAIPRRRRRAKTDKIDGEALLRALLAYKRGEPRVCSMVVAPSPEDEDRRRLCRERDTLTAERVRHVNRIKGLLFAQGIADYAPLLRNRRKRLDELCTGDGRPLPQYVKAQISRELDRLELVLEQIKVVEKERDRVLLSPAPVVLNTGPEAACDQPRGASGVRMLTALRGFAADGATKLWSEGLSRHFSNRRQIAAYAGLAPTPWQSGGIAHEQGMSKAGNPRLRTTMVQIAWLWLRHQPQSALARWYFASVGVGATKARKKVAITALARKLLVALWKYVTAGELIEGAIMKPVA

SEQ ID NO: 166038 - protein, 337 aa, unidentified
MSIVFVGIDLAKTVFAVHGVDEKGKAVLVKPKVQREKLAELIATLPVCTIAMEACSGAHYWARLFAKHGHTVKLIAPKFVVPYRLSGKKGKNDAADAAAICEAVQRPDMRFVPVKTEEQQSILCLHRVRQGFVEQRTAIINRMRGLLSEFGHVMNQKAQVARETAASLIEKLPGYAKISVQNLLDEMRHLDEKVQDYDKMISCVAKENSKSKNLMRIKGVGEVIASLIVALVGSGHDFKSARQFSAWIGLTPSQYSSGGKNRLGKITKAGDSYLRSMLILGARSVLNNAQGKSDPLSLWAISLQQRRGYWRAVVAIASKNARMAWAALKKDDQFVPA

SEQ ID NO: 166039 - protein, 341 aa, unidentified
MDITTIGLDLAKSVSHVVCCNQAGKIVRKKMLRRTQILHFFSELPPCLVGVESCASAHYWAREIAKYGHQVKQIAPQHVKAYVRGNKTDFNDALAIAEAVVRPEMRFVRTKTQTQQDIQALHVMRKKCERDRTANSNEIRGLLNEYGIILPVGISHVYKSLPELFDRQVENGLSELFKELLERHYQKLVELDEHLNWYTKKIKQLSQHEACRRLQSIPGVGPIIASALYQHIGNGSEFKNGRAVSASLGLVPKQHSSGGKHNLQGISKRGDSYLRTLLIHGARAVMRVSKHKETPLSQWIKRIEQTRGRNKAAVALANKLARIAWALLAQGGDYQPELTTA

SEQ ID NO: 166040 - protein, 311 aa, unidentified
MNYNTVYVGMDVHKESFTLCSCKYEDEKASHYQRTQASYKNVLRYLEFLRTIYGDDTRFVCGYEAGCLGYSLYRQLESFNVECVILAPTTMLEQRSKRRIKTDKRDAEIIARSLAQHNYSPVHIPTETDNQTKEFIRMRDDHKAELKKIKQQILSFCLRQGYQYDGSGNWTEKHVKWLRSLKPVGLYKEILDEYLLTYTTLTDKLNRLDHRIEELASKEEYKESVSKLTCFLGIRTHTALSVIVEVGDFQRFASARKFAGYLGLVPGQHSSGDDRNGLGITKAGNTHVRRLLTESAPVYYTHLTLPTKLEV

SEQ ID NO: 166041 - protein, 337 aa, unidentified
MKRYLGVDLHRTQFTVCTRLENGRTYLRQWPVRELRLFAAQLRKDDELAVEATGNTRLFHDAVAGKVARVVVVNPSQFKVISQSIKKTDRNDAETLALYLSKDMLPEVRMKERNQREMGHLAQTRDLLVKQRSALKAKINNLLSAEGINLKKEALSSNKALDRVLALPLSPILAAEARVLVAQIRSLTASVAELEQLIEKEGPKLPGHENLASIKGIGPVSATVILSAIGKVEDFDDAGKLAAYLGLVPRVQNSNETERSGHITKQGNKLARTALVQCALIAKRYRSYLQNFYQRIQRRRGGGKANIALARKFLGVIYHTLKNNWVFTDFPNFVLAS

SEQ ID NO: 166042 - protein, 327 aa, unidentified
MRQHKSLTEKAKTTVAFDVCKAVLDVHIRVDGKAFQVPNTDEGFDQIAVMLADYDVSLILMESTGGYEDVAACCFQSLGYDVAVINPRHARNFAIAMGQLAKTDRLDAAILADFAAVIDTRPDRARFIKPPTDEERKFLSQMVARRRQVVDLLATEKQRLSHADDYAKQSIDKMIISIESQLKEINEDISVYVKKNYADLSKMLSKVPGIGELSVGLLIGDVPELGNIGNRQLSAVIGVAPFNHDSGKRRGKRCISGGRQNVRNVLYMGIMSATRYNPVIKAFFDRLIAKGKSKKLAYIACVHKLLRIINAMVRDGTSFNPELHTVI

SEQ ID NO: 166043 - protein, 370 aa, unidentified
MEKRSMFVGLDVHKESVDISVADEGRHGEVRHYGVIAGDVGALAKVVRTLRAPDRRLRFVYEAGPCGFGIHRYLTAHGEECVVVNPSSMPKRSGDRIKTDRRDGEAFARLHRAGELTAIYVPTPDDEALRDLVRAREDAVGLSTQAKHRLKAFLLRQGRRYPGRAGWTRPYRRWLAELSFPMAPQHIALQEYRDTIDESERRLARVTDQLRQLTPSWRWAPVVDALQALRGVSFVTAVGLVAELGDIRRFDHPRHLMAYLGLVPSEYSSGPSVRRGGITKAGNPHARRLLAEAAWAYQGMPRVGRQMLSRQEALPTAVCAIAWKAQLRLTARFRRLVARGKPKPKVATAIARELTGFVWAIAREVPAPPA

SEQ ID NO: 166044 - protein, 415 aa, unidentified
MHTFEELTHFAGFDWAKEHHDAVVLDRNGTTVAGFTFAHTGEGWAQWREKIKAFPALGVAIETSHGAAVEQLLASGVTVYPMQPKAAQRYRDRHVPSGSKTDQMDAWCFADALRVDGQGWRALGPADPLVEELRLLCRDEVELITQRTGLINQLQAALHEYYPAALEAFDDWTAPSSWALIEQFPTAQDLVKAGRRRWEKFLHVHKLWRPQTTDKRLEIFARADQFCGGPAVTRAKSRLATSLVKLLRTLQSQLDAYRAEIEKLFAQHPDHDLFGSLPGAGDKLAPRLLSEIGSDRGQYPEAQALQCVVGTAPVSFESGQIRKAKIRRHCNRHLRHAVHLWSDCSRKFCAWAATYYRAQRDKGKSHACALRCLGQRWLKILWKMWQSGRPYDETLHALNQQRHGSWVLQLQPKKT

SEQ ID NO: 166045 - protein, 460 aa, unidentified
MKRNKMKQAQRIRAHLKQVNLFAAGIDIGSRSHFVAVPEELDEQPVREFAGFTGDLHRLADWLVEMGIQTVAMESTGVYWIPVYEILEARGLEVLLVDARHVKNVPGRKTDVLDCQWIQQLHTYGLLRGAFRPPEEMVALRSYLRQREGLIASASDCIRHMQKALRQMNLLLENVVSDITGVTGLAIIRAILAGERDSKQLARLRDKRCRSDERTIAGSLEGHYREEHLFALQQAVACYDFYQQQIKVCEGAIERHMREIEDDNDNDQDVPPASKPKGHNKNGFDFDVRSQLYRLTGVDLTEINGMSESNVLTIVSETGLDMNAWPSEKHFASWLGLSPGNKITGGKQLSGKTRPSPNRAAAAFRLAAYSLANSKTALGAFYRRLRNRLGAPKAITATAHKLARLFYRLLKNRTPFIDPGQDYYDQQYQERATRNLKKRAAALGYKLIPESTGGLHESMC

SEQ ID NO: 166046 - protein, 346 aa, unidentified
MLYVGLDLSRQRLDVHVLDEEGRTVEVLAVHPDADALRTLAGRVLRHGQEVSAVIESMTGSRFVHDTLERLGWEVAIADPVKAKGLAPLAAKTDKIDARVLAELARRDLVPEIWLPTPGVRAERERARFRLHLVHHRSALKCRIHATLMTFGHTVPVTDLFGNSGRELLAGFELPEPWATTMATSLAMLDELDERIDECGRELARLGADHPYIPLLLTVPGVGPLLAYTIASEIGDIARFASPKKLTGYTGLCPIVRQSGNRDVRGPLAKNGPKYLRWALVEAATHAARDVHYRDRYERNKKRLGRQRGAKVARIDIARLLAEAIWHVLTKKEPFAPAGPAMQLVA

SEQ ID NO: 166047 - protein, 451 aa, unidentified
MSKQRNKAVSLPVIEPNAAGIDVGATEIFVAVPADRDPEPIRCFPTFTVDLERLADWLQQYHIRTVAMESTGVYWIPLFQILEKRKIDVRLVNAHHVKNVPGTKTDVSDCQWIQHLHSVGLLRGSFRPDDEICAIRSLWRHRDNLIQLATLHLQHMQKALDQMNLQIHHVISDLDGTTGLAIMDAILAGERDPHKLAQLRHPRIRASEETIMKSLVGDYREEHLFTLRQSLKAYRYYQELIQEVDAQVKQMMQRLPSKVAEGEEPSQGSKRRARKTPWRNEPPQLREDLYRAFGVDLTEVPAINSLTAQMLLTEIGPNLDRFPTAAAFCSWLRLCPDPKISGGQVLSSRTRPTKNRAALALRVATQALYHSDSFLGDYFRRMKARMGTPKAMTATAHKLARIIYHMVTTQQQYDSTIFQKQEERRRHQKSAKLHAQARELGFQLVPINCVP

SEQ ID NO: 166048 - protein, 340 aa, unidentified
MVHVGVDLDKRSSQIAVLSEDGEIVQHRLANDAARLEKFFADLPPHTPIAIEASGTWWWLVDLLEELGHQPVLSNPKQTKAIAAARLKNDRVDAERLALLLRGDLLPRVWIPPTTLREARELIRHRIQLVWLRGVIRNRLQAMLARRNLQPTSGKSWLTQRGQRELQRLPLGETPSRIREDCGALLPTLDAQIRRLDADLVTRWGADPRVRRLTTIPGIGPFIAIVLVLELGDIERFASAKRVASYVGLTPRVRGSAGRVRAGHITKEGNRLLRWVLVLAATQAIRRPGPLRAWFHAVKKRRGKKVARVALARRLAEIVFHVWKQECDYFTVVRHGVVRG

SEQ ID NO: 166049 - protein, 338 aa, unidentified
MGRYIGVDLHRNCFTACVRWDNGRSQLGKWKLSDLNKFVFTLRSTDEVAVEATGNTRFFYDAVWSRVRRVVVVNPHQFKVISESVNKTDDNDARNLALFLSKGFLPEVRMKGKQHAGVASLVQTRDKLVKLRTSLKNKINNLVSARGVNLKKESLSSEKGLQEVLKFKFDVLVDLELRVLVDQIRGLNRSIEELEEAIKEAGQELPGHRNLKSIKGIGSLGAAILLSVIGDVEDFADEGKLASYFGIVPRVANSNESFRSGRITKRGNKLARTTLVQCALIAKRYSHYLSNYYERIKARRSSGKAIIALARKFLSVIYHTLKNHWVWDDFPNGVLAQG

SEQ ID NO: 166050 - protein, 319 aa, unidentified
MHCIGVDVSKQELVTFDGERERIFPNTRGLAEFGRFLKRSANALVVFEPTSTYSRRLETLCRTDRISCCSLNPRVVPHLRQVGRGRSKTDSSDAELLYRYGIERGHSEAVQLEYDSLAESILARLACYKVAQKARVAYQGVVEALSQDPATPQALLAELEAEIAELKGKEREHLVAAQEIVEEDEQAAQRLSALLSMPGVGPITGLTLLALFRKYPDSNRSQIVALAGFDPIQFQSGTSVHGKSRISKRGNRDVRKRLFEATLSAARYNPSIRSIYRRLKEQGKPDKVARIAAARKLLLIAHAIYKSGESYRDPDAKEG

SEQ ID NO: 166051 - protein, 370 aa, unidentified
MKQYDEAFIGIDTAKNKHAVAIADAGREGEIRYLGEIDSAPATVGRIIRKLAGRYKRLHFCYEAGPTGYGLYRQVRALGHDCIVVAPSLVPKRPGERVKTNRRDAVTLARLLRAGDLTAVWVPDAVHEAVRDLVRARAAASQDLRRKRQQLLSFLLRHGRIYNGRKHWTRAHLRWLAQQQFAHPTQQIVFQDAVDTIEDAATRLRRLDEQVAAIVPSWSMAPVVEAYQAMRGVSFLVAVTFVAEIGDLQRFDNPRQLMAFLGLVPSERSTGERVRRAGLTLAGNKRARRVLVEGAWSYRHQARVSQTLQARLEGLPKAVREIAWKAQTRLCARYRRLTAAGKKRPVVIAAIAREMAAFLWAIAHHVPPAA

SEQ ID NO: 166052 - protein, 335 aa, unidentified
MKKIHVGIDISKEKCNLCYRSGLEIVCEEECANDVKTLKKAFKAALKALDASMEEVLVCAEYTGRYIYPLTVACQELDVFLWMDDPTRIKNSMGLTRGKNDVIDAARIAEYAYRYSDKAVRYCIPDAALVSMKNLLSDREFLLIDRKRYQSQLSDQKKYMAPCDFKHKNSRWKKVIKSIDEQIAAIDAEIESFIAANPVLARQKELLVSIDGIGDRIAINMIAITGGFTRFQNARQFCSFAGLTPYKYESGTSVRSKAKISKRANQTMKALLHMSAVNVATHMKAGEYKDYYERKLKEGKHIMCILNVLRAKLVHRMFSVIKRDTEYTKEYKPAC

SEQ ID NO: 166053 - protein, 358 aa, unidentified
MRIIGVDLHTRQQTIAMWDTETKELIERTLTHDGDEVRKFYSALPGQVLVGIEATGSMHWFLELLEKLGIDHQVGHPSEIRKAETRKQKHDRRDAALLLKLQIENRFPAIWMPSTELRDLRTLLMHRHQWVRMRTRVKNTLQAMAIGRGLRRGKALWSHTGQHAIASLPLPPHAAYRRTELQDLYQKLHAQIDELDQRVGDQALQRPGAKLLMSHPGVGPVTALATDVFLGDPARFADGKAVVSYVGMIPSEYSSGGRQRLGGLSKQGNPFLRFLWCEAAVHAVRRDPELQRFYRRKLAQKGLGKARVAAARKLGIRLWLMLRGQIDYQEFCRRGQMRQKNGGACAGMPEVGHSPAKQ

SEQ ID NO: 166054 - protein, 355 aa, unidentified
MEIKTLTVDLGKNFQHVCAFDSAEKLLFKKVCKPKSFHDLLSKTNQCTVVMEACGGAHHWARTAKNYGHHAKLIAPKFVKRFVDEGKKNDFEDALAIFEASSRPRARFVAVKSQLQQEIAFLHRSRSRLIEDRTQLVNQIHSYVCELGYKAPKARMALRKYVYELCDLSNSDLSCIIKTELQLMLEELSQKDARVKDLDKTLLQIASSNPIAVKLMKVPGIGPITASALLCEVGDFNIFDSGREFAAWLGLVPRQNSTGGKTKLGSITKTGNRYLRRLLIHGARSLYALTKTKEDVQSKSLQWMKSLCGRAHTNIAVVAMANKLARIVWEIIVHDREYDPSFISNPPVYSSKRMH

SEQ ID NO: 166055 - protein, 357 aa, unidentified
MPAYTKSAKRVSQIAVIGIDIGKNVFHLIGLDKRGAIVLKRKFSRGQLECFLANLPPCLTGMEACVGAHHLSRKLIALGHDARLMPAKYVKPFLKGHKNDYRDAEAIAEAVQRPTMRFVATKTVEQLDLQALHRVRARLVSERTAGMNEIRAFLLDRGIAVAKGIHHLRKALPDILARHADFLLPRMIQIIEALVADWRRLDDRIAEISNEIGELAQKDAPCKRLMTIPGIGPLISSATVATIGGGDMFSKGRDFGAWLGMVPKQLSTGGRTILGKISKRGNSYLRRLFVQAARVVLIKRTFWERYGLKPWIEAAARRLHPNKLAIALANKLARIAWAVLRHGRDFEVRHADEPQHA

SEQ ID NO: 166056 - protein, 453 aa, unidentified
MSRGATSGTKAKKHSRLFDQINHNAGGIDAGAEFHFVSVPEEKAKPSVRKFSTLTRGLYELADWLVESGVDTVAVEATGVYCVPLLEVLDARGIKVLLAKPSSLKSVNDRRKTDMLDCQWIQMLHTFGLLRASFRPTEQVATFRSYSRQRRMLIEQASTSIEHMKKALTQMNVRVDQAVSDVTGKTGMRIIRAILKGERDPQELAKFRDERCAKSSEAIAEALLGKYSDAHLFALDQAVRTWDHYQELIAECNQRIEQQAEVFEKKASRQDIPKPRRIEHVRKNVLTFDARELFFELLGQDLTQIDGISTGTIATFIAEAGTSVDSFATDKNFTAWLRLCPGSNTSGGKNKSGKNRSTTNRLATALRVAAQTLERSRSALGAFYRRKKAHLGPEKAITAAAHKLARMIYYTLKEQRPYVDPGSNYYDQKHREKVLRQMEKRAKQLGYQLVKAA

SEQ ID NO: 166057 - protein, 422 aa, unidentified
MPNVQSTQSPVVLVAIDIAKLRHDVLIEAPGWKRRKRLVLLNTAVEFRRLADYLHSFQMPVHIVFEATGNYHRPLAHFLLSQGFHLELIPSLAVARTREAMHNSWDKNDPKDAQVLLHLLRTGVTQRYHDPLVNHTHDFQELSLTYAQVSMEKTRMQHRLLTHYLPLYFPEIERHYHASRSLWLLDFLQAFPTPATITSLDREQFIAKAWPIIGRKVAKRRLLEDIFHRAQCSIGLPVGEESEAIAMFRVLLKEMSRLCKLRQELEQRAESYLGDNDDFRRLKQIPGIGPILALTILAEAGDLRRFGHHRQFLKFCGLDLATQQSGQFRGATKLSKYGNARLRCALWMAATIAVKQRENSFREKFERYIRKDPLSADRKRMAYVAVAGKMARVVYGIIKSGTEYRCFHEVAAPSGRAVSVGP

SEQ ID NO: 166058 - protein, 412 aa, unidentified
MLFIGDDWAEGHHDVVVHGDMGKTLARRRLPEGVDGLARFHELVAFCWGEDSEPDPARVVVVIETDRGAWVKALAAAGYRVYPVNPKQAARHKETIAVSGKKDDFFDAGALADMGRTRRHQIRELAADSDIAEAVKIAARAHQKLIWERTRQLLRTRSALREYFPAALDAYAALTLTGPDALELLGRAPDPASAAKLTVTQITAALKRAGRRGDLAQRARDIQAALRTPHLAQPAVIAEAYAASVQAGAAVITTLNAQVKVMETKVSELFRRHPDAGIYLSQPGIGDITGARILGEFGDAPGRYASAKARKNYAGTSPLTIASGKKRTVLARYIRNRHLIDALHAQALSALTASPGARAYYDELRARNTGHDDAMRRVAGRLTGILHGCVKTGREYDEAAAWSHRASPPQAA

SEQ ID NO: 166059 - protein, 310 aa, unidentified
MAQHVGVDISKEWLDVAILESGEAFRVGNDRAGRAELVKRLKRREVEAIGIEASGGYERGVIKALLKAGLPVRRINPYRLRRFAEACGIRAKNDRIDAALIARFTATMPARPVEIDPVVEHLAELVGARHQLVEELTRVRNQAEHARDGEIRRLRRRQARQLEAEILRLEQRIAQTVAADPRLAAKDRLLQSVKGVGPVFSHTLLALMPELGRLGRHQAASLLGVAPFDHDSGKLKGQRAIWGGRQSVRDVAYMAALVAARHNPVLRAFHQRLTAKGKKAKVVAVAVMRKLITILNAIVRDGKPWQTATA

SEQ ID NO: 166060 - protein, 367 aa, unidentified
MIQSDYTIGCDAHKHFSLFTVLDGKGNLVQRTRVGHVPDAIGVFLSQFPKGTPVALETVGNWYWIVDEIEAAGCIPLLAHAAKAKVMMGNIHKTDKLDAQGLATLLYLGKLPSVWIPPAEVRDERELPRTRMTFVQHRTRVKNRIRSTLAKYALSLDTASDIFVPKWRPELKITLQRLPEETGRCVLQQLQILDALSEHIRRLEDRIIERIQATPTIQLIQTVPGPAKVLAILIDREVGSIDRFQAAKHFTSYCGLVPKLSASAGRAHYGRMVKQCNTYLKWAFIEAANVIVRHRHHPNWRKKYVVHLYERTRRRKGHSVAVGATARYLAESTFWVLNKSEPYREPPHWAPEGKKSPVSLSQGQVRA

SEQ ID NO: 166061 - protein, 399 aa, unidentified
MNITHSIGLDVHKSSASYQLLDKTAHRVARGLLKPSTVAVKQLLEKLQADPATVLVVAEATGMLHLDFCEAFEASGCQVVAINPLYGRNRSAHNAIRDNKTDQLDAESLAELGLSDHEELLKRFAFHCPVERFALQRYVSSSKILRKSLTNIIKHTATTVHTLFPELDELGLSVNQVRVCRLLRQHPSPVRIAALDLAELRTYVGDKAATLKQAAAESFAIQAMGTTCEEGLLAMLLDTMEHLKEQLKEMNRKIDQLLVPCAGTETIRLVRTIPGFGAKTTPAILAFIPPEHLQWGSKKTITRKLQALFGADPRVKQSGRWKGTTKISKRGIEIARTALFQAAFCGMMHDPQLRCYYDSLKARGKHHKEAIIDLMRKQLHRLVAVLVDQKSFTPITQHL

SEQ ID NO: 166062 - protein, 356 aa, unidentified
MQTQVTKKIDFSGKDLFIGLDVHKKSWSVTILVEGMEHRTFTQPPDPRALYNYLQRMFPGGNYYSAYEAGFCGYRIHRELNDLGIKNIVINAADIPTSQKDKLQKRDPIDSRKIARALEKGMLRAIHIFDRDMEELRSLNRTRFYLMRDLRRSKNRIKSFLQYYGESIPPEFDNNQWTLKFLSWLKQVKMQTMSGQDAFSNLIRSYEYHREQLLTLSRQIRQRIREYDNELYTLLKSISGIGPLTSSALITELGDINRFPHIDHLSSFVGLIPRVRESGETIHTGGITFRCNSFLRTMLIEASWQAIRMDPALMQYYHHHLINNKGHKVIIKVARKLLNRIRYVMKNRMPYVTGVA

SEQ ID NO: 166063 - protein, 348 aa, unidentified
MNYIGIDLHKKFSQVTVLGEGGEIKERVKIDNREEVLNRHFNNFDEPSKAVIEATFSWGWLADYLQSRKIEVVLAHPQKVKAIASSQIKTDKVDSLILARLLRADMIPTAYFCPKPLREVKEVLRSRASLVGLKTQVKNKIHSLLHKYNIREDEKFSDLFGKRGKEFLNSLELGEYTTPVLKRYIETLSFLEEEVKKTSVDLKQVFEKDEVAQFLERLPGIGFYTALILSKEIGNIDRFFSAKHLCSYAGLVPSTYQSGEHTRHGKIKQGNKYIRWVLIEAVPKTIGKDKVLNAFYQKIKAKKGHNKAKVATARKMLGQIWYLLKTKQSFVDPETGSPVFFSGAFPHH

SEQ ID NO: 166064 - protein, 400 aa, unidentified
MSVAVGIDIGAYKHAVAVCRSGEREADRRTMQISANRAGFRQLASWMETIAEPVSLVVMESSGHYWYNLASHLHRAGIPVAVVNPLESKYFGKRRLQRSKSDKADARTLAALGMHDQPRVQTPLAQSELREAARFTMRLVREQAEVCQRIQRLIDLGFPELREAWDDPTCVSALAVLRRAPTARAVARLRVDTLAALKRPGDGGRAIGRGKAEQLQTLAKESVAAPELEAQVAFEMRLLIQQYDFLERQLTEAEVQLASLLDGDTARRLLTIPGVGPATVATLLAEIGDIWRFTDVDQLLAYAGVHPKEQSSGKKGERPETSWTMAKTGNAYLRAAAYRMAVVGIKHNPVIRSHYARKRAAGKSSMNAVGHCMSKALSLVWGVWRSGQDFDPRHGEPRSA

SEQ ID NO: 166065 - protein, 343 aa, unidentified
MEVMIGVDPHKGSHTATMLDRTERELTRIKVRAGRRQVEQLLEWANGHEERTWAVECAGGMGYLLSQQLVAAGETVLDVPATLASRVPVLGTGQSTKTDPNDARSVAVAALHAPSLTMVRAADHVTVCRLLAKRHTDAARWRTKLCCRLHALVGELVAGGIDKEVVVNQARSLLDDIEPDGVAAVERHRQAVELVAEIEHLDVVLQDSRTRITAAVAASGTTLTEVFGVGPIVACMLIGYSGDPTRFTTASRYAAYTGTAPIEFSSGGRVTHRLSRRGNRRLNHALHCAAITQIRHRHSPGRGYYDRKLAEGHTPREAIRSLKRRLSDVVWRHLVADARRVAS

SEQ ID NO: 166066 - protein, 421 aa, unidentified
MKNSAAKKFRQVPAGYLVVGVDPHKKRHAAVAITQDFAVHGKFKFNNSREGLEYLLQRVKAEMVKSDCRGIMFAIETGGHYWRNLAYFLDEVGIPFRFINQFTLKRRREGKDLNRRKNDYRDSEVAAQLLCTGEFTETRLQQGVYAELRAAYNAYRRLVKERTRITNLIKGLLDGLFPEFTQVFKDPCGLTALSVLSTCPIPGVIAGMTEEQFTSTIKASHQGRLMRKKLCALRYAAETSIGIKAGAQPVSAELSFLVEKLQLIKRHIRSIDGTLVKLVDRTEEGKYLLSIIGVNYISVAGLLAELGSFRSYRNAKQLIKMAGTNPTESESGGKRGSHTPMSRQGRPALRYCAWTAVIPMLRFNPDFRAWAKELRERPVHKNPLAKREVVGAALNRLLRLAFTLVKKQTFYQTPHPVQVTS

SEQ ID NO: 166067 - protein, 433 aa, unidentified
MSKFFNSPTVGIDVSADFSFVAILAPNGDVFKKPFRIKHDISGFTHLLKEIKKVEEEFNMKTAIFMESTGVYHLSLFHFLNKNFDNTFVINPLVTKCNKNVDIRKVKNDKKDALSIAQIGKFQNIKLSQSVSMDIFQLKSLVREYYKLTDNCSTYKKKLSTDLRVIFPGYKNVFSNVTSNSSIAILNEFPTPQAILSAPKDLIINILMEKSKKGLIWSEKVYSNLINYANEANIIGLPLHGFSIKITSTINIIKALESEVKNLLEQIESLINSPNFSEQIRKNIEFIDSIPGIGRLTAVTLISEIGDINGFLRPKHLVAFFGIDSSVNESGKFKGNQNKISKRGTRIGRRALYAAALACIRTNRNGVPINKVLLDYYQINLNGKKPKVALVAIMHKIINYIFAVLRNQTPFEVRDPRIHKQMYLENKNTNTAA

SEQ ID NO: 166068 - protein, 338 aa, unidentified
MAIVTVGIDLAKNVFALHGVDEAGAPRLKQPKVARGKLNAVVAALPPCVIGVEACSGAHHWARQFQAHGHTVRLMAPKLVTPYRMTGKRGKNDAADAAAICEAVQRANMRFVPVKSEEQQSRLMVHRARQGFVAARTACINRIRGLLSEFGIVLPQKAEVVRRKARNHLEELPGYANTVIGDLLSEVSHLDERIKQYDTHIRAMARDCTAAQQLMQLMGVGEITATALVAMVGNAREFHSGRQLAAWLGLVPGQYSSGGKARLGSITKAGDAYLRSLLVLGARAVLNAAKSKTDSLSRWALAVAERRGYWKAVVAIAAKNARMAWAVLTKGEAFKLPA

SEQ ID NO: 166069 - protein, 315 aa, unidentified
MEQSPIAPRFVGIDVSKDRLDVHVCPTGHAFAVMRDGRGLEQLVNDLRRLAPTLIMLEATGGFEITVAAALANAGLPLAVVNPRQIRDFARATGRLAKTDALDAQIIALFAERIRPEPRPLADADSQSLAELIARRRQVVEMLGMETNRLHQARNPRVQRMLKATLKTLKAQLAELDRDIDDTIKRSPIWRAADDLLTSVPGVGDVTAHTLIADLPELGQLDRRRVAALVGVAPINRDSGQMRGRRTIAGGRIEVRNALYMATLSAIRWNPVISKHYQSLVERGRPKKVALVACMRRLLGILNAIIRTNTPWRCA

SEQ ID NO: 166070 - protein, 401 aa, unidentified
MISVGVDVSKGKSTVCILKPYGEIVCSPFEIQHVEKDLEDLDSLLKKLTGEIRVVMEATGIFHLPVLTFLQEKGYFVSVINPFAMKKYVKDNSIRGAKTDKLDSIMIANYGIDKWFKLQKHEGDEETYAELKLLGRRYRYYMELHVKALQELTHILDYTMPGIKKLFNSWDEASGKDKLSDFVERFWHFDIITAQSLDEFVEEYLMWAGEKKYHRSRSKAETVYELASGGIPTLSSSTPSTKMLVQEAVTVLRAVDNSLSHILSRMQELAKSLPEYSTVRAMGGVGDVLAPKLIAEIGDVRRLHSAKALIAWAGIDPPPYESGQFVGSKRRITKRGSSTLRKVGYEVMRVLKSHKAPKDDTVYNYILKKESEGKSKKHAKIAGLNKFLRIYYARVMEVYQQ

SEQ ID NO: 166071 - protein, 383 aa, unidentified
MDQTQGNLDRAGNAQAPVLYVAFELANSTWRIACSDGTKVRHVKVTAGDLAQVQGAILGAKRHFIMGDEVQTVSCYEAGRDGFWLHRYLHSIGIDNVVVDSASLEVNRRLRRTKTDRIDAGKLLSMLVRYHGGEKCLWRVVRVPSREDEDARHLHRELEALKRERTRYRNRIHGILIQQGLRVRNPSTKKFVQALELMRTWDGRELPPEMKVRLVRVHERLRMVEEQISSLVREKTHRLQEENARMAQVAQLLRLPGIGPVSSWTFVMEFFGWRRFRNRREVAALAGLTPTPYDSGKRLREQGISKAGNRRVRTLAIEIAWAWLRFQPQSKLSRWFLERFAGGGSRMRRIGIVALARRLLIDLWRFLDCGVVPEGAQVRPLAI

SEQ ID NO: 166072 - protein, 415 aa, unidentified
MKVVFPTCCGVDVHKTFLVATIITTPADSLQPHYQKKRFSTLNSDLNRFADWLLEHNCLDVCMESTGKYWVPVFNILEKRGIRVVIANPKWVKAVKGNKDDTKDSKWIGDLFRIGLVKSSFIPDLNIRILREFTRYRYKLVSMKSSEKNRFQNAFTVCNVALDSVVSDMFGKSATAITDYLTSDESFDAEHCVSLLQRSLKKKAEQVLESIEGFSIADEQKARIKIIREHHDFIEEMIATVDTRVNEMVAKYEGNINLLCTIPGIDRRSAITIISEIGTDMGQFGSSKRLCCWAGLTPGNNESAGKKKSVRISRAGVYLKPALVQVAHAAVKDNDHPYYKLKYERIAKRRGKKRAIIAIARMILTAVYSMFCTGEVWNPVDLYKVDMPGCLKEQQLAKAIKQATRFLEKQGLSVA

SEQ ID NO: 166073 - protein, 341 aa, unidentified
MGQASTIGLDIAKRVFQAHGADERGRVVFRKRITRTALLRFFAAQPPCTVAMEACAGAHYWARELGKLGHTVRLIPPAYVKPYVKRQKNDMADAEAICEAAQRPSMRFVPVKSEAQQANGVVFRARDLLVRQRTQCINALRGHLSEYGYVFPQGITQADTLISCVEEPDTSLPENARAVLTVLVGTYTALEAQVRALDAEIAKRAKADPVARRLMTVPGIGPIAAAAITALVPAPEGFRTGRDFAAWLGLTPLQKSSGGKQKLGAVSKRGERTIRRLLILGASAVVRWASQRGGPEGSWLARMLARKPKMLVTVALANKTARIAWALLVKGGVYRAPVAAA

SEQ ID NO: 166074 - protein, 353 aa, unidentified
MTTMTDSATRVTAGVDTHRDVHLVAALDERGGRLGVEAFTADAAGYRKSLRWLRSFGTVERVGVEGTGTYGAGLTRYLATQGVSVIEVTCPNRQRRRSHGKSDPVDALSAARAAQGGEATAEPKARSGNVEAIRALRVARRSATKARNDALNQMRALLVTGPEELRAAYRGTSVFRMVTAAVRLRPPDPTTPIGATKFALRDLARRVQALEAELDSLDAILVPLITVTAPELIARHGVGPDTAGALLVSAGDNPERLHSEAAFAHLCGSSPIDASSGLVVRKRLNRGGDRRANEALWRIVMVRMVSDPRTRHYVERRTKEGRSKREIMRCLKRYVARELYPLLAGPQQPLDNR

SEQ ID NO: 166075 - protein, 416 aa, unidentified
MDIEVLEPIIIKSKGGSTMIAVGIDVSKSKSTVAIISSDGEILLKPKDFNHTISGLAALTDLIHNYSSDVKVAMEATGHYHYPILKILLDQEVYVSLINPYIMKKYGDTSIRKGKTDKKDAIRIAYYVLEKSYQLEPYTAVNQKYDDLRFLSRQYNQIITMKIKSRVQLSNLLDEVMPGIQSLFASNNASNPSKNIFLDFIEKYESFETINKMGEKRFINSYMKFAEKKHSRNVQAKALAVYELSQNSIMTRGVDVSTVLALHQCISVLKQCTEASNKLLFQMQSIAYTLPEYPIVRAMHGVGDKLAPRLIAEIGDVKRFTSGKALNAYAGNDAPPYQSGQFEGTNRHISKRGSASLRKACYEVMQALKLHKPENDAVYLFMLKKELEGKPKNVAKMAGVNKFLRIYYARAMELYQ

SEQ ID NO: 166076 - protein, 356 aa, unidentified
MMTSKIVQKMDFTGRKVFVGLDVHKKNWKVSIFIEKQYFKTFQQIPNPGVLVKYFLENFPGGTIECAYEAGFCGFWIQRDLSNRRISCIVVNAADIPITNKQKNDKRDPVDSKRIASALEDGKLSPIYIPSTQLEADRRLVRLRKAITNDLTRSKNRIKSELHLMGIETPSKYNGWSKSFIVWLKELRIEHKAWKSTLEIAIYRMEELRAHLLNLNREVRNLMKENRYHKIGEQLMKISGVGVITTITALTEIGEIERFETFDRLNSYIGYCPTEHSSGESEHKGNITPRGNNQLRELLVEAAWIATRTDPAMALCYSNLTKRMTGKRAITRIARKILNRIYCVWKHNMEYQIGIN

SEQ ID NO: 166077 - protein, 384 aa, unidentified
MSTDPRPEQTAIRTDLGAIFVSLELSRATWLITSLSPGRQKMSKHQVHGGDAAGLLARLAELQARAHARTGQLFPLIVIQEAGLDGFWIHRVLQSESIESHVVDPASIATSRRRRRAKTDKIDGEALIRTLLAYKRGEPRVCAMVKAPTPREEDERRIGRERKVLTAERVAHVNRIKGLLFAQGICDYEPMHRHRRARLDDLTTSDGRRLPQHLKAQISRELDRLELLLEQLKAVEAERDALLAATESPAKLASAALLLDLKGIGPEFASVLWSEGLCRSFANRRQVAAYAGLAPTPWQSGAVDHEQGVSKAGNPRLRTTMIQLAWLWLRHQPGSTLSHWFHERVERRGGLRKTMIVALARKLLVALWRYVTAGVVIQGATMKA

SEQ ID NO: 166078 - protein, 370 aa, unidentified
MGKSVLYVGLDVHKMSVDVAIAEAGPAGEVRFYGRIGGDLEALDKVTRKLQAQGAELRFAYEAGPCGYQVYRHLTARGLECLVAAPALIPRRPGDRLKNDRRDALALARLLRAGELTPIKVPDEDDEAMRDLTRAREDAICVERRARQRTVAFLLRHGRVYQGKTTWGRGHWAWLLQQVMDHPAQQIVLQEYLDAVREASARVLRLTGQIQDLVPQWRQAPFVAAYQALRGVSLIVAATVMAEVGDLDRFNNPKELMAYLGLVPSEHSSGASVRRGRITKTGNSHARRVLVEAAWAYRMQARVTRHLLKRQEGLPERVRQLAWKAQLRLCTRYRRLLARGKARQTIVIALARELAAFLWAISRAVAQATA

SEQ ID NO: 166079 - protein, 322 aa, unidentified
MRYIGIDVSKATFVVAYSSDKGGEIRTFNNTTTGIKQFIGALPKDSSIHCVMEATGNYSAMLLYLLNVAGIAVSMENPLKVKNFAKAMLSTIKTDKSDARLITLYGEKMNPRPFKVQGEAILRLRQKRTVIRQLTKQITAMSNLRGSLACLPVPDKGATHTVDETIEFLEKRRDRLQSELTDLVEVEFSRQLALLTTIKGIGITLATALIITTGGFTYFQNAKQVSRYLGICPTYEQSGTSVNIRGHINRNGDAYTRGLLYVAAWTASRFNTKCGETYTRLRQNGKPGKLAMIAVANKLVRQAFAVVTHDKEYVDGFVSNRH

SEQ ID NO: 166080 - protein, 359 aa, unidentified
MKTYYIGADVHSNNTELAIEYNGQIIGRHALPTAIPAIKDVLAAVGGTIHLTFEEGPMAGWLYRNLKDSVEEVVVCDPRRNKLICSDGDADDKIDAGKLAALLRGGYLRAVHHSDDEDRAEFKQWVSLYHDRVRDAVRMINKIRARCRMYGIAIPRKVIRDKLQRPLWLAGIQNKPLANQLDMLWIGYDAVAAQVRRSKRQLCTLSKRYPIIKLWSQLAGIGTIRAVTAFAFLDTPWRFAHKNKLWKYCGIGLQRSASGTDKKGKPKPARLQLAWAVNRLLKNVILGAAHTAIHQNKNIFRDYYERMLHDGIMPSNARHAVARKMLTGMWGMWKTNSRFNESRVEAVAMTAGSSCSAKR

SEQ ID NO: 166081 - protein, 396 aa, unidentified
MMTPDDIDVWVGLDVGKSANHAHALDHDGNTLYDKPLKQDEKAIRTMLGKLSKHGRVLLVVDQPNTIGSLPLTVARNMGIAVAYLPGTAMRRTAQLLPGDAKTDRRDAHVIAWAALKLPETLRDAGPDDETLAALKLLAGHDEDLAHESTRHVNRLRSLLLQTHPAFERALKGERITRDATLALLERYGGPMGVKRAGIEDVKDWAKSNGLRAGRIIDDMFKAIGEQTVTVPGTLMAETIIPSIKTIRDRRREVDRQVEKLLEDHPLLTVLTSMPGIGVRTASNILLGIGGDIANFKSSAHLAAYAGISPVTGQSGTSIKGERPSRRGNKRLKNALWQTAFVASTKHPPSVAYYKRKREQGKHHNAAIICLARRRCDVIYSMLKNGTLYQEPALVA

SEQ ID NO: 166082 - protein, 430 aa, unidentified
MKTNTPSDSPVQWAALIGFDWGDSRHAVAIRVKDQSVETLELAHTAEGLQGWLDQLEQRFEGHPVAVAIEASRGASVYAMMERPWIQIFPIHPATSTHQRRAFQPSGAKDDIPDARVLLLLLEHHQDRLRPLQPDDQATRTLQGLLQARRKAVDRRTLLSNQLTSLLKDYFPQALGWSGENRAAPLALDFLDKWPSLIDLKASKAQTLRRFYHTHNVRSPELIDQRLEQIRGARPLTLDTAILEVSVRTARLLVAELRVLQEHIAGFEDAIAQAFAAHPERALFRELPGAGANLAPRLLVAFGTDRSRWESAAEIQRFSGVAPVTERSGARTWVHWRWNAPCFLRQTFSEWAAQTLVSSAWARAYYEHQKAKGHHHWGILRALAFKWQRILWRCWQTKTAYVEERYLAQLEKRRSPIAARARQIAQEMTI

SEQ ID NO: 166083 - protein, 313 aa, unidentified
MAQILPTVGIDVSKDWLDVAVHPTKVQFRVANDAAGWRELCRRLKSIAPRAIGVEASGGYERGLTHALLAADLPVRMVNAWKLRQFAKAAGLLAKNDRVDAYAIAWFTATLPSRAVRYDPAREHLAELVRARRQLVDARQAFANQLEHMRDALLRRQMARRIRQLEADEAALDQRIVQAIAAEPTFAARQELVCSMRGVGPVFSSTLVALLPELGSVTNRQIAALVGVVPYDFDSGKMRGLRCIFGGRADVRRVLFMAAQAAAMWNPDLKAFKQRLRAAGKKPKVAIVAVMRKLIVTLNAMVRSGTKWQAKTA

SEQ ID NO: 166084 - protein, 357 aa, unidentified
MNYGVYCGVDFHARQQTICCLTTEDGVIATYELKHDNKEAVRNFYVQLPGPVLVGLEAGGYSLWFEQLLEELGHEIWLGDASEIRRCARRRQKNDRRDAALMLDLLVRGEFPRIHRQAPLSREILRMLRYRHRLVKIRTIIKNCLQAVAIQSGLALKSQLFTEAGMQQLTSLAMSPVMQCQREQWLQLLPTLDQRISACEKWLSQQAAADQRVRRLRTHPGLGLLTSLAVVHTLDPVARFPNQRTVAAYGGFDPCEDSSADRKRYLGISKAGSKLLRFLLIEAGQAAVKEDAELKRFYRRLQQRRNKPKAKVAVARKLLIRSYILLRDEIDYAEFQRRAVAARLARENARLPCLSSD

SEQ ID NO: 166085 - protein, 354 aa, unidentified
MSQPPEVIGGIDTHTDVHQAAVIDTIGRHLGTKGFPTTPAGYRDLLEWLHSHGRALVVGMEGTGSFGAELGRHLRANQIAVIEVDRPDRRARRASGKSDSIDAYAAATAVFAGRATGTPENRDGAVEAIRGLRVVRASAVKSRTQTVNQIKSLIITAPAAVREALRSLATPELVRRLAASRPGTELADPGTAVKIALKRLAKRYLHLSEEIADADADLRVLISGTAPGLLALLGFGTETAGQLLVTAGDNPDRLASEASFAHLCAAAPVPASSGRTDRHRLNRGGDRQANRALHTIVLVRMRHDPRTRDYVARRTLEGLKTKDIFRCLRRFVAREVYHHLTSEFSGATDLSPAA

SEQ ID NO: 166086 - protein, 344 aa, unidentified
METIFERVAGLDVHKAQVTACVRVPAAAGGREQHLAEFSTTVRGLIALRDWLEAHRVTHVAMEATGVYWQPVWHVLEDGFELMLVNARHVKQVPGRKTDCSDAAWICQLMEAGLLRGSFVPPKPQRALRTLTRYRKTQIQERQREANRLHKALEDTGIKLDCVASDILGKSGRAMLDALLGGTTDPEVLAELAKGKLRAKIPALREALEGRFEPHHALVIGAILEHLDFLDEHIDRLSEAIEEQLGPFAPGVQLAATITGVAERSAQVMVAEIGTDMSLFPTPGHLASWAGRCPGNHQSAGKRRSGHTRKGSKWWLRITLEEAALAATRTNDSYLQAQPRSCIN

SEQ ID NO: 166087 - protein, 350 aa, unidentified
MTNITTIGIDIAKRIFQFHGVDKNGKTVLKKKLMRDQVLTFIANLPKCLVGMEACGGANYWAREISKLGHEVKLMAPQFVKPYVKTNKNDQADAEAICEAVSRPNMRFVPIKSIEQQDILSIHRVRARLVKNRTALANEIRGLLHEFGMIIPQGINKITSKLTEVLDSGKLSPISQQTFSDLKEEFIENDKKIKCLESRLKIMASELDKYQQIIAIPGIGLITSTALIASIGNGNCFENGRQLSAWLGLVPRQASSGGKEKLLGISKRGDIYLRTLLIQGARAVLNTKLRFTTESQKAKKDYSKFTQWMFNLHDRSGHNKTIVAVANKLARVVFAVLSSGNDYVENKVCS

SEQ ID NO: 166088 - protein, 359 aa, unidentified
MNKNSMLIVGLDLGDKYSYLAILDKEGELIEESRLPTTKASFQRKFFSLQPCRVAMEVGTHSRWASHLLTELGHDVLVANARKLKAIYHNPRKGDRADAETLARLARLDPTLLSPIYHRSPQAQADLAVLRSRDAIVRCRTLLINHARDIVKASGSRLPSCSADSFAHKVAPDIPEPLLTALAPIIDIIASLTKQIRAYDQKVKTLCSQRYPETRLLRPVGGVGTLTALGYILTLENPHRFRRSREVGPALGLVPRRDQSGDRDPQLRITKTGDAYLRRLLVGSAQYILGPFGPDCDLRRWGLKLAERGGKNAKKRAVVAVARKLAVLLHHLWKTGEIYDPFYRARKHDRAPEVIPAAA

SEQ ID NO: 166089 - protein, 346 aa, unidentified
MEHYVGLDVSLKLTSICIVDRTGKVEREGVVASDPEAIATFIKLHAPHVVRIGLETGATSTWLWTELNKIGLPVICSDARHAKAILKMQINKSDRNDAAGIARIMQCGWYKEVCVKDLDSHATKALLVSRALLVKIKRDIENQIRGLLKNLGLVIGRAKMNMFAVRAAQLAEDRSEIFAAVDPLLKAREAIEQQIVDLDRKVLRLARNNAQVRRFMTAPGIGPVTALCFLATIDDPARFKRSRSVGAYAGLTTRRYASGEIDWTGRISKCGDKMLRSYLYEAANVLLTRVAKWSALKAWGIRLAKRSGLRKAKVAVARKLAVILHRMWIDGTEFKWSSKDAADQPA

SEQ ID NO: 166090 - protein, 385 aa, unidentified
MVYIGIDIAKFKHFASVVSSDGKVIVKPFPFENSRQGFMKLVEEIENFQDCLIGLESTGHYAENLIYFLYERGYQIGVINPIQTDALRDSNIRKTKTDKIDTKLIVECLMLKKYSLVNSQDINIIKLRRLSRFKLETIQQQTRIKTQLTACLDIVFPELSSFFKGNLHLKVSYALLEKYSSAKAVAHCRIDGLTNLLYDNSKGHYNQEKAIQLKELAKQSIGLDNPAIELQIQCLIKQLRLYQKQIKDIDLAIMTLMELLNSPILTIPGVGYTLGAMIISEIGDIKRFSNPSKLLAFAGLDPVVKQSGNFQADQMKISKRGSTYLRYAIYRVAFLIIYNNETFHNYYISKRAQGKTHRVALGHVCNKLVRVIFKILTDETPFNLS

SEQ ID NO: 166091 - protein, 345 aa, unidentified
MESMYYIGLDVHKKLISYCVKDASGRIHAQDKIAATRYDLDVWMKTLPGPWMAAMEATMFTGWIYDHLKPHAVALKVAHPLMLRAIAVAKKKNDRIDADKICDALRCDFLPESYMVSTEIRERRRTLRYRNLLVQQAVQLKNRISCVLMQAGVTYNPEKLHHTGYFKELLTTNPDIDESLRRLLHQCREALVRLRKTEGALVRSLERDPFLAKRVERLMTIPAVGPITALTWVLEVGDVKRFSSIKKAISYCGLCGDEKSSAGIRKRTPISKQRNKHLQTVLVEAAKMAPRLSPALAQLYDQAKQKGNANRATLAVARKLVAYLMAIDRRQEGFLVVEKEDRAVA

SEQ ID NO: 166092 - protein, 359 aa, unidentified
MREQRNEISFSGQKIYVGIDVHLKSWSVTVLSETSVLKKFSQNPDPEALHGFLMRSYPGAKYHSVYEAGFCGFWIHERLTALGINNIVVNPADVPTKSSEKLRKTDAVDSGKLARSLRANELKGIYTPDSISLEMRSLIRLKNSITKDTTRQKNRIKSQLRYLGIEIPQEFLTPFSNWSKRFIAWLKEVETLSPSGRQALDIQIRHLEELRRQKLEMTRALRALAKTDRFRESLRLIMTVPGFGQATGMAFLSEICDITRFCNAEQLAAYIGMIPMCHSSGEKDGTGDITVRKHAVMRCNLIEAAWVAVRQDPAMNLFFTEQCKRMPKSKAIVKVARKLVNRLFFVLKHQTEYVNNVVS

SEQ ID NO: 166093 - protein, 461 aa, unidentified
MPRDDTKTFENTRSQLGGLPLVRRNVAGVDLGSEQHWVCAPTQDGSVREIASFGATTAELMRLAEWLKARQVESVAMESTGVYWIAPQEVLEGQGWQVLLVDTRQLARVPGRDKKTDPSDCEWIQRLHSCGLLRGSFRPEEAVCMLRTLVRDKANLVAESGDWLRRMQKSLDQMNVRVHRAVSDIDGATGMAILRAIAEGERDAQKLAKLRDRRCSKTEQEIAEQLSGHWREDHLFSLQQALKMYDAVQERIAAYEQEIVRKLGEMEREEQRGQIAPPLPNSNKAKMIKKRGQEAKRQALYRMSGVDITQIDAIGVETVEVVLSEYGSNLSRFPTEKQFVSHVTLAPHVPKSGGKAVKKRKRSSASTRVAAALRMAALSLRHSQTALGAYYRKLAQRIGGDIAVFATARKLATLIYRLLRWGQPYLDEGAAAYESRYLQQRIKSLSAKAKQLGYELSPASG

SEQ ID NO: 166094 - protein, 366 aa, unidentified
MKKNSTVAIRRKQIFKQKQLTIGMDLGDRFTYYCVLDEEGEVMVEQKLPTTRPAIKQAFGRMPSSRVALETGAHSPWVSRQLTELGHEVIVAHARNVRLIGESSRKDDRLDARMLARLARLDPRLLSPVQHRSAEAQVHLTVIRARAVLVGARTALVNAARGLAKSYGERLRKCGTQQVNRNSAASLSAELRVALEPLLAEVESLNQRIVEYDRRIEQIATEVHPEVARLKQIKGVGTLIALTYVLTVGDPRRFRRSRDVGCYLGLRPGRRNSGDSQPQQHISKEGDRYLRTLMVQGAHYILGPFGQDSDLRRWGLKLAERGGSNAKKRAVIAVARKLSVLLHKLWVSGEVYQPLHNHGAGTSKVA

SEQ ID NO: 166095 - protein, 429 aa, unidentified
MRTESTPGARGPVFCGVDTHADSHWLYVLDWRGRRVLSRRFPADAAGYEALAGAIAAAGEPACVAMEGTSSYGAGLTRHLASLGMPVREALSPARTQRRRPGQGKCDESDAERAARAAMSGSKLGTPKSQDGWVDGVRCMLAARSGAVKARTSAINTARSLLTTAPEGLRSRFRGMGGPRLMEELPSVRAEGALGAALGALADLWAAARDAALDMELAIEASLEENCPALLAMYGCGPVSAAKLAVAAGDNPGRLRSEASFAAICGACPIPASSGKTVRHRLNRGGDRQANSALHEIARQRVMRDPETAEYAERARARGKSDREVMRCLKRYVAREAYRALMRPHEIRRPADASELVAARRAAKVSQVRAASILGTSEKYISMLERGQRELKPIRRAYEAWVEAGLPLDWDRQAFEAERKMDSKKHLAK

SEQ ID NO: 166096 - protein, 399 aa, unidentified
MLAVGIDISKSKSVAAILNQDGSMHTSPFEFHHTQPELDAFIKYILNSNQSATILMENTGHYHYPVLKAFQEAGLPVCMVNAYQIKKFGDMDLRKAKTDKKDAVRIARYALEKSYSLVPYTSMEQKYEDLKFLARQYNQRMLTLKTNKVFLLNLLDETMPGITNILPLTTRTPETSLSVLFINRFKSYDRIKKMGKSRFLDAFEKITRKSRNRQTKTYGLAIYEAALRNITTRGENEYTLAAQDQCLELVCESQKAADSIILKMKTLAETLPEYAVLRSMAGVGNRLGPLILAEIGDIRRFHSGKALNAYAGNDAPPYQSGTFESHNRHISKRGNAALRKYCFEVMQALKLTRPQNDPVYLFLLKKEQEGKPYNVAKMAGVNKFLRIYYARAMETLKQQ

SEQ ID NO: 166097 - protein, 343 aa, unidentified
MQAITTIGLDIAKSVFQVHGVDGGGQVVIRRQLKRSYVLAFFQKLPPCLVGIEACASSHHWSRELQALGHTVRLMPPAYVKPYVKRHKNDAIDAEAICEAVTRPNMRFVATKTREQQSCLTLHRTRHLFIRQQTSVINAIRAHLAEFGIVAPVGRKGVEQLLNVAADAGDKRLPDVARACVTALGAQLQTLKAQILQFDRLIMAWHRSSEASRRLDDIPGVGPVLATALVATVADPRAFRSGRNFSAWIGIVPKQHSSGGKERLGSISKRGDRYLRGLFVAGALAVIRYAKIHGTKHRPWLTALLARRPTKVAAIALANKIARMAWAMMAKGERYKEPVALAA

SEQ ID NO: 166098 - protein, 401 aa, unidentified
MLNLPSLQLRVGVDVGSRCHSVAVGLTDGSLLEEFEIPHTAAGFGDFFARIEGHATRHPYPIAVAMEGYNGHVRPLDSLVKARGWRLFNVNNLKLARFKEIFPAAAKSDRIDSAKTLELFQLRDHLPMAGEVLQEVMATPEENNVLKRLSRRRRRLVNEQGRVASAMQADLQAVCPGLLEITRSAGNLWFVNFLTCRKGLRKLARIRRDSLLKVPGIGATYANTISAWQGCAYFAPDANLVGEMIQQDAARILELKRHIKALEVQMAQVAENSAIAGRLVSIPGFGAICSAELAGEIGTLERFRSEASLALYLGMATLDNSSGKSRRSKAPRHVNTRAKGAMMIAVDTHRKLVPQSQRYYEKKRAEGKRHNQAIRALGRHLCRVIFKIIAQDRSYRIDPLP

SEQ ID NO: 166099 - protein, 358 aa, unidentified
MQRNKISFKGQKIFIGIDVHKKNWDVAIAPEVGNVKRHTQKASAKELFDFLKKHYPDGDYLAVYESGFSGYSTYYALKEVGIECMVIHAADVPTTQYEEVMKTDRVDSVKLVRSLKAGLLKGIYIREKENVDDRSVVRIRKTIQKQLSGYKARVKHMLHCNGVLLPERFEKPGSHWSKAFIKWLKEDVRLLSSTRNSLDLLIRQVETIRITLLEATKMIRNLSQTERYKRKFDLLMTVPGIGVAVSMCILTEVYDVSRFHNENQFAAYLGLIPTSHSSGDKVAHGEMTFRGNKKLGPMIIEAAWITICKDAGLGSLYLRYKERMKPQEAIVRIARKLSNIIFAILKNEKEYVPYHTGK

SEQ ID NO: 166100 - protein, 419 aa, unidentified
MSKQLVDLAAFIGLDWADEQHAVCLQETGTTRREPLKLDQTPEALQAWIQQLRARFGGRPVAIAVEQARGALIYALMHVDFLHLYPVNPQTLAKLRQAFYPSGAKDDPGDAELLLEVLLKHRNHLRVWVPDDVLTRSIQLLTEGRRKLVDERTALTNQLTAALKMYFPQALDWFGDLHTARACAFLQRWPSLQQLQDATTSSVRKFYRKQGYRGEDKLEQLIQNIRHAQPLTEDPAVVLASTMMVHALVKQSPSLTDSIEEYDRQIAALFKKHGDSTLFGSFPGAGPTLAPRLLAAFGSDRNRFEYAAEIQQLSGVAPVTEKSGKACWVHWRWACSKFLRQSFHEFAGQSILKSVWARAYYQQQRQRGNSHHAALRALAYKWIRIIFRCWKDRTPYDEATYFKSLQLRGSALASALKTI

SEQ ID NO: 166101 - protein, 372 aa, unidentified
MVERWGVVGCDAHKQTLTVAAVDAAGSDVKVASFSNDPDGFGAIVAWLRGLGIEVIRVGVEGSSSWGRHLSVSLATAGYDVREVPPTRTTDRRHRRRRPKTDREDALAVARETLADSTLPPAKPTLDVSEAQAELTVVCERRRSLIRRRQRLLNEAEGLLNKLPPELIAGMPKQVAPRLRKVARLDRTLLAPSPSLAEMLDWLAELAADLDQWEARIGELEDRLPPLLDSCGSTLAEEFGIGVVSASELVAAVGKPSRFKTEGGFARWCGVAPVAVSSGEGDGQPIRHRLDLLGNRQVNRILYTMSVTQARHLPSAKEFLARKRAEGKSKKEARRAHKRQLAKRVIRRMWADQRRLGALSQSSQPTPSIRVA

SEQ ID NO: 166102 - protein, 315 aa, unidentified
MIVGMDVSKLSFDAAWEDKSRGCHRQYEYTDEGIAGLLEQTPEDAHYVMEATGVYHARLALRLYESGRRVSVINPLVIKRFSQMKLSRVKSDKADAELIRCYGEQHELTPWAPAAPEVLELQQAHGWLDDLIRERTRLINRQEAHAHHTKPSSFVTKQMSAQLRQLNRQIKGCEQHLEVMVKKSFHDLYERLLTIPSIGPKTAIELIIVTGGFSRFEDIKALCAYVGVSPTTFQSGTSVNGKGTIAKLGQGRMRQLLYLSSWTARSCNPACRALYVRLKASGKPPKVISIAIAHKLLRQAFAVATTNRVFSAEFA

SEQ ID NO: 166103 - protein, 370 aa, unidentified
MRIIGCDLHARQQTLAMLDTETGEVVNLTLMHEGNNVREFYSKLPRPVLVGIEATGSMHWFLNLMEELGIECRVGHPVQIRAAEPRKQKHDRRDADLILKLLAENRFPAIWLPSKELLDLRALLLHRHQWVRMRVRMQNALQAIALANGLRRGPALWSYDGQAKIAFLPLLPHAAYRRSALQAMYKNMQSEIENLTRRVAEQAGNRCGARLLMTHPGVGPVTALATEVFLGDPQRFTDGKTLASYVGIIPREYSSGEHQRLGGVTKQGSPLLRFLWGEAGAHAARRDPELKRFYRRKLVQKGLGKARVAVARKLGIRLWIMLRDEIDYQEFCRRGQIQQKTVRPVVGMPETGNGAKSHRPSDEATRLPES

SEQ ID NO: 166104 - protein, 352 aa, unidentified
MTTITTIGLDLAKKVFQVHGVDAEGKVVVARKLRRKEVLAFFAKLPPCLVGMEACGSAHYWAREIAKLGHTVKLMPPKYVKAYVKRGKTDAGDAAAICEAVTRPNMSFVPVKGLEQQGLSMLHSARSQLIGQRTQLINGVRGHLSELGVIAARGLLGFAELAAIVRDKSDRRLPMTARAALMVLVRQIEMVSTEIAALDSILRKENKASELGPRLETIPSVGPVIASAFRARVTDPALFKNGRHLSAWIGVVPENDSTGGKVKQKGLSKKGDRYLRSLLVNGAMAVVRQAQRRPDKHPLVAKLLGRMSAKQVAIAIANRTARIAWVLMVHGGVYEAGHRAPQYRAQACAAAG

SEQ ID NO: 166105 - protein, 411 aa, unidentified
MENIFLRCVGLDVHKASVEACVRRMEPSGRLHQQTRHWGTMTRDILMMADWMAAQGVTHVAMESTGVYWKPIYNILEGRFTVLLVNARHLKQVPGRKSDIRDCQWIAQLLQHGLLKGSFIPPRPQRELRDLTRHRTQLVEEKTRTSNRIEKVLEDANIKLGSVASEVMGVSGRAMIQALLEGEKDPAQMADLARRSLRGKIPELQKALEGHLTEHHRFLLRLLWKELTQQEALIAELEAKIEELTRCFAPEIERLDAVPGVDRRVAEVVLAELGGDMSPFPTHRHLSAWAGMCPGNEESAGKRRKRRITPGNRWLKRTLVQAAWAASHTKSSYLASQYRRLVGRRGKKRALIAVGHSILVILYYLLKDGRQYADLGSDFFDRLEPQRLTRYYVNRLQHLGHKVTLEPWVTV

SEQ ID NO: 166106 - protein, 312 aa, unidentified
MNTPAPVYAGMDISRNTLELSLQGKAFEFSHDAPGCASLLETLNALKEPVQVICEATGGWERPVLCALHGGAVAVSVINPRLARDFAKAAGRMAKTDHIDAQMLAEFGRLMQPPPTQAPSPMQQELCAWVTRRDQLQAILQGEKTRLIPGLPNSVLKDLKASIKRLERQLQKIKKHLEHLLSSCTELSEKAKRLQAFQGVGPATTATLLGHLPELGTLSNQQIAALAGLAPFNDDSGPRRGVRRIAGGRTSVRCALYMAALSAARCNPVLKPFFERLRSKGKPHKLAIIATARKLLCALNTSLANPSFSPCL

SEQ ID NO: 166107 - protein, 333 aa, unidentified
MNYAGIDVSHKELVIVVSVKGKAHKAKTFENTASGHKAIIQLLSKLKLKSRVCIEATGVYHFDLAVALSRAEGIEVMVINPKASHNFAKVLMKRSKTDAIDAEILAIYCERMPFEAWQRPADENIALRAIARRVAALTKLKTQTKNQLHALKATEETPVLVIEYTEELIEVLDKQIQVHRDSAVKLIQQHDELAEAFALITGIKGIAAASAVQMLGELMILPKDMSAKQWVAYAGLDPRQFESGSSVAKKTRISKAGNKFVRRALYMPALVATCHEPHIKGYYAHMVKDNGLKKIQAVCAVMRKLLHAIHGMLKAKKEFDGTRFYKLPVEVKS

SEQ ID NO: 166108 - protein, 341 aa, unidentified
MSKVTVHVGLDYHKASIQVCVMDPSGKILANRPSPNQAEALVQLVAPFGDDVRAAIEACSGAANLADELATKHGWIINLAHPGYVARMKQTPDKTDWADARVIADLVRVGYLPKVWLAPQDVRQLRTLTRYRQQLANQRRNAKLRVTALLRETRVVEPKARRWGRVWMNWLRTTEGLGSEGRWVVDRQIEEFQNTTDAIREVECRLAQVTSEDPVVSQLVLLAGVGLVTAWYLRAEVGRFDRFTTGKQLSRYCGLSPRNASSGQRQADAGLIKAGNEHLRATIIEAAHRLIRYDPRWKALASSMRRAGKPACVIVAAVGNRWMRWLFHQVAGGPITLKRVV

SEQ ID NO: 166109 - protein, 345 aa, unidentified
MELHTIGIDLGKTVFHLVGLNQRGEVVVRKKFSRKQLLHFTANLQVELIGIEACGGSHFLGRALREQGHEVRLMPAQYVKPYVKTNKSDYIDAEAIAEAVGRPKMRFVPIKSDDQLDLQSLHRVRERWVMRRTAVINQIRGLLLERGITLRQGRRHIDAALPGILEDASAKLSGAVRLLLAQLKLELDHLQMRIDEADAMINKTADENEACRRLVAIPGIGPVTATAIIAAIGNGAAFKKGRGFSAWLGIVPGEYTTGGKQKLLGISKRGNSYLRRLFVQGARAVLQQSTKQSSGLSAWLAQLTTRTHSNVAAVALANKLARMAWAVLAKNEPYRPPVLIGALAA

SEQ ID NO: 166110 - protein, 417 aa, unidentified
MKSARNTLPEEPPGDVTCGIDWARDDHAVSVVNARGREIHRCSVEHSAAGLRELIAVLERNGAREAAIERPDGPVVDALLGAGITVVVISPNQIKNLRGRYGSAGNKDDRFDAYVLADTLRTDRARLAPLMPDSPATVTLRRACRARKDLVSHRVAVANQLRAHLRNAFPGAVGLFADIDSPISLKFLARFGTQDRAGWLSPRRLAVWLASAGYCGRTGPAVLHARLVTAPRGAAGDDGTAQAHVTSALLAVLTTLAEQIKALSEQIGEQLSLHADAHIFTSLPRSGTVRAARLLAEIGDCRARFPTPEALACLAGAAPSTRQSGKLRTVSFRWSCDKQLRDAVTDFAGDSRRASPWAADLYNRARARGHDHPHAVRILARAWLFVIWHCWQDGAAYDPARHRALQTLLNQDQQTTA

SEQ ID NO: 166111 - protein, 376 aa, unidentified
MTMMHQQRTLRYLGLDVHKASISVAIAEESGPPTTYGRIPNEPATIRTVMTRLGGPGIELRVAYEAGPTGYALHRQLTRLGIACMVVAPSLIPRQPGNKVKTDRRDALKLARLLRSGDLTPVWVPDEAHEALRSLVRARADAKADQLRAKHRLSKFLLRHGCWPPIGVRSWSKRYFTWLHQLAFEHLPDRIVFADYLAEVNAAGERITRLERALHECAQSSSQVALIRGLQAFRGIGFLSAVTLAAEAGDLRRFRTAPQFMAYAGIVPSESSSADKHQRGPITKTGNRLLRHVLGEAAHHARHAPRVTSKVKQRQADVPPEMIDLAWRAQVRLHARYRHLSARIGSLKALVAIARELAGFIWAAGHVLQEEVPAAA

SEQ ID NO: 166112 - protein, 338 aa, unidentified
MVYGAIDLHMRYSQIRIVDEGGVVQREQRVMTSPERLVAAFASHGPMRILLETGTESEWVAQALEAQGHEVIVADPNYAPMYGETTRRIKTDRRDVAALAEANRRGWYRAAHRTSATQRATKQLLRSRRLLVAMRTAAVSLVRALLRQDGHRLPSGSCETVPARVARLAVSAALAETLAPLCRQIASVTTEIQALDARLHTRTATDAVVARLRSVPGIGLIVATTFRAFVDTPERFEHAGQVSAAIGLVPREDSSAERRHRGHITKAGPRELRSLLIQAAWVCWRTPRSAALRAWVDRLAARRGKRIAVVALARRLSRILFALWRDESVFDAQKIAMA

SEQ ID NO: 166113 - protein, 398 aa, unidentified
MENKSVFYLGVDIGKYHHQATLIDERRNQIGESLRFDNSLTGFELLTQTIKKRLPKNATVEIGMEATGHYYWHLKNYIADIGFGSLQIFNPIETQKLSKTRIRKVKNDKVDSLIIAQLVSQKTNNHPAIKENFELRQLKDLTRFCEKLKAQKRFYQQELSVLMERLCPEFSAYFSNIFLATPLMIIKKHFLGNIKSKQLVEAIMKTSRGRTSKAKAREIINMLENSIGKEYRCSNAKLQLKMLLESLDLSCKQIAKIKKQVEKASQQFEEIKYLNSIKGVSNYLASVILCEIGNINRFSNKGQLTAFAGLDASVKESGEYRRKQGNHISKRGSKHLRRQLYYAAKTAIMFDPELTAYYQKKKEQGKHYNVIMIAVARKILMRCYAVLKQKRLYELRNS

SEQ ID NO: 166114 - protein, 517 aa, unidentified
MAKSTSSGKEKKKGKKVVIVNDNGKDVIEEENGKEIRTTRDFGCGLDVHNLFIEVNVLVKNNLSVYEYRKSFDTDWISVNKAKEWVFDTIRNNSNPPVNPENNFHYTLESTATYHCVILTAWGGHPSIVNPYLARSGTKKTDKLDARGLSLADLTGVWEPSYIPSIDVIELRMLVDERKQFLSKATQIGNHINNLLLKLGINLGREGSVTKSNSIRSMIEAMFQDEAPESDDSNEENKTSSEDSNHYPPLPSIPESVRCVFKNDYEEYDNYCRISDDYFKRILDKIYSMKWETGSGEISGEEMMSLLTSTPGVGNQTAVLWLSRVITPRRFKNEKALAAYCGLDPSLKVSAGKVTSTVKRGGRKDLHSAFCMSASNLMRRHTEPFGKFGYNIAIQNGIWKKGVSALARKLATSMYYVSLRGEPFSYEKYKMINEPDVLNVSVETLVLLEPSFKRYLRFLYQNDIKDTKTLVHKYFICELPSIKGLGKNFFALVKDFINNQKKYNESYERMVSNEDNT

SEQ ID NO: 166115 - protein, 352 aa, unidentified
MDNTNSATIIIGVDTHKSTHVAVAINPLGARLAALSIPANTKGYQELESWSRALGKVEAFGIEGTGSYGAGLSRSLLFLGHKVIEVTRPNRQLRYRHGKTDSLDAEGAARSVLNGQAMAKPKTQTGSVEMIRHLKVVRDSAVKCRTQAMVTLKTLIINAPAELRGVLDPIKGKIALIRYIAAFRPGKITSTTASAKAAMRALARRWLILHKEIQTHDNELERLVVAKAPSLMASHGIATMTVAEMLILVGDDPSRIKSEAALAKLCGVCPIPASSGKTNRFRLNRGGNRQANAALYRVAIVRMRNHEPTVAYVRKRTRDGKTKSEIIRCLKRYIVREIYRHICAPKTAPATA

SEQ ID NO: 166116 - protein, 442 aa, unidentified
MVAVMIGIDPHKASHTAVAIDPAEVPLGQLQVRACAAQAERLLGWAQAWPQRTWAVEGAGGLGHLLAQQLLAAGERVLDVPPKLAARVRLLATGNINKNDPNDARSVAVAGLRSAGVREVCRDDHATVLKVWSKRYRDLGRARNQVACRLHQVLCELIPGGVPGEITAGQAERILASITPAEAVEAARWELAAGFTEELRGIDARIRQTRNKLAAAVRAAGTSLTGLFGVGPVIAAAVIGDVRHVARFPDRDHFAAYNGTAPIEVSSGGRKIWRLSRRGNRRLNHAIHMAAVTQIRYRHSPGHAYYQKKLAEGKTGKEALRALKRQVSDAIYACLQADARRAAAPVKSPGGQPGNGSDSSAAGSHPGHRLFGQATPGPATYPTTPTASFPAPLPSQASGRPGQGPGAARPRQRRQQGVLDPAAREPIMPAAGRNATGPAGHR

SEQ ID NO: 166117 - protein, 388 aa, unidentified
MYHVGIDISKFKHNCFIATDAGVKVKEFIFDNNKSGFIELKDSLNCLGKPSQIKIGFESTGHYGINLKSYLSNLGYTYVELNAYLTHMFSKALSLRKTKTDKVDAKVISSMLGSVDYETLHTKFYHMNDLKELVRQRNVYLNSRSKELIKLTNLLDKTFPEFKPFFKNRLGVSALFILKRFKTKARISKLSSSDYELIRSKTKGRITYPKFNGLKQIAKDSIGISSKVYDLLIQTSIHQYEYLTQILKLLDDEIIALFKKTNSKLLTIPGLGIITAATIYAEVGDFKNFSNPAKLVAFAGFDVRIVQSGTQEHYGKLVKHGSSLLRNAIWTYALPAVRFIPTVNDYYHKKKSQGKHHKVILSHICRKLIRMIYYIEYHNVSFDHSMSR

SEQ ID NO: 166118 - protein, 318 aa, unidentified
MNSYYKAESTEPVRYVSLDVSKARLDYAIEARACRAVPNTAAGIATLITRIKALPGVRVVCEATGGYERRLLAALWAAQLPVCRVQPGRVRHFARAEGTLAKTDEIDVGVIYRYACSMHPRVEQPPSAEAETLRELLEYRRQLSEQLTQTTNRLETAGPTLSGLLGAQRTQLEASLTQADTTVREHLRGHPALQAKAERLQQLQGVGPVLAATLLAYLPELGQEEDKRIAALVGVAPHAEDSGERSRPRHARGGRVEVRNVLYMAAVSASQHNPVLTAFYQRLRATGKPPKVCLTAVMRKMITVLNRMLRDPNFNLVH

SEQ ID NO: 166119 - protein, 355 aa, unidentified
MNEAKYIGMDVHQATISAAVRDSSGNLVMEAILETKAETILQFIRGLRGSLSVTFEEGTWAAWLHDLLQPHVTRVLVCDPRKNALLKVGNKNDRIDGRKLSELLYLNKLSAVYHGKPGIRTLKELARSYIAMTRDLTRVMSRLKAIYRSWAIPCAGQQVYAPRYRAEWLAKISEASVRHRAELYYQQFDALAALRQQARRELLVEARKHPAMRLLRQIPSIGPIRAALLIALMQTPNRFRTKRQLWAYCGLALRTYTSGEYCFVGGQLKRSKKVLAVRGLNINHNHDLKNIFKGAATRAASTAGPFQDFYQACVARGVKPHLARLTLARKIAATALLVWKKGVRFDAEYLKQQAA

SEQ ID NO: 166120 - protein, 337 aa, unidentified
MQITTVGVDLAKHVFQIHGIDDEGQVVLRRRLRRAEVIPFFAGLTPCLVGMEACATSHHWARELMSLGHTVKMMPPSYVKPYVRRGKNDATDAQAICEAVTRPSMRFVPVKSAEQQSVLVLHRVRALLIRQRTMLVNALRAHLAEFGVVVAQGVKRIRELIAMLTGENAPVPALARTSLAPLVEQLMDLDLRIKELEAELLAWHRSSEESRRLETIPGVGVITATALAATVTDPSHFRSGREFAAWLGLTPRQNSSGGKERLGRISKMGDGYLRSLLVVGATAVMRYAREKPSWVSGLLARKPARLVSVALANKMARIAWALLARKQTYQTQSSAVA

SEQ ID NO: 166121 - protein, 338 aa, unidentified
MEVYAGLDLHSTNTYVAMIDGENTVLYKQRHRNELPSILSALDPFKKDVRGVVVESTYNWYWLVDGLMDAGYTVHLANVSAIKQYEGLKAIDDKRSSLWLANLLRLNILPTGYIYPKEERPTRDLLRKRLQLVRHRTSHILSVKNILARNLGVRMKSDEVKKLTADEVTALFPDKEMRTAIMASVGLIGHLEEAIDGIEKLTMKKLKIGEEFIKLLTMPGIGQILGLTIMLEVGHVDRFPTVGDYSSYCRCVKSTRTSNGKVTGYGNRRNGNKYLSWAYVEAAQFARRFHETVRSYYERKMSRTNRIVAVKAVSHKLARASYYVMRDRVDYDPRLFSE

SEQ ID NO: 166122 - protein, 391 aa, unidentified
MPYTYFCGIDISKDSFSVAIKNGSFILKDKLFSMNSSGFSRFENIISNLKPHLSIGMESTGIYHKNLFNFLKVRGYNTIEIDPYKMWRFFRFTNSKPSTTDKKSAKTIAQFLEFNKNNLKTDKNHPQNEKYSLRYFVREKERITHDIAKTKTEIKRILTLVFPEIEKTNSLFSKEILAILVKFPSANKIRNISLAEFTEQITPISKKGRNGRLTSYNIYQLASSSIAFSYPLYEQLLKIKINRLLNLLEEKENISKLIEQVADRFFKREIEILTSIPGIGKESAIYFMAEIIDIKRFANKRKLVGFCGLDPVIKQSGNYKASFRISKRGNAHARRIAFIMAGSVKRNCPYFREYYLKKRKEGKSYTEAVIATSTKLLRTIYTLLLENRCFK

SEQ ID NO: 166123 - protein, 378 aa, unidentified
MKVVHEICCGIDVHAKMLVACLILANGEKEIRTFSTMTEDLLRLRDWLMAKQCTHVAIESTGVYWKPVFNILEDALTVILINPEHTHALRGRKTDVKDAEWLADLLRHGLLKASFIPPPEIRELRELTRYRESLVREQSAVANRIQKVIESGNIKLGQVASDALGASGRAMLWALARGETDPVKLAGLAQRQLKEKVPELRRALRGHLTVNQRFVLRESLQRWEELEKADRRVSEEIDKYLQDRPKLARAREILDSIPGIGPRVAEIILAEIGVQMVAVFASDAHLASWAGICPGNKASHWRQTPFWPHAQREHLPAFGVGASGLGRDHEEALLLEQPVLSPAQTTGPEEGFAGRGALVVGDHLSCFRARSNLHRTRR

SEQ ID NO: 166124 - protein, 450 aa, unidentified
MGAKRLEMDIINPCCAGIDIGSKSHFVAVGQGLEDVKEFGVYADDLTAICLHLKGHGITSVAMESTGNYWQNLYVELIKHGFGVTLANGKFTKNIRGKKTDVKDARWIQKLHSIGLLTGSFLPDEVTEVLRTYCRQRQNMLDLAAEASHKMQKYLKILNFRLDVVVKDICGLTGMAIITDICNGNLDPERLSEHRHGNCRKSKEEIAKALKGNNRQDYLFGLRQELESYQFYQMKIAECDREISGFLKAQINTDPGKAMLKTTSKVHKRVNKNALRGIDLNQVAFQYFGGVDLMGIEGMSHATVLTIISEIGPDGFKKFETAKHFTSWLRLAPNNKISGGKLLSSKIPKGSNRLKIALRNAANAIGNLKDTHLSNFFWRVCYRKGRAAAISATARKLATILWNMVVKGEQYHPPTMYEFLDQKRKRKVREMRKLICKFDISPNELGMAIT

SEQ ID NO: 166125 - protein, 386 aa, unidentified
MQTPNDLSQSRIVLKQDSTLIAVIEMSLSSWLVAGIVPGVERQPLKKLAVDESALLKLLNRWREEAEKAGRKIERIAVAFEAGRDGFWLARWLRARGIEAHVIHASSVAVSREHRRAKTDRLDTELLKRAFLGWLRGEREHCKMVAIPTIEDEDAKRPNRERESLAGERTRIVNRMKAALSRLGIRGFNPKLKKAAERLKDLRTPEDQPIPPNTLAELRRDMERRRLVSDQIRQIEHARLERIEHAPSDRPHAMVRLLARVIGIGIETADMLVQEVLSRNMRDRRAVARYAGLTGSPDESGTKRREKGLARSGNARVRRGMIQLAWRFLMFQKGSALAQWFRARTENARGTRKTMIVALARKLLIALWRLVREGVVPDGIVLRPAQ

SEQ ID NO: 166126 - protein, 328 aa, unidentified
MCKGIFYIGVDVGQEELWVAIGGSKPRSFRHTVAGVKGLWNWVRSNNTEATLHFCMEATGIYSQSLAAILSTHADTQVSIVNPAQISSFAKAQLRRSKTDQVDARVILAFAQSQHPKSWKPQPEALQQLHHLVVQADALKATKRQWSNRAHTQAYTHNLPKVVCKTSSALQKSIEKQLTQIEEAIQKLCQTDPSLKTQIQLLCTIPGVKECSASRLLAYGKTALNSYSARALVAHAGLAPSHKQSGTSLLTKSHLAKQGDKRLRHALYMPALVGIIHNPILRKYYQRLLAKGKPKMLALVACMRKLLIIVRAILTQQIPFNPTIQSLT

SEQ ID NO: 166127 - protein, 356 aa, unidentified
MQKKILYVGMDVHLLCIVIAVMDQQGKILNRSVIETSAQAVRDFLSGLRGELHVTFEEGTLAAWLYDLVEPLARRVVVCNPKHNQQRMGRNRNDLIDANRLAELLRLNAVQAVYHGETGTRTLKHLMRSYECFVSDITRVKNRLKSLFNARAIRSRGRALYHVSKRRAWIEKLEDAGERQRGELLFLQLEELKELKRAAQKAMVGESRRHPAHPVLSQAPELGPIRVAQIIATVDTPFRFRTKRSFWKYLGLAVERRSSSDHEIIDGRVRRRQHQVVETRGLNEDYNRRLKSVFKSAAAHACGCGVYKEYYAGLLAQGMRPEMARLSVARKLAAMTLAVWKSGERFDEGRIMKKAA

SEQ ID NO: 166128 - protein, 347 aa, unidentified
MRFYNTNHKQYCGIDLHARSMYLCVLSHDGKTLLHKNLPTDPDVFLNAIAPFREDLVVAVECIFTWYWLADLCAQEGIAFVLGHALYMKAIHGGKAKNDRIDALKIATLLRGGMLPQAYVYPAEMRSTRDLLRRRLFWVRQRGQLLAHIQNTHHQYNLPTPKARLAYRKNREGVAEHFADSAASKSVSSDIELAEHYDSLITKLELYLCRQTKLHDQDNFYRLRSIPGIGKVLAMTILYEIHDIDRFERVQNFASYSRLVKCEKSSSGKRLGTGGNKIGNVHLKWAFSEGAVLFLRANPVAQRYIENLRRKHGKAKSLSILAHKLGRAVYFMLKRQKSFSMQTFRMA

SEQ ID NO: 166129 - protein, 342 aa, unidentified
MATVTLIGIDIGKHSFHLVGHDAHGKVLLKRQFGRHSLIDFLARHPPCRIVMEACCGAHWLARKLAGFGHAVQLIAPQYVRPFVQGNKNDFLDAQAICEAASRPTMRYVAVKSPEQQAQSALHRLREARIRERVQTSNQIHALLLEFGLALPQGARGLQQAHSLLGERDAALPEGAWRVLEKPLQHHDLLLQEIETLDLEIAAQAKQDDVARRLMTGPGIGPITASQLAADAGNAKGYGHARDFAASLGLVPRQHSTGGKAKLLGISKRGDKSLRRLLVQCAHVIMQRAAQWDSALAQWTAQLMLRRPSQVVACAVANKLARVVWAILAQGGEYHPHPRAGM

SEQ ID NO: 166130 - protein, 317 aa, unidentified
MTTITSQTVVGVDVAKAELVVYRADLQETFAIVNEPGPIKKWLKSLPAGSFIALEATNTYHVATVEMAHALGHTLYVIDGYRLSNYRKGTGGRSKTDISDARLLARYLTNEFEDLRPWSPPPKGFAKLQGLMRKRSQLVQMKVALNQSWGDEPMLKRQLKELQAVIAKVNADVQKMLHKLIEEAGLTAQVNRCKAIEGVGPLTAAALANAFSRGDFKSSDAFIAFLGLDLRVSDSGQKTGRRCLSKRGDSEARRLLHNASMAASRSDSWHPIYERYLTRGLKATQVYVILARKIARVAFALMKNQGEYQPGRVGCVA

SEQ ID NO: 166131 - protein, 322 aa, unidentified
MNPVSTPSVFVGIDVSKARLDVCIVAETQACFSVDNSAAGVAELVSRLRLIAVTRIVIESTGRYSRLVAAELCAASLPVCVVNPRQARDFAKSLGRLAKTDAIDARSLAEFARVAGLRVSEKQPENQAILDDRITRRRQVVQMLVMEHNRTEGVTDKLTIGHIKKVIRLLEQQREDLDREIAKLIDADDDWRKRRDALVSVPGIGQSTASILVTDLPELGKLNREQIAALVGVAPINRDSGTLRGKRGIFGGRPHVRATLYMATLSAMRFNPTIKAFADRLREAGKAFKVIAIACIRKLLTILNVMLRDNQPWRNPCLAKNA

SEQ ID NO: 166132 - protein, 429 aa, unidentified
MTRISVGVDVSKNRSTVCIMDQDGKFIMRPFLVWHSTEELDFLADTLKRLNGEVRVIMESTSIYQYPIALQLKERGLFISIVNAYEMKQFANIDFRGGKTDKKDSRTIASYGISYWYKLVEWQIPKDTYFNLDLLNRTYMNAKKHRQIILQELQHYIDCAMPGMDKELHSLNLSTKKDFMLDFVEKFWHRDEIVNMTEAEFTEVFTAWAKKKGYRPVEGKAAKIYAIAKSCIPYYPANPTVKTILQCIVDKLSGVNRTLVTIVTQMIEEAKKLPEYQIVREMPGVGDPLAARFFGSAGDIRRFKNSKALVAYAGIDSPPDESGDFSSTHRHITKKGSKVFRDTGYEIMMALRAQKRTWEKVRKNPEVYDYMLKKEAEGKPRKVAKIAALNKFLRIIYARIKELYDNMALAERAKTKTRSKTRAKTKATD

SEQ ID NO: 166133 - protein, 385 aa, unidentified
MSKVTMIGCDLHDCSMLLKVAVDRGKPVKKTFQTSDAAEMIEWLKEFARRHDSVRIVFAYEASGMGFGLHDDLTEAGIECHVLAPTHLPHTTHRRKNKTDEKDAEMILEEVRASVLAGRKLPAVWVPDPETRDDREPLRLRLSLARQRTQIKNQIRCLAKRSKLSFPVWFTNSGDWSKRSVAWLLAVAAGDEGNLLPGVRAVLAGLVELYVSFSEQLKTLDKVIGKLAKKKRYAQAFRKLKLIKGVGTLTAMVFLTELGDLNRFANRRQLAAYLGLAPSAFESGECDDRKGRITRQGPSQVRHVLCQAAWTAVRCTDKWKDTYERVKRGTQKRGKVAIVAVMRKLAITMWHAARSQELDELLDEFDEIKADQQNQQPADRKRKAA

SEQ ID NO: 166134 - protein, 384 aa, unidentified
MPADYRHDQTAIRIDLGAIFVSLELSRATWLITSLSPGRQKMSKHRVRGGDIAGLLACFAELRAKAQTRTGQLFPLIVIQEAGLDGFWIHRVLQSEGIESHVVDPASIATSRRRRRAKTDKIDGEALIRALLAYKRGEPRVCAMVKAPTCREEDDRRICRERSVLTAERVAHVNRIKGLLFGQGISDYEPMHRCRRARLDELKTGDGRPLPPQLKAQVSRELDRLELLFQQIKAVEAERDALLASTESADKPAPTALLLGLKGIGPEFASVLWSEGLCRSFANRRQVAAYAGLAPTPWQSGTVDREQGVSKAGNPRLRTTMIQLAWLWLRHQPDSALSRWFHERIERSRARRKTIIVALARKLLVALWRYVTAGIVIEGATMKA

SEQ ID NO: 166135 - protein, 343 aa, unidentified
MTQYVGLDVSLKETKLHVLDEAGNRVWRGRCTTDPVAIAATVHRYAPSAARIGLETGPLTTWLWTALTAEGLPVVCLDARHAKKALDMKVNKTDANDAEGLAHLVRAGWYREVRVKGRSAMLAKALLGARSQLLSMSLALENQIRGILKTFGLIVPKGAGGLFEKNVRALITEDASIAIVIMPLLQVRQVARGNCAALDRRLIRSVQGEAPCRMLMTMPGIGPITAVAYVAALEKPDTFKRSRAVGAWLGLTPRRFQSGEVDYDGHISRRGDRQLRALLYEAAAVLLTRVRKESALRRWGLMLWKRLGFKRAATALARKMAVVLHAMWKSGTSFNPTLGTVKA

SEQ ID NO: 166136 - protein, 469 aa, unidentified
MNSPQKNKKSKTKLKKMVKRYAQKINKVGVLEQINFNAAGIDVGAEEIYVAVPEDRTEQSVRKFGTFTQDLVQIVLWLKANGVTTVALESTGVYWIPLYDQLGKAGLDVYLVDARKTKNVSGRKSDVQDCQWIEQLHTYGLLSKAFVPDEQTRNLRSLERHRDMLINYRSSHIQHMQKALTEMNVKLTNVLTDITGKSGMAIIRDIIAGEWDPNRLVRHRDYRCRKSEKEVALSLEGNFNQQKIFVLKQAVELYDNYTQKMVELDVESEKLFKTFARKVDVKSKPLKKLAPSLQNMKKNAPHYDLRSQLYQIAGVDLTRVDGFNVLVLQRIISEVGLDMSKWPTMKNYTSWLALSPNNKITGGKIISSATAKTKSRANIAFRMAAMGVARSNCPIGRFYRKMKARDGAQSAITATAHKLARIFYVMVSKQVEYSEEIANGDEEKNKKRMIKNLQRRAKELGYELVQETA

SEQ ID NO: 166137 - protein, 360 aa, unidentified
MTIVSMHDADVDHQVEDVVLGVDTHKDIHVAAVLTLTGGVIAHASFPTTTAGYQHLIAWARSFGQARRAGVEGTGSYGFALARVLQAEGLTVLEVNRPDRAVRRRRGKTDTIDAENAARAVLTGEATAVPKAADGPVEMLRVFKIAKDSAIKARTQSINQLKALLVSADPALRDQLTRLSNPRLITACAALDPSTALATAHATLYTLKLLAERIQYLTGQVDELAKHITSAVEAAAPALLQQPGIGPDSAAVLLITAGDNPERLTSEASFAALCGVSPIEASSGKSNRRRLNRGGDRQANAALYRIALSRLRWDARTQDYLAKRTSQGKTRREIIRCLKRYIAREVHRLITDSSSPSPQT

SEQ ID NO: 166138 - protein, 369 aa, unidentified
MERRYVGIDLHRRRSVIFIMNSAGEKLSCVRIANEPLRLLEEVSKAGDDAEVVIEATYGWYWAVDLLQDNGFNVHLAHPAGNDWGKRRVKNDERDARDLADLLRLGRLAEAWIAPKPVRELRELVRYRAKLVQLRTGLKAQVHAVMAKEGVLPSRFDMFGPGGNAQLDGMQLAENYAARIESLRAAIRHYDREVLALERRIHQQLRHDKGYQAIQAIPGVGRTIAAIFVAEIGDVSRFPNAEALTSWAGLAPKHKESDTKVTRGPITKAGSKLVRWAAVEAVGGGRSGVRPARGHQAARRLRRDRRAAREVQGPRRRRSQTPHARLLRPARRRDPLPDRRSSVSSAHQPGAARVTACTPPVRVAVRVSA

SEQ ID NO: 166139 - protein, 470 aa, unidentified
MAARKDRADGAGVPGHGGDGAEVAEELTQVVEYAAAIDVAKGSGMACTRVPGSRPDRRRQKVWQVGATFGEVTALMDHLRCEGIQRLVLESTSDYWRIWYYLAEAAGLEVWLVNARDVKHLPGRGKSDTADCVWHCKLNERGMLRRSFVPPEAVRDLRMLTRTRTRLAQDQARHQARVEKILEDALLKISVVISDLFGVSGRRFLDALVAGERSPAALAALGDYRLKASQAKLEEALTGRFRDIHATEIALHLRLIDAINAEITALDEQIGQQLAAVPGTAPVCTACGLAGGGHAPDCDDLGILLLGLADRLDEVTGIGAVNGRAIIAELGTDPSQFPTPGHAAGWARLTPRSRQSGETSRPGRTGKGNPYLRGGLGQAAMTAAKTDTRLGAMYRRIARKRGKQKAIVAVSRVICEIAWILICDPSARYEELGPDYYHPRSPARQTRDKIREIERLNPGKKVILADDDAA

SEQ ID NO: 166140 - protein, 339 aa, unidentified
MKNLFIGVDFSKEKVDVAIIFADGLTETAARMFNEFKTTVSGYKQLVKWVEQNSYGIDSSLWLFCGENTGDYSKGLCNFIYGKGYDMWLENAKSIKDASGLRRLKSDRADASMIAEYAMRNYDRAIMYEPLSESLAQLRELFLYRQMVIRHRCSFQVRRGEKKLTMEKSPVKTMISQSGRHIVSELNKEVEKIDKRIAELIKSDEELTEVFTIVTSVPGIGTQNAVCLMVYTDNFRRFNYDSRKIACYYGIAPFGKDSGTSVHSDPRVHYMANRQIKSMLTQAALAAVNFNPVIARYYMRLVERGKKKQVALNNVKNKLVHLVTAMARNRQLYTPEYKI

SEQ ID NO: 166141 - protein, 367 aa, unidentified
MKKVSTAVAQLSRIFSQPRLTIGLDLGDRNSWYCVVDETGQIQLEQRVRTSTKALQEVFGAMPRSRIALEIGTHSPWISRLLRQWGHEVIVANARKVRLIGESRKKDDRLDAQTLARLARIDPQLLYPVKHRSAQAQADLAVIRARAGLVRARTGLVNTARGLAKSYGERLRSCNVRNLDPEKAEGLSPELQRALQPLLSAIAEVSERICTYNERIETLAQQSYPQVALLKQIKGVGTLIALTFLLTLEDPHRFPKSRDVGGYLGLQPGRRKSGQSEPQMHISKEGDPYLRTLLVQGAQHILGPFGVDCDLRRWGLKLAERGGRNGKKRAIVATARKLAVLLHHLWVSGEVYEPLHNSSRTTLAAAA

SEQ ID NO: 166142 - protein, 345 aa, unidentified
MDHFAGLDVSVKETSICIVDDAGKIVREVKVASEPEALLAVLKNLAYHFKRIGLEAGPLSQWLFSALAEAGLPVICVETRHMQAVLKAQINKTDRNDARGIAQMMRAGLYRPVHVKTIRSQKLRMLLTHRKLLQSKAIAIENDLRGTLRNFGLKVGVVGKVKFEARIRELVENLPDLAVLVEPMLIVRRTLREQIVILHRRLLAIVRDDEVCRRLMTTPGVGPVVALTYRATVDVPARFRKSKAVGAVFGLTCAKYQSGEVDRNGRISRCGDEMMRVMLYEAAQSMLRSKKWSWLKAWAMQIARRRGMKKAIVALADADRQAPRDEKGDRGPGTPVGCDHAPHMG

SEQ ID NO: 166143 - protein, 350 aa, unidentified
MIVGIDVHKHNHAVALIDDRGGEIATLVIANTPKGYRSLIDWLVDHGAAAAVIGVESPGSFGRCLVAALAGAGFEVLQVPAWRTHRERHRRGPGKTDPGDAISIAHVVRTKRVDLGPAEEPELVRALGTLELQRRRFVRDRTQAIQRLRADWTQHDPVAEAGVIRCDRQRELAKLRRLQLGSSLAARTAARCIRELARDITDLNKRIAGLDREISQLLSEHDNPLADLHGAGTNLAATIIAQAGDVRRFRNASAFARFCGAAPIPCGSGQTADRHRLHRGGNRQLNAALYRIAVVQQRHHPQAKVYLARKTAEGKTPREARRALKRHLANVLYRRLHAWANVAPSMNPLT

SEQ ID NO: 166144 - protein, 370 aa, unidentified
MRKKILYVGLDVHKKTIDVAITNNRINGKVRSYGKIPGSLDALSKLIKKLQTEETTLQFVYEAGPCGYQIFRYLQSKGISCSVVAPSMIPRRSGDRIKTDRRDAINLVRLFRAGELTSIYVPSAEDEAIRDLIRCRDDVRRFEKKARQRLLAFLLRHGYHYAGKKHWTKGFYNWLGTIKFPHRAQQITLQEYIDATNECSERIKRVTQQLQAQVEEWDRWPMVKAYQALRGVSFIVATTVVAELGDMNRFATPKQLMAYLGLIPSEHSSGTTVRRGPITKTGNSHVRRVLIEAAWTYRMPARVSIVLLRRQQGLPQSVRDISWRAQTRLCARYRRLIARGKSRQTVITAIARELSAFMWAIDKQINVASA

SEQ ID NO: 166145 - protein, 349 aa, unidentified
MATACSVTLGVDTHKDLHVAVTLDQVGRRLGVATFGTDDAHHARLWAWASDFGPIVQAGVEGTGSFGYRLAQFLTGSGVQVFEVNRPNRVTRRRRGKSDPVDAEAAARAVLAGDATATPKDRSGPAGQLRALLVARRSAVKARTQAEQQLRSLILELDDDQRARVDRRRVVELTTACAALAGTDGTSLALRALARRWQHLDQEVRDNDQDVTIIVRRVVPGLLARPGIGPVCAAQLLVTAGDNPDRLRSQGAFAALCGASPVEHSSGKTQRHRLNRGGDRAANSALWVIANNRLMHDPQTRAYAARRTATGASRKEILRLLKRYVARQVFAEIRHALSPPAALPDSPLT

SEQ ID NO: 166146 - protein, 369 aa, unidentified
MSHTLFVGLDVHKEKIVVAIAEEGRSADVRGYGSIDNTPAALDKLIKKLGEGGRSLHFCYEAGCCGYGVHRQIVDSGQYCDVIAPSRIPRPTGDRVKTDRRDAIMLAKLHRAGELTAVWVPDQDHEAMRDLIRSRMAATMQRQTARQQLLAFLLRHGRSYPGIKTWGRSHYLWLSDQKFERPAQQAVFQDYVNAVRDGEDRVKRIEQEIEEQVPSWSMGPVVKALCSLRGVSTLVAATVLSATGDLGRFECPQQLMSYFGLVPSERSSGGSVRRGGITKCGNNEVRRILIQSAWCYRYTARVSRYKADAFAANSSTVRQIAWKAQLRLTKRYRALATRGKPIQVVITAIARELLAFMWAIGQVEKPANA

SEQ ID NO: 166147 - protein, 391 aa, unidentified
MLTDTMDKGSIVDASFGEASVASRAERRGRREIGKILVHETVAERDPRRHCGTNPNSRMNRRRPTGSASSHLQDWEKTMDETLFIGIDVAKDTFHVASCPASINISLPNNSTGTKQLIKTLQPYNIALAVLEATGGYERPIVAELLEASFKVVVASPRQVRDFARGMGEFAKTDPIDAAVLARFAQVVQPEPKPPASPEIDELSDLVRRRRQLTDLRTQESNRSQLALHPKIRKSVRKMIKTLDYQIAEIDELIEQNIKSDDDFRQKNKILKSAKGIGPITSAVLIAQLPELGRLNRQEIAALVGVAPYDFVSGRFAGKSRIWGGRKDIRSALYMAAMSAIRWNPVIRRFANRLLKKGKAFKVVITACMRKLLIILNTMMRNQTLWRPEKI

SEQ ID NO: 166148 - protein, 323 aa, unidentified
MKKRPARFVGIDVSKEHLDIACRPEPTRWRVANDSTGIGQCLAQLRQLKPALIVLEATGGWQGALVAALAVAKLPVAVVNPRQIRDFAKATGQLAKTDALDAGVIAHFAEAVHPTPRPLPDEATQQLDALLQRRRQLLEMWVAERHRVALAHPTVRESLTRHIDYLQRLIDETDAELSTRIRTTPVWRATDDLLQSTPGIGPVLSATLQAALPELGVLNQREIAKLVGVAPLNDDSGKRAGARHIRGGRAEIRAVLYMATLTATRCNPVIHTFYHRLLARGKAQKVAITAAMRKFLTILNAMVKTRTPWNARIHHGSVPEPSR

SEQ ID NO: 166149 - protein, 405 aa, unidentified
MDARSSGGTRHAGVDWSWDRQAVCVIDDEGVVLDRFEVQQRARALAGMTQRLHRWGVRRVAIERPDGPVVEVLLGAGLEVVVISPRQVRAFRLRHGTAGNKDDRFDAYVLADALRTDGHRIASLVPDRDDTRALRALVRARKDLVGHRIAVHNQLLANLQHAFPGAVGLFAQLDSPISLTFLERFPTEDKAAWLSERRFQAWLGSVGYSGRKTPAALMAHLREGPVGLKQEAGIGHAVVTIQLVGLLRAIRTQIDELDHRIAEALSLHPDGAIFQALPRAGTNRAALLLAEIGDCRGRYPDESALAAAAGVAPSTRASGKRRSVSFRRGCDKQLRAALVDFAQDSVHASPWARDVYDRARARGCRHPHAVRVVARAWVRVIWRCWTDGVPYDPSMHGGVIRLDAA

SEQ ID NO: 166150 - protein, 312 aa, unidentified
MTHACAAGVDVGRDWLDVGLAPSGKVFRLANDPSGVAALVMRLEREGVAKVVLESIGTYGARLVRGLAQAGFEVGVVDPKRIAALRTAEGRRAKTDRLDAGLIARFALLMQDAARPVPSARAFEIRALSTRRRQLVEMAAMEKTRLKQTLDEAVADSCRRAIAWLAQERADVEARLQALILEAHDGPARQALLQTIPGVGPAVSMTLLADLPELGGLDRKAVGSLAGLAPHPNQSGTRTGPAHIGGGRPCVRAALYMAAVSAARSDNGFKREYQALRAAGKPAKVALVAIARKIVVAANGMLKSGQPWQRPA

SEQ ID NO: 166151 - protein, 364 aa, unidentified
MRYYTGQHQYYCGVDLHARTMYLCIINQADEILYHREIPTRADAFLEKLAPYREDVVVSVECIFTWYWVADLCTAEGIPFVLGHALYMKAIHGSKTKNDRIDSKKIAKLLRAGMIPMAYVYPKAMRSTRDLLRRRMHFVHQRSNLMIHIQQTNYQYNLPKIGKSLKYKGNREGIAERFSEQSVQKTIEVDLELIAYYDAIIGKLEWHILKSAKAHDATALTILRSIPGIGKILSLVIVYEVQDIRRFSRPQQFASYARLIRPVKESGGKRTGSSNGKIGNAYLKWAFSEAVVLFLRETREAQPYIKRLERKYGKEKAKGILAHRLGRTVYYLLTHHELFDMNKFVNQQQVANNKSPVAGRKGGR

SEQ ID NO: 166152 - protein, 382 aa, unidentified
MSKLKPKSQSLPVINPNAAGIDIGGRFHVVAVPPDRSDKSVQTFKAFTGDIHNMARWLTKCRITTVAMESTGVYWVPVYEILEEHGFEVVLSNARDTRAVPGRKTDVGDAQWIQRLHACGLLKASFRPDATIAELRTYMRVRERMLDYAAAHIQHMQKALTFMNVQLHIVVSDITGVTGMKIVRAIVAGEHDPAILAKFRDPRCKADEQTICAALKGNYQPEHLFALRQAIILYDVYQRQVNECDVQIEAVLDRLCINSSEPDEPIPKPKHRAKQANAMTFDVREKLYRLIGADFTQIHGIGPFLALRLISECGTDMNKWPTEKHFTSWLTLCPGSKISGGKVMSSHSLKSNNRVVAHLRLAATTVGRSDTALGGILSKALI

SEQ ID NO: 166153 - protein, 368 aa, unidentified
MTSILYIGMDVHTTNYTLCSYSMETQRAFGRMQVEPDYKRILQYIQEMKKAWGDDIEIVCGYEAGCLGYSLYHSLTDHGVNCVILAPSTMACSPNERKTDMRDAEKIAKCLAYGTYSPVYVPTQGDEAVKEYIRMRDAHKANLKRIKQQIIALCHRYGKQYAKQSHWTQAHLTWLKAQRFNDPILQETFEEYLIQYHQAVEKLERFDKRILEISGKEEYAEKVHKLTCFNGVREHTALSAIVEIGDFNRFPSADHFAAYLGLVPGEHSSSTNIQRTGITKKGNAHLRTLLTESAQCYSRGQIGRKSKALKARQEGNEPAVIAYADKANERLKRKFKRINFSRPHNVAATAVARELACFIWGMMTNHID

SEQ ID NO: 166154 - protein, 370 aa, unidentified
MGMLAEQVDHVIGVDTHRDSHSAAVAAALTGHVTAQTTLSADAFGYKRLLRFARRDAPGRRVWAIESSGSYGAGLAAFLLEQGEWVVEVDRPKRPARRNGAKSDELDAVRAAREALARDHLGQPRQRGDREAVRVLLVTRRSAVRARTKAINHLKSLVVTAREELRNQLRRLDTDQLVTRCARLRTLPSHPVEHRATVIALRRTAQRILALEAEANDLETEIEQLVKQAVPDLLAETGVGPLSAAQLYCSWSHQGRLRNDGAFAMLAGSAPIPASSGQTVRHRLNRGGDRQLNCALHTIVLTRLKHDPETRAYAARRAAEGKTPREIKRCLKRYTARRLFRILETTGPEPAPQVSRSHARRRSRTLGPCS

SEQ ID NO: 166155 - protein, 345 aa, unidentified
MKITTVGIDLAKNVFQVHALDERGKAVLRKQLRRAQVAAFFGNLPPCVIGMEACASAHHWGRTLQRFGHTVRLMAPQFVKPYVKTNKNDAADAEAICEAGGRPSMRFVPIKSVEQQAILSVHRVRQGFVEARTAQANQIRGLLGEFGLVIPQGISNVAKRVPELLEDASNELPVPFRHLMDRLTEHLKELDRQVKDFEKQIIAWHRSCELSRKLENIPGIGPLAASALVASIADANSFDNGRQVSAWLGLVPRQHSSGGKPTLLGMSKRGNPYLRTLLIHGARSAILAAQRKTENKNIWLANLLTRRHPNIAAVALANKNVRAVWAMLAHGREFKADYVPTRMTA

SEQ ID NO: 166156 - protein, 477 aa, unidentified
MNKTQSGNLQQPKTKSKRRRRNKGMCLEDRPVLEPNAAGIDVGAREMFVAVPPGRDEKPVRVFATFTEDLERLTDWLEQCGVTTVALESTGVYWIPLFEILEQRGIRPCLVNARHMKNVPGRRTDWHECQWLQFLHSVGLLRAAFRPGQDVCAVRTVLRHRNELVAAASQHVQHMHKALTQMNLQIHHVISDITGSTGRAIVDAILAGQRDGAELAKLRDPHIKADTETIRKSLEGNWRPEHLFTLGQSRDLYRIYQQQIVNCDLEIEKMLRGFEPRTDPVERPLPPDRKRNRAGSKRRRKNGHPHPEFDLRTETYKLFGVDVTQIPGVEENALPLFSEVGRDMSRWPSAGNFVSWLALCPDNDISGGKLLWRGARKIKNRAGHLFRMAAFSLHHSLTPLGNYLRRMKAKLGPKAATVATAHKIAVIFYTMVKKRVEYDETIWDTRDAQREKRLEAKLKRQAKQLGYELVPIEPQAA

SEQ ID NO: 166157 - protein, 412 aa, unidentified
MQTLIERGCGLDVHQATVVACLLMVRRDGKVQKQVRTFGTTTRELVSLREWLRSEGCTHVAMESTGVYWKPIYAILEGALEIVVANAQHIKKVPGRKTDVKDAEWIADLLCHGLLRSSFVPPKPIRELRDLMRYRRKLVESQAAERNRLLKVLETANIKLANVATDVFGMSGRLMLRALIQGKATPQEMAELAKGLLRKKIPELQLALEGKLEEHHRFLLELQLQRLEAAERDLAVLEQRIRQMLEPYAAQLALLDEIPGVDWTLAAVIIAELGVDMSVFGNVSQLASWAGVCPGNNESAGKRKSSRIPSGNVYLKSGLVEAANAAARAKGTYLRDKFFRLKARRGYKRAVVAIAHKILVAIYHMLSQQVSYNDLGDLYLDKLNKNHLTRNLVHRLERLGYAVTLTLQQKAA

SEQ ID NO: 166158 - protein, 371 aa, unidentified
MNHVTSIGLDVHARSVTAVALDSITGEVRSQKFGYSPAEIAGWILQLDSPKAVYESGVTGFHLVRELREMGVDCIVGAVSKMHKPASDRRKKNDRNDAEFLARQLMAHNIVEVFVPDVETEGARNLSRALEDIRDDLTRAKHRLTHLLIRWGYIWNEFNEDGKRRGSWTHAHWEWIRGIELPDAAARESLDYYISEVRHIESQKKAIEKRVAQCASRPRWRDRVEALRCMKGIETVTAFALTVEAGVFSRFDSARAFASWLGLVPSEHSSGERASRGGITKAGNSHLRKLLVEASWHYTRATKERKRSLYDESVPAPISNHAAVGVKRLVERRRHLSCELRKRPVVANVATARELACWIWALGRMSEGALA

SEQ ID NO: 166159 - protein, 611 aa, unidentified
MTSMNQDRRRGRVVIGVDTHKYVHVAVALNDFGGVLGAEKFPADTAGYRQLIDWATTHGHLLTFAIEGTGSYGAGLTAAVRRRDVGVIEVMRTDRRDRRLRGKSDFLDAENAARAVLAGHADAVPKSADGVVEMIRTIKVAKDVAVKARTSAMISLKAILVNAPTALREQLQPLSKMALIHRCAALRPGSLTTVEAATKHTLRSIARRWEALNDEITAHEKLLAELTAAAAPQLGAAFGIGADTAAEMLIVAGDNPERVRSEPAWARLCGVAPIPASSGRTTRHRLNRGGHRQANAALYRSVIVRMQHHEPTKAYVARRTAEGKTKAEIIRCLIGGVSPVRLGQRLAVAPRSCRGMASLPRQLLMASLSTASLDAPRPSTGVRDMPDTGPNNEGPAKGLDTAESTTDSDGRQGMSYVGWDWASRTHDVTVLDDDGGVRDRWAFEHTESGWTSTLHRLRRHGEPHELPVIIERTSGLVVDRLLGAGHPVVPVHPASFYAARPRWGASGAKSDPGDSYKLADYLRTDGHRLRRLEPTESGLRELQALVRLRDDQVRARTAATNQLAATLDAHWPGPRDLFRSLASPIALAFLTDYPTPQAAAHLGEVAGASQL

SEQ ID NO: 166160 - protein, 425 aa, unidentified
MFDAAGRLIPIRRSVLLTKHGWYVGIDWGSEKHRACCLSAAGKLLEWRWAEHSGEGLAGLVDWLMGMSEHQPTRVAIGIEVPRGAIVETLVERGFAVFSINPKQLDRFRDRYSPAGAKDDNRDAMVLADALRTDQHCFRQVRLDDPEVIRLREISRLEEDLSQDFYRLANQVREQLWRYFPQLLQLAALPEEAWIWDLFEMAPFPGKAAKLSLPKITRVLKKHRIRRFDAGQIHDLLAVAPVFVVPGTAEAASERILILLPRLRILQQQLSDVAKRIERILEEMGAAGPDCQPGEHCDATILLSLPGVGRKVSATVLSEASQALADRDYHGLRCLTGAAPITRQSGKKKLVFMRYACNQRLRNALHYWASGSIQFDPRSKQMYQEMRDRGLHHNRALRGIADRLLEMMISMLLHRTMYDPQRRVA

SEQ ID NO: 166161 - protein, 347 aa, unidentified
MDHIGMDVHKKESQICILTEEGELIERRMHTEPQRFAAVLGDRPRARILIEASTDSEWVARCLEALGHEVVVADPNFAPMYATRTRKVKTDRRDARALAEACLLGAYRPAHRLSDPQRHVRGRLLVRDALVRTRTRYISLIRALLRQHGYRVPSGSAEAFPHRVLALALPGRLLSQIAPLLAVMRHVNHQLVYSEHVIEDVTAHDERVQRLRTVPSIGPVTAAAFVATIDDVRRFRRAHQVEAYLGLVPRELSSGESQRRGRITKAGHARMRWLLVQAAVSILRRRPPQAEALRTWALHIAARRGKHVAVVALARRLAGILYALLRDGSVFAPRRSPQPGAAATVAA

SEQ ID NO: 166162 - protein, 390 aa, unidentified
MDVLYQSCAGIDVHQANIVVCILHGPLTSTRPKREMATFDTTTKGLRACHDFLSQFHVEAVGMESTGVYWRPVWHALCDDFKLILAQPAHMKAIPGQKTDKKDAHWVAKLTRIGLLPRSFVPDEAIQELRELTRQRKHYVESRNRETNRIHKILQSGGIKLTTYIEDIMGLSGRNLLQLLVDGTPITPRIVHQSVYTSLKKKVPQLLEALDGYFSDHHRFMLKQSLEIYDFYQKQIELLEERMNVYLSQYENHVEILDSIPGIDVITASVIISEVGVDMSQFPTAGHLASWAGLCPGNNESAGKKRSTKIRHGNSYLKKCLCQAAFAIKKQKGSPLADRFYQIQSRRGSQKATIALAHQLLKIAYILLKEQITYPEFLAQKKTTRDELVA

SEQ ID NO: 166163 - protein, 369 aa, unidentified
MKKDITHVALDDSKKSIVVGVLRPKATVPELRQIPNDPKQLRRFVTRLQQEGPVRACYEAGPSGYDLYRQLTALGLPCQVMAPALTPRKPGERIKTNRRDAAKLVRLFRAGELTPIRVPDEAQEAVRDLLRCREDVQEDLLRWRHRLLKFLARHGRSYREGRNWTQRHWTWLRSQRFADPVLARTGQEYLCTVEQLLARRAELDRELEAIAEQEPYRTPVGWLRCFRGFDTRSALGVLIEVGDFPRFSHPRELMAYLGLVPSEFSTGEDARRGSITKAGNTHARRILVEAAWHYRHPPRLGKALAHRSQGQPPAVRAQAWRAQQRLHRRYRHLVGHGKRPPVAVVAIARELVGFLWAALTQEPPAAAAA

SEQ ID NO: 166164 - protein, 418 aa, unidentified
MAMKIVRFNCCGMDVHKDLVVATIGITDRQSNITEYFQQSFSTLNSDLYRLKDWLNSYHCCDVCMESTGKYWIPIFNILEGEINVHLTHPKYVKAIKGKKTDKKDSKWICDLFKHDLIKFSFIPPKEIRELREIARYRYKLVCMRSSERNRYQNCMTVSNIGLASVVSDPFGKTASNIMKEVMKPNVIDDDKILKLIHKNCKNKDKILDSLHGYHIEADQRFKMEKSLNHMEYLDQLINSCEAELVKRAYPLRESFQHITQIKGISSLSAILIISEIGIDMSQFESDKQLVSWAGLSPANNESAGKKKSVRISKAGQYLKPLLVQCALSTIKDKTSYFGRKYSNIKKRRGHKKAIIAIARMMLVSIYHMILTGEVFQPTDYESFMNPRSDTKQSLTVEEALNFLKQSGIDISSIQINL

SEQ ID NO: 166165 - protein, 342 aa, unidentified
MDHFAGLDVSVKETSVCIVDDTGKLVREVKVASEPEALLSVLKSPAYRFKRIGLEAGPLSQWLLSALAEAELPVVCVETRHMQAVLKAQINKTDRNDARGIAQMMRVGLYRPVHVKTLRSQKLRMLLTHRKLLQSKAIAIDNDLRGTLRNFGLKVGMVGTVKFEARIKELVENLPDLAVLIEPLLVVRRALREQFVILHRRLLAIVRDDEVCRRLMTTPGVGPVVALTYRATVDVPARFRKSKSVGAVFGLTCSKYQSGEIDRSGRISRCGDEMMRVMLYEAAQSMLWSKKWSWLKAWAMQIARRRGMKKAIVALARRLAVIMHRIWVDGTEFRWTREVVAA

SEQ ID NO: 166166 - protein, 596 aa, unidentified
MLPQPAPAPQPPRRVGVGIDTSRYGHYAAFLRDDLQPAAPELQFAESAAGYALLRQRLECIAQRHPPAHFVVRLDAAGQYAENLPHFLHRLATPPADPLAPAARLALTISCGDPQRNQNYRAAVFGPQKSDPVAARAAARFALTERPGRDRPLSLPLRTLRQVAGRLQAVVRQRTRLINQFHHLLALTFPELALQTRDLAAGWVLELVHRYPTAVCLAGASLADLLDVPYLPDAQAGPLLEHARASVASLGGAATEELVRDHVRQLRDAGARQKRLEKLLVSAYQTLPRDNHRATIPGIGDVTAAVLTAFVLDIDRFATPGQLVAYFGVLPIEASSGVDREGQARGPRRYVMSRRGNDLVRRYLWMAALSAVRYNPAVRALYARVVAKHPGRKAIAIGHAMRKLLHLAFAIWKSGRPFDPGHYPWQAPGHVETRGQDKGTEEEAGGKGPAEGDQAAGHRPDTQPARQVVTAACADSVAGAVPFGEATAIDFAHRKRQLPIARALDQLGLSDRLRGRGPQRRCACPLHRGDARGRSFSVNLEENVFQCFDRQCGRKGDVIDLWAAAHGYALREAALDLVRTFGLEPTPRSGTEKRNG

SEQ ID NO: 166167 - protein, 422 aa, unidentified
MLLFIGDDWAEDHHDVELQDETGRRLERVRLPEGMAGISRLHAMVGRHAGDAEDVQVVVGIETDRGMWVQALVAAGYQVYPVNPLQAARFRERLGVSGAKSDPGDAHTLADVVRTERHQLRPIAGDSDTAAAVKVAARAHKSLIWERTRHLARLRHALLDFFPAALAAFDDLDAPDVLELLGKASDPDAAARLSRAQVRAALKRARRRDVDAKTERILAVLRAPQLRQPAPVTAAYAASVRAQVAILTALNTQIQAMQAQVDAHFGQHPDVEIYRSQPGLGVILGARVLAEFGDDPDRYAEAKARKNYAGTSPITRQSGKMRLIRARYVHNDRLVDALNHQAFAALRVSPGARAYYDRQRARGVSHHAALRQLANRLVGILHGCLKTHTCYDEATAWPGQEPRPRQRGQRRAPSGTCILSPG

SEQ ID NO: 166168 - protein, 347 aa, unidentified
MKHYAGIDVSLNSCSVCVVDESGKIVREVKVASEPVALIHCIKSLGVRVERIGLEAGPLSQWLYGALRESRLPVELLETRHVKAALSAMPVKTDRNDARGLAQLMRLGWFRPVHCKSMAAQEVRALLTARKLVQSKLYDIEMSLRGILRGFGLKVGPTTSRSFAARINHLTAGHPSLEMVAEALLSTHAAALCAFKNLEKNVRQISRADARVRLLMSTPGVGPLVALTYVSAIDDPKRFTSSKRVGAHFGLTPKKYQSGETDISGRISKIGDSTVRAVLYEAAHIILTRPIHGGALKSWAMRLAKRAGMKKAKVALARKLAVVLHRMWVSASTFDFEKANGCMRAAA

SEQ ID NO: 166169 - protein, 455 aa, unidentified
MEKKKLSLQVVNLHAAGIDVGSRSHVVAVDQNKENVRSFGVYTKDHELLISHLTDHGITSVAMESTGTYWQTLFNALQRAGFEVMLVAGSQTKNVQGRKTDVIDSIWIQKLHSLGLLTGSFLLSDVLQELRTYFNHRQHLIEQIARYTVKMQKTLRLMNIRLDIAIRDVTGRSGITIIEAILAGDRDPSHLASLVDIRTKRAKEEIASSLHGSWREEFLFELKAYLNFYKFYNQALVECDSTIEQLLIKYTPNLPVTQEQEKILKGYNRKKTKNAPEFNVSKIAFQYFKTDLFAIPGISHNTVLCLMTNLGNDIIKFPSAKAFASWLRLVPNNKITGGRIISSRSKPGKNYIATALRNAANSIGNQKDHDLSPFFKRIAFKKGRVAAITATARKLAVIIWNMITKTQPYSKTEVQLNNERYRKIKLRQVQKNISSLQLNREELTKLFERTLILAY

SEQ ID NO: 166170 - protein, 372 aa, unidentified
MKFTTKFIGLDVSKEKISVAIADEGQAKPRYYGTIAHTPAALRKLIKELGPANSLSFCYEAGPTGYETHRWIESMGAHCVVIAPSLIPKRAGDRVKTDRRDAEQLARLFRAGELTPIYVPAREDEALRELVRAREAAKEDAHRARQRVLKFLLRHQIHRPEHIKRAWTKKYRVWLSQVTFPQPPMQTAFTEYLHTLREVEERIGRLDQALIDEAATHPKAEMIRILQSLRGIGFLTAVTLVSEIGSFARFSSPAKLMAYLGLVPREHSSGASTKRGSLTKTGNGRLRRILIESSWSYRHRPAIKGDLALRLEGVSADVQLISWKAQNRLHTKYRRLIFGKHKHPNVAIAAVAREMMGFIWAVARTVEQPNAQ

SEQ ID NO: 166171 - protein, 342 aa, unidentified
MSINTLGIDLGKTVCHMVALDEGGQILFRRKLRRDQVLRMTANLPACRIGLEACCGAHHLGHRLSAQGHDVRLMPPEYVRPYVKSNKNDDRDAEAIAEAVGRPTMRFVPLKEEAQLDLQAIHRARERLVRDRTALINQVRGFLFERGITVPQGRLSLGRRLPEILRDDTLGISPRIRLLLSDIRAEWQELDRRIDAFDRELAECARRNDKACRLIEIPGIGVTIATALVAAIDNGAAFSRARDLSAWLGLVPKQHTTGGRPRLGGISKRGNVYLRRLLIHGARSVLPHLAEQSSPVGCWLRGLLSRAHRNVAIVALANKMARIAWVVLRTGTHYEAQALPTA

SEQ ID NO: 166172 - protein, 344 aa, unidentified
MGEVSTIGLDIAKSVFQVHGVDDAGAVTIRKRVSRSKMLEFFADLPRCLVGIEACPSAHHWGRELQGLGHTVQLMPPSYVKAYLKRSKNDANDAAAICEAVTRPSMRFVPIKTKEQQTALMLHRTRQLLVRQRTMLSNALRGHLAELGIVSTKGRNGAGELLRIIADAADNRLPATVRGILDVLARQYLAIGTEIGSVDKSILALHRSCEASRRLAEIPGVGPIVATALVAEIGDWKTFSSGRSLAAWIGLVPKQHTTGGKDRLGSITKQGNRYLRWLLVVGAMAVIRYAKMHGTKNRPWLGRLMERRPTKVAAVALANKIARMAWAIMVRGERYKEPKLLLAA

SEQ ID NO: 166173 - protein, 419 aa, unidentified
MSFKIIKNNCCGLDVHKTWIFACIGITDSRSRTEYKQARFSSFSKGLQELCDWLAKYNCTDVCMESTGKYWIPVFNILEQRSLWVTLSHPKYTKPMKGNKTDRKDAKWICDLYMCGMVKPSFIPPADIRELRDLVRYRFKLTCMITGEKNRAQNCLTVSNLKLDEVFSDVFGKSSRSITEQILQHPGETFDVAPFVNSRCKTPIVEIQAAIDGAISKEQAVKLRQCLDHIDELNKHISEVEQEILRLSDKYEEALILIRTVPGFDKNPMTAIQVLSEIGGDMSVFPTAKHLVSWAGCCPRNDQSNQKIKSTRISRAGSYFKPVLVQVANALIKSKKNPEFTTRYRRIKARRGHKKAIIAICRMLLTAIWHILTDLKPYTPEGFLESRPVNDSKVLTTSQALNLLKQRGYIIKDNTIPVT

SEQ ID NO: 166174 - protein, 443 aa, unidentified
MSTYVGIDVGSEEHTIYTIEKEGDDPVSQTTVSNDKDGFESLKEFMRENSTGSIHLGLEATGNYWKPVFDYLMGLREKLDITLSLINPNEIHQFKKMDLSRVKTDSADAKAIARYVLRFEPKSTPRTNERLRSLRRLCRYRASRVEEKTRLLQQLNEVLVGAFPEYSECFSKLSAVSSIALLREYPGPKEIAKLDVKELANLRYGKINHKLGEEKAKKLIDLAKNTVGEGYGPEIEITIQHLAQQLSSVKREVEDLDEEIEDSFEEIAPNKLTTIDGIGPVNAAVMTTEIWDVNRFATATKLNGYVGAYPELSESGNYEDPHPDMTKKGNPRLKCAVFTSTMSAVTCNPVIKRHYEKQLAKGKDRMVAIGSCMRKLVHIIYGILNSGQEFDPDYEEKRRKKEEGRTRKPQSGNYPEDERSSGFSPENNNEKRRPNYQLAGGET

SEQ ID NO: 166175 - protein, 367 aa, unidentified
MKQVTTFVGIDAHKKDLFIAMLIGDQSTPVTWQLANEPNAVRRLVRKLEREAPGPVRACYEAGPCGYALQRQMTTTRVSCQVIAPALVPRKPGERVKTNRRDARKLVELLRAGLLTEVRPPTPEEEAVRDLCRARDDARTDLQRCRHRLGKLLLRRGLHYSGRNWTRAHRQWMASLTWTHAAERVVVEDYLLAIDQVEARLRELDAHLTETAQTDPYREPVAWLRCFRGIDTLTAIVILAELHDFRRFQSPRAFMAYLGLVPGEDSSGEKHRRGRITRTGNTLVRRLLVETAWHYQHRPTVGIALTRRRKGQPGRVIAIADKAQQRLCRRFRKLAAEHKPAPKIAVAIARELAGFLWAALQPPVVAN

SEQ ID NO: 166176 - protein, 449 aa, unidentified
MSRPQVIDDEQHERVHERVAAVDVAKDSGMVCTRTRHPSRPGARRSTVWTVKARMGAVRALGRQLHKDGIEIVTPESTSDYWRIWFFILEACGLAVQLVNAAQAKNLPGRPKTDKLDAQWLARLTEMGLLRASFVPPKAIRDLRDYTRARTRLIRERTRCWQRLEKLLEGALVKVSSVASKLTTVSAQDMIKAMIAGERDPEVLAGLARTRMRAKRDDLVQALDGMFDDHHGELAGMLLDQIAFLDGRIAQLSARAAELTAAMPEAWGINADGTTGPDAGAAPGAPVLPAVARLAEIPGISDDLARAIIAETGLDMSRFPTAAHLVSRAGLCPSARQSGPRIRAGKKGQGNGYLRGSLGQAATGAARTATFLGERYHRIARRRGKAKAQVAVARSILVIIWHLLAGPAARYTDLGASYYQTRTDTDRKLRNHIRQIQALGFEVTLTKTL

SEQ ID NO: 166177 - protein, 369 aa, unidentified
MNKNILFIGMDVHKESIEIAIAEGGNQEVRRYGKIGGTQDAMRKTLRKLVSLGKSLHFCYEAGPCGYELVRYLVSEGHDCWVVAPSLIPKKAGDKVKTDKRDAIQLARLFRAGELTPVYVPNREDEAIRDLSRAREDAMLVQKSARQRLKSFLLRHDIRYQGKTSWTEAHLRWLADEVRCPSAAQQIVFQEYVNTVTESSHRLQRLNEQIGIFVKQWRLYPVVEALMSMRGVKMVVAVTVISELGDLSRFDNPKQLMSFLGLTPSEHSSGPRQSRGRITKTGNGHVRRILIEAAWCYRYPAKVSPEIQKRQEALPLAIRNIAWKAQLRLTQRYQHMQRKGKPHNVTVVALARELAGFMWAIANEVKYPR

SEQ ID NO: 166178 - protein, 350 aa, unidentified
MEHHAGLDVSLEETSVCIVDGAGKIIRETQVASEPEALVGYFSALEIKVVCIGLEAGPLSQWLHAALTEAGFEVVLLETRHVKAALSAMTVKTDRRDARGIAQLLRMGWYRPVHCKTLPSQEVRAIITARKTLLGKLIDIELSMRGILRGFGLKVGAVTRKSFEIRVRELMEGQLTLTAIMEGMLNSRATLITEVSKLHKAILRIARADGVCVRLMTAPGVGALTALIFKTAIDDPTRIAKSRDVGPLFGLTPGRYQSGETDIIGRITKVGDVMVRTALFEAATVMLTRSTKKSQLKSWALDVVKRRGIKRAIVALARKLGVVLHRMWVDLTEFRFAKEEAAVPALITAK

SEQ ID NO: 166179 - protein, 410 aa, unidentified
MQTLVERGCGLDVHQATVVACLLMVLKNGKVYKEIRTFGTTTRELLALREWLLSQGCTNVAMESTGVYWKPVYAILEGVALELVVANAQHVKKVPGRKTDVKDAEWIADLLCHGLLRPSFVPPPSIRALRDLLRYRRKLVESQAAERNRLLKLLETANIKLASVATDVFGMCGRLMLRALIEGKATSQEMAELAKGLPRKKIPQLEQALEGKLEEHHRFLLHLQLDRLEAAEKDLAVLEQRIQEKLRPYEAQLTLLDEIPGVDWTLAAAIIAEFGVDMSVFGGTSQLASWAGVCPGNNESAGKRHNSRIPKGNVYLKTALVEAANAAARTKGTYLRDKFYRLKARRGYKRAVVAVAHKILVAIYHMLSHKVRYHDLGDLYLDHLNKHHLTRNLVRRLERLGYTVTLELAA

SEQ ID NO: 166180 - protein, 346 aa, unidentified
MDQIIRIGMDTSKHIFQLHGVDSAERPVLRRKLRRSEMLAFFAKLPPTVIGMEACAASHYWSRELRKLGHQVKLIAPQHVKAYIKRNKNDGRDAEGLCEAMSRPTMQFVAAKTEEQQAALMLAGVRQQLITRRTQLSNAIRGYAAEFGVIAVKGLVKVEPLLAQIGQDESLPVLAREMFTLQGRDYAQLQVELKAVEARLMAWHRANPDSLRLAKIPGIGLIGATTLVMKAPDPQMFPSGRHFAAWIGLTPKDHSTAGKTRIGKITRAGDEMLRSVLVAGATAVIQQAKKGRGRPSPWLLALLARKSPKLAAVALANKTARIAWKLLTTGEDYNGARMPVASALAA

SEQ ID NO: 166181 - protein, 341 aa, unidentified
MSESALIGIDLGKHTFHLHGQDKSGREVFRKKCSRAQMMQFFARSPSCVVAMEACAGSHYVARQLAAMGHAAKLISPQFVKPFVKGNKNDFVDAEAICEAASRPSMRFVTPKTESQQTLSVLHRMRESLVRDRTRTANQMHGFLLEFGLSLPRGLAIMKRLAVVLAEHELPVRLTVLLQRLHNHFVYLDEQIKAMDKELACQLADDDLGSRLLSIPCVGPITASLLAVEMGDGKQYRCSRDFAASVGLVPKQYSTGGKAHLLGISKRGNKHLRQLLVQCSRVYMQRLDHQKGALADWVRSLLSRRHSNVVACALANKLARIAWAMAAHHTQYEAGPDALNA

SEQ ID NO: 166182 - protein, 353 aa, unidentified
MIMIGVDAHKHIHMAVALNERGQVVGQWQGDNSADGWDALAWWALTLDEERRWGIEGGGGYGRGLAQHLVAMGDRVYDINPRLTATERRRSRRMDKNDACDAQAIALVVQREEDKLPCVAAEDETAALALLAAERDDAQAEATRLRNRLHHLLLQLDPEYHLHLPALTSVAGVQAAETYTTTSGSLVQQERAAVVRRLAGRLRLAMEQVAELGRRIEALAQARYAPLTCLCGVSLLTAGSLAGILGPGRRFASEAQLAAYAGVAPLETSSAGRVRHRLNRGGNRRLNAIVYRIALVQARWSPEAKAYLARRVAEGKTKREAFRALKRYLVRAIWRLWQECLSPAGVEPAYHTA

SEQ ID NO: 166183 - protein, 353 aa, unidentified
MQCIAFDSHKHYTWALVQDETGKVLREQRINHMRGALQGFLEEFEPGSPVAVETIGNWYWITDEIEAAGMVPRLVNARRAKLMSGSIDKTDKLDARGLNRLQRSGTLPTVWIPPKELRDARELPRTRMVLVRQRTKLKNRIHANLAKYGLKTEGVTDLFGVRGRQILGQCLEELPVQTRYATEALLDELDHLQAGIEEFEGRMGDVFGEIAALEIVKTLPGVAFILGVVILTEVGHVQRFPNSSHLASYAGMTPRVHSSGGHTRHGRTRPDVNHYLKWAYAEAANVAMMHRRRHPQRHVSRLYERAKRRRGHPKAIGAVGRHLAEATYWMLTKQEPYRDPATNRVEAESMREA

SEQ ID NO: 166184 - protein, 342 aa, unidentified
MEYGAIDLHTMKSEIRVVQADGTVVLETRIVTSREQFARVFARPVMRIVLESSTESEWVAQTLEALGHEVIVADPNYLPMYGARSRKIKTDRRDVAALAEACRTGLYRRAHRVSAAARDLRRTLRVRTQLVRARTSAICLVRAMLRQEGLRLGTGTAERVLDRLDRVALPPALTTILTPLRAQLQALQTELAQLETTLTAQARADGRVRRLMTVPGVGPLVALHYVAVLDTPARFGGSAARASAFVGLVPSEDSSAERRLKGHITKAGPRDLRALLVQASWVIWRSRTEDARAWREWAHALAARRGRRIAVVALARRLSRVLYALWRDGTDFRAPRRPATAA

SEQ ID NO: 166185 - protein, 345 aa, unidentified
MKIVGCDLHTRYQQIAMLDEETGELIERRLEHANGEAKEFYTQLTGAVRVGIEATGHTRWFEQLLAQLGHELWIGDAARIRASEVRKQKTDARDAALLLDLLLSSRFPRLWRPAREERDLRHLLWHRQKLVWMRNAVGNQLHALAMGEGLCRKKQLFTRKGRCELEALKLDKWASRQRQELLHMLDQLDASLAQFDQAVNEQAAANAEAVRLMTHPGVGPVTSLAFVLIVGPAARFERSKQLVSYLGLNPCEHSSGGKQKLGAISKQGNPMLRGLLVEAGHTAARMDSELRQDYQRLRLRRGGSVAKVAIARKLAVRMYWMLRRQVNYTQLVRTQGSSRATLVQQ

SEQ ID NO: 166186 - protein, 354 aa, unidentified
MGSNGITWVGLDAHKKWINVAMLVPGREEPLSWQEANEESAVRRLARRLNREAPGEVRSCYEAGPLGYALQRELEAQGVICEVVAPSLIPIKPGERIKTDWRDARKLAELLRAGLLTEVQAPNESDEALRDLCRGRDSVRQDLMRARHRMSKLLLRRGYRYHDTQRHWGVRHMKWLRPLRFEHAAAQAIFDHYLLTIDHLDERLRQVDAHLEHFGDQEPYRQPVAWLRCFRGIDTVTAVSLVAELHDFRRFRSARALMAYLGLVPGEHSSGDLFLAFSTGNRVPHYPKPLTYTLTVVADDHLDPIFRAAEEATEEAILDALAMATTTVGRDGHTAHALPLDRLVEVMKRYGRLR

SEQ ID NO: 166187 - protein, 407 aa, unidentified
MPRYYMGVDWADQTHAVWVGDEHGTPVFERTVPHTADGFSDWSRWLYECQAAGIEVWAAIERPDGRVVEFLLDHGVSVYPINPKALDRARDRFRMSSSKSDPFDARVLAEFLRTDQGHLRPLQPNTEAAQELKLLTRDYHRVVRQQTRLLNQLTATLKEYYPQPLHVFEDVTTQLALDFLRTYPTPTALAALRPREWARFARGHRLGEARKAAVWEALQQPTIPVPAHVVRAKACLVQVLVAQLDTVVSAIARYQAEIDRFFAALPAAEWMNSLPVGHHGMMVPTIWAELGDAPDRWQSVTHWQAHAGMVPVTERSGKQHVVRFRFACNSHLRYALDRLAFCSLQRSEWARAYYRRQRRLGHSHHRALRALGAKWAKIIFVMWRQHKPYEEQYHLATMAKQHLRQVA

SEQ ID NO: 166188 - protein, 324 aa, unidentified
MDESIIGIDISKQKFDATIFLKDGKQRHRVFSNIKEGFEQLKKWLEYLGVKEAHCCMEATGCYGDPLAFFMHEKGYKVSIVNPARIKAYAKSEGARTKTDKVDSQIIARFCKAHRPLLWAPLSPAEQQLKELYRCLQSIQEDRGRLSNRLEKIGKKTTFISKVWQDLLMLVEQKKKDVESQIYDLLQNNKELRVQVDLLKTIPGVKDKTAVAILSELPNIKNFKNAKEAAAFAGLTPYVRQSGTSLRGKGVLSKVGSPQLRKALYMPAIVAKNHNPLLKEFSARLSKKGKHSMTIIAAVMRKLLHIIFGVLKTQKPFTSSLKGA

SEQ ID NO: 166189 - protein, 334 aa, unidentified
MKSDICHIGVDVSKEKLDVFVPAKKEGLRPVTTTLDNGIEGFRELRNLARKAKGTVCVEPTGGYELELIAFLHKFNVPVAHADALRVRQFARAEGNLSKNDAIDAALISRFADKIGARIIEAQDVEAVELKRKTKFRQTMVDSRTALINRLETEVDAEMKTLLKEQIRLMNRIIEKAERLCMDTVKKNERMDETRDRFTKIGGVGDLTAISILSGLPEIGMLSDAKLNRLVGIAPEEKQSGTKEWQRRIWGGRKDVRNALYMAAVASIKWNAVLGSYYRKKRAEGHPHKWAIVPTMRKLLSLLNRIARDPSFTPKPEPESTKLNANVGRRKKAA

SEQ ID NO: 166190 - protein, 440 aa, unidentified
MQPDAAGIDIGAQEVFVAVPPDRDCEPVRRFGTFTRDLHEMAEWLERCRVRSVAMESTGVYWIPVHQILEQHGFEVYLVNARSVKHVPGRKTDVSDCQWIQHLHSVGLLRASFRPPAEICAVRCLWRHRDSLVQMAAEHVRHIQKALDQMNLRLHHVLSTVTGLSGMAILDAILAGERNPLRLAELCHCTVRSSRDTVAKALEGDYRPEHLFALRQSVSGYRYYQTMLLETDTELRKVLRELPTSENAQPKVPAQTKKRPPKRQKNEPVFDLRSELYRIVGVDLTDVPGISVVTAHTIVSEIGTDVARFRNASAFASWLGLCPEKAVSGGKVLYTRSRKVKNRVAIALRSGAQCLYRAQSYLGEFYRRMKRKLGGPEAVTATAHKLARIVYHMLRTKEAYNESVLLKSEEDLVRKAELRLRRHAAKLGFQVIPANPEPAA

SEQ ID NO: 166191 - protein, 334 aa, unidentified
MLYLGVDHHMKTSHLTVTDESGQILKRKGIATRQDELLKALEEFEGEPIKAVLEASYSWGKMFDWLGEVADDVILAHPQKVRAIADARIKTDAIDSETLAHLLRADLIPEAYACSAETRAVKRVLRQRMFLVRVQTMFKNRIHATVNQHDLSRPKVSDLFGAQGMSWLSSIDLPYPDNLILSEDLRFLSEVRARISATEGLIRDLSRGDQAVKLLKSIPGIGDFFSVLIRYEVGDITRFRSPDKFASYTGLIPSTYSSGEKTFHGKLTKRGNKYLRWAFIEAVRPAVMTSPELRAYHDRIRRRKSAGDARVATARKLACITWYVWTEQRLYEIR

SEQ ID NO: 166192 - protein, 357 aa, unidentified
MKIVGCDLHARQQSLAMMDTETGEFTEKTLLHEGNAVREFYAALGSPVLVGIEATGAMQWFLELLEELDIKYRVGHPAKIRAQETRKQKHDRRDAGLLLRLLSEDRFPEIWMPSSEQRDLRTLLRDRDQWVRMRSRVQHTLQGIALNHALRKGRGLWNAAGQSALQALSLPPYTAQRRNQLLGMYGYLQKRIQQLDQEVESQARERLQARRLMTHPGVGPVTALATEVFLGDASRFTTGKEVASYIGMIPCERSSGKRQRLGKLTKEGNKLLRYLWTEATMRAVEKDEELNRFYRRKLVQKGMGKARIAVARKLGIRLWIMLSDQIDYAEFCRRGHLRQKGKAHAGMPELQHGPATQ

SEQ ID NO: 166193 - protein, 484 aa, unidentified
MCPRMTNHQWGAYDAFSFSFASAGALAFANECSGSAVLPAHYIAFAERQLGLSRLIRLISPEVSMAHPPTQEFAAFVGIDWADTSHAVCLQAAGSDTRESSVLAHTPGAISAWAAALRHRFGGQPIAVCLELTKGPLVSALRAHDFLVLFPVNALTVAKYREAFTPSRAKDDPSDAELQLELLVKHRDKLQKLSPQSATMRTLDQLVEFRRRLVEDKVRLTNRLTSALKNYFPQVLHWFADKDTTIFCDFLTQWPTLKAVHLARRATLERFFRQHHVQTRIIAQRLEAIQTAVPLTTDEGVVTPHVCLVRALVAQLRATLQAIEDFDRAMAQLAPTHPDFALFQALPGAGPVFAPRLLVAFGEQRERYTSATDLQQYAGIAPVTERSGNTCWVHWRLQCPKFLRQTFVEWASESIRHSFWARAYYAQQRARGKTHQAATRALAFKWIRILYRCWQTSTPYDESTYLNALVRRGSPLIRHLASAS

SEQ ID NO: 166194 - protein, 344 aa, unidentified
MITIGIDPHKSSHTAVALDADGHSLGELRLPATRTTAERLLRWAGRWPDRTWAIEGASGLGHLLAQRLVAAGEIVLDVPATLAARARLLDRGHGRKTDALDATCAARVAMSQPGLRRVCPEDHTAVLRLLSDRRDELTGERRRVVNRLHRLLRDLRPGGAPTDLSTAAAARLLGRIRPTTAVDLERKLMARTLVAELRRIDRALAENRTRCASAVAASGTTLTAIFGISDVLAAKILGHVGDVDRFPSDDSFASYSGTAPIAVSSGEVTRHRLSRNGNRALNNALHLAARVQTMHPGLGRDHYERKLAEHKSSREALRSLKRLLAKVVYRRLVADHAHRPALAS

SEQ ID NO: 166195 - protein, 331 aa, unidentified
MTSLPNRTNDAPLSVGVDVAKATMEVGFSDRDATLAPANDEAGHAALLAQLAELRAQGLRVGLVVLEATGGLEIEVATALQLAGYAVAVVNPRQARDFARAMGVLAKTDRIDARVLALMGQTLLQRADLARLVKPLPDEQQRMLQAMVTRRRQLLGMRIAEQQRASGPDKRMRRSLNIILKALDRELARVDKEMQAFIGEHHAELAALLDGVKGVGKATISTLLAEVPELGKLNAREVSSLVGVAPINRDSGTMRGKRTIFGGRPAVRKVLFMAALVASRYNPVIKAFYQRLLAAGKPKKLALTACARKLLTILNAMARTGKPFDAAIHLG

SEQ ID NO: 166196 - protein, 358 aa, unidentified
MVFHEKFGVLTPELERLASVLQEHEVNEVCMESTSIYWMPVWRVLEPYVVELKLVNPYFIKQLPGKKSDVKDAEWIATCLLKDLIRGSYVPADIIQQLRQYDRRISDLNAECVRKLCKLDAALQRCNIRISNYVSTTDGKSYKEVVRLISEGIRDPAALLKVIHGRITNRVGKDVIQASLTGVISDTDIDVIRQLREEVDLAQRHKDECQSKMDAICQQYFPEQLKNLQTIPGVKGRSATAIIAEVGSDVSSFQDAAHLVSWCGLKPRNEESAGKVKARSITHGNRYLRKTLIECAWAASKTQGCYLNKFSYYQTVVRRKNKMKVQVAIARKILTAVWYVLHDNVAYRDYNPDIAPAA

SEQ ID NO: 166197 - protein, 463 aa, unidentified
MFRPDITGMKPDNNDELAGLPILRPKVAGIDLASEIHWVCAPTVDGSGREVEKFGATTPELERMAQWLKERGVESVAMESTGVYWIAPHEVLESNSFEVVLVNTRELARVPGRKKTDRVDCMWIQRLHSCGLLTGSFRPPEQVCMLRTLVRDKRTLVAEAADWMRRMQKSLDQMNVRVHRAVSKIDGTTGMAITRAIVQGERDPLQLAKLRNQHCSKSEEEIAKELSGHWRQDHLFSLKQALKMYDTIQERIAEYEAETLRKLAEMERQDCRGQEPPKLKNRQKAYAIKKHGEDPMHEALFRISGVDLVAIDAIGVETVKVVISEYGPDLSRFPTEKQFVSHVTLAPHKPTSGGKAVKKKKRGSASTRVAEALRMAALSLRHSDTALGAYYRHIARRIAGDVAVFATARKLATLIYRMLRWGQPYVDEGAAAFENRYKQNRVNSLTAAAADLGFELTPKSAQA

SEQ ID NO: 166198 - protein, 401 aa, unidentified
MKRLSGGIDIGKDFHQMIILDDQEQVLYQKKLAHNLGEMKETIKELPCLEKKEKAKLSFALEGKNGYGNPLDRLLLQAGFTLYNVDNYKLKRFREAFPGEWRDDHRDALMLSKMLHLKEHINSERERVFVPITKPSVLTESLKLLSRHQQLLIDEKVRLTKRLGKKLMEVCPELLSLGKLKYQKIIAILARYPDFSRYHKITLDSLLKIPGIGKKQAPHLLAGLPALTYLPGLTSIYKTIISSYSKRILQLQKEIKEINTKMDQIRAGDEAVKHLKSIPGVATKLASRFLGEIGDISRFPSEKQLAIYCGIACVNNASGKSNKTKAMYKANKMAKQALVMMAGCSIRVNPQCRDYYLKKRKEGKAHNHALRCLARQMIKVIYRMLTEDRDYQIKKEYLQAA

SEQ ID NO: 166199 - protein, 403 aa, unidentified
MEQIIIGVDPHKLSATIEVVDKQEHLLGSGRFTTDQRGYTAMRSYVKTWPNRVWAVEGANGAGRPLAQRLVEAGEQVVDVPAKLAARVRLFDTGHNRKTDALDAHSIAIVAVRTKGLRVLAADGELEALRMLTDRRDELAHLRVQTVNRLQRLLSELFPGQRKKDLSALQAKAMLATVRPRDIAGKTRRRMAAEELADLVVVDGKLKKIKAELKAVVIARGSTLLEIHGIGPSGAARTLADVGDITRFADRNRFASWTGTAPLDASSGEQIRHRLSRAGNRRMNHVLHMAAIVQLRHDTQGRAYFRRKVAAGKTRMEALRALKRRLSDVLYRRLVADAQTRDRTAGDTGPGGHRGATQESSAADLSPHVGTSDKPLPGPARTTLRPPIRTQKTARPRVPHPAS

SEQ ID NO: 166200 - protein, 314 aa, unidentified
MQAVFIGVDVSRDTLVIAGSPGRQRWTIANEQSQIEQWLKDLPEGTSVAMESTGRYHQLLATLARDRGLRVYVLNPKRVWYAARGDGRRSKTDRIDAQVIVKFLRDHVDDLHEWNPGTPLLSKIAMLERRRQCIERHCTAMRLSLQGLEGLDQQLGQFLGSLKAMRQAIDDRIQALVKADQQLARKQALLTTVPAVGAMGAASMAALFARVPFKRSDSVVAFVGLDVRASDSGTYRGRRKLTKLGPAHLRRQVWLMGFAACHTKIYKPFYEAMKMRGLKSTEAIMILGRRILRIAWAVWRTDKPFEPQLVGKRA

SEQ ID NO: 166201 - protein, 388 aa, unidentified
MQDVAHRPVAATTIGSDLCAIFISLELSRSTWLVTSLSPGHGEKMSKHSVKAGDIAALLARFSKLRTKACARTGKSLPIVVIQEAGLDGFWIHRVLLSEGIESHVVDAASVATSRRRRRAKTDRIDGETLLRALLAYKRGEPRVCSMVRAPTPEDEDRRRICRERKVLIMERVQHVNRIKGLLFSQGVSGYEPLHRDRRAQLDALQTGDGRRLPQHLKAQICRELDRLELVLEQIKAVETERDALLNAEQTKVAAPPPMLLALHGVGPEFASVLWSEGLSRHFDNRRQVAAYAGLAPTPWQSGSINREQGISQSGNPRLRTTMIQLAWLWTRHQPVSALTLWFKDRNERTGGRRRKTTIVALARKLLVALWKFVSAGVVIEGAMMRPA

SEQ ID NO: 166202 - protein, 337 aa, unidentified
MVYGAIDLHLRYSHIRILDEAGRVLRERQVVTTAERVVAAFRDVGAVRVLLESGTESEWVAQALEGAGYTVVVADPNFAPMYGETRRRVKTDRRDVAALAEANRRGWYRPAHRTSAPQRARRQVLRARRYLVQMRTGTISLIRALLRQDGYRVGSGDSETLPARLARLDLPARLETTIAPLVRTLTHLTGEIGQLDTQLVDVAREDPVVRRLQTVPGVGPVVAVTFRAFVDDVTRFHSAAHVSAAIGLVPREDSSAERRHRGHLTKAGPRELRSLLVQAAWVCWRASRRRALGGWADQLAARRGKRIAVVALARRLSRILYAIWRDDTAFCQSPVPA

SEQ ID NO: 166203 - protein, 357 aa, unidentified
MKYIGCDFHPSFQQIAMLDKDTGELVERRLLHTEEARTFYEGLRGPVVVGIEASGNTHWFESVLARCQHELWIGDAAAIARQEGRKQKHDRRAAALILKLMLENRFPQIWVPTVAERDLRQLLIHRQHLVRMRTRVKNQLQHIALNQGWQKKRKLWSETGLELLRSLKLEPWTQQRRDTLLEMLEELEEKIRPLDLAVAKEAEACEAARRLATHPGVGPVISLATVLTMGDVRRFADSRSWVSYLGLNPSEESSGQRRRLGAISKQGNPFLRYLLVEGAASAARGDKSLARMYARLKAKKHHGVAKVAVARKLAVRLYWMARTQKSYPEIVRTQGSQSHSVAEVMADLLNRPPASHQ

SEQ ID NO: 166204 - protein, 402 aa, unidentified
MNAVGIDVSKSKSVVAIMRPFGEIVSTPFEIKHTASDIPSLIELINSVEGESRIVMEHTGRYYEVLAHQLLEANLFVSAINPKLIKDFDNDSLRKVKSDKADAVKIARYALDKWQNLKQYNVMDELRNQLKTMNRQFGFYMKHKTAMKNNLIGILDQTYPGVNTYFDSPARSDGSQKWVDFASTYWHVDCVRKMSLNAFIDHYQNWCKRKKYNFSQSKAEEIYGKAKELVPVLPKDAITKLIIKQAVDQLNSASTTVESLRTLMNETASKLPEYPVVMAMKGVGTSLGPQLMAEIGNVSRFTHKSAITAFAGVDPGVNESGTYEQKSVPTSKRGSADLRKTLFQVMDVLIKTHPQDDPVYQFLDKKRAQGKPYYVYMTAGANKFLRIYYGRVKEYLASLPES

SEQ ID NO: 166205 - protein, 413 aa, unidentified
MDVLHPRCCGLDVHRSSISACILLREAGRVQKHQRRFGAMTQELRELAEWLRQFDVTHVAMESSGVYWKPVWNILEGQFTVVLANAQHIKNVPGRKTDQKDAEWIAQLLQYGLLRPSYVPCESIRDLRDLTRMRASLSQEASRISSRIQKVLEDANVKLASVATNVLGKSGRAMLEDIISGEDDPEHLASLALGHLRVKIPQLRLALEGEIRSHHRFLLRRLVDQIQFVEHEIGLLDERLEEIAQQRPELSQAVARWDTIPGIDRVAAWTLLAEIGDNMAQFPTAEHLASWAALCPGNHESAGKRLRGTTRQGSPWLCRMACQCAWAAARTKNTYLSSQFRRLAARRGKKRAIIAVAHTIIVIGYHLQKNQSNYQDLGGNYFDRIHSDGLKRYLVKRLQQLGHKVTLEPMEAA

SEQ ID NO: 166206 - protein, 328 aa, unidentified
MSAFLGIDVSKATLDVCLIRDDGGVEQPQPFANHDGGIQQLCTWLIQQCHDEVHVCMEATGHYWSQVARRLLEAGYKVSVVNPLQIKAFRDTALSRGKSDAQDARLIAQFCYLHRPAPWIPFDAAQDQLKQLCRRRQALLKMRQQERNRLQSGVTESWVIGSLERTIAFYTDEIAAIDSHIRQHLKQHPHLWHAYQLLQSIPGIGVHTAPLLLAEIRDIRAFDRANQLVAYAGLDPQPHQSGTSIHQPTRISKRGNARLRAALFLPAVVAKNRSDYFQAFVERMEKDGHCPMSIVTAVMRKLLHLVYGMLHSGLPFDPLYRQKLALAT

SEQ ID NO: 166207 - protein, 411 aa, unidentified
MEIVFERCAGLDVHKETVVACVRQPSEGKLKRRGEVRTFSTMTRGLSELAAWLQSERITHVAMESTGVYWRPVYAVLEEQFEILLVNARHIKGVPGRKTDVRDCEWLAQLLECGLLRGSFVPPQAIRDLRDLTRFRKSLVHERADHVNRIAKVLEMANIKLGSVATDIMGKTGRAILEALIAEQDDPQYLAQLAQGLLKKKTEQLREAVTGRMRAHYRFMLHQQLKLIDVLDQQISELDAQIEHCMLPFAEAYGLLQTVPGVAKRSAQAILAEIGVDMSRFPSAAQLASWARLCPGNHESAGKRHAVGTGHGNRWLREILQEVAWAAARTKRSYYSAFYHRIRARHGVKKAIVAVQHSLLVAIWNMLTDSTVHQDLGADYFERRSKDHLRRHHVDRLKQLGYEVVIKKEAA

SEQ ID NO: 166208 - protein, 493 aa, unidentified
MVDKTINKSKVCLPHPLERSEPVDKGGRRTGFSFRSGLTDGDTHCQEEPVMSRKRRTHLRGKRGQAFADKIRGIPLDRILCVSLDIHKYFHVVMIHNALGEIVTPTFEIDIFQTGFYQLCQAVDEATVRTKAQVVLTGMEPTGHYFENLARHLCQRPQPVTLVNSYAVKKNRDQQMMHREKDDEIDTAAIGDLLRRGEGTPFNPASGVYLQLQHLDRVRFSKVKIRTMLQNQVLGHLDRIFPGLVIIAKEAKARYKPLFATNFWSCQTLQHLIRVCPDPRQLAAMSPQDLIDAFHAHHYAMGPVTAAKIITYAQKVLLPDAELIAIRCELLAHDLALLEEVEGHIAQLEARLRTLLAETPYQMWVKLKGLSDIQVASLAAAIGDPANYAYAAQVFRRSGLVSGRNDSGIRQRKGKGKRVVKVGDVYLRRALMGALATLLLHQPVLLQYFNKLKKSKPVGVARVATARRATGILWATLRDQHANTLILKKGAAM

SEQ ID NO: 166209 - protein, 344 aa, unidentified
MYHYAGIDVSLEYSSVCLVDGAGKILRETKVLSEPEALIGWFRSLGLACERIGLEAGPLSQWLYAAMRDAGLAVELLETRHVRDAFKAMPVKSDRNDARGIAQLMRLGWFRPVHCKSIEAQETRAILTARKLLQSKLRDVENSLRGVLRGFGLKVGATTERTFAERIRELVAGHPGLEVVAKALLEAHGVLRREFNSLDKQVARLARSHPQASLLMTTPSVGPIVALTYASAVDDPKRFRSSKATGAHFGLTPKKYQSGETDYTGRISKIGDASVREALYQAAHVMLTKPVRNCAALKGWAMRIARRAGMRKAKVALARKLAVILHRMLADATPFNPMAKAMAS

SEQ ID NO: 166210 - protein, 407 aa, unidentified
MNAVGIDVSKGKSMLAALRLFGEVAITPREYPHTGEGLSRMVSDILALGEDTRVVMEATGRYHEVVAFALHEEGIFVSVLNPLLIKQSGGGTLRKAKTDKKDAVKIAKYCLDNWSELREYTPLDAVRQQLKLFSRQYNLYMKTIVSLQNNLISLADKVFPGVNELFKSPGKNDGHQKWVDFFYTFWHADCIANVSEKSFTDRYQKWCKRKGYHFSQEKAEDLYIESAGLILTLPKNECTKLLVQTAAQEMIDAKVTLAAFRDEMIRLAAMLPEYETVLSMYGVGEITAAQLMAEIGDVTRFPRRSSLIAFAGIDPDVHQSGKHDASSVPTSKRGSPHLRKTLFQIVSTYLKHSPVDEPVYQFLDKKRSEGKPYYVYMTAAANKFLRIYYARVKEVLSTEEESANEPA

SEQ ID NO: 166211 - protein, 402 aa, unidentified
MTYDYVIGMDACKYFHHACVLDIDGTQVLSKRINQNEQSLRALFSALSAYDHKVLVVVDQPNNIGRLTVAVAQDIGIDVRYLPGLAMRQLSRIHAGNAKTDIRDAYIIAHAAKNLPESLRSVDRVEEAFLQLKVLNDIDEDLARSYTRLINQIRSALVGCYPQFEQALRGQIIHRKWVLHLLARYGGPTKIKRLGKAKAAAFARRYKARNPEPVLDAIFAAISEQTVTIAGAHYAEMGVAMSAKDALLKLEHRQQIEKEVIELINDIPHTQFLLSMPGIGPKTAAQILMTAGDMSDFPSAGHLASYAGLSPRTNQSGTSIMSNSLNRAGNKKLKNALWQSSFASIRFHERSRQFYERKRREGKRHNAAVVALARRRLNVLYAMMRNHEHYHDPAPSQEDLAA

SEQ ID NO: 166212 - protein, 440 aa, unidentified
MEHITIGVDPHKLSATIEVVDDHEKLLGSGRFTTDQAGYTAMRTYAKTWPDRVWAVEGANGAGRPLAQRLLEAGEHVVDVPAKLAARVRLFDTGHNRKTDALDAHSIAIVAVRTDTLRVLKVDGELEALRMLTDRRETLTRRRVQTVNRLQALLAELLPGQAKRDLTALQAKAMLAGVRPRDIAGKTRRRIAAEELADLVAIEAKIKKATAELKTMVTARGSRLMDLHGVGPVVAARILADVGDVTRFADRNRFASWTGTAPLDASSGEQNRHRLSRAGNRRMNHMIHIAAVTQIRLDTEGRTYYRRKRAAGKKPMEAMRCLKRRISDAVYRQLVADAERAALASSPETVGTGPGGHCGATQSSSAVDLPPHIDTSDQPLPGPAEPTVLPPPRRQNNHAAPAASPPHRRVGAVKVERPTGRTTLTATSAGAPSKATGPRP

SEQ ID NO: 166213 - protein, 459 aa, unidentified
MVSHRGSTPSLGTFEQINWHAAGIDVGTEEIYVAVPEGCDGDRVGVFPTFTVDLERIADWLKQCQITTVAMESTGVYWIPLFEILESRGFEVYLVNARHLKNVPGRKTDVLDCQWIQQLHTYGLLRASFRPSEEICALRAVVRQRNMLVRYRAAHIQHMQKALHLMNIQLTQVLSDITGVTGMQIIRALVAGERDPHVLASYRHDKCVHTESDIVKALQGHYRREHLFTLQQALELYDLYGQQIAQCDAELEAMYREMDPPNAPPTAEVTQPPPVRTTKPRKNQASFDLATSLYQMAGVDLTRIDGIDALTAQVVLSETGLDMGKWPTVKHFTSWLGLCPQNEITGGKVKHRGTAKTRNRANTALRVAAQAVWRSQSAIGAFFRRIRSQHGGAVAVTATAHKLARMIYHVLKFRTDYRDPGTQAYDTQQRERAERSLRRQAARLGFAVTPLEPSPAAVS

SEQ ID NO: 166214 - protein, 324 aa, unidentified
MTSALEVFVGIDVSRRTLDIAIYEQQAAWELDHYQQPAAGELDHDEIGLRKLVDLIAPRSPHLVVLEATGGLEIDVAAALVEAGLSVAVVNPTRVREFAKAIGQYAKTDRIDARLIARFACKVRPAASGWKSHQQSMLSAYIRRRQAVIQNLTAEKNRLATTPEPLLKRVMAHIDWLERERDELTQEIHELIQADPVWSKKEQILQSVPGIGPVTAATLLAELPELGTTSRQKVASLAGVAPFNKDSGRKRGKRRTFGGRAQVRRTLYMAALSASRSNPAIRRFYQRLLANGKEKKVALTACMRKLLAITNTMLMRMEPWRETG

SEQ ID NO: 166215 - protein, 372 aa, unidentified
MNYNTVYVGMDVHKESFTLCSCKYEDEKASHYQRTPASYKNVLRYLAFLRTIYGEDTRFVCGYEAGCLGYSLYHQLENFNVECVILAPTTMLEQRSKRRIKTDKRDAEIIARSLAQHNYSPVHIPTETDNQTKEFIRMRDDHKAELKKIKQQILSFCLRQGYQYDGSGNWTAKHVKWLRSLKPAGLYKEILDEYLLTYTILTDKLNRLDQRIEELASKEEYKESVSKLTCFLGIKTHTALSVIVEVGDFQRFVSARKFAGYLGLVPGQHSSGDDRNGLGITKAGNTHVRRLLVESAQSYTRGKIGYKSRVLRSRQAGNSPQVINYADRAKERLRRRYYKMVLKDGKKYNIAKTAIARELACFIWGMMTDNIY

SEQ ID NO: 166216 - protein, 315 aa, unidentified
MKRKIYIGVDVSKNWLDLAYYDGVEIDWKSGHIRVDNNKSGYRRISLWMKKLQIAKESALFCMEYTGLYCYNFRVWLESEGIIYGMINPRKMHRFEPDLGEGEPALDRIKTDEMDSFRIAMYCEKHSRKIKSSPSRLPGPAFFNLKRLLAERRQYVKHSVLYKQQLHDISAYDTEESCKRKQAGLKSLSVLRRQTDIEMRKIIKSDEAIYKNYKLLCSVIGVGLVIAVETIVLTENFTAITNPRKYACYVGIAPGRKESGISIRGGDHVSKKGFKQAKANLSLVALQAIRHDSNIRSGCLPSSKGKNHMWKWMPI

SEQ ID NO: 166217 - protein, 357 aa, unidentified
MMKTGTVRQSIGIDCAKDEFVAAYCCSNELRGSECKQTRAFKNNKQGFARFMAWQGKLREEGPALPMVMEATGVYHEQLACALYDGGHQVHVVLPNKAKAFTRSINLRSVDDGSSARTLALMGMERKLDPWEKPRELYSRMKHLTREREDIQQTLASAKNQLHAEETSAFTNPGTVKRLKGRIRFLAKQILEVETDLRSLIKAEKDVKERIDRVCTAPGIGWLTMTIILAETNGFHHVRNQRQLTKYAGLDVEKQDSGTSVHKPGRLSKKGNRHIRKALYMPALSRIRSEAKSKEFFKRLVSKHGVKMKAVAAVQRKTLVLAYTLWKNNATYDKQYQASAGGEERGQPRKAALNELA

SEQ ID NO: 166218 - protein, 392 aa, unidentified
MEVQDETGRRLAKARLPEGISGIARLHALVGRFLPEDSDPAEVKIGIETDRGPWVAALVASGYQVYAVNPLQSARARQGNGVSGAKSDAGDAHVLADLVRTQSHQLRTVAGDSKQAGAVKVLTRMHQSLIWDRTRLVLRLRSSLREFFPAALEAYEDLASPDVLELLTKAPEPAGAARLTPAQISAALKRAHRRDRETKTTAIMAALRTEHLTQPPLIAAAYGVTVRALAALITTSNEQITALEGPVEACFGRHPDAEIYLSQPGLGPILGARVLAEFGDDPTRYAGARARKNYAGTSPITRASGKKKVVLARYVRNKRLADAVHRQAFSALSGSPGARAYYDALRDRDIGYNAALRQLGNRLVGILHGCLKTRTRYDEATAWNQHTQRVAA

SEQ ID NO: 166219 - protein, 326 aa, unidentified
MKELYAGVDIHRDNYVGCILDKDENVVIEKSFPPTKKGAQGFLCGMPVKAVAIEACGMWRAALNIFRDLGCEVKLTSPKKTKDIAGKKKTDKVDAKTLANLLRTGFLPEVYIPNDEMLRLRDLARHKSQLTRMRSDIQRKIRSILMLKGIKAPKSLWTIQGVKWLSGLNDENISNWIRLFSSFKAEEKETLRRISRIANSQRHTNLLMTIPGVAAFSSVMILEEIADIKRFKTPKELVMYAGLCPGIYQTGKTERNVKNNAVNNWLKWIIMECSGRASTMKNTKFMYHYSKIKQRKDVKVARRSTARKMLTIIWHMLHKEEPYHAA

SEQ ID NO: 166220 - protein, 340 aa, unidentified
MLYIGLDVHKEFCQACVIDESGRSLSNERFSSTSEELDQYLDKFQDAKFVLESTGIWEFIYEGIEKRGFEAVLAHPLKVRAIAEARVKTDKVDAETLAQLLRADLIPRSWIPPKDIRDLRQLVRQRAYLVRQAARFKNRIHAEILRRGVRRPENLKTPFAQRSIRWMRSLGIPTVTSCLNCLESVQAQVEEINIQLRQEYGRRTDAQLLATVPGIGFYGALLILAEVDDVRRFNHPEKLCAYAGLVPTVSQSASSVKYGSISKDGSAYLRWILTESVHVHTRYDPSSQLSHFHARIAKRRGKRVATVATSRKLLRIIYWMLVRHEPFHSHGFNPVKRLHS

SEQ ID NO: 166221 - protein, 349 aa, unidentified
MARNIGIDLHRNNFVVATRAENGRTYLRTWKMEELGRFAGQLRPDDRLAVEMTTNTRFFYDAVRPAVADVKVVNTSQFKVIAKSVKKTDRRDAETLALHLEKDMLPTVRLKEVEQGQLAALVSTRDTLVKQRTTLKNKVNNRFAMYGKTIVREMLSSEKGLAAVEAEPFDALVRIEIGVLAAQIRVLNASVRELEKAIDAEAGKLKGYRSLTSIKGVGTVGAATLLTVIGDIDDFEDAGKLAAYLGLVPRVSNSNETERSGRITKRGSKLARTALVQCGLIAKKYSPYLHAFHHRVKQRKGGGKANIALARKLLEIIYRTLKNGWVFENFADFRLVGGANPLKGKARTG

SEQ ID NO: 166222 - protein, 335 aa, unidentified
MHYLYYVGLDVSKETFDASLVAFEDANEMAHRKFANSRKGICSCLHWVEKRHGIRLVDVIFCAEDMGSYISEMAVCASDRTLTFNFSLISPLVIKYSMGIARGKTDRVDARRIAEYAITHYRKIALYLPAEKELCQLRTWLILRAHLAKQRVAKLVLLEKLDYKEKFADVSIQRSMLQEEIAYAETHMKTIEREMKELIAADSNICRNYKLLTSIKGVGPITAIVMLCSTLNFTKITDHRKFACYCGLAPFEHSSGTSVRGGCHTSSMANRDIKVQLNRSALIAIRCDPQLKAYYERKVAEGKHKFSVLNAVRAKIAARCFAVVRRGTPYVALQI

SEQ ID NO: 166223 - protein, 373 aa, unidentified
MPKYSTAFGMDVHLRSTTVCALDADTGEAVTRRFPGNPWGEIAGWMDGFPGPSLAAYESGYLGFAPQRELAGLGVECVVAAVSKIPRSAADSASKNDRNDAARMAKAILAHDISPVWVPSPEVEGIRDLAGAYGGATARLATAKQRLLAFLARRGFVYGGTTPAGNPRKYWTYDFLRWLDKVRPEDDGGVRALAALRNEVEAAAEARADLLSEYRAAVDASPIAAEVAALQSIKGCAFALAAAFSAEVGDFTRFRSGRQVTAYFGLAPSQRSSGDSVRLGGISGAGNALVRKLAVEGSWCYAAARHQPKLMPRDTGVPLEIRMHGRKGSERLLRRREEMLARGMPAAKANAATAAELVRWLWALGMMCREGAE

SEQ ID NO: 166224 - protein, 372 aa, unidentified
MADDSVIFIGLDTSKLKISVAIADGSRNGEVRFFGDISSEPSCVASMVNKLSKRGAKLHFCYEAGPTGYGLYRQIVELGHECTVVAPSLVPKRAGDRVKTNRRDAVSLARLHRAGELTAVWVPDEGHEAIRDLVRAREAASDALTQARQQLQSFLLRHGRIYSGRKPWTRAHTRWLASQAFDHPAHHILLAEYRQAIEDAGVRLDRLTKLVMETAASWSMAPVVAAYQAMRGVAFMTAVTFVVEIGDVRRFDNPRQLMAYLGLVPSESSTGERVKRGGITKAGNTRARRVLIEGAWTYRFPARVSPTIQARLEGLPRTVREIAWKGQVRLCARYRKLVTAGKPKVVAVTAIAREMAAFLWAIGQEVAPTAQA

SEQ ID NO: 166225 - protein, 345 aa, unidentified
MGKYCGIDLGNKRTTVCVMDKRRQVLRLVEVKTTVEGLTEALKGYRKLTCIVEAAPLAEWTAREVEKLGHTITVVCPRKAKVALESQGARKKTDKRDARALAELCRSGWYEAVHRKSEEARNIRSYMTARKQLVEASTAIASSIRGILRAHGIKLTERGDGKAFTERVEAAMTPLAKAVQAAIRELLQAWELLHAQQQRMYRQLHDQLKSTPVAERLMTIPSVGPATAAAFIATIDDPKRFSDGAKVASYLGLVPSVYQSGETEFRGRITKSGDKVLRWLLIEAAHNMLTCSKTETELRTWGLKLQEKKGVGKARVAVARRLCILMWKLWQDGGVFHAEPVKEAA

SEQ ID NO: 166226 - protein, 321 aa, unidentified
MKTVLGIDQAKKKFDVALLLNGKYKSKVFENNPAGFSALLAWLAKNDVEAVHACMEATGSYGEALARFLHEAGHSVSVTNPARIKAYGQSELLRTKNDKTDAKLIARFCERMNPALWQPPPAEIEYLRGLGRRRDALVSMRTQELNRQETSNETINSSVRTVLECLDKEIEQISKLIRDHISKHPDLKHKHDLLDSIPGVGPATIEAVLSEINAFEGFETIEQVVAYMGLSPKEHTSGTSVKGKSAICKIGNSRLRKALYMPALSAIIYNPIVRALYLRMKAKSKNGMVIACACMKKLVHLIYGVIKTNKPFDPAYTLKTA

SEQ ID NO: 166227 - protein, 455 aa, unidentified
MAPRHKSNLAKKKSPFVLPTLRPHAAGIDIGARQIYVAVPPGSCPRPVRHFDTFTEDLHALRDWLLACGVDSVALESTGVYWIPLFQILEGAGLEVVLVNARHCKNLPGRKTDVQDCQWLQYLHSVGLLRPSFRPAEQVCAVRSILRHRDSLVHGAARGVNHLHKALTQMNIQLQHVISDLTGVTGLAILQAILGGQRDPQKLAALKDHRIKASRDVLAKSLRGDWREEHLFTLGQTFELWQKHQQLIAQCDQQIATMLAAFDTRSAKDAVLAPAKGSHKKPQRNEPQFLAREECFRVLGVDLTVVPGFGTPTVLVLLGELGPEFAEKFPTAKHFGSWLGLCPDNRITGGKIYSAKTRDVKSRVATALRMAAQSLGRAENYFGDLYRRWKARLGGPKAVTAMAHKLARVLWHLLKFKQEFDWKVFAKEEEKMKRKKLARLFNMAESLNYQLTPKP

SEQ ID NO: 166228 - protein, 489 aa, unidentified
MTRDSGIVLSDLGSVASMGEARPETQVLDRRSRAMSHAEHCRRLKMEVKRQERREALVPPGAMVMGIDLSRDEMVWHALGGEDGPRRAVGFTGDRTWEGVRDMVKQARPIAAELGCSEWVFAMEPTGSYWLPVAEALHRAGERYVVVPAVFVKRTRELEDGRPQAADPKDARRIADLARQRKVLFVQPQEEAGWRRTWYEIAAEYYDLGEAIQVERHRLRSWTDISRPVWAAQISDLTGSTALAVAQVLRQVTGEWDERRFLEEVRKVYSGRRFPASVARRLWPEVHQPSEWGCSWYREGLDWRISLAAERLAGLLRQQAETEARMMPFYEQSPEARFLDTIQGNPRTLTACVMGLAGDPHDWDSPRALVKMAGLDPQRDQSGRWRGETHVSRKGQGRLRGAAYRAAAWLCGLGRNPFFTARYWALRRRTENPLRHREAVVACADTYLRMLVVMAQKELTYREYCHFAHIALTPEVSVALTEPAESPHD

SEQ ID NO: 166229 - protein, 348 aa, unidentified
MLADQLDYIVGVDPHRDSHALAVVHVVSGAVVFESTVVANSDGYAQALKLVDRHAPGRRAFAVEGTGSFGAGLTRFLANRGERVLEVGRLRRQRCSGGKTDALDAVRAARSVLTQRRPATPRAGGERQALQALVAAREGAVNAKRAGLCQLRGLLITTPEPLRSELRPLTPARLLQRLAATRPQRRADPELRGSMLALRSIARRVLQLTAEERELAREIETLTRKLAPQLLDQPGVGPLAAAQLVLSWSHQGRITSEAAFARLAGAAPIPASSGQTIRYRLDRNGDRKLNRALHMILVTRKRSHPATIAYIQRRLQEGKTRREANRCLKRYLARSLYRLLEHGTPLAT

SEQ ID NO: 166230 - protein, 318 aa, unidentified
MNKSEHTNKYLDRPFVGIDVAKETLVIFIDSLNEHLTCSNTKKDLTAFAKRLSKLDPQLIVLEASGGYEKAAADAFSQAGLPFAVVFPRRVRQFAHGLGIIAKNDEIDARIIARYGRVAEVQPQPQQTQELRTLRALTQRRTQMIEMRIAEQNRLETSHPSVHKGIKQHIASLKQQELKMNIEIEQCVTANASLKAQEERLRTVPGVGPTLSSTLITELPELGLLSNKQLASLVGVAPFPHESGKQKGKRFCKGGRNQVRRVLYMATLSAITFNPVIRAFYQRLCDRGKLKKIAIIACAHKLLSILNSMTKYQTAWSL

SEQ ID NO: 166231 - protein, 338 aa, unidentified
MYYTGIDLHKKTSFLTTVNEEGKVVKRANLINDESLILDYFAALDEPTKVVMESTGSWYWLYDLLDGNGFEVVLSNPTKTKAIASAKIKNDKLDSHMLAQLLRTDLISTVYVPSIDTRKLKELLRHRARLVRDTVRMKNRIHALLTKNNCSIPFRDIFCQKGLAHLNNLGLPHYHQEQLQVYLLLYHQLMDQVAPLTESIQKMAQNHPIAKLLMTIPGIGPITAMVIVAEIEDIARFPSYRNLSSYAGLVPSLDASAGKQRIGRITKQGSPYLRTALIEAAQSIPRMKTCRLNLFFRKRIVRSGYKKAIVATAHKILQIVFYVWKNQTPYQEDYEARA

SEQ ID NO: 166232 - protein, 387 aa, unidentified
MNKSNRVIGLDVHPDSFAGAVLLKGKDAASARVVSTSRRVELPELEKWVARHTGEQDVLVLEASGNAFAVAERLRVLQRQVVILDSHRAGKVGKAYCANDRVDAIKIARIYLTALSPVVWQPDAKTRERREVFSAYQAVVKEATRLKQQLRSMLNEHCVRLESGFRLSHPSAINRLLKLREWTPVRAMLLEQLHRGLVSAQARRTRLRRYMAQEVLDEPELLRLTRLCGISLITLYGLSASIGDIKRFSNSRKLSAYFGLNPSVEQTGNWEGEGALKRHGRGALRALLVQSAKKLLRVNNPLQKWGLAVATRRGRNKAAVAVARKLCVAVWHVMQGHVIGAIERMTTLHTKLHKLATELGLNTIKSQGYETKEAFVQKKLFVLRSYA

SEQ ID NO: 166233 - protein, 359 aa, unidentified
MLTQSNKIDFNGQHFYVGLDVHLKSWKVSIMAEKLTLKTFSQDPRPELLHHYLVKNFPNGIYHSAYEAGFCGYWIHNKLTALGIDSIVVNPADIPTTDKEKVCKTDKRDSKKIAKCLRNGELKGIHVSSLKTLEDRCLVRIRGTLVKDLSRNKNRIKSFLYFHGIEMPERFRSMSTHWSKRFMNWLRSIELAEYSAKKSLTLIIEESEHLRLIILDATKGIRELSQSETYAYQVQLLQSIPGIGILTAMIILTEIEAINRFNNFDKLCSFIGLVPSTHSSGEKEIIGEITHRGNNFLRSAIVESAWIAARKDMALNKSYHDYCRRMEPNKAIIRIARKLLNRIRYVLKNNEPYVYSVVK

SEQ ID NO: 166234 - protein, 337 aa, unidentified
MMYSGIDLHSNNSVIAIIDDADRVVAQKRLPNDITKIVDFLARWQDELAGVVVESTYNWYWLVDGLQDAGFHLHLANTAAIKQYEGLKHSDDETDAQHLAHLLRLGILPTGTILPREQRAVRDLARKRMQLVHSCTTHVLAVENIMARQLGGRMTSNQIKRLTADTVDSLPLAADVGLAVKANVAVIATLQAQIEVLEKRLQERVKPRPQYGLLTSVPGIGRTLATVILLETGPIDRFADVGNFASYARCVDSVHTSNRKKKGEGNVKNGNKYLAWAFVEAANFARRFCPEARRFHERKKARTNNIVATKALAHKLARASYHILKEGKPFDVTRCFA

SEQ ID NO: 166235 - protein, 314 aa, unidentified
MDRVCCVGVDVAKRHWDAAVHGRQGTRRFVADEAGLAELMAWLEELKPTLVCLEATGGYERLLRQSLHEQGVPVSIVNPRQVRDFARATGQLAKTDAIDATLLARFAATLEPEPSEPPSPQQERLRALRARRQQVVQSLIQEKNRLGTVPDAEAKRSIQDAIEFYDRQLRELDQRIAELTQADPELCRRLDLLVSVPGVGVVTASGLLAELPELGTLSRGQAAKLVGLAPLNRDSGSLRGKRMIGGGRAQVRRSLYMATIVATQHNRVIRSHYQQLLQRGKAKMTALVACMRKLLLILNAMIKNQTPWKMTEEA

SEQ ID NO: 166236 - protein, 370 aa, unidentified
MEHHHQQNDVKIKHYVAMDLHSDNVCVVIEDQDRRCVLKRKFPTGLKIILAKLKPYRESIEAIVVEATATWYWLVDGLRLAGYNVHLAHPAAIEDRSGKKRTNDFDDCFNLIRLLRNGDLREGYIYPKEERPIRDLMRKRSFFVRSRTQHMLSLMNMVSRNKGFKLSSNQIKQLTEEDLEDLFDHPFLLLSAGASISTLNHLTQQIDGLEKAILKVGRLKPEFNRLVAFPGIGKTIGLTIAFELGTLSRFAGVGDYLSYSRCVDSRRLSNGKKKGENNRKNGNKYLSWAYVEAANFAKRYCPYARAYFNHKLKEKGIYTVAIKALASKIARATYYMMTREVNYDPEKVFGNYKAQAQALIKKSKSRDSKP

SEQ ID NO: 166237 - protein, 476 aa, unidentified
MVVPNQEPKKPAKGKKSTKPDKSPQRSIPVPVPASTAALNVINPDAAGIDVHSNMHMVCVPADRDANPVRQFGANTADLHEIAAWLKKCRVRTVALESTGVYWIPLFELLEAEGFEVKLVEPGQLSRCGARPKTDVLDAQWIQRLHSYGLLRGSFRPPDSILALRAYWRQRQMQVRYAASHVQHMQKALEQINVKLAEVVSDITGLTGMSIIEAILGGERDPVKLAKLRDERCHCSEDQIALALQGTWRPEHLFELRQAYELYQFHHKQITECDNQVQAELAQFPNRAGEKTRTHKPRKRGRKSNDLRFDATGPLFKALGVDLTLIDGIDVGTALVILAEIGVDVSRFPTEKHFASWLRLCPPQDESNNTKKRRRRRKNTSRVATALRLAARSVGKTMTPLGLFYRRIRSRIGALGAVKATAHKLACLIYRMLKYGHEYVVQSLEEYEAKTKANMLKVLQRKAAAMGFQLTPIPTQ

SEQ ID NO: 166238 - protein, 343 aa, unidentified
MKHTTIAVDIAKNVFELAISHCPGQVEESHRLSRSRFLRFLAQREAADVVMEACGMAHYWARQLQQLGHSVVLLPPQYVRPYVRRNKTDRTDAKGLLEAHRNKDIRPVPIKSVEQQTLASLHRFRSAWLATRTARINGVRGILRELGIFIPLGAKQVVPRVRSLIEDADSQIPMAWRDSLHQACDEIGNLESLTHDADKQLQALARQLPTVEQLLTIPGIGILTATALLAFVGDVHRFRSCRHFASYLGLTPRERSSGTTRRMGRISKQGDVYLRTLLTHGARAVLWAATKHSQPDRLRTWALELQHRRGHNKATIALANKLARIVWAVWKRGTEYQSLPKAA

SEQ ID NO: 166239 - protein, 378 aa, unidentified
MNALAVGWDVHRRFSQVSLQELHSDGELRIVERKRLEHNDRSAMAAWLGKLPANTPIAIEGAFGWQWVADWLSELGLSPHLGHPPAIRVLAKNEAKADRIDADRLGRFWLRGIFPESYLSTPEVRQLRERLRHRQSLVALRAQVKNRIQALLHRAGVLHDLSDLFGKRGRELLAELKLPAASRAVLNDGLSLIDALGDQIAALETWMLEHLAQDAIVRLLLTIPGIGLVLAHVIRAEIGQLTERFANAKRLASYAGLAPLADDSADRHGRRHIGHACNRTLRWALVEAAGIALRSSDCPPKLRQLYDRLTRHGHVNKMQGRVAVARELCELVYVIWKKGEPYRDPTSPAPTSSRPPRPRGKRSVASRRAEPSRASRPQ

SEQ ID NO: 166240 - protein, 339 aa, unidentified
MRLYAGIDLHANSHYLGVIDEENKVVFRQKMANDLRKTLSILESFRGELEGVVVESTFNWYWLVDGLMDHGYQVHLANPSAIQQYEGLKHSDDERDAIWLANLLRLGILPEGYIYPKQERSVRDLLRKRLQLVRHRTSHILSIQNMVSRSLGIRMTSNEVKRLDEEKVAGLFKEEHLFLAVRSSVGVMRYLGDKVKQIEGVLKGRVKLRQEFEKVLTLPGVGQILGLTIMLEVGDIGRFPGVGNYASYCRCVRSTRISNGKSKGEGNRKNGNKYLAWAYVEAAHFAIRDSSEVNRYYHRKAAGANRVVAIKAVSHKLARASYYIMRDQVAYDPNKLFHY

SEQ ID NO: 166241 - protein, 348 aa, unidentified
MWHFIALDTHCHGTDLVCLDDHGRMVRKWNGPTTIPALVAAMESIPEPRAIAFEEGPLADWLFRNLQGHARRLIVCNPRRNALIAKDSDKDDAIDAEKLADLLRGGYLQPVHHNESEERSIFKQTVAMYHRTVQHRVREANRIIAQFRQWGVFVKEADFRSDELWSEQLSRLPEDTQLRGVLGSMFCIYRMALEQEIAMRRRMIQRTRREEVIRRWCALPGISWIRGATFFVYLDTPWRFGTKSQLWRYMGVGLERRHSGGGPTVVRLSHQANHHLKGAILGAAKSAIAIKKNPFADQYRRWRDTGLSHCIARRNVARSLAATVWSMWKHGDVYRPELVAANGRRAPE

SEQ ID NO: 166242 - protein, 487 aa, unidentified
MAKRNSSSTQAEQRTSYRRRQAKARSKVAATKEAEVRKVVGLPVTNLHAAGIDIGSWSHWVCVGTDASAIREFAAHTDGLHAVVAFLHEQQVTTVAMESTGVYWIPLYELLEAEGFEVLLVDPSYTKQVRGRPKSDRLDCQWIYRLHSVGLLAAAFRPDEKTCQLRSYLRQRANLVRYAGQHTQHMQKALEQMNLKLTEIISDITGRTGERILQAILRGVRDPQKLAKLRHERCKASEEEIAQALTGTYREEHLFALRQAYQAWQFYRKQRDQIDVQIEQQLARMKQDRALPALKPRSHPKSYCPNEPRFDVRTALYYVVGIDLTEIEGIAEMTALTIISELGPDVSKFATVKHFCSWLGLCPQVKKTGGRIRSSGTRPGVNRVAVALRMAVTGLYASKGALGAYLRHKKAHLGAPKAITATAHKLARLVYLALKHGLTYVRQTQEEYQAKVREQQLKSLKRKARQLGVSIVEQPLDPKHVPMAGSE

SEQ ID NO: 166243 - protein, 413 aa, unidentified
MASMKECCCGVDVHKSFIIAVIATLKGREVKFTKYTRFSTFTCGLRDFKKWLGTHNCFDVCLESTGKYYIPVYRTVSDETFHVDVVHPKYVKAPRGKKNDKRDAKRIADMYMRDHIAEYSIIPPADILAIRDITRYRRKTVNAITAEKNRMSNCLTVSCIKLDEVLSDIYGKTGQAIIGQIIKTSGCDFDPGPYIDPRVKAPVEHFKMALDGDVTFATLTKMKMIQQRLAFLGKQKTELESTMASLSKDYNRQLEILDSAPGVDSISAISIISEIGVDMKEFGSVKRFLSWIGVVPQNNESAGKKKSTKIGKGNTWLKPVIVQCANAAIKDKKHPEIRMKYLAIKKRRGHGKALIATAKRLMTAIYFMLLRDEVYNPNIGKDSAPKRGKIFLGKLIEHYRLQGYTIVTEDGAA

SEQ ID NO: 166244 - protein, 399 aa, unidentified
MFIVGIDIAKKSHQAVIIDEEGNQRSKNFRFANSLEGFNLLLNNMEEIDSDHSNFEIGMEATGHYWINLYTRLIDKGFKIHVINPLQSDALGNLYLRKTKTDSVDSKLIANVIRFGQYTETRLTDDKLLTVRELSRQRFYLVDMNSDLKRKVVVIMDKIFPEFQGIFSDMFGKTSCAILKKCPSSKEVLEIDFDEFAAIIKKSSRSKFNIAKAKEIKLAARDSFSALIDPAPLSFLVKQMVEQIELLENQIQNLEHEISEIFMQLDSKITQIPGIGPVLGAVILSEIGDINRFSSSKKLVAFAGIDPSIKQSGEFVSSENHMSKRGSPYLRRALWIASFVNLNHNKEIIKLYGKKTSNGKGHYKTMGFLCHKLLNVVYAVLKNNADYIPYAWTESKACS

SEQ ID NO: 166245 - protein, 418 aa, unidentified
MDRVVADIINPIACGLDVHSAVIVACLVRPGPRGGPSYEERSFATTLRGLRELRDWLLAAGCQAVGMEATGVFWIPVYSVLEGHVPMVVGNPNHMANLRGHKTDRKDAKWIAGLIRHGLIRPSFVPKAEFRDARELTRARRQLINARTGIRNEITRLLAHQGIPLGVKGLLSDIFGVSGMGILEALAEGRDVIEELPKLLYRTVKGKKEAISAALEAGLRDALRPLLSMHLTRLEAVEEDIQKVEELIAKQLSPYQDKLDLLMTIPGVSLISACVIIAELGIDMSQWPTSKHLSAWGGVAPGCRESGGKVRKAKTRKGNPFVCTTMVECAGAAVKKKNCQFAGMYRHLCARTGSKMKARMAIARKLLVIVYHVLSTLQPYVEPKPKEPTARSKEKSIRRHILELKKLGIEIPLPTIFA

SEQ ID NO: 166246 - protein, 414 aa, unidentified
MRPWNEITHFAGFDWAKDHHDVVIVNRSGEVVADFGLEHTAEGWRHWREQIAAFASGLAACVETSQGVVVEQLLESGVAVYPVCPASAKHYRQRKVPSGNKTDHVDAWSLADALRIDGHGWKALAPEDPLVAELRLLCRDEVALIGKRTALVNQLQSALHEYYPAAEEAFEEWTLPSAWAFVETFPTPQALQTAGKRRWEKFLHAHKLARPETYQKRLEIFARAHEFVSGPALTRAKSRLAVTRAKMLRVLQAQIEDYRAEIEKLFAQHPDHDLFGSLPGAGPKLAPRLLSEIGSDRARFEDPCGLQCLAGTAPVSYQSGQINKVLLRRHCNKPLRHAVHLWADLSRKSCSWAAVYYEHLRKRGKSHACALRCLGQRWLKILWKMWQSHTPYDADLHTRNQLKHGSWVLKIQPA

SEQ ID NO: 166247 - protein, 311 aa, unidentified
MNSEAYVGVDVSKVSLDVKVLPTNETLQISNNNGGINELIKRLTQIDPTLIVFESTGGLEMLAVSNLIENQLPVVVVNPRQVRDFAKATGRLAKTDAIDADTIARFARDIRPEIRPIKDEHTQLLSALNARRRQIVDMLVAEKNRLSRAPKPNKKSIQKHIQWLERSLTDINKDIDKTIKKSPIWRENDRILQSFKGVGPVVSATLLCDLPELGALNRKKIANLVGVAPLNCDSGHFRGRRRIKGGRANVRRKLYMAAVASLRHNPLMKDFYERLVEAGKPPKVALTACMRKILTILNAMMRERTYWNAIW

SEQ ID NO: 166248 - protein, 371 aa, unidentified
MNTIVYVGMDVHKESYTLCCYSYDRDKVEFKQTIPSDYRLVLKYMERVREQYEGEVKFVCGYEAGCLGYSLYHQLTDHAVDCKILAPTTMAITNTNRVKTDRRDAENIARCLAFHTYSEVYVPDDEDNAVKEYIRMRDDQKLMLKKIKQQILAFVLRKGKRFEGGKTYWTIAHLKWLKNLELEGLDKETLSEYMITYEYLTDKIQRLDERIQELAEGERYCEQVQNMSCLLGIKTHTALSLLVEIGDFDRFEKASRFSAFLGLVPGEDTTSDNVKRLNITKAGNSHLRRLLVEAAQSYTRGAIGHKSQDLKKRQSKCSPEVIAYADKANERLRRKFYRMTLQKNINRNVAATAVARELACFIWGMNTGNIA

SEQ ID NO: 166249 - protein, 370 aa, unidentified
MKKKILYIGLDVHKNTIDVAVATGRANGKVRSYGKIDSTVDAIDKLIKKLKGKDVELRFVYEAVPCGYQIYRHLRSKKINCAVVTPSMIPRRSGDRIKTDRRDAINLVRLQRAGELTSIYVPSVEDEAIRDLVRCRDDMRRFERKARQRLLAFLLRHGHRYPGNRHWTKGFFNWLATVKFSHPADQIALQEYIDTANECSQRLKRITEQIRAHVEHWSRAPFVKAYQALRGVSFVVAVTVVAEIGDMNRFANTKQLMAYLGLIPSERSSGKTIRRGSITKTGNSHVRRALVEAAWTYKLPARKSTILLKRQQGLPKSVCDISWKAQTRLCARYRRLIARGKSRKNVVIAIARELGAFIWAIDKQMQLSIA

SEQ ID NO: 166250 - protein, 343 aa, unidentified
MKLSYVGVDLAKNVFQLHGVDRHGQAVWRRRLRRGQWLQVLRETVEPGCIIGMEACASAHHWARQLEAHGYDVRLVAPQFVKPFVKSNKNDRNDAEAICEAISRPHMRFVPIKTVEQQDLQAIHRVRSTLMSQRNAKANQIRGLVAEYGMVAPQQMLALRRAVPAWLEDAENGLSACFRALLHDMWMDLQHLQERLAELDRQIEQIAKDNPVTRRLQQLRGVGPLVATALVASVGDGSHFRKGRQMAAAIGLTPRQHSSGDKRRVLGISKRGDVYLRTLLIHGARAVVSQAKRRDDPLSLWVTGIAARSHTNVAAAALANKTARIAWAMLRNESDYDPALAVT

SEQ ID NO: 166251 - protein, 410 aa, unidentified
MIYVGIDWADDHHDVAITDDSAKTLSQFQISHDSSGFATLHGQLAKFKQSPNQILIALETSRGLLVHELLRSDYSVYAVNPRAVNRYKDRYVLSKAKSDSLDALALAHLLRTDRQRFKALRPFPEDYRLLDRLCQDLRKLVDEKSRIFNQITSVLKEFYPKALELVSLDSHIGIAFLKAFPDPQALRNCKKKTFMAFFKKHHYTRPNKIEELWTLIQTPALQPDVVILKAGRFRLLSLLDQLIPLREHLSLYEKEVKAILDKLPEAKSISSLPGVGDRLAPELTAALGPKIPNSEARFQSAEEIMNLSGCVPVTRQSGKWKTVSFRYSCVKGLRRTFRDWAFASLEQSVWARAYYDFYKAMNMSHSTILRNLGKKWARILFVLWSQGTVYNEPLYIQSLKNHNVRWAMAL

SEQ ID NO: 166252 - protein, 346 aa, unidentified
MNQIIRIGMDTSKHFFQLHGVDAAELPVLRRKLRRGEVLAFFAKQPPTVVGMEACAASHYWARELCKLGHEVKLIAPQHVKAYVKRNKNDGRDAEGLCEAMSRPTMQFVPVKTEERQAALMLAGVRQQLMARRTQLSNAIRGYAAEFGLITAKGLVKVEPLLARIAQDESLPALAREMFTLQGRDYARLQVELKSVEARLMAWHRANADSRRLAQIPGVGPIVATALVMKAPDPGLFPSGRHFAAWIGLTPKDHSTAGKTRIGKITRAGDEMLRSVLVAGATSVIQQAKKGRGRPSPWLVALLARKSPKLAAVALANKTARIAWKLLTTGQSYDGARMPVASALAA

SEQ ID NO: 166253 - protein, 381 aa, unidentified
MRKDTRHVGFDVDTEKIAVAVAEPGLGSEVRSVGTIPHTEDSVRRLVKKLGPASRLRVCYEAGPHGYGLYWLLSGLGVHCDVVAPTLVPVKSGDRVKTNRRDALKLARCYRAGDLTPVWVPDAEHEALRDLVRAREVAKKDQLRARQRLGKFLLRRGLRAVGGMKSWTKKHLLWVRTLRFERLAQEAAYLDYLHEVEHAAERVARLERAIDQAIETLPEKMRALVAGLQALRGIKQVSAVTIVAEVGPLSRFPRPKQLMGYSGMVSREDSTGSDVRRGAITKTGNAHLRRIVGEAAWAYQYRPAMSPEMKKRQESLSEEVKEIAWKAQHRLCTRYRRLVAKGKLRSKVTTAIGRELLGFIWAIGTQIEKEQRLARTSARAA

SEQ ID NO: 166254 - protein, 457 aa, unidentified
MMKTKRRREQRSMLPVHPDAAAIDIGATVHVAAVGPARDPEPVRSFGTFTGDLHRLADWFAQCGIKTVVMESTGVYWIPVYEILEQRGFEVRVVNARDAKHVPGRKTDVSDAAWLQRLHEFGLLRGSFRPQGAIAALRAYLRQRERLLDYAAGHIQHMQKALTQMNLQIHHVISDITGATGMRIIRAIVAGERDPDTLASYRDIRCHSSADTVRRALIGNYREEHLFALAQAVELYEVYQAKVATCDEKIEGVLERLKQPCRAPAKPLRAARHKTRQPNAPAFDARGALYALLGVDLTQIHGLGPYLALKLISECGTDLSAWPSAKHFTSWLSLAPGNKISGGKILSSRTRPSGNRAAALLRLAATTVGRTETALGAFYRRLSARIGKAKAVTATARKIAVLFYNAVRHGMDYADPGASYYEERYRQRVLTNLQRRAKAFGYVLQPTEIKAVSMAVS

SEQ ID NO: 166255 - protein, 410 aa, unidentified
MELLHRRCCGLDVHKETVVACLRLVADGKVTTEVRTFQTTTADLLRLSEWLAANDCTHVAMEATGVYWKPVWHILDDGEFELVLANAAHVRNVPGRKTDVNDAMWLAELLAHGLIRASFVPDTQTQEMRNLLRTRKQLVREQSSHVLRVQKILEDANIKLDSVLTDLMGKSGRAMIEALIAGETNPAKLASLADRRAKASHEEFREALRGRVTKHHRFLLRLHLNQIDALDAAMATLDAQVEANLGPFRTAVELLISIPGIKNLGAHVIVSEIGIDMSRFPSHAHLISWAGICPRNDESAGKRRSNRLRKGAPWLKTTLVQCAWAAVKKKDSYLQAQFYRIKARRGPKKAIMAVAASILTAIYHMLKDGTMYKDLGRNHFDRRSTDKQKQRLVKRLAELGYVVEIKPLAA

SEQ ID NO: 166256 - protein, 344 aa, unidentified
MEHFAGLDVSVKETSVCIVDETGKIVREVKVASEPDALLAVLKSPAYRFKRIGLEAGPLSQWLYSALAEAGLPVICVETRHMRAVLKAQINKTDRNDARGMAQMMRVGLYRPVHVKTLRSQKLRMLLTHRKLLQSKAIAIDNDLRGTLRNFGLKVGMVGTVKFEARIRKLVENLPDLAALVEPLLIVRRTLREQFCILHRRLLAIVRDDEVCRRLMTAPGVGPVVSLTYRATVDVPARFRKSKSVGAVFGLTCAKYQSGEVDWDGRISRCGDEMMRTMLYEAAQAMMRSKKWSWLKAWAMQIARRRGMKKAIVALARRLAVVMHRIWVDGTAFRWTREQIAAAA

SEQ ID NO: 166257 - protein, 342 aa, unidentified
MKDMMIGVDLAKNVFQVHGALRTGEVQFRKKLTRKQFPAFMAKQEPCLVIFEACGSAHYWAREMETLGHEVKLIAPQYARPFVKRQKNDAADAEAIVIAARQPEMRFVELKTVEQQSRAAVFRGRERLVYQRTADVNALRALLYEHGHVFPAGIRYLDRMKALVEDAASELPGLIREECQDLVTQIAEKTARIIERTAKLKTLAAQSDRARRLQTMPGVGPLTAVAVEAFGPDMAQFKKGRDFAAWLGLVPRQHSSGGKERLGRMTKAGQADIRRLLIIGAMSRLNWLGQRSIVEGSWLSRMLARRPKMLVAIALANKMARQLWAMLTKNEDYKDPALAGTA

SEQ ID NO: 166258 - protein, 320 aa, unidentified
MTITTVGADISKDKFDAACLSAAGKYKHKKFTNNPEGFAAFLVWLASFGDEEVHIGMEATGAYSIPLAEFLVEKGYAVSVINPAKIHAFAKTELSRAKTDKADAKLIAKFVREKKPALWTPPPSNIRELQALLRRVEHLLEMRQMEQNRLDTASPTVAGSIKTILELLDRELETTRDRIRKHIDDDPDLRRRGDLLDSIPGIGEATLAHLLVALSDHYGFDNAKQAAAHAGLDPKIKESGKWIGKTRMSKSGDSMLRKALYMPALVAWRYNPAIRAFCERLKANGKNGKAIVCAAMRKLVHIAFGVLKSGKPFDPELNPA

SEQ ID NO: 166259 - protein, 356 aa, unidentified
MSRNANRTSAGFVNTIGIDIGKNTFHLIGFDEEGAIVLRQKLSRGQVEARLANMRPCLIGMEACVGAHHLGRALNAVGHDVRLMPAQYVRPYSKGQKNDFRDAEAIAEAVRRPTMKFVAIKSVEQLDLQALHRIRERLVCQRTAVINQIRAFLLERGIAVRQGPRALRSELPIALAKIHKLSPRMIHLIEDLSEDWRRLDERVETVTSEIEALSKEDHGAIRLMTVPGIGPIISTATVAAIGTGEIFSKGRDFGAWLGLVPKQMSTGGRTILGRLSKRGNRYLRMLFVQAARSVLLRAKSWERQGLKSWIEAAAKRLNRFKLVIALAHKLARIAWGVLNGGRNFESRSMPPASQPA

SEQ ID NO: 166260 - protein, 338 aa, unidentified
MKKNVIGVDVSKEKLDFCFQVENMVVKEWALSNATMAIKTSLKALLKDSRCKASEVLVCAEYTGQYTYPLCCACEELGLSLWLENPAQIKHSSGVQRGKNDRLDARRIADYANRFQDKARMFSFPEKNIASLKQLISERDLYIADKAKYQGQLKDQKRFMNQLDYQRKSKRLQDLMSCLEKTIAIIEQQIQELIDQDHTLSNQHKLLCSVDGVGDKTALKMIVATNAFKNFDNARKFNCHAGVAPFQYTSGSSIHSKNRVSQRADKSIKSLLHMSALVAATRMKNSELRDYYLRKVAEGKNKMLVLNAVRAKLIARMFAVIKNNQPYEKNYSFCLQIS

SEQ ID NO: 166261 - protein, 336 aa, unidentified
MKFVGIDLHKQTISLCVMNQAREVLARKKFPCNQPQAIHQFFSEMGPFQAVVEATASYEWLWQLLEPLAARLVLAHPQKLRIIAESAKKSDKLDAQVLAEFLVLDMIPQSYRPTPRQRAHRRLVRHRLYVRDERTSVACRIHAILADYNSDFPKLFTAEGFTRLQEIRLEKEDRFALDQLVAQWRGFTQQIKDVEEQLREFAGKALVAEAESRAVLASIPFVGPVTIDVVLSEIGDIHRFRNAKQVCAYAGLVPVHRESAGKRRESGLIKEGSRRLRWALIEAAWRMVAHTNRWKTAYLHLQKTRGSKKAIAAIARRLLCAMTAMIKTGQAYRWAA

SEQ ID NO: 166262 - protein, 346 aa, unidentified
MEQYVGLDVSLKLTAICIVDQTGRIEREGVVASDPETIAAFIKSHAPHVARVGLETGATSTWLWTELNKMALPVICIDARHAKAVLKMQINKSDRNDAAGIARIMQTGWFKEVRVKDLDSHSVRALLASRALLVKIKRDLENQVRGLLKNLGLVIGRAKLNVFAVRAEELIEGRPELMAAVRPLLAARNAIEQQVDDLDRKVMRLARNNAQARRFMTAPGIGPITALCFLATIDDPTRFKRSRSVGAYVGLTTRRYASGEIDWTGRISKCGDKMLRSYLYEAANVLLTRVAKWSTLKSWGVRLAKRSGLRKAKVAVARKLAVILHRMWIEGTEFKWSSKEVANQPA

SEQ ID NO: 166263 - protein, 360 aa, unidentified
MRIIGCDLHARQQSVAMLDSETGEVVNRTLQHEGGEVREFYEQLPRPVLVGIEAIGPMQWFLKLLDELGIECRVGDATKIRAAEPRKQKHDRRDAELILKLLVENRFPAIWRPSQELLDLRALLLHRHHWVRLRTQIQNALQAIALANGLRRGPGLWSYDGQAKIAFLPLPPHASYRRSMLQALYRQMEEEIEQLTAQVAEQAEQRAGARLLMSHPGVGPVTALATDVFLGDPQRFADGKALASYVGLIPREYSSGAHQWLGALTKQGSPFLRFLWNEGAAHAVRRDPELQRFYRRKLVQKGLGKSRVAAARKLGIRLWIMLRDQIDYQEFCRRGQKQSGAVCAGMLEVGNGANRHRPIG

SEQ ID NO: 166264 - protein, 340 aa, unidentified
MTFGTIGIDVGKNWFHLIGLDSRGVIVTRQRFNRAQLLRFMSKLPPCVVGMEASCGSHHLARELSGMGFDARLMSAKFVRPFLKGNKNDYLDAEAIAEAVQRPSMRFVPIKTIEQLDLQAIHRTRSGLISRRTGVINQIRSFLQDRGITVPQGPAVLARALPALMTAEEARLSDSIKQLIRMLREQWVSINQQVDELESELRSIVERDDACKRLASIPGIGAITASAIVAAIGDGRMFRSGRDFAAWLGLVPRQHSTGGRSTLLGISKRGNAYIRTLLVHGSRCMLRFFKDPDTAIGRWAVALKSRAHANVAAVALANKQARTAWALLTQGTFYQARPAV

SEQ ID NO: 166265 - protein, 410 aa, unidentified
MELLHPHCAGLDIHKETVVACVRHLRNGKVMTGIKTFKTTTEELIALSDWLTAEGCTHIVMEATGVYWKPVWHILSDGEFDLVLANAGHVKNVPGRKTDVNDAAWLAELMAHGLVKASFVPDQPTQQMRDLLRTRKQFGRERSSHIQRIQKTLEDANIKLDLVVTDVLGLSGRRILQALIAGQTVPQALAALADRRIHATSAQLEAALRGRVTDHHRFMLKLHLDQIDAQDAATARIDKEVDGNVEPFRVALEMLNGIPGVSSLSAEVIIAEIGVDMSRFETAGHLISWAGLCPRNDESAGKRRSSRMKKGAPWLKTTLVQCAWAAARTKDSYFQAQYHRLRSRRGPKKAIGAVASSLLTTAYHMLKTGTLYQDLGANHFNHRAKDKQALHLIYRLKNLGFNVQITPSPA

SEQ ID NO: 166266 - protein, 305 aa, unidentified
MQTLVERGCELDVHQATVVACLLIVLNSGKVHKQVRTLGTTTRELMGLREWLLSESCTHVGMESTGVYWKPIYAILEGAFEIVVANAQHVKKVPGRKTDVKDAEWIADLLCHGLLRASFVPPKPIRELRDLTRYRRKLVESRSAERNRLLKVLETANIKLASVASDVFGVSGQLMLQALVEGKATPQEMADLAKRQMRKKIPELKLALEGKVEEHHRFLLRVQLHRLSAVENDLGIVEQRIQEKLKPYAAEVTLLDEIPGVDATLAGAIIAELGVDMSVFENVSQLASWAGVCPGNNGIGWQAQK

SEQ ID NO: 166267 - protein, 412 aa, unidentified
MNVVYERCCGLDVHKKMLVACLIVPGADGQRQKQVRSYSTMLADLLALRDWLTAAGCTHVAMESTGVYWKPIYNVLDGSVEVLVVNAQHLKAVPGRKTDVHDAEWIADLLQHGLLRASYIPSRAQRELRELTRTRTRLIQQRSQTINRLQKVLEDSNIKLGSVVSNIMGMSAQAMLKALLEGQTDPHLLAELAQGRLRAKREQLEQALVGSFQPHHRFLIQEHLTHIDYLDEAIARLSQEIAAQLRPFESLLGLLDTIVGINRRLAEVLLAEIGTDVKRFPTAKHLASWAGMCPGNDQSAGKRLSGRTRKGNRWLRTALMEAAHAAAHSKNTYLSAQYHRLASRRGKQKAVLALAHSILVIVYMVMSRQEAFKELGGNYFDERDRQAVEQRLVRRLEQLGYQVSLHPNDPAA

SEQ ID NO: 166268 - protein, 375 aa, unidentified
MKNKVRFLGLDVHAETIAVAIAEPDGEVRSLGTIANRAESVRKMVKKLGPAEQLKACYEAGPTGYVLYWQLAELGVACEVIAPTLAPMKAGDRVKTDRRDAERLARSYRSGDLTAVWVPDEGSEALRDLVRAREAAKQDQLRARHRLSKFLLRAGQRPAAGVKAWTQLYMAWVRQLRFPQVAQEATRLDYLHEVEHMGERVARLEQAITEAVKLASPAVQEVVKGLQALRGIAQISAVTIAAELGNISRFEGARQLMGYSGMVPSENSSGGRTQRGSITKTGNAHLRRIAGEAAWSYRLRPGVGPALRKRQEGVPEEIKEIAWKAQHRLHTRYMRLAAAGKDQRKIITAVGRELLGFVWAIGVKAESAAKLKMAA

SEQ ID NO: 166269 - protein, 345 aa, unidentified
METMYYIGLDVHKRTISYCVKGVSGRVYAEGSVPATRFELDRWMKTMPQPWTAAMEATVFTGWIYDHLRPHATALKVAHPLMLRAIAAAKKKNDRIDAKKICDCLRCDFLPECYMASTAIRERRRTLRYRNLLVRQMVQMKNKISMLLMEAGVCYNKQKLHKAGYFRELLATNPDINEGLCSLLRVCRETVVRLQRTESALVRSLERDSLLVERVERLMTIPAVGPITALTWALEVGEVQRFSSIKKAISYCGLCGAEKSSGSTVQRTPLSKQRNKHLQTTLIEAAKMAPRNSPELAMLYDKEKQKGNANRATLAVARKLVAYLMAVDRGQRNFQVVETSDCIAA

SEQ ID NO: 166270 - protein, 354 aa, unidentified
MDLKETLVILGVDTHADEHVVVALDDFGRRLGHKSVPSTEAGYAALVAWAEEFGTLLRAGVEGSGSFGVGLVRFLRARGVEVLEVNRPNRQHRRRFGKHDTADAEAAARALQADTATGEPKSADGPAEMVRALHVARRSALKARTQAANQLHALLVTSPEELRAELRDLSTAKLVAVAARFRPGSLSKDLRAATKLAMRSVARRHRRLSEEIAELEEQIAQLVSEAVPALVALPGVGTDTAASLLVAVGDNPERLKSEASFALLCGVAPVPASSGKTVRHRLNRGGNRDANRALHMLALGRMSWDERTREYVARRTAEGKSKREILRCLKRYVAREVYRILTAPGALPSYVSVP

SEQ ID NO: 166271 - protein, 354 aa, unidentified
MIIIGVDFHPAYQEIATVNTDTGEYQEKRLAHPKEAEEFYRSLASVGQAVRVGMEASGQAQWFERLLEGLRLELWRGDAEVIRAKRGRKQKTDREDARHILKLLLKDDFPRIWVPSWENRDLRQLLWHRHRMVQARTRVMNQLQAVALKEGLRCKKRLWRASGRQQLESLQLAPWSSRRRRELLELLDRLNPTIAELSQAIEREAEKCPEAQRLMTHPGVGALTALAFVLIIGNAERFGCGKQVASYLGLVPLEKSSGNRRRLGHITKQGSSLVRFLLVEAAQVTVRSLPEWRSKYHHLVMRRGRKTAKVAMARKLAVRLYWMWRKGWDYEQWKKFGSYVGQPGNRDGVQSNTE

SEQ ID NO: 166272 - protein, 367 aa, unidentified
MSADTFVGLDVHAESITAAILRPGSEQPEVIKLSSDLMKVRRLFRRLSGHGPVRSCYEASGAGFVLQRVLAGDGFSCEVIAPSLIPRKPGERRKFDRLDAVNLARLYRSGHLTAVHVPSEDLEAIRRLLRLRTTYHQYITATMHRISGVLRNHGFVFKEGKSTWTKKHRMWLARLRLTLQGPLSTALAMEIQHLEYLETELHSMDTELERYAQLPLYRSKVEALCCLRGVKILTALTIVCEVDDVYRFPTPRKLMAYFGLVPSEHSSGDRQHRGSITKAGNIHVRRLLVEAAWNNRHNAGAALILNRRRQGQPPEIVAIALKAQHRLTKKFLRLDQRKHRHVAITAVARELCGFVWAILMALPQTQH

SEQ ID NO: 166273 - protein, 356 aa, unidentified
MSIVAERYKFVIGVDTHAATHSLALVTAATGAHLDEAVFPNTVSGWDRAWNWIARRIDGQSALVVIEGIGSYGAGLAERVSSAGLPVAEPPAIPAAQRRGVGKTDALDAVRIARSVLAVDTARLRQPRATGRRAALRILVVAREQMVAERTRVINALTALLRTVNLGLDTRKALSHSQFKVIAQWRERKEDAVLSTCRHEAIRLAKRIVALDAELADNRKGLDVLVEDLAPQLCELPGIGSVVAASVLTAWSHPGRVRSESAFAALAGTCPIPASSGNTLRHRLNRGGDRRLNRALTTVVIVRMRTHAPTRAYVARRRAEGRTTKEIMRSLKRYVTRQLYRTLAAAHPVPTPLDTI

SEQ ID NO: 166274 - protein, 267 aa, unidentified
MDNHTQYLGFAGVDLAKKVMQIHFVTADGEITDKSAKRAEFLDFFRNRGKCLIGMEACGSSQDWARKLEAMGHEVHLLPPKAVKPFVSGQKNDHNDAIGIYKAMFNGVRRVPVKSTEIRDLQTLRRIRSQVTKDKVKEINHVRGLLAEYGIVMGKSLNAFNKDISSALGILTERGDVSPLVAEELRTTVEAIKAKIERQKKLDQEIEQLARGCKNYENFLKTPGVGPFTAAMLCVLLCDPSIFANGRQFAAYIGLAPRSRGSGDSSM

SEQ ID NO: 166275 - protein, 391 aa, unidentified
MISVGIDVAKDKHDCFIINSEGEVLADVFTIPNNMDGFNSLLQRIRECSAPQDKIKVGLEATGHYSYNILGFLLDNGLTTYVLNPLHTNLYRKSLSLRKTKTDRVDARTIAAMLLSDVGLKPYTDTAYHNEELKSLTRYRFDKVKERSQLKQSVSRLVCILFPELEKMVPTLHMASVYTLLDEFPGAKQIADAHLTHLKTVLFDTSKGRYGRDKAVEIRESARTSIGSAMPAKSLELRHTIRLIRELDAEINEIEAAIEGIMDQLHSPITTIPGIGTRMGAMILAEVGDFSCFESPDKLLAYAGLSPSTYQSGQLNNCYAHMEKRGSRYLRYAIFNAAKYVCLFDSTFATYLAKKRAEGKHYNVAITHAAKKLVRLIFALERSGQAYRTAA

SEQ ID NO: 166276 - protein, 368 aa, unidentified
MRASVLYVGLDVHKMSMDVAIAATGGEVRHYGRIGGDLEALDKVVRKLHSTSPTLRFAYEAGPCGYQVYRHLTGQGYPCLVAAPSLIPRRPGDRLKNDRRDAVTLARLFRAGELTAVKVPEPEDEAMRDLTRAREDAKSVERRAKQRTAAFLLRHGHRFSGKTTWGRGHWRWLRGLFLEHPAQQVVLQEYLDAVAEAAARVQRLTAQIRELIPQWRQAPVVRAYQALRGVSLIVAATMAAEIGDLGRFANPKELMAHLGLVPSEHSSGATVRQGHITKTGNGHARRVLVEAAWAYRLRARLTRALHRRQEGLSPAVREIAWKAQLRLCARYRRLFARGKNKPMIVTAIARELAAFLWAIGQAVQTATA

SEQ ID NO: 166277 - protein, 344 aa, unidentified
MLYAGMDISSKSFVVHVVNERKIVVLKTEIAASRESLRWMVRQLGREPKLFVFEAGNQLKWVADTLRKEEGVSLHVVHPNEVKWISASSGKTDKVDAKKLAELARGDLLPRKVHLVEGEARQLRELLSARTQLMQKRVSILNTLRGYLKQEGVRLGANFFAREDWQGRLEKTRLSHTLKLILKVFRPSIEALEASEHELNQRISDIKNEKTQLLETIPSIGVLSSRTVVAALDDAKRFENRKAVAKYGALTPTIYQSGDTVQLGRINRDGRHEVRRVLLQCAHLLSRMKSPAAKPLRQFYERIERRQGKKKALVALARKLLTVAYGVLKSELPYDQSKLLPHGA

SEQ ID NO: 166278 - protein, 366 aa, unidentified
MIKKLLKQVVGIDVAQKKIDVSLGRMDIEVNTEVYAFKVFPNSEKGFASLLLWVKKNTEADVAVRFVMEATGVYHEALAYHLSTRAYSISIVMPNKITNFFRTLEIKTVTDKSMSEAIAQFGLEKKLDNWIAPQKVYRELRQVTRERDQLIGERTMNKNQLHAEQTEAYPNERTVKRVMDRIIMLNKQIRQIITEVTEMNNNDSEVAAATKLITTIPGVGLLTAITVLAETDGFSLIHNRRQLTSYAGLDIKEKESGTSIKCKPRISKRGNKHLRKAMHLPALSAIRHTERYKATFTSIVGRTGIKMKAAVAVQRKLLEMIYTIYTTKQPFDIDYLQKEAKKKQELKDVKEKESNSIELLPVQAGM

SEQ ID NO: 166279 - protein, 415 aa, unidentified
MKTYILRQPKPVESQKPARQSRRKTATGTTATVVLGRPLALTNDRVLFTGFDVHTDSIAVSLAPSDSTEVRRYGIIGGTHDDVLKLLTKLQAAHPGTELRCCYEAGPHGFSLARCLHRHGYVCILVAPSKIPRQPGDRIKTNRRDADQLARLYRAGELTGIYVPDPADEAIRDLIRAREQVRDHQHRSRQQLKMFLLRHNLRYTGKSAWSPAHLRYLAKLKLPFPVQQIAFQEMLDGITEAAARLERYDVEVARAMPGWRWEPVVRALMALRGFALLHAATLIAELGDFNRFSHPAQLMNYLGLVPSENSTGDKRCQGGITKTGNAIARRALVEAAWQYRSPARVSPHLKKRQEGLPKAVTDIAWEAQRRLHHRYVHLTRVGKKKSQVAVTAVARELAGFVWAIARQIQPFAPKA

SEQ ID NO: 166280 - protein, 354 aa, unidentified
MSQQTNCAIAVIGIDIGKNSFHVVGHDARGAIMLRQKWSRGQVEARLANLPPCLIGMEACVGAHHLSRKLASLGHDARLMPAKYVRPYSKGQKNDFNDAEAIAEAVQRPTMKFVATKTAEQLDLQALHRVRERLVSQRTGIINQIRAFMLERGIAVRQGIGFLRTELPTILATRTDALSPRMLRVIEELAGDWRHLDQRIDGLSGEIEALARQDPACSRLMTVPGIGPIISSAMVAAIGTGEVFSKGRDFGAWLGLVPKQISTGDRTILGKISRRGNRYLRVLFVQAAWVMLVRIKNWERYGLKSWIEAAKRRLHHNVLAIALANKLARIAWAVLHKGRAFECVKTNEAVSQSA

SEQ ID NO: 166281 - protein, 352 aa, unidentified
MSAVSVGCDAHKRYSQVEVQDSNGRVLRQARINHAPGALRTFFASMPPGTPVALESVGNWYWIADEIESCGCRPLLTNPARAKLLMGHVNKTDKLDANGLATLLRLGSLPSVWLPPAELRDQRELPRTRMALCAWRTSIKNRIQSLLAKYAVTPEEGQKVFTQQGRSWLQEAIKRLPPETGRCLSQQLELLEELNAHIATMEERIRSQIALTPTMQLLKSLPGVGDILAIVIEREVGTIERFPSPEQFASYSGTTPRVSSSGGKSHYGRMRTESNQYLKWAFIEAANAVAAHHNQTGWNTRHCAKLYMRIRGRKGASVAIGAVARHLAQSAFWVLTKKESYKEPTKVSPKQE

SEQ ID NO: 166282 - protein, 393 aa, unidentified
MHNCLAIDVAKGKSMVTLVSSNGEVLIDPYEVNHSIIDFTNLLNRIKKLKLDNISVIMESTGIYHRPIERFLVENNFKVFVINPIYGKMKKRNLRKTKTDKEDCFNLVNLFISNTFKEYIKPDQLYLDLNALSRQYFALDELCVNIKNRYRNLVYLCFPEYENIFKDSLIYSNIALKFIEAFPHADIIFNTRIDKLQNFFKKHKFRYWKSKAFKIKEISSSSYPSVNMNDEIVSNLSQIARLVNEYQKEIDIIKYKITFLAKKSKYFEPINSIYGIGEFTTSIIIAELGDINRFNNIKELTAYCGLDPSIKQSGKSINVHGPISKSGNKYMRKILYITCSNIIRLTAISKSENDIEIYYRKKRNEGKHHYASIVACTTKLLRKILALCKQLDN

SEQ ID NO: 166283 - protein, 389 aa, unidentified
MFYVGIDISKFKHDCFIVTEAGEVVCDSFSIKNDSDGFTELLSVLDSLYPKENVRIGFESTGHYALNLKLFLEKAHYSFMEFNPVLLSKFNKSQSLRRTKTDAIDSISIARWLMTVDYKPYPIGFYHTYALKSLTRLRDSLVKQRSFYMVKITNVLDHVFPEFKPFFNNRFSKTAIYLLDNYGSAKSIANMNTRSYDALRSISRGKFSMQKFIKLKELAKNTVGCDHELFTCQLNSLLSLYKQLANEVDSLESQIESLIVEIDPKTLSIPGIGPLSAAVIYAEYGDLSRFNSPAQMLSFAGLEPGYYQSGTSEHGGGMVKRGSSHLRYTLMNLCIPLIQYNMTFAEYYHKKRNEGKSHRVACSHLVKKLIRVIFTLEKNGIDFDPTKLR

SEQ ID NO: 166284 - protein, 425 aa, unidentified
MKSTRNNATNQRIERISSQHAVVGIDIAKDVHAAQVTDFRGRALTHRHFSFTNSQEGFVKFLRWIQDVQAKHRLPSLIVGVEPTGHYWFNIANWLLERGIEVVLVNPVTTHRNKENRDNSPSKNDPKDALTIADVVSRGYYTEYAPQEDAFERLKTAMSNREYWVKLGISLGNRLVRWIDLYFPEFRRIFPDWTVLRSLASLRAFPLPSDLRGLNADDVMEGWREQGMKRAGGVSGKAKAVALLQAAASSIGETRASEEVHRDLKRLLDAYEQVSRELETMQREIEEMLEILPLAEQLRSIEGIGTITIAALLGCAGDLRLYAHGRQLLRRAGLNLAECTSGKFKGQIKLSKRGDSMLRKYLYLGMLNLVRQHPDFRRWHVRNQEKGMKKQASIFKLLGKLARLLIGMVQRGETYRTEAGSSMAA

SEQ ID NO: 166285 - protein, 358 aa, unidentified
MESVKYVGLDVHRDTISVVVLEESGKMVMQTILATHAAALLDFVGGLRGSVHVTLEEGTHSVWLHDLLVRRVARVVVCDPRQNALLKAGNKSDKSDKIDARKLAELLRAELLSPVYHGETSTVTLKHLCRSYAALTEDTTRVMGRIKALYRSQAISSAGQKPFGRRHRGQWLAQLTQEGMRRRAERLYEELDALQSLRREARRELIVESRKHDAVKLLCTVPFLGPIRAAVLVGRVQTPHRFRTKRPFWAYCGLALETRSSADYHFQEGQLVRAKKPVFIRGLNVNHNHDLKNLFKSAATTASAMPGPFHVFYENLLIKGMQPAMARLTLARKIAAIALCVWKKGEPFNAEHLKPQAA

SEQ ID NO: 166286 - protein, 360 aa, unidentified
MALAKTVVAWDVHVSATVAAIIDRDSGELRRRRLSGRGSEVCEFVAALPGPVRATYEAGPTGFALARRLQAAGVDCLVCAPGLIPRGPSDRVKTDQRDAERLVRLLIAGELHRVAVPTVEAEGLRDLVRAREDLRGDLMSARHRAAKLLLRHDVRFEGTQRNWTQPHLRWLSTVRFEQPGTQAAFDDYRGAVEALVIRRSQLEAAIAEQLPLSPWAQTAKRLMCLRVIDTLTAAGLCAEVGDFNRFRHPEQLMSFLGVVPSEHSSGTRRRQGSITKSGSQHARRLLVEAAWHYRQPPRVSEPLRRRQAGADPAIVALSWKTQRRLHRVWSRMEQRGKRRTIIAVAAARELAGFCWAVATE

SEQ ID NO: 166287 - protein, 419 aa, unidentified
MTQSEDSKIIGIMHPICCGLDVHKESISACVIYPDKDGVDQYDIKVFGAFTDDLMRLRSWLLDHSCPVVAMESTGIYWRPVHNVLEAAVQVVLVNARDIKNVPGRKTDIGDSKWLAGLLRHGLLRGSFIPSKDVREWRDLTRLRKKYVHTVGDYRKRTHKLFESANIKIDSVVSDLFGATGRNLMNLLVSDRKSLTLSDIQLCVRGKLKGREEELYRSIQGFFSDHHRFILKRLLETIGMLEAEIEEFDSHIRHLMKDQNALLDRMKKAAGIADVSSCEILAELGPDLTAFPTGEAMVSWAGLCPGNNESAGKRKSGRSPVRKHHLKTIMIEVAWAAVKKKGSYFKDKYYRLKARRGAKKAIVAIAHRILLGIYHVIKDGVDFRDLGEDYLTQRNKSLKLFQLRKQAQSLGFNLVPQTT

SEQ ID NO: 166288 - protein, 353 aa, unidentified
MMYVGVDVHKRVCRAAVVNDEGELIDELSFRNSKRGIEDFIMRIEAFRDMVLVAVESTANLWIRLYDALEERGIRVVLSNPSKTRLIAEARVKTDKVNARILAQLLRADMLPLCFVPSRRQRDRRQFIRHRVHLVKMRTEVKNRIHALLDKHGLRCPFKTLFSKKGLEWLRSLRLGFADDAVLRSDLALLGSLDEQIGFMDVAVNDERVKLLMTMPGLGYFAASLLVAELCDISRFSSDKRLVSWAGLAPGVHQSGDKVVHGRITRQGNRLVRWVLVQAAQTARLYDDRFREFYERYARRRGDKKAVVAVAHEMFRVVYFMLKRNEAYRGGRSDLSWRKLNRLERKSLVGLQV

SEQ ID NO: 166289 - protein, 304 aa, unidentified
MDISKAHLDVFRLEDQAAQRFENSSAGFRALRKWLGKVPVARIVFEPTGPYHKAFEAALGEVFPLVKVNPLQARRFAEAHGTRAKTDAVDARMLARMGVAFELVPQAQSSRETRVLSDLHVARTGLIKDRTRLRNRAQTQDIAILKRQTKARLAQIDRQIAELDAEIVELISARETTARSRDILCSMPGIGAVTAAAMLTLLPEIGTLERKQVASLTGLAPITRQSGQWQGKSFIGGGRKPLRDALYMPALVAMRFNPDLKAKYEDLRAAGKPAKVAIVAVMRKLIETANALVKADRAWTPKTA

SEQ ID NO: 166290 - protein, 402 aa, unidentified
MNAVGIDVSKGKSMVAIMRPFGEIVSTPFEIKHTTSDINSLVELINSVEGESRIVMEHTGRYYEVLAHQLSEANLFVSTINPKLIKDFDNDSLRKVKSDKADAVKIARYALDKWQNLKQYSVMDELRNQLKTMNRQFGFYMKHKTAMKNNLIGILDQTYPGVNTYFDSPARSNGSQKWVDFASTYWHVDCVRKMSRNAFINHYQNWCKRKKYNFSQSKAEEIYGKAKELVPVLPKDEITKLIIKQAVDQLNSASTTVESLRTLMNETAFKLPEYPIVMAMKGVGPSLVPQLMAKIGDVSRFTHKGALTAFAGVDPGVNESGTYEQKSVPTSKRGSSDLRKTLFQVMDALIKTKPQDDPVYQFLDKKRAQGKPYYVYMTAGANKFLRIYYGRVKEYLSSLSES

SEQ ID NO: 166291 - protein, 443 aa, unidentified
MSHKSTTHLKGERGQAFADQIRNIPPERILCVSLDIGKYFHVVMIHNALGEIVTPTFELDIFQSGFTALCAAIDEASARCRAKVVLTGLEPTGHYFENLARHLRARPQPVTLVNSYAVKQNRSQQMMRREKTDEIDVASVGDLLRRGEGTLYRPASGPYLQLQQLDRTRIAKLKMQTMLKNQILGHLDRIFPGLVLQGEEALDRYTPLFSTSFWRCQTLQHLVRLCPDPCRLVTLSPSELVALFHGHHYRLGQQNAAKIIAYAQKTLLPDPELSTIRSDLLQADLTLLEHLQLQIDHLEQRLGELLAPLPTAVWAKLKGLSTVQAASLTAAMGDPAHYTYAAQIFRRAGLVSGRNDSGNRQRKGKGQGVLKVGDVYLRRALMTATETLILHQPALHTYYTTLKKTKHPGVARVATARKAMGILWATLRDQRSTLLILKKGETM

SEQ ID NO: 166292 - protein, 340 aa, unidentified
MPLYGGIDLHANNSVIVLLNEQDEVIYGKRLPNALSTVLDQLAPYHTEIKGLVVESTYNRYWLVDRLMEADYQVHLANPAAIQQYSGLKYSDDHSDARWLAHLLRLGVLPEGYIYPKAERAVRDLLRKRAHLVRQHTSNVLSVQNILARNTGARFSVKRIQELTKQELKSLLAEEPQVLAVTSSLAVLDCLRQQIKTLEKTVHKRLHHTPAYEQLLTVDGIGTILAQTITLETGAISRFPTVGNYASYCRCVDSNKISNGKSKGTGNVKNGNPYLAWAYMEAAQFALRFQPAAQRFYQRKLAKSRNNTVLARKAVAHKLSRACYYIMRDLVPFEAAKAFG

SEQ ID NO: 166293 - protein, 479 aa, unidentified
MTKQTAQRSDLKAVPLLLNESLYIGVDSGKGTHVAGFLSKTLLERHDRFEACPALVFENAREGFRMLMERARSLAPLEQVFVLMERTGHYHRALQQYLQELDITVYVMHVQSRPSGMLKTDKRDALTLANHLYSQLELGVQVANKLHLVRRVVPPTEAAAQLKGLIRHRYELIRESTQRKNKLTAICDAVFPELTRIVKDPNSLVALALREQFPTPQALAIASFPTLQLIRGGARSLSDAKLLELQRVAAQSSGVKDMARLRGLLLQQRQLIKELRLLREHVDQLESEIGSIVEQAREGQILLSFPGIGPLMAATMIAAIGSIHNFPSAATLKSYFGWAPIREQTGTSYDRSRLTRGGTRTMKQMLFLVVFQAIRLRDNEWAKLYERLVKAKCPSDERTQSHVGKKRVSGRVAGQMTEAIYALLKRDAELLSTVLPGQDPPPPQLYDPEVHRQHRQGQYRPLKSTPPPNTITLVHPSSS

SEQ ID NO: 166294 - protein, 411 aa, unidentified
MELLREALPMSALVVAVDPGKVSNRVWLASGERGLLGKPVSLPVLREGVEALCQLIMTSGVAGPPIIGVEATGGLHQAWVAELERRYPGSVRLFAPSETQAARTQLGSRRFKTDDRDCAALVWLLRQGAGRPVADKPVDALLGAVRHRRGLVADRRVLQQRLHHQLQALCPGLSAPAGHGRALALDKPTGQAVLGCAAAFAGRPPTIGSLVARAPGRHTQATARFWVERWRRLLPPPADAELRAHRLGRDLARHQALQADITAVEGQLLRLLAGTDGQVLTTLPGVATVRAAAFAAHSLPIDRFPTPEHLYAATGLAPAAWQSASLKRRGHISRQGLPEHRDALMGIAWGLSQYSPSFHQRDQELRGRGMRPIQARVALARHACRLCHALLRTQQPFDEARYRSARHSRGR

SEQ ID NO: 166295 - protein, 371 aa, unidentified
MTREKILYVGVDVDDKSFHGAGLHLLTGEKFQFKCKPTSGALITRLRDFIKKGFKVKVCYESTYIGYTLYRALAKVSIDCEIIASSLIPNQSGKQVKTDRLDALKLAEYFGKGLLTAIHIPSEEDEKVRDFIRSRNFMVKQRRHLKLHILGLCRRNGFNFREETGGKCHWTDTHERWLKSRISKCEDSVLQQNFNLLLSQYSLINSGIESADFEIEKMSEKPKYKVAKNALNCFRGLSTLSSMTLIAEIGDIRRFKHPKQLTSFAGFDIREYSSGGKSKRYGITKMGNKQIRTVSVESCQLASKPKIVSKRLALTRREQSFKIVDVADRCMQRLHKKSNRMHYAGKHTNVIKVACAREMLNFVWEVLYLVA

SEQ ID NO: 166296 - protein, 323 aa, unidentified
MRTSVGLDISKKTIDAAYMPAERQITSAVFTNDADGIQSLKQWLDAFGQSDLHICMEATGNYYEAAADALSNDYAVYVVNPLKIKCYAKKRFSRTKTDKQDAKIIAEYCFTALDAELEQRHTPSADQYRLKRFMALHGQLKQQMTAQKNRLKAAKDKFVQSIHKEQIAQLQRHIDAVEQEINDAAGGDSGTKATTDKLQSIPGIGVITSAKLAYYLTALKFKGAKQFAAFAGLVPQKKESGTSVKGKEQMTNYGNRQLRGALFMPAMVAYRNGYFPELIKRLTKKKKHKKVIIGAIMRKLATIAYYVHTTGKPYEPHRYRPQS

SEQ ID NO: 166297 - protein, 331 aa, unidentified
MKNKEIVGIDVSKNTLDVCILSTNYHFTVKNTPEGFASLIETTSGHVKEKSHPPFFCFENTGRYSRLLSVFLEESGFHFALLDALDLKRSMGLTRGKSDKKDARMIALYAWRRRDELASSQLAGPVIDQLRQLLTLRDKLIKHLTTFKNTTHDLHDGYCDVEFDFIKERHLSMLNHLQQEITLVENEISRIIDLHEELSSNYNLLRSVPGIGNVLAIYLIVLTQNFSRFNDPRKFACYAGIAPFEYTSGTSVKGRSKVHPCANRQIKSLLNMAAMASIQLTGEYKTYYLRRLLDGKNKMSTLNIIRNKLVSRAFAVTKRGTPYVNLHKFAA

SEQ ID NO: 166298 - protein, 431 aa, unidentified
MIYIGIDVAKDKHDCFITNSEGEVLFNAFTIPNNADGFHDLFQKISSLTNDFSNVKVGLEATGHYNYNLLGFLIDKGLPTFVINPLHTNLFRKSLSLRQTKTDKVDAHTIALMMMSGVNLQSYSDTSYHNEELKSLTRYRFDKVQERAKLKTSISRLVNILFPELEKLVPSLHMVSIYALLAEFPSSAQIASCHLTRLTNLLANASKGHYNKEKAIEIRNAAKHSIGSNMPAKSLELKHTIRLIQELTSEIDEIECFIKSIMDEIRSPILSIPGINYRMGAMIIAEIGDFNRFSSPDKILAYAGLSPSTYQSGQLDGCYSHMEKRGSRYLRYALFNATKFVCIWDNQFSAYLAKKRSEGKHYNVAISHAAKKLVRLIFAMEKSGKAYHLTSYLLLEHLQRCSYCHAVFKVQIYLKSISAIYSKNLHFNLDF

SEQ ID NO: 166299 - protein, 424 aa, unidentified
MKVTYQTCCGVDVHKSFLVATIVKTTGGIEPSYQKKRFSTFNNSILEFKQWLLDNDCRDVCMESTGKYWVPVFNLLEDEINVVIANPKWVKAVKGNKDDTKDSKWIGDLFRLGLVKGSYIPCKIVRILREYTRYRCKLVSCRSSEKNRYQNALTVCNVALDSVVSDIFGKSSTSIIDYLLEQSGTSINHEEIASKLLRSLKSKEDAVIESVEGYQMTDAQKYRMRLVRAHMDYITAEIKDVDKMIENMISSNPDFENAVQFLCTIPGVKCDSAITIISEIGTDMSQFSSSKRLCCWAGLTPGSNESAGKKKSVRITRAGVYLKPALVQCAHAAVKSDQSPYYKKKYESLVKRRGKKRAIIAIARMILTAIYQMLSTGEQWNPSDLYKINVPEALIEKQKAKAIKQAKKLLQREGLLPPDEPVAS

SEQ ID NO: 166300 - protein, 343 aa, unidentified
MSEYAGKQFVGIDLHRRRSVLVRMSDAGEVLETVRIVNDVDRLNSVIERAGVDPEVVLEATYGWYWAVDVLQAAGARVHLAHPLGVKAFEYRRVKNDVRDATDLADLLRMGRLPEGWIAPPATRELRELVRHRAKLVGLRSHCKAEVHAVLAKCGVQVTLTDLFGVAGNDLLDRLELPAPYAARIASLRRLLEDLEFEIDLFTGLVRGRLVRDPGYVALQQIPGIGPVLAAVFGAEVGDITRFRTAAQLACWAGLTPKHHESDTHVHRGRITKQGSRLVRWAAVESVQLLPAHTRVGAIRDRVADRRGRNIGVVAGARQQVEFVFYALRDHHVRALHPPRAAA

SEQ ID NO: 166301 - protein, 413 aa, unidentified
MKSARDTLPEEPANGLTCGIDWARDDHAVSVVDARGRQILRLTVEHSAAGLRQLRDTLARHGVEEVAIERPDGPMVDALLDAEITVVVISPNQLKNLRGRYGSAGNKDDRFDAFVLADTLRTDRARLRPLTPDSPATAALRATCRARKDLVAHRVAVANQLREHLKRVLPGAVGLFADIDSPISLKFLRRFDSQDRADWLSTKRLAAWLASVGYCGRVDPAVLHARLTAAPRGATGDQGAAAAHITRALLATLDTLVEQIKALTEQITEQLDTHTDAHIFTSLPRSGTVRAARLLAEIGDCRARFPTPESLACLAGVAPSTRQSGKMRAVGFRWACDKQLRDAVCDFAGDSRRANPWAADLYNRALARGHDHPHAVRILARAWLYIIWRCWHDGVAYDPTKHRALQAHQQHAA

SEQ ID NO: 166302 - protein, 440 aa, unidentified
MLNDHAAGIDVGSTRHHVAVPEDAASPCVRTFDAFTEDLVAIADWLCACGIKTVAIESTGVYWIALFQILEERGFKVCLVNSRNWRTAPGRKTDVDDCQWLQYLHACGLLRASFRPDQQVCAVRSLLRHRDGLIASAASATHLMQKSLNQMNLVLHNVISDITGKTGLAIIDAILAGERDPAVLSELRDPRIKNSKEIVAKSLVGDYRTEHLFTLKQSLASYRHYQELIGECDREIERLFSEFDSHPGSGDVPLTSGAPKRDRGNKLRFEHTNLTEELRRLLGVDLTLIPGFGALTIYNLIGELGRDLSAFPTYKHFVSWMGVCPGNHISGGKSLSSKTRYVPSRAAHIFRVAAQSLWHSQSALGDYYRRICARLGRQAGNTATAHKLARIYYHLLTTHSEYDEAAFAKENARLEKRRHSRLHKDAARMGYQLVPMAAQG

SEQ ID NO: 166303 - protein, 372 aa, unidentified
MLYAGVDVSKDKVSMAVLTSGGTKLTSGDFEITTEGLKLLELTLKHLKDEISMFIEQTGTYSIPVIFYLMKRVENLRIYLVDGLNFSRFIKLEGRKKQDKTDAVSLAEYGRRGLKARIITDKDIKAYELKVLISEREHLLKVKNQIENRLRQLIETIFPDSKTLSKPVFWSEVRKGWGLIDWKRLTDKPEVLSTILRERKIWLEIIHSLEETEKEINTFLRLNYPEDVKILKSFGFSDTTTAYFISVYVDVERFKDVKAFKSYMGLGLRIYQSGKKEKNVVNSYTNKYIRKLLYMYVIQAIREKSNHRKVKDYYLRQVEKSGSKKKAIIKTAGKIIEWVYYCLKHREPFNWEVKHETQQEDISQAYSGQAED

SEQ ID NO: 166304 - protein, 397 aa, unidentified
MYIVGIDIAKRKHEAAVIDGEGTVIIKPFSFTNNCSGYNRLLAMLAKAKLPLDEVSFAMEATGHYWLALFTRLQKEGFRVQVINPVQTNSIRSFYIRQAKTDPRDALLIAEVIRFGHFSESTLHPENIYELRELCRGRHAIVSMQADVKRKVVALLDQVFPEYETAFTNLFGDTSMAILQACPTPKELSEMPLEELCYLIEVSSHKRFRMAKAQELQELARNSFGFAMAGDVFSTMIRLYAKHLDFLKQQVREMDRKIAEIMDTLDTPITTITGIGPTLGAYILSEIGDINRFSSSAKLAAYAGIDPTMRQSGEYNGVRNRMSKRGSPYLRHAIWLATSSAVLHDPALKLYFQKKRDEGKPYMASVGHACRKMVSIIYAVMRGNKAYTPCIPNEISA

SEQ ID NO: 166305 - protein, 354 aa, unidentified
MSQTFSTVISVVGIDIGKNSFHIVGLDRRGAIVLRQKWSRGQVETRLANMPPCLIGMEACVGAHHLSRKLKMLGHDARLMPAKYVRPYSKGQKNDFRDAEAIAEAVQRPTMRFVATKTADQLDLQALHRVRERLVSQRTGIINQIRAFLLDRGIAVRQGQRFLRAELPVILATPPDVLSPCMVRMIEDLAADWHRLDERIECLSGEIEGLARRDSGCERLMTVPGIGPIISSAMVAAIGAGDAFAKGRDFAAWLGLVPKQISTGDRTILGKISKRGNRYLRVLFVQAAWVVLIKPKSWERHGLKPWIEAARKRLHHNVLAIALANKLARIAWSVLVHGRDFEARKIPEAAVLSA

SEQ ID NO: 166306 - protein, 419 aa, unidentified
MSDPPLQVWTRYIAIDIHKHYLMIGGIDAHKRIVLQPRRIELHRWPAWAEANLHPADAVVIEATTNAWTIYDQLVPLVGRVVVAHPAKVKLIADARVKTDKVDVLTLAQLLRADMIPEVWVPPQHVRELRALLSHRRRLVSLQTTAKNRLQSVLHRLNLRPPQGDAFAHKQRAWWQALELSPTERLRVNQDLATLEHIGAQIAAVDAELRRLSTSELWSEQVPYLLQLPGIALLTAMTILSAIGDVRRFGAAKQLVGYAGLGAGVHDSGKTHRSGGITKQGRRDLRFVLVEAARTAVQTHPYWKREFARLAKRIDEHKAVVAIARKLLIVVWHVLLAKSADRRADAEQVAFKLMVWSWKLSDEQRGGLTSRQFIRAHLIRLGLGEDLTHITRGGIKRGLATIEELLALRPELRGPPTSA

SEQ ID NO: 166307 - protein, 375 aa, unidentified
MEHHSEAFVALDTAKLRNAVAIADAGRNGEIRYLGEFDNTEAATRKLVAKLASKHARLTFCYEAGPTGYGLYRLIKSIGHDCIVVAPSLIPSKPGDRVKTNRRDAVNLVKLLRAGELTAVWVPDERHEAMRDLVRARDAAVKDYRIKRQNVSSLLLRLGRHYPGKKTWGRTHINWLTGLKLEHREQRIAFEEMLLAVRQVRERIERLEQAMREAVADWTPAPVIEAVQAMRGIDMVGAVAFLAELGDLSRFENPRQLMAYLGLTPSERSTGESVKRGGITKAGNTRARRLLIEAAWSYRFPPRVSKDMQTRIGAAPRTAREIAWKAQMRLCGRFRTLTRKGKRPTIVVTAIARELSAFIWAINREVVGSHATANQ

SEQ ID NO: 166308 - protein, 338 aa, unidentified
MSYFVGIDLHSDNSYVGVIDKKDSRIFGKKLPNDLGVILKTLEPFQEKIQGIAVESTYNWYWLVDGLQEAKYRVHLANPAEMQQYSGMKYTDDTWDSYWLAHLLRLGILPEGYIYPKEIRPVRDLLRKRTMLVRHRTAHVLSLQNMVNRNTGRKVNVNDTKRLSEEEISEQLTDEHHKMAIRSDKAVIDFFHEQIDRIEKAVLKEVKLRYPYQELLTVPGIGKILGITIMLETGDINRFPTVSDYSSYCRCVSSKKVSNGKKKGEGNKKNGNKYLAWAYVEAANFMVRYSEPARRWHQRKASKTNKIVAIKALSNKIARACYFIIKDQKPFDPKKSFQ

SEQ ID NO: 166309 - protein, 347 aa, unidentified
MRKIVKQVVGIDVAQKELVVSLGKMQDDWTPEVYARKTFTNTQKGFIDLMAWVKKLTDQTIAVRYVMEATGVYHESLAYFLNDQGQEVTIVLPNKISNYMKTLETKTITDKTAAEAIAMFGLEKKLDLWKKPKPIFKRIRQLTREREQLIQSRTIAKNQLHAEQAEAEPGKSTLERLKKQIAFFEKQEREINQELRALINTDEQVTSSIKLITSLSGIGYLTAATVLAETNGFELVKNKRQVSSYAGFDVKEKQSGTSVKGKSRISKKGNKYLRKAMHMPALSAIRLDERFKAIYARLVAKHGIKMKAAVAVQRKLLEMIYTIHKTGVPYDKNYLKKNGKEAVAEAE

SEQ ID NO: 166310 - protein, 386 aa, unidentified
MQKLNDLSRSLTPLEPDGTLIAVIEMSLSSWLVAGIVPGVERHPLKKIAVDESALLKLLHRWREEAVKAGHRIKRIAVAFEAGRDGFWLARWLRARDIEAHIIHASSIAVSREHRRAKTDRLDTELLKRAFLGWLRGERDHCKMVAIPTIKDEDAKRPNRERETLVGEQNRIINRTKATLIRLGIRGFNPKLKRAAERLESLRTPEGEPIPPNTLAELRRDMVRRRLVNDQIRQIEDARLERLKQAPSDGPHAMVRLLARVIGVGIETADMLVQEVLSRNMRDRRAVARYAGLTGSPDESGRKRREKGLARSGNARVRRGMIQLAWRFLMFQKDSALAQWFRARTENARGTRKTMIVALARKLLIAFWRLVREGVVPEGLVLRPAQ

SEQ ID NO: 166311 - protein, 338 aa, unidentified
MTILCVGIDLAKNVFALHGVNEAGKAELVRPAVPRNKLHELIATLPPCMIGMEACSGAHHWARLFQASGHTVRLIAPKFVTPYRMTGTQSKNDAADAAAICEAIQRPHMRFVPIKDVEQQSRLMVHRARQGFVEQRTATLNRIRGLLSEFGIVLPLKASTVRRCACECLEELPGYANTVIGDLLSEVTRLDERVAQYDAHIQAMAREDARAQQLMRLGGVGPTTATCLLAMIGNGHDFDCGRQFAAWLGLAPGQYSSGGKTRLGRITKAGDAYLRGLLVLGAKALLAAAKNKSDPISRWAVALAERRGYWRAVVAIAAKNARMAWAVLRRGEAFAMPT

SEQ ID NO: 166312 - protein, 343 aa, unidentified
MSIVTWHVVFVGLDYHASSVQVCVMDADGAMLLNRKCANDWRAVMAAVHERCGKEVPVQAAIESCCGAADLADELISRGWTVQLAHPGYVARMKHNPDKTDYSDARMLADLQRLGFLPRVWLAPEEVRELRRLVHYRQSLTKERKDLKLQIGAALREARQKAPANVNPWTKAWLAWLDTSAELSPNARQIIHWRLRRLRDLQEDLRRVDKRLERQTREDPLVQKLLTIKGIGLVTATTLRAEIGRFDRFRTGKQLARFCGLSPRNASSGKRQADAGLIKAGNNELRALLIETAHRLIRRDERWTALAARLSGRGKPTGVVVAAVANRWVRWLFHQAQPSCLAA

SEQ ID NO: 166313 - protein, 404 aa, unidentified
MEVYLGIDWGESSHAVVFVDGEGRELCRKKVEHSVNGFGEIDDLRRGLGVTKEECVVGVETAHNLIIDWLLGYGYSQVYVIPPNVTRSRQRSYRQSGAKTDESDGYLIGNLLRTERHRMIQWRPDSELTQRLRAKVRLRSQLVVDRTAHYNQLRQTLLRYYPAALEPFGLNSRIALDFVQRYPTPAAAGKLKYSEFESFAKGHRYPANGIAGAYAKLGVEQPTALPITVETYQEEAVLLAQLLSEVKGHIGRIERSIAELFSQHADREIFASLPGVGEHLAPALLVKFGDDRERFPDAGAIQALAGTAPVTSQSGKSRSVRFRQACDHEFRTYMYQWAALSIKYSPWAATYYAQARQRGLSHNHTCRALGNRWLKILWKLWQNRECYDQDRHLAKTLYFRQKSH

SEQ ID NO: 166314 - protein, 338 aa, unidentified
MYYTGIDLHKRTSFITTIDQNGKVIFRRNFPNVEELILDYFRNLDGPTKIVIESMCSWYWLYDLLSANNFTTVISNPLKTKAIASAKIKNDKVDSHMLAQLLRADMIATVHVCNIKTRKLKELIRHRRRLVQDSARMKNRIHMLLMKNNINIPVSDLFGKRGMKLLKEVSLPAYHQQQFNSYLALLRYVAEQIEPLTEQIRDLAKKDPMARLLMSIPGIGFLTAMTIIAEIEDIGRFPSYRNLASYAGLVPSLDASADKSRTGRITKQGSPYLRAALVEAAQAIPRTKQSRLNIFFRKRIVRAGYRKAIVATAHKILQYVYYVLKNQVFYSEEYLARA

SEQ ID NO: 166315 - protein, 345 aa, unidentified
MLYVGVDAHKATSQVTVMDSGGNILRRKRIVSSPIAVRQALAGYDEPLKAVLEASYCWAPMYDWLDEVADEVVLAHPLKVRAIAEARIKTDKIDSETLAHLLRADLIPEAHASSQDVRARRRVLRQRMFLIRLQTMVKNRIRALLIQHISEQPKVSDLFGKCGRDWLRRVQLPDPDGRLLKEDLGLLEFLQQEISKTDRLIAELAQGDEAVQFLASVPGIGVFLSVLIRWEVDIIERFRQAKKFASYTGLVPSTYASGNRIVHGRLTKQGNKWLRWAFVEAVSPAVRSSAYLHSYYQRIKLRRGVKDARIATARKIAELAWTVWTERRGYQERLPKSLRTATEER

SEQ ID NO: 166316 - protein, 297 aa, unidentified
MKSNYPDANHTHVNGGVDVSKDTLDISIAGQSSRFPNKLKAIVSWLRKLKTSNSKPIRIGCEATSRYHHPLITACLMVDIEVYEINPRLIRDFARSHNLLAKTDRIDASVIALFVSQRTLRALIATAAAQKASLHQYPDKSIQREINRLIKVLEKQIASYIEEIEKLIMENKTTADLYQDLQKEPGVGQRTALAVIVSLPELGRLNRQDAVAIAGLAPFNWDSGTMRGKRHIKGGRALLRSALYMAALPAARCHPQLSPFYKGLRERGKPAKVALTAVARKLLIIINSRAKKYYAAI

SEQ ID NO: 166317 - protein, 364 aa, unidentified
MHSINNTELSSLEETRCQFNGGRCAIKLGIDVHQEFYVVVMQEGGANPKPPQRFQKEAFLQWAGRLKQKSGAEVYAVYEACGFGFSLQRNLSGLSIHCYVICPQKLDEQNRRVKTDGLDAKALCLKLDRFVQGNRAALAIVRVPSEAEERSRAIHRQREQLVGARKRLEAQGRSLMVNHGFEPVQNWWKPRPFAALEVPQWMRELLSNSQPILVALQQKIAALSVQLQCAAAPEQPRGLGKMTSVVLDREIGDWNRFSNRRQIASYTGLCPGEYSSGNTRLQSCVTKHGNPRLRAALVELAWRLVRFQPNYKPVLKWRAILAKGALATGAARKKAIVAVARQLAVDLWRIKTGRLRPEELGLIN

SEQ ID NO: 166318 - protein, 408 aa, unidentified
MASKIAGIDVHKKVLMVVVIDARTPDSKPERRRFTTMPSDLRRLSTWLEQLGVEEAVMESTAQYWRSVWLELEPHFRLHLAQAFSNRAPRGRKQDFKDAERLVRRLIAQELILSFVPDGEQRIWRNLTRMKLQLVRDRMRLQSQIECLLEEMRIKLSVVVTDLLGTSGLRILHALANGETDAKNLALLGDHRLKCGEEQLVEALTGRPHSMHRQMLSLQLERLRLLDEQIGKLNSLIAAAMNPHQDTVIRLAEVPGLGIDSAQQIIAEVGVTASTFPSAAEFTSWVGTCPGSQESAEENSSSRSAKGNKYMRRVLNQAANSAARSKGTHFQAVFRRLLPRLGYQSAVWAIAHRLCRLVWKILHEGIRYIEQGIESEPKLLIYRARSLAKQLRKFGYNVQITPADGAPA

SEQ ID NO: 166319 - protein, 374 aa, unidentified
MTDYSEVFVGIDTSKLRNAVAIAEGGRNGEVRYHGEIENTEAATSKLVKKLAAQHRQLTFCYEAGPTGYGLHRLITTLGHECVVVAPSLIPKKPGDRVKTNRRDALNLAKLLRAGELTAVWVPDARHEAMRDLVRAREAAVDDLKSKRQQVLSLLLRLGRHFTGKRTWTRAHMNWLVSQKLAHREQRIAFEEMLLAVRQANERVIRLERAIVAAVPDWSLAKVVTALMAVRGLDLISATIFLAEIGDLSRFASPRQLMAYLGLVPGEESTGDRVWRGGITKAGNHRARRILVECSWSYRHPPRVGKKKLAKVEAAPPAVQEIAWKAQARLTARYRALARRGKRPTLVVTAIARELSGFLWAVSRAVGAPTIPTM

SEQ ID NO: 166320 - protein, 352 aa, unidentified
MIVLGADTHKRSHSIAAVAAATGELRGEQTIQVGRRGFDALLRWARGVDDERVWALEDCRHVSGSLERFLIGRGERVLRVPTHLTANARRSSRQRGKSDPIDALGVARVALQEGLESFPAAHLDGPELDLRLLVDHRERLVRQRVALNSTLQWHLHDLWPELQLPGSSLFYGNWGPRVARRLACAEQTMRVRIARDELRRIRELSHTIKTLEREIAQLVTAIAPQLLSEPGFGPLTAAKLVGEIAGAQRFATAAKLARAAGVAPIPASSGNTKRQRLDQGGNRQINAALHRVIVTRARCHAQTRDYIARRCAEGKTTREAIRCLKRYLARHVWRLLQPPHPDRGTPPSPSIS

SEQ ID NO: 166321 - protein, 314 aa, unidentified
MKMAMLSFCGIDVSKDRLDVVVLPEGWFFSVSNDTAGWAELVVRLRPLTVSAIGLEPSGGYERGIIRALLAAGMSVRRINPNKLRQFARARGVLAKNDRLDARLIAEYIAIIPTRVVQRDAAVERLAEIVTMRRQLCDEHVAAENQAAHLEDAMLRRLSKRRQMRLEADIRLLDKRLAEMVAANVALAQRYELLTSMPGVGPVLAFTLIALLPELGKMTRKQIAALVGLAPYDFDSGKLKGHRSIYGGRMPVRNVLYMAALSASRYSPALKAFHNRLADADKKSKVIIVAVMRKMITTLNAMLRDNAAWQPQSA

SEQ ID NO: 166322 - protein, 388 aa, unidentified
MTVYVGVDIAKELHYAAIMNSDGVVANPFSFENNNKGFSLLLSHLSPYLKESVLIGFESTAHYQDNLAFFLRSHGYRIAVINPLQTSALRKANIRNTKTDSVDARLICLALMQHNIHGDQRDSSRLDDLYQLCKMRMDLIKKRSSCKIQLVSAMDRIFPELASFFSNNLHINTAYRLIESYPLPSLIKKTRIDVLTRLFHKASKGHFGKEKAQALKNLATISVGIPSVTYAFQAQQLIHQIEFYSEQIQAVDEKIDTDPNVMSSPLMTIPGVSSFCAACILSVIKNINDFDAPCKILAYAGLDPVIRQSGKFNARQTRMSKRGNSLLRYALVWTAGNAVKNNATFNEYYRHKTQDQGKSHYQALGHCAKKLTKSIYHMLKYNESFNLA

SEQ ID NO: 166323 - protein, 394 aa, unidentified
MIYAGVDIAKTDHVIGAVDERGAEMCRPMPFKNTEAGLERAVAWLEGLAGSPSDVVVGMEATGHYWMACYSFLVARGYSVAVINPMQVKAVRKLKKLDKVKNDRIDAWLIAETLRIGQYDETRLATDEVASLRSLSRYLQSLRGMAAELKTQCVCLMDAHFPEYAGIFSDMFGAGSRAVLSKSPLPFELARRRADSLARDIAEASRRGGKSAGYAAKIKAAARSSIGVRLGQEAASFQVKSLIRQIEFADSECAKVEAKVRALLDEVEPLVLTIPGVSYATGAQIVSEIGDVSRFRNASALVSYAGLNSSVSQSGQFDSGGGPITKHGSPYLRRALWLAANRARQYDPGLRAFYDRKRAEGKPHRVAVTAVARKLCHIVFAVMRDQVPYDPGRE

SEQ ID NO: 166324 - protein, 435 aa, unidentified
MRREQVSVFRERGLRAGVSRRAEPQCLVGNANTERKTDTMKSYILLKPQTVQSQISRISAGAKPPVLFIGLDVHNDSIAVSLASSDTSEVRRYGIIGGEHDDVLQLVKKLQAAHPGATLRFCYEAGPRGFALCRCLRSHGLDCIMVCPSKVPRKPGERVKTDRRDADQLARLYRAGELTGLYVPEPVDEAMRDLIRARYQVGKAQHRARQQLKMYLLRHNLRYGGQTSWSPAHLRYLAQIKMPFPVQQIVFQEMLEVISEATARLERYDQEIERAVPGWRWEPAVRALMSLRGMARLHAATLVAELGDFHRFDHPGQLMNYLGLVPSEHTTGKDRQQGGITKMGNGPARRALVEAAWQYRAPARLSPHLKKRQAGLPKAITDISWEAQRRLHHRYCHLTRVGKKKSQVAVTAVARELAGFVWAIGCLVQPSPAKP

SEQ ID NO: 166325 - protein, 377 aa, unidentified
MGSTRQALINDTSVVLMLYMALELSASKWKVALADGQRAASQHTLEAGDVGGLLKLIEKAKKRCGLQGRLKVKSCYEAGRDGFWLHRWLLEQGIENVVVDSSSIEVNRRARRAKSDGLDAVKLYEMLVRHVGGDKRMWRVVRVPSVQQEDERRVHRELERLKRERTAHVNRMRSLAVLHNVRLQRVGGRGWSERLEQLKGQLPGALWAEIERESVREKLVCEQIVALEQERKEQLQAMLEQGGPLVALLKLRAIGLQTAWVLVRELFGWRHFNNRRELAACVGLNPSPYDSGASQREQGISKAGNRRVRALVVEIGWYWLRYQPHSALSEWFNRRFGAGGKRMRRIGIVALARRLLIALWRYVEHGIVPAGAQLKKA

SEQ ID NO: 166326 - protein, 376 aa, unidentified
MRTIAIDGLPACLNPDPDSRLTSIVKVVRLSSIPFFPKRLKDKSMESFYFIGVDVSKKKLDFCVMFEGEVVHEEKTANHPSAIMALIHHLEENYGIEGSRMLVCAEHTGQYTFPLACACKALECKLWLENPAEIKYSSGVQRGKNDKVDAKRIAIYACRFQDKVQYYERPTEDIERLKQLESERTLYVNDLAKYKGQLNDQKDYMPKDLYERKIKRLQALMEDLEEAIQAITEEMDEVINSCPVLSRQKELLMSIDGVGRVVATNMIIVTEAFTRFEDPRKFNCYAGVAPFSYSSGSSQHSKARVSHRADKVMKRLLHLAAVAVTHRVGGELKMYYERKVAEGKNKMSVINALRAKIVARMFAVIKRNEKYKPILS

SEQ ID NO: 166327 - protein, 429 aa, unidentified
MIMGFTKPIEHFNLQRKKVITMNTLYVGIDVSSKSNVIYLMLPNGDKHSNFSVANSHEGSTQLVKRILSALTSHSLDTVLIGLEATSVYGDNLVYFLREDATLAPFNRKIHVLNPKQVKKFHDAYNDLPKNDYVDSFVIADCLRFGRINKEVYMGDYRYKALQNLTRARFFAVQNLVKEKQRFMNVLFKKYSTMTQEKVFSDTFSTTALAVYDEFESAEALANMDLHELTDFIIEKGKNRFPDPDAVAKAIQKAARSSYRLPKTVNDSVNQVLSISITSMKALESQIKEFDKAIKAQMELLPNVLISIPGIGPVYSAGIMAEIGDINRFNSQAALAKYAGLAWKQHQSGGFESEVTRLIPSGNRFLKYYLCEAAFSLVRCDKEYSDFYRLKYKEVNRCQHKRALALTARKFVRLVFRLLKDNRLYCPAK

SEQ ID NO: 166328 - protein, 317 aa, unidentified
MKKVSTAATKQSRNFSEQKLTIGLDLGDRSSHYCVLDESGGILVESKVSTSPHAMQGIFGSMPRSRIALETGTHSPWVSRLLSELGHEVIVAHARNVRLIGESRRKDDRLDAQTLARLARIDPQLLCPVKHRSARAQADLTVIRARAGLVRARTALVNTARGLAKSYGERLRGCNVRNMNAEKADALSPELQTALQPLLVGIEMLSEQIHEYNEHIEKLAEESYPQVELLKQVKGVGTLIALTFLLTLEDAHRFKKSRDVGCYLGLQPGRRNSGQSEPQMHISKEGDPYLRTLLVQGAQHILGRSERTAICAAGDSS

SEQ ID NO: 166329 - protein, 367 aa, unidentified
MKTTNILKYAVGIDVAKKDFKCCISSIDEQQQVKVKSTAHFLNSIEGYKALVLWVAKHCQTGTAVVYCMEATGIYHESLALFLYRQNMHVSVVLPTLSKNYLKSLGHKTKNDKIDAKGLSTMAAEKSLSAWQPFSESIYELRQMTRYIEDLNQQRTATGNQLHALQHSMYAMEELQNILKEHLAFIEKQIKELKVHVEQMVKQDEKLWPKIEHMMTIRGVGLYTIVVIVAETNGFALFENIGQLCSYAGYDVIEEQSGTYQGKGRISKKGNSHIRRALHMPSLSLLRYQVPLFYALYQRVLDRTHIKMKAIVAIQRKLLTILYTLWNKEEDFNPSMHVTKKEVATTEVATQDELSAETRSPLLVYQS

SEQ ID NO: 166330 - protein, 382 aa, unidentified
MPSSRNPAPTSDGPDTVFLALELSGTSWLVALHAPDADKVERHRLASGQARDLLDLIARIRSRVQRRLGTVPRVSCCYEAGRDGFWLHRLLEREGIASHVMDPTSLQVDRRARRAKTDRLDAEALLRALMAWSRGERRVCSMVRPPSPEQEDARRPSREREALLKERIRRVNRIKGLCAAQGVYDYEPIQADRRERLAQLVTGDGRPLPRELAAEIGRQLEQLELVLRQLAEVEAVRDQRAAAARAEPGSKLGALLRLRGIGPELATVLQMEVFYRHFASRRDVAAYAGLAPSPFASGGRQREQGIAKAGNPRARKALVELAWLWLRHQPESALARWFHGRVGAAGGRVRRIAIVALARRLLAALWRYVETGVVPTEAQVKA

SEQ ID NO: 166331 - protein, 390 aa, unidentified
MTKKATRSEQYSDLRGTLYLAFELGLKEWKLGFSIGLGQKARRRTIPGGDLEKLVREIAAAKKRFELSETAPVVSCYEAGRDGFWLDRYLTQSGVRNLVVDSASIEVNRRRRRAKSDRLDVQKLLTMLIRYEYGEHKVWSVVRAPSPEEEDRRQLHRELHSAKKEKTRTTNRIRGLLETQGKRLESRMDLSDARLEAIRLWDGKPLPPALKSRLKREWEHVLFLKKQIQVLEGERRRAMKKQEGADKGQESADMGKVRQLAMLGGIGTNGSWVLVRELFGWRKFGNRRQVGSLSGLTPTPYQSGDSRREQGISHAGNCHVRDIAIELAWCWVRYQPESKLTRWYMERFANGGPRARKVGIVALARRLLIDLWKFLETGVIPEGARLKAEA

SEQ ID NO: 166332 - protein, 337 aa, unidentified
MIVIGVDVHKHSLTAAAVDELGRAYAEWSGPVDGEVVAWARALGEERLWAVEDCRHVTRSLERTLLAVGERLVRVPPRLTAPQRRRGRVRGKSDSIDALAVARAALQEPDLDRPRAGVETLRELKLLVDHRDDLVEERRRCQQRLRWHLHELDPTLTVPLGALDRAVWIDRLGRQLARREQATQVRIARDLVGRCRTLTRSIGELDRELHARTATLAPRLLQLPGCGALSAAKLLCEIGPIERFRTDAQLARHAGVAPLDASSGKHQRHRLDRGGNRQLNCALHRIAITQGRVHPPARAYLERKQNEGKTRREAIRCLKRQLARTVYTTLNTEPLLT

SEQ ID NO: 166333 - protein, 356 aa, unidentified
MSRMTVGTGAGQVVFAGVDTHKDTHQVAVVDGNGAVVAGRQFPAGTAGYREVAGWLSGWAVGRVGIEQTGTYGAGLTRVLTAVGHEVMDVNRPDVWVRAASGKSDPIDAVMAAQAARTGRALAIAKDTAGVIESVRLLHVARRSAVKARSAALVQLGDLAVTVPAGLRDQLGRSNTQIAAASRKLRADRDRLGDPTQAAKLALRRLAGRIEALDAEIDQLGKAMDELVARVAPRLLARPQVGTQIAAQLLITAGQNINRIGTDAKFARLTGIAPIPASSGRTTRMRLHRGGDRQANRAIHLIAIGRLRAHQPAIDYVNRRTHDGLSKTDAIRAMKRLIAREVYGALKADLKALDAL

SEQ ID NO: 166334 - protein, 322 aa, unidentified
MLYCGIDISKLTFDVAVMVDDSFKSKGFENSVTGIKSLYSWLKSFKQDIVFCMEATGIYNVLLAKTLHKSGYQLVVINPIKTHNFSKLEMQRNKTDLADAQMIARYCRYLWNESKFEENIFKPKSKYFEKLQYLVTRLDQLKKMHTQENNRLGVCIDKTMTRMVNSMLKTISKQIEQVEQQIRLCQKYDQLLDNQVKLLVSIDGIGEKTAWAILAYLGDISFFDTSKQVVSFAGLNPRKQESGTSLKKSSLSKMGHRRLRKSMYMPALVAIKHNPIMLEMYEKLLAKGKPKKVAICAVMRKLLVVSYGVLKSGKEFDVNYSS

SEQ ID NO: 166335 - protein, 368 aa, unidentified
MSDITTFVGLDVHKKDIQVAMLVGDARVPMTWQLANEPKAVRHLMRKLEREAPGPIECCYEAGACGYALQRQLTIGRIHCHVIAPGLIPRKPGDRVKTDRRDARKLAELLRAGLLTEVRPPTEAEEAVRDLCRARDDVREDLMRCRHRLSKMLLRRGLHYAGRAWTEAHRVWLRGLEWAHDAERTVVADYLLAIDQMGARLAALDADLTAVAARDPYRAPVGWLRCFRGIDTLTAVMLLAELHDFRRFQTAAALMAYIGLVPGEHSSGPRIARGRITRAGNALVRRLLVEAAWHYQSRPSVSRTLRQRRLGQPRSVIAIADKAQQRLCSRFRRLTLHKERAKVAVAVARELAGFIWAALQQEATAMAA

SEQ ID NO: 166336 - protein, 339 aa, unidentified
MKSLLSTKHYKVMKSIYVGIDISKNTLDFCVRSSGVASFHKIGNKTKSIRKILKSIAKIDSKAFIAMENTGYYNYNLYQTLKDFDFNVYVIDPKHIKRSIGLVRGKNDKVDAKRIAIFIERNHQDFECWEPCSEAIRSLKILMGQRRSKIKQRKGIKQQMADLKDIVFNGSTRKLIKINQKAIKELDRHIHEIETLIRAEIKSDPVLQEQLKRIKTVPGIGDVTAWMIAIKTEGFQRLTDPRKLACFAGVVPFEQQSGTSLKTRPRVSKMADMALKSVLQMAAMRAVRMQNDLQVYYLRKVEEGKNKMSVLNAVRNKLLHIAMALIKNQTNYKNRLELS

SEQ ID NO: 166337 - protein, 315 aa, unidentified
MEAMIERCAGLDVHQETVVACVLFGPLDKKPKTSIETFSTTTTGLLALSDWLATLQVSDVVMESTGVYWKPIWNILEGSFHLVLANARHVKNVPGRKTDVKDAEWLAKLLRCGLIENNFVPPEDIRDLRDLTRYRKKLIHHRTSEQNRIHKILQDANIKLTSVLSDIFGLSGRRILEAILNGEKIETDGLRKMVDWRTKASITDIASAINGRIRRHHRDMLRYHWDHMGYLEQTIEELEKQIDQLLSPYRKEVELLDGIPGVNKAAAATFIAEMGVDMSVFKSAKHLASWAGVSPGNYESAGKKKRVKPHKEIKL

SEQ ID NO: 166338 - protein, 343 aa, unidentified
MQIRSVGIDLGKTTFHLVALDDNGTVLIRRKFTQRQLITFTANLQTSLIGMEACGGAHFLGRMLRAQGHDVKLIPAQFVKPFVKSNKNDFLDAEAIAEAVDRQNMRFVPIKTDDQLDLQALHRVRDRLIARRTSVINQLRAFLLERGLVFAKSPAKLRERMPEILENAEEDITPRMRNLLALLWNEWKDLESQLEEMNDEVERIASSDAACMRLRQIPGIGPLVATAIVAAIGNGAAFHKGREFAAWLGIVPRQYSTGGKARLYGISKRGNNYLRKILIHGARAVVLRSKRERIAMGAWMTALEARAPRNVLIVATANKLARIAWAVLSTGQDYRAVQDPVPA

SEQ ID NO: 166339 - protein, 454 aa, unidentified
MSKGRKKTRTGAKKITQFEIIRPNVAGIDVSDNDAMMVAYPINETVVMVEAFECYTRDLHRISSTLKLHNIESVAMESTGVYWIPLFLLLQEDGFEVYLVNAKHTKNVTGRKDDEGDAEWIQKLHRCGLLSASFQPDNQTRALRSVVRHRSTLIKTRSTYLNRMQKALEQMNLKIHTVISDIDGKTGQAIISAILAGERNAERLADLRDPRIKAPREEIVKSLEGFWSKEHIFELDQCYKFYEFHNKMIKECDMEIEKILRGIIKSKNNGIMPKLGKLKRKDNNKNDFAFDAANYLYRLNKVDIAGAAGISGISEISALTIYSETGDDLSRFKDEKHFTSWLGLAPNNKISGGKMISSHVPKKKHSAGQAFRMAAFGLCSKKNPLSDYYRRIRARIGHPKALVALARKIAVIYYRMMTTKEAYNPQLLIDYQEIYKERKIKNLEKYLAKLKGAG

SEQ ID NO: 166340 - protein, 408 aa, unidentified
MTTSNSTPADVVLVAIDIAKLRNEVLIEAPGHKRRRRLLVLNTRAEHDHLIEVLQAYGRPVVCAFEATGNYHRPIGWRLAEAGFEVRLVSSLALARTREALHNSWDKNDPKDAQVILHMLRIQATQLYHDPLRAGINDVQELSKTHEAIARAKTEIQHRILTHYLPLYFPEIDRFRGNSRSDWFFAFLHAFPTPASVTALTKEEFVAAAWDVVGRKVSKTQILMDIYETARSSIGLPLPLDAPAIRMFRMVIDEARSLIRQRNEIEAQADELLRHSQDYQLLRQIPGIGPINALTIIAEAGDLRRFGHHRQFLKFCGLDLSTQQSGQYRGQTRLSKFGNARLRRTLWIAGQVAIRQRENGFRHKFERYIAKDRDNPDLRRKAMTAITAKMARVVHAVVKGGSDYRPFR

SEQ ID NO: 166341 - protein, 313 aa, unidentified
MYYIAFDVSKKELSVYDGKKDMTFSNSEGLGSLKKYLKNYYRDFSQLIFLLEATGSYSDDLIKMCAQYQIKAVIINPKASHHFAKSLGIRNKTDRIDARMIYQYHRLIHDQMITVPRVNKEAKTLSTYLGSYQLAMKQRVALSNHLRHVRDKDLFGLLKKELKRALGLEERILKRITAYILKDPQLKADYQRLLTIPGIGEKSAPALLYLFITYQGANRNQITALCGLDPIQRQSGTSVSGKPKISKHGSKLIRKVLYMPMLSAIQTNLKIRAFYQRLLRNHKVKKTAVIAAMRKLILIAHAIYRDKTEYVPA

SEQ ID NO: 166342 - protein, 337 aa, unidentified
MKVTLIGIDLAKSIFQVCGVNRAGKKVFNRQVRRAKLMDLLVQHPDVTIAMEACGGSNYWGRELIERGYKVMLIPPQHVKPFVKGNKTDRNDAFAITEAAKRPNLRCVEPRTLVQTDMIQVHRVLDRMIRQRTALINQLRGFLSEYGIVVGRGKEKLLSTIPDLLEDAGNGLTPSSRALYQTMYNDWRQMNESIDRIEKVLEGQANTDAAAQRLMKIRGVAKKISTATIAHAGNGHGYKNGRHFSANLGLVPREHSSGGKQKLGGITKRGNRYLRRLLIQGAWSVIKNADKSDDRLSRWARQLVERRGKHKAVVAVANKMARIMWSMLYHQTEYRAN

SEQ ID NO: 166343 - protein, 340 aa, unidentified
MTTPLYCGIDLHSNNSVISIQDKNSNQVYEKRLPNDLPTISKALAPYQADLQGCVVESTYNWYWLVDGLMEAGYLVHLANPAAIQQYNGIKYTNDYTEARFLAHLLSLDILPTGYIYPKETRGIRDVLRRRLLLVDQRASQRTSLQSLLARHTGKRLSEGQLKKLDTEGLRHLLPIPCASLVAETLLSVIQSITKAIVLLERAVQSHCIQQKDYELVTSIRGIGNILGATIALETGTIERFPDAGHYLSYSRCVKTQKISNGKTKGHNNRKNGNRYLALAFMQAAHLATIWEPQVKRFYQKKQSNSHTMVAKKAVAAKLARAIYHMLNNQEPFDVERAFA

SEQ ID NO: 166344 - protein, 412 aa, unidentified
MQVIIERCAGLDVHQETVVACVLAGTPGQRPTKEIRTFRTMTRDLEALRDWLKAAGVTHVGMESRGVYWRPVYAVLEGHFELIVGNARHIRNVPGRKTDVKDSEWIADLVRHGLIAKSFVPPKPLREMRELLRYRRKLVESQAAERNRLLKLLETANIKLASVASDVFGVSGRAMVKALILGTASSEEMAALAKGRLCRKHADLVLALDGRIEDYHRFLLTLQLRRLDAAEQDITALDKRIDEKLEPYRTQHALLMQIPGVDWLVAAVLIAEIGIDMSQFLSVFHLAAWAGVCPGSYESAGKQKSGRARKGNVHLRTILVGAAISASRTKGSYLRDKFHRLKARRGALRAALAIAHKILVAAYHMLAKGVPYKDLGEAYLDEIGQTRTLANLKRRIERLGYHVILEPQAAAA

SEQ ID NO: 166345 - protein, 316 aa, unidentified
MPRYYIGADLSKDWIDIYHPQQDEHRRIANNAPSISAFLQTMQQHDILIFEATSGCDDILLAQIRAEDTVFVRVNPAHAWHFSRACNLPKTDRVDARMLSAFGAARQMEPQQTNTPARDRLRALVKRRRQYKDMETQEKNRLRRIADPELTRDIQSLLAILERRVAKLEKQISQQLSECEELHRVSSLLASAPGIGPVSASVLVADMPELGSADRRQIVSLAGLAPRAYESGKFKGKRRLADGRRHVRKVLYMAALSVMAQGRYFQPFIKRMKAEGKANKAIVMAIARKLLTILNTLVSQQQPFDPEKFHRNAIPQ

SEQ ID NO: 166346 - protein, 344 aa, unidentified
MEITTIGLDLAKSVFQVHAVDAAGKPVVRKALRRAQVLPFFAKLPRCLIGLEACGTSHHWARELIKLGHDVRLMPPAYVKPYVKRGKTDANDAEAICEAVTRPTMRFVPVKSPEQQAALSMHRTRDLLVKQRTQLVNMMRGLLAEFGIDVPCGLERALIMAREITEGLPPDVPAEAGKILAALSQQALDLHLRVRDIDRDLLVWQRGNDVAKRLMTIPGIGPVGAAALAASVTDPHQFRSGREFAAWLGLTPRQNSSGGKERLGRITKMGDKYLRKLLVIGMTALVKQVRYKPDAADRRLVDLLARKPTRVATVAMANKTARIVWAIMVREETYRAGHVPALTA

SEQ ID NO: 166347 - protein, 401 aa, unidentified
MELAKLYKRVVGLDVHQAKITACALIEDEAGETSVELAEFGGFKRDRRALARWVAAHDPEMVVMESTGIYWKSPYVALEQVGIVATVVNARHVKTVPGRKTDWADAQWLAMLARAGMLRASFVPRAHFRALRHVARQRQQLIGILAGEKNRAHKLLSDGGIRLSVVVSDIHGVAGRAMVKALIAGRSPAEVLMLAGNRLKADRAELLDALDGDLTVEHRFVLHEVIAHIEEVERRIDRFDQYLLEQLASYRSTLALMQTIPGIDAIGAALLLVEIGDDMSAFGSVDRLASWAGICPGNNESAGKRKTGRIRKGNPWVRRLLCQFAHAASRTRCAFKSKFEALRLRRGHKRAIVAIAHKILKTVFLLISRQTHYRDSATDFEAMLSTVNNLDGICPVSDHAT

SEQ ID NO: 166348 - protein, 346 aa, unidentified
MKKIFIGIDFSKEKFDATLIKAEGLKECAPSMHEVFDNKTSGFRRLVKWVKGLSEKLPVDTWLFCGENTGAYSIGLSNYLYASGYDMCLENAYKIKHSAGILRAKNDKTDSMVIAEYAMRNYDKIRLHKPQSSSLTCLREVFLYRHSLVRQKVALTVRRDEKRFTQEKSDARAFMSFTSKHLITEINKAIYKCDQKIKETIASDDELREIFDIITSMPGIGVQNATCLMVYTDNFQKFDMDSRKIACYYGIAPFGRQSGTSVNSRPKVSPFANRMIKALLSQAALAAIKSDINIHNYYQRLIERGKHPQLVHNNIKNKMLHALVAMVRNRIKYNPDYVYQTNKSAA

SEQ ID NO: 166349 - protein, 328 aa, unidentified
MKKNIMYVGLDVHKNSIEVAFADAGRDGEVRSYGKIDGNLTALDKVIRKLEAKGSELHFAYEAGPCGYEIYRHLSSNGYDCIVVAPSKIPRQSGNRIKTDRRDAQMLARLHRAGELTSIYVPALEDEAMRDLTRAREDARSVERKAKQRILAFLLRHGYRYSGKTPWSKAHFRWIAIIKMPHPAQQIVLQESLDALFECTGRVNRLTEQIQRLLPQWRMFPVAQALQTLRGVSLIVSTTTIAELGDLTRFASPVELMSYLGLVPSEHSSGEKTKRGSITKTGNGHVRRVLVEAAWAYRLPARVSTALHSRRDAAKRLRNIVEGTTPFV

SEQ ID NO: 166350 - protein, 322 aa, unidentified
MQGKAMPEPNAMPVYAGVDVCKEWLDVHVHPSGLKLRVSNDGFGLKRLKRVLAALPVARVVMEATGKHHRATQRSLHAAGLVVAVVNPLRARLFAEATGKIAKTDAIDARLLAVMGAALEPAATPPQPAALEEVGELINARAAATAERTALSNRLAAAATPFLKAELRRRRDACQRHVERLGAEIERRIMADPDMARRHAVLCSIPGIGPVTAAAFLAGLSELGTCSAKQAAMLAGLAPLANDSGDRNGRRAIRGGRRPVRNAAYMAALSASRHNPDLAAFADRLRKAGKKPKVILTAVMRKLVVLANTLITQNRTWTPIHP

SEQ ID NO: 166351 - protein, 507 aa, unidentified
MKEKVRPLGHEPVPQCLPFTRFKSGNNVVLDTVCNKADDSWYFFKLTGENKMEQKQFFLGGDVSKGYSDFVIIDQQRQLVKENFQLDDTVDGHGLLYIQLHQFLSAHPDAELNAAVESTGGYENNWYSSLIKFQSSLNIRTARLNPEGVYNNSKASLIRTVTDKVSARNIAEYLIAHPEKVKYQQQDYWGPLRKQWTFVKLLTKQKSQLLNQLESLLYGANPEVLKYCQDGVPQWVLKLLKQYPTAVELARCRAKTLTRIPYVTEQRAKELIGNAKKSVASADDSFTGQLITSTVQHILQLVQSIKMQVNIIAENFPMPEVALLKSFTGIGDYSAIGLMLEIQTVTRFPSVKKLASFFGLHPVFKASGDGQSVARMSKKGRSEPRRILFMVALSAIKSNPLIAEIYKKHLENGMDSMPAIGLCMHKILRVVYGMLKNNTAFDPSIDRRNQQRSVGKTAQTAKDKSRRYQEHDPNAPVSNRQRKKRKEQVESQGIVEDAESGISQPAP

SEQ ID NO: 166352 - protein, 447 aa, unidentified
MKQKKPSKKRSTKFPKHLQHLNQYAAGIDVGSRSHFVAVPEGTDEQPVREFSTFTDDLERLAKWLTSCGVTAVAMESTGIYWIPVFEILESHGFEVRLVNARHVKNVPGRKSDVLDCQWLQQLHTYGLLRGAFRPTDQVCTLRAYVRQRATLVRSASSHIQRMQKALAQMNLQLHNVVTDITGVTGMGIIKAILAGERNPQALAVLRDKRCKNNKETIARSLHGNYRPEHLFSLQQSVELYEFYQQKIADCDQQILAQLKHFDSSDDGDPDRKPPRSMEEALQRMSGVDLSDINGISTNTALKVIAEIGIDMSRWKSEKHFTSWLGLCPGSKISGGKVLSSATKPVANRAAAALRMAAMTLFNSKSALGAYLRRQRSRLGAPKAITATAHKLARLVYSMLKHGTAFVDAGQEQYEERYRSRVIQNLKRRAQEMGYKLVSIQEEPHTT

SEQ ID NO: 166353 - protein, 404 aa, unidentified
MDVHRDFVYACIATTVNGVTTYKSHRFSTFTKGLRELLSWLLASNCKNVCMESTGKYWIPVYNILETNRKIVLAHPKYVKAIRGKKTDKKDAKWIADIFKHDLVSSSFIPPADIRQLRDLVRYHTKLTNFTTGEKNRAQNCLTVSNLKLDSVFSDVFGKASSNIIGHILADPSEALSDVSAFRTKGMKATDEEILKAVDGEIYPEQAEKLRIIRDHMSSLDLCKANLQSLILSTAEKYIPEIDLVCTVPGIATFSAISVIGEIGVDMSVFPTSKHLCSWAGLTPQNDQSAGKKKTTRISRAGAYIKPLLVQCALAAVKSKNKHPEVYKRYSASKKRRGHRKAIIAIARMLLTAIYNILKKHEPYNAEIYRKSDTPPEHRNVSVEEAIFILQRQGYLISPPASIG

SEQ ID NO: 166354 - protein, 331 aa, unidentified
MKNYSDSIGIDVSKTYFDAIIFNLSIHRRFTNDAKGFNGFNKWILKQGLRLNNVLVCFEHTGYYSLRLSVYLNEKGIDYSQIHALHLKRSIGFRRGKSDKVDAKDIARYAWLNREVIILSVPPTPNLIKLQQLKSVRDMFVRQSVALQNQIKSFDVVGDHKVSGAAKKALKAVLRNLEKQISKVEQEIRDVIKSDDELRRNYKLCTSIVGVGLVVALEMMIHTQNFTCFDSWRKFAAYCGTVPYPYQSGTSIHGRHRIHPVCDRRMKSLLTMAAISAIRADPEIRMFYQRRLDEGKPKMSVINMVRNKVLARMFATVNRGTPYVVLSKHAA

SEQ ID NO: 166355 - protein, 383 aa, unidentified
MNNLIRIGVDTSKSVFQLHGVDATERRALRKQLRRRQFLAVFEKLPATRVGMEACGAAHHWGRELSALGHEVVLLPPQRVKPYVNRNKNDAADAEAICEAMSRPRMTFVPVKTAEQQAALMLVGVRDQLVGRRTQLTNSIRGYAAEFGLVAAKGNDKIEPLLSRIADDKNLPALAKELFATLADEYARLKPELRKIEAKLMAWHRGNELSRRLAEIPSVGPIGATLAVMKVANPHAFRSGRDFAAWLGMTPKDHSTAGKVQLGAITKAGDEALRSVLVVGATAVIKQVRKGRGRHSPWLVALVSRKPPKLAAVALANKTARIIWKLMVSGERYRPQPTRQRFVPSTDSLAPGRRRQGHAACGGDLRSALTAPALGAPGAPPST

SEQ ID NO: 166356 - protein, 343 aa, unidentified
MEIQTIGIDLGKTLFHLVGVDASGSVVVRKRCSRSQLVAFTANLRVQRIGMEACSGSHFLGRTFRDQGHDVRLMPAQYVKPYVKTNKSDYIDAEAIAEAVQRPTMRFVPIKTEDQLDLQAVHRVRERWVMRRTAVVNQIRGLLLERGLTLPKGRCYVDQALPDILEDATLRLSDSFRLLLAQLKLELDQLTARIEQMDAVLQHTAKDNEACQRLTTIPGIGPVTATALIAAIGNGSGFRRGRDLAAWVGMVPREYTTGGKQKLLGISKRGNSYLRKLFVQGARAVMQRRHNQAPELSAWLAQLLARTHQNVAIVALANKLLRMAWAVLCKNETYRPPALVPSS

SEQ ID NO: 166357 - protein, 342 aa, unidentified
MTYYAGIDVSLEYSSVCVVDGTGKIVREQRIASEPEALIAWFRGLGFELERIGLEAGPLSQWLYAAMRAEGLAVELLETRHVRDAFRAMPVKNDRNDARGIAQLMRLGWFRPVHCKSMAAQEVRALLTARKLVQSKLLDVQMSLRGLLRGFGLKVGPTTPSRFAGRIRDLVEGNATLEIIAAALLAVHEALRRELAGFEKRVRSMARSDGRVRLLMSTPGVGAIVALTYVAAIDDPARFKSSRAVGAHFGLTPRKYQSGETDITGRISKIGDEGVRAALYEAGHIILTQPLKGCTALKSWAMRLAKRAGMKKAKVALARKLAVIMHRMLVDGTMFASAAVAA

SEQ ID NO: 166358 - protein, 383 aa, unidentified
MARTEVRTFGTMTRDLEALSAWLTAAQVEQVALESTGVYWWPVYNILEEAGLPVTLVNPQHTKALPGRKTDVGDAVWLADLLRHGLVRASFIPPAEIRALRELTRYRATQVRARAREVQHLLKTLESANIKLGAVATDPVGVSGWQMLVAVAAGEEDPATLAQMAKAGLRSKLDALEQAFISRVKPHHRVLIRISLDLLRFLEGTIEQLDGEVTQAMVPFAAQQAALLTVPGIGDVAAAAIVAEIGVQMEQFPTEGHLSSWAGVCPGNKQSGGKRLSGTTTKGNVWLRRILGEVAWAAIHQRRSIFRARYYRLKPRLGAQQALVAIMHQLLKVIYHILTTGESYRELGADYYQTLESKQTARRLTKRLERLGYTVTLSSAAAS

SEQ ID NO: 166359 - protein, 391 aa, unidentified
MIFVGIDVAKDTHYAAVSDDSGAVLVKPFAFQNNAEGFCLLLKKLSEFDRSKLLIGLESTGIYSENLICFLYESGFRLAVINPIQTATLRKTAIRKTKTDKVDTMLIIKSLMVNSYRLYSQRDADFLKLKTLCRFRQNLKKSKARLKIQLAGYVNLVFPEFGKFFKSGIHIAASYALLKKYSSPKEIAALRTSTLCTLLSKASHGRFGKDTAEALKSLALSSVGVKNPYISIQIAQTIAQIELLEQQIKDLNSAIEEAMESINSVLMTVPGIGAVNAACILGEIGDIKRFSKPCKLLAYAGLDPTVRQSGQFTAKSTRMSKRGSALLRFALINSAWQLTLNDTTFKAYYDLKRSQGLNHYGALGHVAHKLTRVIFKLLTSDTPFNPAKLVA

SEQ ID NO: 166360 - protein, 377 aa, unidentified
MSSTDAPAEARETVYAAIELSKKTWMLGIAHPDRDRPSIHRVCGGNIMELVSRLRLAARNNRRILVCYEAGYDGFWLARALAKIGIECRVLDPASIQVNRRARRVKTDRIDVLALLRALIATDRGERHVCAIVRVPSVEEEDARRSHRERQRLVRERTGHINRIKGLLFAQGIRDIKPKLRRTRIDFAALETAEGHPLPDRLRRELEREYARLALIEAQLREVEKERDTADAQDPVVERKRQMLVAVRGVGGTSAAILAREVFARSFASRRQLGSYLGLTPSAYDSGSVTRSQGISKAGNSWARRILIEVAWLWRKYQPASPLSNWYIQKTTGQSSRIRRIMLIALARKLAISLWRYVETGLVPEGVVMARAESHPA

SEQ ID NO: 166361 - protein, 335 aa, unidentified
MTYYAGLDLSMETTQVCIVDETGRKVASMKVESSPDMIAYALREVGGVERAVIETGRMSPAICHGLRALDIPIVCIDARQAHQSLKALKANKTDPHDAAGLAQLARTGFYKEMHVKSPAAHGVRSIITTRNHLVESRVRLDNMIRGLCATFGFKPGPGQGKAFIDRVMEAAKTSGLGQSITALLAVRTALTAQIKEMDRVLRELAHRSQSCRQLMSIPGVGVQTSAAFVAAVDEVGRFRQSRTAGAYFGLVPKRHQSGEIDWTGRITKQGDSTVRKLLYEAANSILTRSRGSFALKGWAMKIAKRRGLRKARVALARRLAVIMHAMLRDGTLFDA

SEQ ID NO: 166362 - protein, 403 aa, unidentified
MNHKPVVSIDVAKGKSVAAAFLSYNECVRKPFPFKHDPAEIVPVLELLELLEQTTGIQPCVVLEATGIYSKPIVSYFSERGYPVVVLNPLYTHQLKKRAVRKIKTDPIDAIRIAQAFYLGEGTIHRPHHQKTLELQVLCRQYYQWSDLFGDVQTHFRTILDLIFPGYDKVFHKVYNAASLELLASFPTPQEVLTANRNVLLQILKQNRRGQAWNEQKLDHLLTIARGSLPDSYAQGAHRVALHSYITMIRSYREGIANIEAQMLSLAESIDPYTLIRTIPGVGPITAAVIVAEIGDIKRFPSSKQLTAFAGLDSSVYESGTFKARQNRITKRGSVYLRTALYQATVCGISEQIHGPRNPILSRYYQQKRAEGKEAKLAIVATSNKLLRMVFGIWSNQTPFRAE

SEQ ID NO: 166363 - protein, 381 aa, unidentified
MLYVGIDVAKNKHDVTVIDDTGRIVLKPITITNRKQGFELLHNTLKQLNQNCLIAMEDTGHYTLNLLTFLHQKNYLIYTYNPLLIKEFTKSLSLRKTKTDKKDARTIALKLLSDPNRALFMHDDRQEELKIMTCHMNRLKKHQSDWKVQYTKCLDIIFPELHQVVTKHSDYVYELLKCFPSPEKMVSAGFDKLVKIKRLTAKHALDILELAPNSIGTTSFAREFELVEIIENIQHYEKLIKQAEKKIDELMAELNSVITTVPGISNRLGSVILAEIRNINTFKNPSQLQAFAGLEPSIYQSGQLDTQGKMVKRGSSHLRWALIQAAIKVARYSPTFKAYFRTKLAQEKHYNVAISHVAKKLIRVLFHLLQNNEDFDEDKLR

SEQ ID NO: 166364 - protein, 372 aa, unidentified
MNYNTVYVGMDVHKESFSLCAYTIEAEKASHYQRTEADYKKVLNYLEFLRTIYGDDANFICGYEAGCLGYTLYHQLTANNVKCIILAPTTMLEQRSKKRIKTDRRDAEIIAKCLAQHNYSPVHIPTAKDEETKEFLRMRDDHKLALKKVKQQILAFCLRHNYRYDGKSHWTAAHLKWLKALTPEALYKEILDEYLLTYQTLSDKIERLDKRIEELATQDEYKEAVKKLCCFIGVKTHTALSVLVEVGDFKRFASAQHFASYLGLVPGEDSSGDDQNRLGITKAGNRHVRLLLTEASQCYARGQVGFKSKELKSRQSGNTPAVIAYADKANERLRRRYYKMVLNKYKKHNVAKTAIARELACFMWGMMTDNIV

SEQ ID NO: 166365 - protein, 340 aa, unidentified
MDMTTLGIDIAKSVFQLHGIDADGAVVVQKKLRRGAVLNFLGKVGPCLIGMEACATSHYWAREIAALGHEVRLIPPAYVKPYVKRQKNDAADAEAICETVTRPNMRFVPIKTEEQQSVLVLHRARDLLMRQRTMILNAIWGHLAEFGIIAAQGPRQVMGMIARLRDDGDASLPEIARSALLALGAHLEALAGEIRALERQLIVWHRADPTSQRLETIPGVGLITATALAASVSDPSVFKSGREFAAFLGLVPRQNSSGGKDRLGRISKMGDRYLRKLLVVGATSVIRRAGSNPTKTGAWVRSLMERKPARVVTVAMANKTARIEWAVMTRGEAYRASPIA

SEQ ID NO: 166366 - protein, 356 aa, unidentified
MPMLEGRVEHVIGVDTHRDSHAAAVLDPTGGLVAQVEIPSSQQGYEQLLHFAGERAPGRRCWALEGTGCYGAGLASFLADHGEWVTEIDRPKRTGRTQAKSDALDAIRAGREALSRDHLACPRQRGQREALRVLQVTRAGAVKVATDARRQLKALLVTAPEPLRQALRGGTWLRQARTCATLTTQPSDSVEYRATVRALRATAERALAAHQEARQLGKELRVLARAMAPALLAQRGIGPITGAQVLISWSHPGRLRSEAAFAMLAGAAPIEASSGRVVRHRLNRGGDRQLNRALHTIVMIRERYHEPTKRYVTRRTAQGKSEREIRRCLKRTVARQLYRLLARTTAAPAACASGLR

SEQ ID NO: 166367 - protein, 339 aa, unidentified
MEQISRIGMDTSKHVFQLHGVNAAGVTVLRRKLRRKEMVAFFEKLAPTVIGIEACGASHHLARLLSSFGHTVKLIAPQLVKPYVKRGKNDAADAEALCEAMSRPTMRFVAVKTAEQQAALMLVGVRDRLIRNRTQLSNAIRGYAAEFGLTAAKGMAHLIPLLERIEGDENLPALARELFAIQAEEYIQLQAQIDDIDAKLTAWHRADECSQRLAKIPSVGPIGAALLKMKTPDPAQFQSGRQFAAWIGLTPRDHSTAGKVRLGGITRAGDEGLRSALVLGATAVIQHALRSGKASPWLAELLKRKPAKLAAVALANKTARIAWKMMLTGEAYNAQSAAA

SEQ ID NO: 166368 - protein, 358 aa, unidentified
MASIPPTSRVVIGGIDTHKDLHVAAVLDTAGVLLGTEAFSTTRAGYRALVRWLRGFGDVRLVGIEGTGSYGAGITRHLGEAGIEVVEVDRPDRSDRRRRGKNDTIDAENAARAALAGRRTSTPKTKDGKVEALRVLRLTRTTAVKSRRAALQLLGNHIVAAPEELRDQVRNLTRMQLIRTCASWRPDTSGFRDPVVATRIALKSLARRILELNDEIADLDQLITTLVGELAPQLVAATGIGVETAGQLLVTAGDNPQRLGSEPAFAMLCAAAPLPASSGKTQRHRLNRGGDRQANSALHLIVITRMRVDQRTKDYVTRRIAEGHSKPEIIRCLKRYIAREIYYLPKPPPKETLKSQAA

SEQ ID NO: 166369 - protein, 393 aa, unidentified
MQVWIGVDAGKQAHHAAAVDVAGRVLWSTRVANDQQAIADLIGRVGADDEVVWAVDLVGCETALLRAMLALAGQQTVYIPGRTVKTMAAGFAGEAKTDARDAVVIANTARMRRDFLPVETPTELIAKLALLVAHRADLVEDWVRTVNRLRRLMLGISPVLERALTFTNVATLILISAYQTPEQIRAAGRDQLIAHLRRHRAVNAVRVADQALAAAAEQDLTLPGQDTAAALAGELASHLLHLHQRMKNTDKAIEQAFGTHPQAGIIRSLPGMGALAAAEFIVAVGDLSTFASPDHLAAYAGLAPVARDSGKRVANLRRPQRYNRRLRHVFYMSSLSTLRMNGPNRDYYQRKRAEGRKHQQALIALARRRVDVLWALLRDNRCFQLQPPPPAPV

SEQ ID NO: 166370 - protein, 379 aa, unidentified
MRYFGLDVHKSYCEGAELLSDNTVRRFRFSNEKKEWKRFAKELDGNCKVALEATGNASMIYDILSERGAQVIVVNPIRARAIAEARIKTDKVDAEILVRLLAADFVCACWVAPKEKRELRTLLHHRAALKKQVVGVKNRVHAVLARHAITVPVSDLFGVKGRQFLRELEELPEVEKIVLTSNLKILEALEAEIAALEKELNLRAIALPGMETLLGIPGIDVLAALTILAEIGDIKRFASAKKLASFSGLVPSVHQSGKTRYTGHITKAGRSMLRWVLIQVAQTAVRQPGALRDFYLRLKKRKGHKIAIVAAARKLLTIIWAMLTKNTEYRYLKEDLRQKKIRRMHKRALLYKVDNDLPQKITSLVGEEQTMTEITPPAA

SEQ ID NO: 166371 - protein, 375 aa, unidentified
MREKVRFLGLDVHAETIAVAIAEPEGEVRSLGTIPNREDSLRKMIKKLGPPDKLRVCYEAGPTGYVIYWQLAELGVKCEVIAPTLVPVKSGDRVKTDRRDAEKLARCYRAGDLTAVWVPDEGSEALRDLVRAREAAKQDQLRARHRLSKFLLRSGQRPPSGVRSWTRAYLIWVAQLRFTQMAQEATRLDYLHEVEHMRERVERLEQAITEAVKLASPALQQVINDLQALRGIADISAVTIAAELGQVSRFDSARKLMGYCGAVPSESSSGKRTRRGSITKTGNAHLRRIVVEAAWSYHRPPGIWYGLRKRQESISEEAKEIAWKAQHRLHKRYLRLAAAGKDKRKITTAVARELLGFIWAIGTRAETVVRQRIAA

SEQ ID NO: 166372 - protein, 343 aa, unidentified
MVYVGIDLHRKSSQLCALDEHGEQLLSRRVVNEPEALLAALAQLPERPAVALEAAFGWEWLADLLESEGIELHLAHPLRTRAIAAARVKTDAVDARTLAELLRGRLLPEAYVAPRELRQQRQLLRQRICLTQLRTSLKNRVHALLAREGIQRRHATLFGPAGRAFLAGLPLRPPERARLEQLLRLIAVFDTEIAALAAEIEARAQSDPRVSVLTSLPGIGRYTALLVIAELGDVGRFASAAKLCSYAGLVPRVRASGGRVRLGAISHQGSPYLRWALVEAAQQASRRPGPLRRRYERIARRRGRNVAKVALARQLLTLCYYGLRDGEIRCLARASSAWDMAAA

SEQ ID NO: 166373 - protein, 343 aa, unidentified
MNKLNVIGVDLAKNVIQVSVLSPSNRELRNCALTRRKFAEFLGRQVASLVAFEACATSHYWARVAQRHGHEVKIIPAKAVFPFRQGHKTDENDALAVAEAARRPNVKLAPLKTVDQQGMQAIQRSRELLVHERVALSNHLRGLLMEFGIVIPQGFASLYRQLPETLEDGENELPDLYRPTLNLLYGRLCDLREDLERLNREIEVLVQANPVCRRLTALEGVGPIGSVLLYATLGTGEAFANGRQFSAYLGLTPKQFSSGGKVNLIGISKRVANKRLRAVLIQGARAYVYHMKEPKTAKDRWLWAIVERSGKCKAAVALANKNVRTAWAMLTQNTEYQRYPLAA

SEQ ID NO: 166374 - protein, 342 aa, unidentified
MSVVGGIDIHRAQLTFDYVDLDSGEVFRGRVAPADRMQLRRWLQRFAERPGVAFAVEGCTGWRYVVEELQRAGVHAHVAEPAETAARRGPKRRAKTDRSDARLLRDLLLEDRIPESWIPPQPVLEARALVRLYKDLLEERTGWLQRVHATLFHMGAPDLGAKIMSAAGREQLQGAELSPATRTAIEVGMRQVDRLTEDMTRAREEIEWISRRQPACRALRAAHYGVGPLTSVAIWAEMGDTRRFRSSDDAVRHAGLDVTVHSSNGRRSAGHLARQGPVVLRWALYEAAVYSGRPTSPDYPYFRQVKARLDGQLALLSVVRKLARRCHHTLRNLDDQVLAPAA

SEQ ID NO: 166375 - protein, 377 aa, unidentified
MHSENIAAYIGLDVHKETLAVAIAAPERLGEVRYYGTINNEAQAVRRLFQKLQGLYGNILPCYEAGPCGFGLYHQLTAMNIKCQVIAPSRIPKSPTDRIKNDHRDAISLARLLRAGELTPVWIPDLTHEAMRDLIRARAAAKRDSRVARQRILSMLLRTDKRYAGKHWTGKHRTWLANQSFSQPSQQIAFQHYCQSLEQIEDRILQLDQEISRLLPEWSLCNLVCQLQALKGVGQLTAITLVAELGDFSRFSSPKQLMAFLGLVPGEYSSGNSIRPRGITKVGNSELRRLLYEAAWSYRTPAKVGAWLIYYRPDSVTQYSKDIAWKAQQRLCSRYRSLTAKGKKSQVAITAVARELTGFMWDIALAAQSPFSQQKQN

SEQ ID NO: 166376 - protein, 375 aa, unidentified
MSKIRFLGLDVHADTIAASIAEPDGEVRPLGIIPNRLESVRKIVAKLGPVKQLKACYEAGPTGYVLYWQLTALGVPCQVVAPSLVPVKAGDQVKTDRRDAAKLARSYRAGDLTPVWVPDAAHEALRDLVRAREDAMQDQHRARHRLSKFLLRHGRRPPEDVKKSWTQKYLTWIKEQIHFDQPALETTLLDYVHEVDHMAERIERLEKAIDVAIEKAPAEMRAVIEALQALRGVAKITAVSIVAEVGSLSRFEKPRQLMGYSGLVSREFSSGNRIRRGGITKTGNAHLRRVLVEAAWAYQHRPWVGGALLKRQQGLDPAIKEIAWKAQWRLHTRYKKLSARGKNKNQIVTAIGRELLGFIWAIAVRTEARAAAPAA

SEQ ID NO: 166377 - protein, 426 aa, unidentified
MADTNHPIAALHWVAIDVARYWNAVLVETASGQRHRFRMTNSAADMQRLTDFLLGLGGRCRVALEPTGDYHRPIAHRLLRAGLEVVSISSVAQSRFREAIFNSWDKNDPKDAAVILEMLKQGRTQRYVDPMLAGHHDIQELSKTYYQISRARTKVQHAIINHHVPLYFPEMHKYWTSTRTEWWVKFMIEFPTPAHVRQHSCQEFIELASPVVGRRVHRVGKLTEIWECCADSGALPHDPQSVAVQTFLFTLRHYQHLNDMRRQLEEQAQNLLASDSDYVNLMSLPGVGPINALTILAEAGNLRRFGHHRQFLKYCGFDLAKIQSGVQRGREQLSKRGNARLRLAFWLAAVVAIRARENSFREKYDRYVSSNPKDPDLKRKALTAVAAKMARVAYGIIKKDQPYRRFFEQSLPSGSIPLNKAVGAPT

SEQ ID NO: 166378 - protein, 350 aa, unidentified
MLIIGCDYHPSFQQIALVDTETGELQQRRLGHREEAEQFYRALAKSGNKVRVGMEASGHAGWFERLLAELNFELWMGDAAKIAAKRVRKQKTDRLDAQHILTLMVKDDFPKIWVPSWENRDVRQLLWHRHRMVQTRTRIMNQLQAAALNEGLRYKKKLWRETGRQQLESLPLAPWASRRRQDLLEVLDRVNPTIAELTHAIEQEAEKCPEAQRLMTHPGVGALTALAFVLILGETERFGCGKQIASYLGLVPEEDSSGERRRLGHISKQGNSLLRFLLVEAAQVTVRSDVRWRNRFFHLAQRRGRKIAKVAMARRLAVRLYWMWRRGWNYEQLESFGSHAGQPGHRHGVK

SEQ ID NO: 166379 - protein, 405 aa, unidentified
MVDIMVSDFKKGRYNLMKIFVGIDIAKLNHFAAAISSDGEILLEPFKFTNDADGFQLLVSKLESFDKNSIIIGLESTAHYGDNLVRYLVAEFYQVCVLNPIKTCQMRKNNVRKTKTDKVDTFVIVKTLMMQDDLRFITFFDLDMMDLKALGRFRQKTIKQRTRLKIQLTTYVDQVFPEIQYFFKSGLHQHAVYALLKEAPSPKEIASMHMTHLANLLKVNSHGHFTKELAKELRVLAQKSVGANDSAISIQITQTIQQIELLDSQLEKIEAEMTDIMKFNDSVIMTIPGIGYINGGMILGEIGDIHRFSNPNKLLAFAGLDPSVYQSGNFQAKTTRMSKRGSRVLRYALVNAAWNVVRNNATFKAYYDAKRAEGRSHYNALGHCAGKLVRVIWKMLTDEVEFNLE

SEQ ID NO: 166380 - protein, 423 aa, unidentified
MEVMHQWVAGLDVHKETVVSCVRLMTGRKPARECRTFATTTEGLLALLAWLTASRVTHVAMEATGVYWTPVWKILSAGDFTLIVANAAHIKQVPGRKTDINDAMWIADLLARGLIKASFVPEEEIQELRSLMRTRKQLVREQTRHVQRLEKTLEEANIKLGTVISDLMGASGRRMIEAMIAGERDPHRLAGLAERTIKASPKALYDALHGRLREQHRFVLQLHLQQWDAIDAAIRQIDQRVAEQIKRMDAEAADRQPPFRELIPGLCAIPGVSFLSATAILAEIGRDMSRFPTAGHLISWAGLCPGQNQSAGKRKSSRLRRGAPWLKTMLVQCAWAAKRAKNSYYSAQFHRLRSRRGPQKAICAVAASILTAIYHMVKSGLPYRDLGVDYFDRRSPEAKAKRLVTQLAKLGFAAQLQPLAEAA

SEQ ID NO: 166381 - protein, 440 aa, unidentified
MAIRKRDAEVFPNAAGIDVGASSHWVAMPAPVAEQPVREFGAMTDDLQTLADWLIACGVDTVALESTGVYWIPVYEVLEQRGLTVWLVDARQLKYVPGRKSDVQDCQWLQKLMSLGLLRAAWRPDMEVCVVRAVARQREVLIAEQSSWVQRMQKALVQMNIQLTEVLSDVMGTTGQAIIRSIVAGERDPSVLARHRHRRVKASEADVIRALTGNWREEHLFVLGQALAMYDDIGRHLAQCDDKLQALLAERRRHDIDVGRTPRQGTRQRSEFDARQALANWAGADLTRIDGIGTTVARTLLSEIGPDLSRFASVKHFCSWLGLCPGTKISGGKVLSSGTKRSANRARQALKMAAMTLSHSDSALGAFYRRLCMRMDKPRANTATAHKLARLVYFMLTRGEAYVDQGQQRYEEQQRQRSIAALKRRAAALGFQITSTEAAA

SEQ ID NO: 166382 - protein, 376 aa, unidentified
MNEKLRFLGLDVHAETIAVAVAEPNGEVRSLGMIANREDSIRKFIRKLGSPEHLRACYEAGPTGFVLYWQLTQLGVKCDVVAPSLVPKKPGDRVKTDRPDALKLARSHRSDDLTAVWVPDEGSEALRDLVRAREAAKQDQLRAKHRLTKFLLRTGQRPPLGVRAWTEKYVEWVQQVRYTHPAQEATLLDCLNEVQHMEERVKRLEQSIVEVIQLAPAPMQEVVRGLQALRGIAHISAVTIAVELGNITSRFESARDLMGYSGAFPSEDSTGKRIRRGGITKSGNAHLRRIVVESAWSYRHRPAIGARLRRRQEGLPAEITEIAWKAQNRLHKRYMTLMARGKEQRKTMTAIARELLGFIWAIGIKAEAACKQQMTA

SEQ ID NO: 166383 - protein, 288 aa, unidentified
MHIASIGIDLGKTTFHLVALGERNKVLLRKKFSRPQLLAYTANLPASLVGLEACAGAHVLGTALREQGHQVRLIPAQFVKPYRKSNKNDFLDAEAIAEAVTKQNMRFAQIKTQEQLDWQAMHRVRDRLVRRRTALINEIRGFLLERGITFAAQPIHLRKNLPTVIEDAGQNLSPRLRWLLDHMWQEWKQTETEIQAITDEIERISNEDARCRQLRQIPGFGPLVSTATVAAIGNGSAFRRGRDFAAWVGVVPRQYSTGGKQKLYGISKRGNVYLRRMLIHVPARFCFA

SEQ ID NO: 166384 - protein, 358 aa, unidentified
MPQSTPSDPAEVVLGVDTHKDVHVAAVLTTLGVLLATSTFPTTAVGYRRLLAWARGFGPVGRAGVECTGSYGAALARYLLAATITVIEVNRGDRGERRRRGKTDTLDAETAARAVLSGRATAIAKSGDGQVEMLRMFKLAKASAIKSRSQAINQLKAVLVRAEPTLRESITGLGNPALFRRCAQLTVSDPCDPAGAAALTLRLLARRVLTLTSEIDELNVHITAAIKTHAPQLLQRYGVGPDTAATLLLAAGDNPERLTSEASFAALCGVSPIEASSGKTRRRRLNRGGNRQANSALYTITIARLRWDKRTQHYIRRRVAEGKTRREAIRCLKRYICREIYRDITLARDQPAPTSSAA

SEQ ID NO: 166385 - protein, 379 aa, unidentified
MSVARLVRAALSVEVMVKGRLAPTMAQQTDEVTGGVDTHKDSHTAAALDSAGRLLGVEQFPATGAGYGRLLDWLRGFGAVGKVGVEGTGVYGAGLARHLAAAGVAVVEIDRPDRKARRWQGKSDPVDAEAAARAALAGRRTGKPKDRTGQVEALRALQVARRGAVEGRADAQRQMKALVVTAPEQVRAELSALTATRLVEVCASADIAVAHAGDPAVAVRLALRSLARRHQRLSVEIRDLDTVINRLVVTISPKLLEVQGVGPDTAGQMLVTMGANPDRMRSEAAFAMLCGVAPLPASSGRTHRYRLNRGGDRQANAALYRVVLSRLRWDARTRAYVERRTKEGKSKKEIIRCLKRYVARELYAILTTLREPNDLPVIT

SEQ ID NO: 166386 - protein, 370 aa, unidentified
MAQSTPLFVGLDVHKDSITVAHAEGGRAAPPVFVGAIGTRQTDLDQLIRRLQGKASALTFAYEAGPCGYGLHRYLTGKGLACQVVAPSLIPKKPGDKVKTDRRDAVELARLLRSGDLTAVYVPSVEDEALRDLGRARDAARITLKNAKLRLKAFLLRLGRHYVGRADWNEAHRRYLAKVVCPTPTQQIVFQESVRAVDEQVDRMHRLEAELLERAPAWRLYPVVQALQALRGVQFLVAITVVAELGDLTRFDSPRQLAAFVGLVPSEDSSGPRRRLGAITKTGNGRAQRALIEGAWAYRHPAKVSEHLQRRIDTLPKSLQDIGWKAQVRLCKRFRRLTARGKHPNVVVTAIARELIAFMWAIAKEVPITT

SEQ ID NO: 166387 - protein, 452 aa, unidentified
MAKKRRKQTTRGKMLHTIQPNAAGIDIGATEIYIAVAQDGESQPVRHFGTFTEDLHKAAKWLKKCGIDSIAMESTGVYWIPVFQILESYGFEVILVNAKHVKNVPGRKTDVLDCQWLQYLHSVGLLRGSHRPPQDICAVRALLRHRDTLVRISASHVQHMQKALTQMNLQIHNVISDITGATGMAILDAILCGERNLNKLAALKHSRIRASEATIKKSLEGDYRSEHLFTLKQSLQSYRHYHKLMKECEQEIENHLNNFSSQVDLDKNPLPPPVSSSRRGKGNEPDIDLRTHMYRIIGTDLTQIDGISSSTAHVFFTEVGRDLSRFANPASFASWLNLCPGNKVSGGKILSSRTRPGKNRFAQALKISAMSLWRSQSYLGQYFRRMRAKHGNPVAITATAHKLARIVYHLVKTGKQFDESAFKQQEKNHQKRIFQNIKNKVKNMGYQLVPCD

SEQ ID NO: 166388 - protein, 261 aa, unidentified
MQVICESSGGYERAFVQAFAGAGLKISLVQANRVRQFARAAGILAKTDRIDAEVLCAFGKVMGPQAVTAAKLEQEHLRELESQRRHLTHLLVMELNRGARVSDACVQRLNRRLIKQIKNQIEQLDLLIKGHINQSHELSAKAAKLMSISGVGTRTAALLLARLPELGELNRREIAALVGVAPFNRDSGRMCGKRAIYGGRKPVRHGLYMAALVAAHHNPFLRDFYLRLRAAGKPAKLALTATMRKLLIALNSALKTDPTYA

SEQ ID NO: 166389 - protein, 342 aa, unidentified
MLYCGLDLHAKESYLYVIDHRGRQIMSRKVPTQARSFKESLGPLVRRRLKVVLEASTMTGWAVEQLRRVGAEVVVVDPRRVRLIAETRHKNDRADARVLAELARTGALPPALNLPSEQARVLRARLVVRRGFVVQRGAILCRAGALLRSVGIRVSKRGLQRAGQWDKLLRRRDLPQWLIGLLRPLREAAEVVERIIGSVQEQYQAELKDERVKRLQSIPAVGPIASLTLVASVDRVERFTSSRRIGSYAGLVPREYASAETFRRGHITKEGRKDLRTVWVEVAHVALRMKEHPLGPWARRVVYRRGRKVAVVALARRMLCMAFAILRDGTVFDVNRVQTMKA

SEQ ID NO: 166390 - protein, 386 aa, unidentified
MRKPNDLSRSLSVLNRNSTLIAVIEMSQSSWLIAGIVPGVERQPLKKLAVDESALLKILHRWREEAEKAGHKIERIAVAFEAGRDGFWLARWLRARGIEAHVIHASSVAVSREHRRAKTDRLDTELLKRAFLGWLRGERDHCKMVAIPTLTDEDAKRPNRERESLVGEQSRIVNRMKAALARLGIRGFNPKLKKAVERLEGLRTPEGEPMPPNTLAELKRDMERRRLVRNQIREIEKTRLERIEQAPSDGPHVMVRLLARVIGVGVETADMLVQEVLIRNLRDRRAVARYGGLTGSPDESGKKRREKGLARSGNARVRRGMIQLAWRFLMFQKDSALAQWFYARTKNAPQTRKTMIVALARKLLIALWRLVREGTIPEGIVLRPAS

SEQ ID NO: 166391 - protein, 399 aa, unidentified
MSVVGWDWASQAHDVTVLNDAGGVVDRWAFPHTEAGWVMTLARLRRHGEPGDLPVIIEKTSGLVVDRLLAAGHPVVPVHPTAFYAARPRWGASGAKSDPGDSYKLADYLRTDGHRLRRLEPADPGLRELQALVRLREDQVRARTAATNQLWAMLGNYWPGPRDLFCSLASPIALAFLTAYPTPQSAARLGQARMAAFLRRNSYRGGKEPAALLARLRAAPQASVVLPAATLAAMVRAHVQQLRSLQAAITSIERLIAGRVAAHPRARLLGKLPGVGMINLAQLLAEVGPILDRASSAEQAASECGAAPVTRASGKTTGVYFRWAASTRARKAITAFAHNARMQSPWAAKLYADARARGKRNPHATRIVARAWIRVIWACWHTAVPYDPAIHHARQRFTT

SEQ ID NO: 166392 - protein, 373 aa, unidentified
MSRSIIYLGLDVHKDSITIAVLPEGAPAPTRVERLPNDLAKLRRFCERLAAQGELRACYEASGAGYVVHRAMRAWGYHCDVIAPSLIPTKPGQQRKHDKYDAAQLARLYRAGELTLIRIPSEAEERVRDVVRCRETLQREVLRSRHYILKFLTRRGFVYREGTNWSTAHYNWLRRLAAASSPLAAEDQIVYGEYLGLLEYKLSRRDELDRRIAELALTPALAPAVNRLQCFRGVQRHVAMVLTTEIGDWRRFESPRQLMAYLGLVPKERSSGDRERRGSLTKAGNSHCRHALVQAAWAYRFQPKVGIALKARQRGQSPVVIAHAWKAQHRLHTLYRRLAFRTKPQIAVVAVARQLVGFLWAVMQDQDAPAVAA

SEQ ID NO: 166393 - protein, 380 aa, unidentified
MDRVCGLDVHKDSVFACILDEQGKKIFEKRYGTLTPELDNLRDMLVAQDCCRVAMESTSIYWMPIWRILDTDFSLKLANPYFIKQLPGRKSDVKDAAWIAACLQKELIKDSFVAGEVLQQLRQYTRQHRRLTKSRVRLEQQLDNQLQRCNIRISNYVSNQGKNKSIRKIINKIIAGERDCEKLCYLVHGRTQNKHGKQVITDSLKGIIGKADVEMLQQCMGQIELIEKQQATCLHHLEELANEHFAEEISLLCTIPGIQKFSALCILAEIGNDMSVFPKATDLVGWAGLRPRNDETAEKIKSRKILHGNKYLRQILVEISWSAARSQKTFLGKKFKAFAKRMKSQKALIAITRKILVIIYNVLKTKQPFDPKKNVQADKA

SEQ ID NO: 166394 - protein, 350 aa, unidentified
MLIIGCDYHPSFQQIALVDTETGEVQERRLGHREEAEQFYRTLATEGAKVRVGMEASGHAGWFERLLAELNFELWMGDAAKIAAKRVRKQKTDRHDAQHILHLLLKDDFPKIWMPSWENRDVRQLLWHRHRMVQTRTRIMNQLQAAALNEGLRYKKKLWREAGRQQLESLPLARWVSRRRHDLLEVLERINPTIAELTQAIEQEAKKCPEAQRLMTHPGVGALTALAFVLVLGETERFGCGKQIASYLGLVPEEDSSGERRRLGHISKQGNSLLRFLLVEAAQVTVRSDVRWRNWFFHLAKRRGRKIAKVAMARRLGIRLYWMWRRGWNYEQLESFGSHAGQPGNPHGVQ

SEQ ID NO: 166395 - protein, 460 aa, unidentified
MNPKRSKSTNGGEMPMVHPNAAAIDVGATMHMAAVRADRAPGPVRSFGTFTADLHRLVDWFTECGVETVVMESTSVYWIPIFELLDARGFTVFLVNARDAKHVPGRKTDVSDAQWLQRLHSFGLLRASFRPKGQIAELRAYVRQRERLLEYAASHIQHMQKALTEMNLQLHHVVADITGATGLRIIRAILAGERDPEALACLRHYSCHSSAETIAKALTGSYRAEHLFALEQALALYDSYHEKASACDVRIEAVLKELSIHRGHGHGSAPRASRRRNRTDQANALAFDVREALFALLGKDITTIDGLGPYLSLKLIAECGDDLSSWPSAKHFTSWLGLAPSNKVSGGKMLSSRTRRSGGRAAALLRLAAVTVGRTDTALGAFYRRLSARIGKAKAVTATARKIAVLFYNAVRYGMDYVDPGASSYETRYRTRVVNNLHRRAKAFGFVLQPLEPKVGAAVS

SEQ ID NO: 166396 - protein, 315 aa, unidentified
MSDVPCFIGIDVAKAQLDIALRPSGERWAVPNDVSGVTMLVDRLQALHPALIVLEATGGLERLVTSALATAGLPVVVVNPRQARDFARATGQLAKTDALDARALAHFADVIRPTPRPLPDAQTQELRGLLGRRQQLIVMRTAEQNRLAGTSGRLQTDIAAHITWLNERLAMLDDDLETVLRGSPLWRENDDLLQSAPGIGPVCARTLLLELPELGTLTRQQIAALVGVAPLNCDRGTLRGRRIMWGGRAHVRTVLSMGTLVATRDNPRIKAFYQRLLAAGKVKKVALTACMHKFLTILNAMLKHRTPWHAQEVQG

SEQ ID NO: 166397 - protein, 343 aa, unidentified
MKLTRVGVDLAKQVFQVHGVDRAERPAWCKRLKRSRWIADLERDVEPGAEIGMEACGSAHHWARLLQPKGYRVKLIAPQFVKPYVKTNKTDANDAEAICEAMSRQSMRFVALKTVEQQDLQAVHRVRSSLIRERTAKANQLRGLVYEYGLVAPQQISSLRRAVPQWLEDAENGLTVRFRSLLAGLYRDLQQIDERVLELDQEIAAIAREHEAVGRLEQLRGIGPLTASALYALVGDARQYRNGREMAVSLGLTPRQHSSGGKERRLGISKRGDKYVRTLLIHGARSALRAAPGKTDRLSRWALALAERSHPNVAATALANKMARVAWAMLRHGTNYEPEHVAA

SEQ ID NO: 166398 - protein, 370 aa, unidentified
MKQYSEAFVRFDTAKKKHAVAIADVGRAGEIRYLGEIDSSPAAVERMIRKLAGRYEELHFCYEAGPTGYGLYRQVRALGHHCSGVAPALIPKKPGDRVKTNRRDAVTLARLLRAGELTSVWVPDTVHEAVRDLIRAREAASQDLRRKRQQLLSFLLRHGRIFSGRQHWSRAHLRWLAQQQFDHPAQQIVFQDAVDAIDDAATRLRRLDEQVAAIVPNWSMAPVVEAYQAMRGVSFVVAVTFVAEIGDLRRFDNPRQLMAFLGLVPSERSTGERVRRAGLTLAGNKRARRVLIEGAWSYRYPARVSQPLQARLEGLPKVVRAIAWKAQIRLCTRYRRLTTAGKKLPVVIAAIAREMAAFLWVIARHVAPAA

SEQ ID NO: 166399 - protein, 310 aa, unidentified
MMKENFVGVDCHKNTIACYQNGKFKEFSTTQKGYQKALEWAGNNAQWAVEGAFSVHLLKKGCKVYEINSLLTYNFRKTLSICGKKDDYGDAKVISLFAKDAPKSEVSLKTIELKEKLTSRELFVKQKTELINHIRSLFLKRGEKLSFNNLNTIKARKWLQNHEDKLVSGLGKTLSDQINLIEILEKEIELLLPEKAIKLTQIAGIATIRAAIIYTETKGKTSTKAQLANYAGVAPVKDASGQKNKYRSNKRGNRKLNSVFYQISLSQVKYDEKGREYFEKKVKEGKTKRHARKCLSRQIINLVWKILNDK

SEQ ID NO: 166400 - protein, 329 aa, unidentified
MSDVVVGLDVHLKDTQVTVMKLNGEIVKRERVRTTRAELRKSLQSVPKGSKVALESVGFCWPWVDFLDELEYEPLLANPVKVKYRAEDVKTDRVDSKLLADLTRMNWLPTCYVPPTELRSLRNLLRHRAYRTRLCTGVKNRTRSEFRKRDVELDVNLGTVKGRKAASGLEIFEVNQNMELLDVMDRQNKEIEAVLEKKYSGVRPVQLLMSIPGIGFISALTLYAEICDIKRFANPEKLAHYAGLVPRVHQSGEHSFMGRETRGDAWLKWILIGTAWSHVRYCPKGHLAEVFKETRKRKGNSRDAIKVVARKLVNVVWAVLTYEQEFMVK

SEQ ID NO: 166401 - protein, 489 aa, unidentified
MNNCAASHNRAGGRPALARSRSRLAYPKRVSFRPPAEPATLAPTSNRKSPPEGHYISLMDSRAKRRKNQQKTMNESGQWQQHRAFGALDWASEKHSVIVVDQAGKVIEDFEIEHSALGWKKFREKLQPYGSIPFAIETSQGAAVEQLLEAGMIVYPLNPKSAQAYRERKAPSGVKDDRLDAWSFADALRVDGQGWKALKPEEPLIKELRLLCRDEVSLIEQRSAFIQQLRHALAEYYPAALEAFGDWTGVSAWMFLQRFPTPQALAQAGKRKWQNFLHSRRLWGSDEGPRRMEIFARATEFAGTAPTVKAKSLLALSLVEMLFTVEKQLGLYRRHIEELFASHPDHDLFGSLPGAGTKIAPRLLAEIGDDRQRFGGDVQGLQCLGGTAPVTKRSGKYRHVHQRWACDKHLRHALHLFAERSLSRCVWAERYYQLHRQKDRSHANALRRLAHRWLKIIHKMWMDRTPYDPELHHRNQLQHGSWIFQLKAL

SEQ ID NO: 166402 - protein, 332 aa, unidentified
MNVCGIDVSKNSLEIVTIVETKVSRVKTFTNTRTGHKALVGHLKKLKVDHVCMEATGNYHLDIALILSTHKTIKLMVINPKVAHSFGKALAAKAKTDAIDACVLAQYALRMEFKQWQAPPEVFFAVRACSRRLYQLVKLKTKLKNQLHSYQNTDFSPEFIIDDALQSIVQVEQQIKNLIKHTLQIIEADEQASRMYQILINIDRFGPRTAIKLVGEIGVLDPELKGKQLVAHAGLYPTIITSGTSVNKKSRLSKTGNKYIREALYMSAMSLTQHNENIAAYYQHLINDNGLAKRQAICAIMRKLLLAISCMLRNQSTFDPSKFYQIKAQVMH

SEQ ID NO: 166403 - protein, 430 aa, unidentified
MAAVSIPIVDWLDKPQSFHFVQGYEDRFLWNTVVANDTRSDAYMIYLGIDVAKNSHVAAAMSSEGEVLLMPFPFANSADGFTLLREKLNNLPKLPLLVGLESTAHYGENLIYFLCGNGYHVAMINPLQTAAIRKSAIRKTKTDKVDAFVIAKALMMEGYTELQQSDIQILKLKGLCKTRQNLILMRTRCKIQLGSFVDQLFPELNRFFRSGLHINVSYTLLKAHPRPAEVGALHLTYLSNLLRKASRGKYKKEDAIRLRELARNSIGTDNPALALQIRQAVSQIELFSAQLKQVESEISTIMDSLDSPIMTVPGIGYLNGAMILSCIGNIQRFSSPAKLLAYAGLDPAVVQSGNFSAKSTRMSKRGNSMLRYALINASHNVVRNNETFAQYYNSKIAQGKSHYCALGHTAHKLIRVIFALLTNNIAFDLA

SEQ ID NO: 166404 - protein, 342 aa, unidentified
MKVTTVGLDLAKNVFQIHAVDGRGKVVVRKQLKRDQVAPFFAKLEPCLVGMEACASAHHWARKLQGFGHNVRLIAPQFVKPYVKANKNDAADAEAICEAVSRPSMRFVAVKNVAQQALLAMHRVRQGFIKARTAQGNQIRGLLGEYGLIIPQGIGHIAKRVPSLIEDASNELPGTFRVLIDRLLEHLKALDQQVAELEAQIIAWHRESEASRRLEQIPGIGPITATALVATLGEARNFSNGRQVAAWLGLVPRQHSTGGKVTLLGMSKRGDSYLRTLLIHGARSMILALRRKANPQGWLHDLLKRRNANVAAVALANKNARIAWALLAHDRSFRADYAAAPV

SEQ ID NO: 166405 - protein, 316 aa, unidentified
MTKAERFVGIDVAQATLEIAVRPTGESWQVANDEVAFGALVDRLHELAPTLIVLEATGGIQLPVVGALAAAGLPVVAMNPRQVRDFAKATGKLAKTDGIDAQVLAHFADAVRPEVRPLPDAATQELAILVARRRQLLEMRVAEQNRSRGVPPRIRAQIREHIIWLNRCLADLDRELGQLVRSSPVWRERVDLLRSTPGVGPVLSATMLADLPELGTLSHKQIAALVGLAPLNQDSGKKRGKRVVWGGRASVRGALYMATLVATRRNPVISAFYQRLLGTHKPKKLALTACMHKLLTILNAMVRRQTRWAPPVALVG

SEQ ID NO: 166406 - protein, 355 aa, unidentified
MYGLKHQKEKRSMDHFAGLDVSVKETSVCIVDDTGRIIREVKVASEPAALLLVLRNGAYHFKRIGLEAGPLSQWLFSVLAAAELPVVCVETRHMQAVLKAQINKTDRNDARGIAQMMRVGLYRPVHVKTLRSQKLRMLLTHRKLLQSKAIAIDNDLRGTLRNFGLKVGMVGTVKFEARIRELVENLPDLAVLIEPLLVVRRVLREQFVILHRRLLAIVRDDEVCRRLITIPGVGPVVALTYRATVDVAARFRKSKAVGAVFGLTCSKYQSGEIDRSGRISRCGDEMMRVMLYEAAQSMLRTKKWSWLKAWAMQIARRRGMKKAIVALARRLAVIMHRIWVDGTEFRWTREATAAA

SEQ ID NO: 166407 - protein, 377 aa, unidentified
MSRSKLCGGGSHLLVAPGQAGNVVGIDPHKHGLSALVLDERGGVLGCEHFRVSGIGHRALEVWARQFGPIARWGVEGASGWGRHTAMYLIAQGYDVRDVCPARTSRSDRARQRGKSDVLDCERIARETLAHSLLPRAFKRAGQDRAPDQTHELLALWHNQRRSIVKTRQHLLNESEDLLNTLALEVGEQLPATKSIKPRLAAAARMAPPAGDVVSALRLRLLGDYHQQIRQLDAQEKAVVRELSTLIGACGCTLEQLHGLSVRSVAELLVEVGDPRRFTEGGFARFNASAPLAASTGEGPDEPVRHRLNPGGNRRVNRILHLMAVTQLRCEPKAQAIYNNARTRGHTKKEARRILKRHLSNVIYHRMTRDLTPLPSP

SEQ ID NO: 166408 - protein, 364 aa, unidentified
MNATTVRPGRELAATVAIDLAKEVFELAFADGNGRIIERKRLGRGPFQRCLINRPPLRVVMEACGSAHYWARRLARLGHSVVLLPAHHVRPYVRGNKSDRTDAAGLLEAARCQDIHPVPAKSPEQQGIQALHRIREHYKAQRTAGINLVRGLLREFGVVMPAGAGNLRPATLAALEDGDNELPMELRHALAGLLEKIATCEAAMDDLEKRFTAMARNDPRCQRLMAACGVGPLTATALCAGVGDLSRFPSGPHLASHLGLTPCEHSSGHIRRRGRITKRGDVYLRTLLIHGARAAINAAQVARKRDRCLDRTQQWALELADRIGHNKAAVALASKTLRRLWAAERHGARFDPNHRSLRPSVQAA

SEQ ID NO: 166409 - protein, 428 aa, unidentified
MNSTQNERINQITSTTLIVGVDIAKFKHVARAQDYRGVEFGKPITFENNHEGFKLFVSWFHKISKERGFQDVIVGMEPTGHYWLNLAQFLRNKEIMYGVVNPLHVKKSKELDDNSPTKNDIKDAKVIAQLVKDGRYAVPSLPQGVYAELREAMKIRDHLTTDLCVVQARVHNWLDRYFPEFLTVFKDWECKSAVQMLSLNLLPHELISISDEELLQHLREAAKRGLGLGRIKKLKEAAMCSVGIQQGSELAKMELKLLLTQYEWLQNKLEDLGAKLDELLLQIPHVQQVLAMKGIGRDTIAGFLAEVGDIRKYRHPKQITKLAGLNLKTNSSGTHTGQTRITKRGRKRLRALLFRVIMPLVAKNAAFRALHEYYTKRAKNPLKKMQSLIALCNKLIRILFGILKKGHEFSEDKMMQDIPRCVELTQAA

SEQ ID NO: 166410 - protein, 457 aa, unidentified
MKWYLGIDVSKGYADFALVSELLVQLEETFQLDDTRSGHEQLEIWLEALFKQHPHLEIDCGLESTGGFENNWYALLIKLSSSIPIRATRLNPSTVKNASRALLNANKTDAESAKEIAGYLKRYTDQIDFAVRDNQYASFRSLQNHLELVTKQKTQLINELKQILYSSFPELQRFCKQGIPGWVLELLMQYPSPEKLVRQKPLKLARIKGITEEKAKSLIEKAQVTIASRSNSTYEFLIVQLATEVKHKQGKIKQLKQYLEDHCKGKEKEWLESIKGIGSYSAAAIMIQIEDVHRFASPKELASYFGLHPLIKMSGDKRMVSRMSKQGRPAMRALLFMCANSAVRCDEHMRTIYARHRAKGKNHKQALGAIMHKMTRVIWGVLMHEKPYDSRIDLANQAKNNQNPVQDELKEIENKRRMQKFDSDAPVSRIASKKRRVHAASQVGEAELVRDLEHEPG

SEQ ID NO: 166411 - protein, 379 aa, unidentified
MATTKQALLNDTSVTLMLYMALELSGAKWKVAVADGKRAASQHALVAGDVGGLLLLIDKAKKRCGVQGKVRVMSCYEAGRDGFWLHRWLLEQGIDNLVVDSSSIEVNRRKRRTKNDALDAAKLYEMLVRYVAGEKRVWRVVRVPSVQQEDERRLHRELERLKRERNAHVNRIRSLAVLHNVRLQRVGGRDWSERLEQLKGQLPAGMLAEIERQSARAKLVGEQIAQLEKSRQEQLQTMIEQQQDGPLLALLKLRAIGVQTAWVLVRELFSWRRFSNRRELAGCVGLNPSPYDSGASQREQGISKAGNRRVRALLVEIAWYWLRYQPHSALSAWFNRRFGGAGKRMRRVGIVALARRLLIALWRYVEQGVIPEGAQLKRP

SEQ ID NO: 166412 - protein, 337 aa, unidentified
MAEVTFPQLVQRACGIDVHLKVVVATIDGVGIPRETRSFKTFTSSLNELKEWLLSNGVTHVAMESTGVYWKPVYKVLEDSIPNVWIVNARHIKNVPGHKTDKMDSEWICKLLLSGLLKPSYIPPKEQRQLRDLTRYRNKLIQQMASEKNRMMRILEDCNIKLSSVVSDTSGATATSLIDMLCEGKVLTLDDIKSVYHGKLSASPEELLEACTGFVEEHHIYLLQMIRKDIDQTHALVDDLSERIKRLLSKYENVLELLKEIPDFSTKVVEDLVSEIGLDMSHFPSEKHLSSWAGLSPGNNESAGKKKRTNHSRKQTGKGGNHRSRMGCDPYKEYVFQ

SEQ ID NO: 166413 - protein, 339 aa, unidentified
MSIVMGLDQHRAQITAEWIDTSTGEVSRGRVAPADRDGVRRFLERFCGEELEVALEATTGWRFVVEELRRAGAQVHLAEPAETSARKGNKKRAKTDRADARHLRELLMIDRLPESWIPPEHILDLRARVRCRHTLSHQRCEWQQRIQAVLYHHGCPHRRQLMVGDGREWLAAQPLPETAREQVTIAIAMIDALDRHMVPLDKELRAYARRQLGCKALMAHYGIGELTAVTILAELGDARRFANSRDAVRYAGLDITVYQSDQHRAPGKLSRQGPPALLRWALYEAAQVARRPGSPDREYYLQAAERIGGNRAYLAVSRKLLKRCYHTLRELGEEALQPA

SEQ ID NO: 166414 - protein, 287 aa, unidentified
MAYYTGIDVSLRSVSICVVDDKGEVCLEAKVAAEIDAIVERLRRFSSEVKSVGFEAGTLTQYLTYGLQAAGFEVICLEARQVSVTLAAMRNKTDRNDARGLAQILRTGWYSRVHVKSLQSHQVRALLASRKAILTKCVDLENELRGLLKVFGIRLPSRVGHGSFDAELRETVSSDEMLACALVPLLDARTVLYKTYLKLDNAVKGLVRVDPICRRLMSIPGVGPVTALTFKAVVDDPNRFKSSRAVAAHFGLTPRRFQSGELATRDISPERAMPMFALRSTSPLTRS

SEQ ID NO: 166415 - protein, 442 aa, unidentified
MAASPDAHDTPGGALVSVHVVPATSSTIVVAIDVGKNVAAISATDSSRRRVLPPTHVALTRSGLDSVVTRIQSASDASIQVRVGVEAAGHYHQPVLGYTWPSDWELVEVNPARVAEQRKIFGRRRAKTDAIDLDALTELLLAGQGIPVISRSVVCAELSAWAAHRSRRVLTHTATMIQLTTQLDRAFPGVGTVISDLFGTGIGRLVIAEFTDPTHLTKLGTEGVIAFAADHGLRLEHPRAERLVAAAADALPTPHAALARQVIARDRILLADLETQITEATARIAELIPASPFATQMSVPGWGPARIGSYAGALGDPERWAGPAQIYRASGLVPAQYESAGKRRDGHISREGSVPVRRALIELGFGLRHKRAIGEAVRSGLEAARQAEQGHRVRVGAPRQPNRLRPGTGPGRIRPGLLAAKGVLTTKPDPRGSSARPRTVER

SEQ ID NO: 166416 - protein, 373 aa, unidentified
MKRILKIGMDVHSTNYTLCAMEPTIGTEDRIYGVIQVAPDYKEVLSFIDSLKMKLGFDNEYSIECGYEAGCLGYTLYHQLTEAGIKCVILAPTTMLTQQGKRVKTDRRDAHLIAQCLCYGGYHSVYIPTGEDDAVKEYLRMRDDHKLALKRLKQQINAFVLRHGHQYTGTKWTIKHVAWLHKLELAPMYRETLDEYMASYGEQETKIERYDKRIEEIAAGARYQESAKKLGCFLGIRTHTALSLIVETGDFKRFAKGSIYAAFLGLAPGEHSSSMSVNRLGISKAGNTHLRCLLIEAAKGICKGAIGHKSKKLRLRQNGQSAEIISYADKANTRLRSKYYKMIRHGKKKNVAVAAVARELACFVWGMMTGNIA

SEQ ID NO: 166417 - protein, 342 aa, unidentified
MEHFAGLDVSVKETSVCIVDETGKIVREVKVASEPEALLAVLKNPAYHFKRVGLEAGPLSQWLYSTFAEVGLPVICVETRHMRAVLKAQINKTDRNDARGMAQMMRVGLYRPVHVKTLRSQKLRMLLTHRQLLQSKAIAIENDLRGTLRNFGLKVGVVGKVKFEARIKELVENLPDLAALVEPMLVVRRVLREQIVILHRRLLAIVRDDEVCRRLMTTPGVGPVVSLTYRATVDVPARFRKSKSVGAVFGLTCAKYQSGEVNWDGRISRCGDEMTRVMLYEAAQSMMRSKKWSWLKAWAMQIARRRGMKKAIVALARRLAVILHRIWVDGTEFRWTRETAAA

SEQ ID NO: 166418 - protein, 346 aa, unidentified
MHYIGMDSHISTLDFAVVNESGRLVKASRVATSVNGFVEFVKTVPPPRTIYMEEGTLAAWALETCVRFREKLVITDAKENHWIGSSGQKNDSIDALKLAQLARGGYIKEIHHPVGQRRRFRELMIAYQDAVRSTTRIKNKIKAKFRQNGIQCTGTTVYSEAHREEWKGKLPQEATLLLILDGLWRQLGQSEQTEKEILAAARAQAKHYPEIKHFEAITGIGFISAATISAILETPYRFADKRKVWMYAGLGLMKRSSGGKTYSEKLSTDYNRLLKYSIKQAAEAAIQAKDNPFRRKYLDMTLLHGIAPHRAKLTIARDMLATMWAMWRKGEKYSPEIREKAACKQG

SEQ ID NO: 166419 - protein, 355 aa, unidentified
MPSKADTAVARTIGIDTGKNTLHMIGLDERGAIVLREKISRARIAARFVNLPPCLVGIEAGMASHYVARELVALGHEVKQVPPAYSKPFRHGHKNDFRDAHAVAEAVERPSTRCVPIKTDGQLDLQALHRVRSRLIGNRTAVINQIRGFLLEHGIPVRQGHHFLRKQLPLILATRTDVLSPRMIRIIGDLMADWKYLDERIERVTDEIEALAHADEGCQQLITVPGIGPIISSAMVAAIGNGAAFCKGRDFAAWLGLVPKQMSTGDRTVLGRITKLGNRYLRMLFIQGARAVLLRPASWVKHSFGSWLTAATRRLHRNVLAVALANKLARIAWTVLAQGRRYEARVEPRVEPAAA

SEQ ID NO: 166420 - protein, 331 aa, unidentified
MKFTETIGLDVSKITLDACVHGQQLLIQVPNTKKGHLKLLSWAIKKTGCSLENILFCFEHTGIYSFNLSRFMTEKKLNYILVPSLEIKRSLGIQRGKNDQIDARKIAQYAYRRRDEITPYQAPDESINKIRQLLSLREKLVKQRSEFMATIKDQANFIEKSKNKLFFSVPNKLIKELTKQIDNVEKEMDIVLEESPAIMDNFKLVTSITGIGRQTALLLIVVTNNFLWFNDYRKLASYAGIAPFPYTSGTSIKGRNKVSPLANKKLKSLLSSCAVSAIRNDPEMKLYFNRRTESGKHKMNTINAVRNKLLSRVFAVVKRKTPFVSLCKHAA

SEQ ID NO: 166421 - protein, 347 aa, unidentified
MEHIAIDLGGKKSRICVRDDKGTILEERNYPTERLSSYLKKRPGSQVVLETCSEAFAIADQAKQLGHKVTVVPATLVKELGVGSRGVKTDKKDAQVLSQVSSRVDLPSVHIPSGQAREWKALCSSRDCLVASRTKLINHVRGWLRTQLVHVRSGGVQTFSQRVEEELLNRPDGMPMYIHRELQSIKMLNEQIAEADKELDEITAQETRCRNLMTVPGVGPVTALRFVATVDDVGRFRRAHALQSYLGLTPGENSSSMRERKTSITKAGAPEVRWLLVQAAWCAWRTRPGDPMVKWANQVASRRGIQIAIVALSRKLSGILYAILRDGSQYQSKRAADSLPLPANSPV

SEQ ID NO: 166422 - protein, 407 aa, unidentified
MEVIHARCAGLDVHKETVVTSVRIARGSKVKRETRTFATTTGELLALLDWLGEHEVTHVAMEATGVYWKPVWHVLEGEFELVLANAAHIKNVPGRKTDVSDAEWIADLLAHGLIQGSFVPPERIGELRDLTRTRKQFVREQTRHVQRIQKVLEDANVKLDNVVSNVVGMSGRAILEALIRGETDPERLADLTTGRLKASRAALVEALRGRVTLHHGFMLQLHLRQYDSVGEAIALLESQAGELLAPFREVVDRLQTIPGVSEVTAQIILAEIGTDMSRFPTAAHLVSWAGLSPRQDESAGKRRSSRTRNGGWLKTALVQSAWTVVRTRDGHLYAKYMRIKARRGGKKAVVAIAASILTAVYHMIERGTDFHDLGADYFDRRSQGERAHRLVQRLQRLGYEVQLRTAA

SEQ ID NO: 166423 - protein, 353 aa, unidentified
MQIKSQIKSQIKSIGIDLGKTTFHLVALSTHSRVVVHKKFSRQQLLTYTANLPACLIGMEAGVGSHFLGRALRAQGHQVRLIPAQFVRPFVKSNKNDYRDAEAIAEAVERENMRFVPIKTEDQLDVQALHRVRERLVSRRTSVINQIRSFLLERGISFRKGPASLRRQMPEILENAEEKLSTRMRRLLDFLWQEWKHLQLQIESLNEDVEQIASQDEVCARLQQIPGVGPLVATAVVSAIGNGAAFHKGREFAAWLGLVPRQWSTGGKAKLLGISKRGNRYLRKMFIHGARAAVLRVKRQGSCLGQWMSGLETRAARNVVIVATANKLARISWAVLSSGEDYHPMHRAVSSAS

SEQ ID NO: 166424 - protein, 425 aa, unidentified
MTRISVGVDVSKNRSTVCIMDQDGKVIMRPFLVWHSTEELDFLADTLKRLNGEVRVIMESTSIYQYPIALHLKEKGIFISIVNAYEMKQFANIDFRGGKTDKKDSRTIASYGISYWDKLVEWQIPKDTYFNLDLLNRTYMNAKKHRQIILQELQHYIDCAMPGMDKELHSLNLNTKKDFMLDFVEKFWHRDKIVNMTEAEFTEVFTAWAKEKGYRPGKGKAAKIYAIAKSCIPYYPANPTVKTILQCIVDKLSGVNRTLVTIVTQMIEEAKKLPEYQIVREMPGVGDPLAARFFGSAGDIRRFKNSKALVAYAGIDSPPDESGDFSSTHRHITKKGSKVFRDTGYEIMMALRAQKRTWEKVRKNPDVYDYMLKKEAEGKPRKVAKIAALNKFLRIVYARIKELCDNMALAERAKTKTRAKTKVTA

SEQ ID NO: 166425 - protein, 425 aa, unidentified
MNVDSSDEPRFAAYVAIDWGDKKHFWSLQPADSDRRERGEIEHSPEAVAAWAAMLSARFGGQPVALAVEQSRGPLVFMLGKYEQLHVYPIHPRAAAQFRAALFSSGAKDDPSDAELLLDLLTHHRARLRPLRPDTEQTRLLQHLVEGRRKLVNEKTRQSNRLTAQLKVYFPQMLDWFDAVDSPLVGALLKRWHTLESLQKARPDTVRSFFTAHNCRSQELIQQRLDQIRQAVPAVRDKALIEAAQAMTKVLVELIATLREGIADFDRQIAQAVAAHPDFAIFDSFPGAGSALAPRLLAAFGSQRERFQSAADLQTFSGIAPVTERSGKSEWVHVRWACPRFLRQTFHEWAAHSIGFCGWARAYYRQQRDRGTDHHAAVRALAFKWIRIAFRCWKDAVPYDDNRYVESLRRRGSPLTAALGKLELP

SEQ ID NO: 166426 - protein, 321 aa, unidentified
MQTVVGIDVSKETLAVCHLVAGEPRHLEVENAKAGFRRLLKGGGPESLYVMEATGAYYMRLAYFLVGQGAKVAVVNPLVIKRFIQMHLGKGKSDRKDAQWIMRYGQQNELKLWQPDDAQLVECRQLEQAIEQLVKQKTMTLNSLEALEQQPVRNKVTLRTLRLTLLVLQKQIRLLEQELDGHLQDQFKEQMELLSSIPGIGSKTAGMLLLFFGGFRQVTSYRQLIAKAGLCPREYSSGSSVRGKVRITKMGGSQIRSKLYMCSLTAMRANKACRELYERLVAKGKNRKLALIAVCNKLLKQAFAIVHSGVPYQPDFKRFSA

SEQ ID NO: 166427 - protein, 453 aa, unidentified
MRRAGNGQPLEKTRMKQKPNPLELPLVEPRAAAVDVGSEKFFASIAGQEPRVFLTVTNQMQQLCEHFKAQGVRSVAMEATGVYWINLFGVLEDAGFKVVVVNGAHCRNFPGRKSDMKDCQWLAVLHAHGLLSGGFVPPQDVRRLRDYVRVRNDLVSMAAQHVQHMQKALDRLNVKVHVVLSNLTGVSGLRIVRAILAGERNPEKLVQLCEEQILKTKRASMLDALRGLWREEHLFALRLALESYEAYQAQIEQCDVRIGQVLKEMSADKPVPELGKPKELRNNALRLENLQTQMAQIYGKDLTKLPCINESTAALLLAEIGSDMSRWDDWRKFGAWLALAPACAQSGKMRRRQKRHLTPAGKILCRAVQCMALGKHTWLASFYRRIRGKRGAKVAIKATAYRLAKLIYLVLTQGWEYVEQGIQKYEARLRERQLKALKRLARELQFELVPKPA

SEQ ID NO: 166428 - protein, 355 aa, unidentified
MNSVKYVAIDVHPGTSVVAVRDGQGTVVSESVLATEAATILDFIHGLRGTIDLTFEEGTQSAWLYDLLVGHVDRLVVCNPRQNALLKAGNKNDRIDARKLSELLRAGLLSPVYHGENSTATVKQLASSYSALTEDTTRVMSRLKAIYRSQAIPARGVKVYGKRHRQQWLVQIQGSGLIRRAQRLYQELDGLQALRREARRELMAECRQHADVQWLRSVPFLGPIRTAVLIGRVQTPHRFRTKRQFWAYCGLALETRSSSDYQFVKGRLVRNAKGVRIRGLNLNHNHDLKDVFKGAATSASTHSGPWRSFYEGLLAKGMQPAMARLTLARKIAAITLRIWKKGERFDAEQLKPQTA

SEQ ID NO: 166429 - protein, 371 aa, unidentified
MKDRSTFIGMDVHKNSIDIAIAQQGRKGRVRHYGKIDGDLTALDKVVRKLVSTGRKLHFVYEAGPCGYQIYRHLTAQGLDCTVVAPSRIPTPSGNQIKNDRRDALMLARLHRAGELTAVYVPRAEDEAVRDLTRAREDAKCDEKRSKQRLLSFLLRSGIRYTGGSPWSKAHMRWLSDIKMAHRSQQVVLQEYISTVNQCSERVQRLTEQIQQLLCEWPLFPVVQAFQSMRGVSTIVAATTVAEIGDLKRFHTPAELMSYLGLVPSEYSSGQKTKRGSITKAGNGHVRRVLTEAAWSYRLPARVSRALLKRQEGLPESVCAIAWKAQLRLCSRYRHLWNKGKAKQVIVTAIARELCGFMWAIANEIESPANA

SEQ ID NO: 166430 - protein, 396 aa, unidentified
MHRVGIDWADEKHDVCILAPDGRILSEFEIAHDWQGFQKLKAALTPLEPFQVNLERPNGLLVDWMVGLGWQVYVTPPRIVAHRRPRRSKNDRGDAFLLAHLRHLDDEDSRPLVIHSPLVEELKHLTRGYNQLKKHQMRITNQLTHVLKQYYPTAIGLFAKLQSPIALTFLEAFPTPQAAQALSREALADFLHRQKYRYPKRIQGIYHQLQLPIPPARIAAGYAAHAQALIAVLKSLNQQLALLKRQITTILNKHPEGTWWQQFPGVGVMLAAEFLAHFGDNREQFPSAEVLQATAGTVPIVRRSGKQLTVEFRKACSHSLRDATMNFAKNSIRTSGWAASYYRDQLARGHKPSRAHRALANRWLKIVWTLWQRRENYDEAVHIANRSRRGLSEQVA

SEQ ID NO: 166431 - protein, 391 aa, unidentified
MFYIGIDIAKKNHEASIIDSSGKSLSKSISFPNSTKGIEKFNNFIAEFGVTTNNCIIGMEATGHYWISLFSYIVDLGFTCYVINPIQSDAFRKMYVRQTKNDSVDSFIIAQIMRFGEFSISNFSDENTFALRNLTRYRFALVDECSDWKRKLVAILDQVFPEYSSLFSNIYGVASKELLSKYPLPEDMLSIPAEELGDLLYECSKGRLGMNKAEEIQSCARETFGIKFAKRSFSFQIKQIISQISFLEEQLKEIEIEISCLLEDICPVITTITGIGSVLGASIVSEIGNISRFERANQLVAYAGLDTRIKQSGDFSATNTKLSKRGSPYLRRSIWLAATVAAFKDPALSIYYQGLRARGKAHGTAIGAVARKLTNIIFAVLRDQKPYTPNI

SEQ ID NO: 166432 - protein, 449 aa, unidentified
MKKEKMALDVVNPQAAGIDVGSRSHYVAIGQRDEDVKEFGVYNEDLIALSQWLLENEVKTVAMESTGTYWQSLFTTLQSVGLEVILCNGKFTKNIKGKKTDVKDCQWIQKLHTLGLLSGSFLPDEATEQLRTYCRHRANLLEQAADTSRKMQKYLRLLNLRLDVVVKDVTGLTGMTIIDAICKGEVSPEKLASFRHGNCKKSEQEIAKALQSNGRKDLLFALTHEYELYHIFQGKITECDKQIQKLLNEQINNDENKKQHFIEGKVHKRINKNNPDININLLSYQYFEGVDLLAIEGVSHSTVLTLMSEVGHGINKFESAKQFASWLRLAPNNKISGGRILSNKIPKGSNRLKIALRQAANAVGNLKDTALSNFFKRIAFRKGRTSAISATARKLAVIIWNMITKKIPYKTDSQYEFLDQKRKRKVMEMKKLIHKFDITPDDLGLQLAP

SEQ ID NO: 166433 - protein, 334 aa, unidentified
MEKITTVGIDLAKSVFSLHGVDEAGRVVLKRTVRRDQLLEVVAGLSPCLIGMEACSGAHEWGRRFQEFGHTVRLMAPKFVAPYRKSGKNDGNDAEAICEAVTRPSMRFVPVKSAEQQALLAMHRVRQGFVVERTATINRLRGLMSEFGVVLPLRSVTVRRQAAAAAESLPELARRAIGDLLDELRVLDERIGGYDREIEAQAKLCEPAQRLMKIRGIGPTTALAIVATVGNAREFKNGRQFAAWIGLTPSQYSTGGKPRLGHISKRGDAYLRNLLVQGARSVLNSAGMHQDRMSRWALELHPRRGYYRTLVAIANKNARIAWALLAKNETLRAA

SEQ ID NO: 166434 - protein, 402 aa, unidentified
MGDFAGLDWGSTRHAACVVDEHGKVVDRLAVRHDAEGLDWLIAGLRRLGPAGTLPIAIERPSGIVVAALAAAGHPVVPIPPNAVKATRPRYRAALLKSDAGDAYSLADMLRTDGHRFRPLAASSDALKALRALVRGRDDLVAARVALANQLRGVLESFWPGAAAIFADIDSPIALAFLRRYPTPESAARLGERRLAGFLAQESYCGRRSAAELLARLRAAAPGRAGEAEAEIKGELVRALVGVLAELVARLAKLTARLEPLVADLPDGRILMSFPRAGRVCAAQILAEIGDARERFPTEAQLAAEAGLCPVTKASGKSHAVTFRWACNKRLRSAVTCFADNSRHASRWAADIDARARARGCDHPHAIRILGRAWIRVLWRAWYDGLPYDPTRHRGAQAHAAA

SEQ ID NO: 166435 - protein, 358 aa, unidentified
MNSKAFVPRDYDVFAGLDVDKKSISVTFTNHQGFIRSLRVPYSAEHLVNHVRKHFPDQKVAFAYEAGPTGYGLYDGIVAQDYPCLIASPSMIPKAPGQRVKTNRLDSRGISENLRGGQLKSIHVPAVLYRELRHLTQLRDTFVSAMVAMKQRIKSLLLMEGLEFPPAPAGSQWSFMVKAKLRKLPCSSMVRFELDQLLDSLEFNEKQIVKTTQQIRQLCQNDAELSQCIKYVMSVSGIGQIVASQLLARIGDWRELRNVRQLGAFLGLVPTENSTGERTDRGSITHSGDPRLRSKLIQAAWSAIRKDGELKEFFRAVCQSHARPVASRVAIVAVARKLTVLISVVLMEQRPYVVRKKV

SEQ ID NO: 166436 - protein, 344 aa, unidentified
MTVDYYVGIDVSLEASSICVVDGAGKVIKEAKLSSEPEAFIAWFKALPFSLARIGLEAGPLSQWLYAALKEAGFAVELLETRHVRDAFKAMPVKTDRNDARGIAQLMRLGWFRPVHCKSAPAQETRALLTARKLVQGKLYDTEMSLRGILRGFGLKVGRTKKAGFASRIMELTEHHPALKAIAKALLTVHEVLLKELNRFENQVRKLARGDARARLLMTTPGVGPIVGLTYVAAIDDPARFSSSKMVGAHFGMTPKKYQSGEIDVTGRISKMGDKGVRAALYEAAHVILTTPVKGGALKSWAAKLARRAGMRKAKVALARKLAVILHRMLADGSVFDVTKAAAA

SEQ ID NO: 166437 - protein, 430 aa, unidentified
MKSNTQNAKIEAITEKTLVLGIDVGSETHYARAFDYRGIEYSKKPFKFSNTEAGFVTFKEWILDLKDRHKKDKVVPGMEPTGHYWFNLGKFLQDNEMKPVLVNPHHVKKSKELDDNNPTKNDRKDPKVIAGLVREGRYMIPYLPDGVYADLRTASNIRFQLQAELTRIQNRISRWFNIYFPEYKTVYGKPDAKSGMLILKAAPLPEDILTLGIDGVNQIWRDAKLRAVGKARAKTLIEAAEHSIGSKEGTVSARMEIRMLLEDYESKNMRLQEVMVLIEELVKEIPMAEKLLEIKGVGIRTVSGFLAEVGDISRFNNPKELQKLAGLALVENSSGKHKGKTTISRRGRKRLRYLLFEVAMSLVAKNPEFRELHNYYTTRRLNPLKKMQSLMAIAAKLIRVFYAMLTKGVDYDPKKMISDIKRPTVYLQAA

SEQ ID NO: 166438 - protein, 332 aa, unidentified
MDERGKIIKRGRVNGHDREELAGYFKSLKSQSRVVHEAGWNWDLLHEALEEIEGVEEVILAHPAKTKIIAEAAIKTDELDAEKLAMLLRGDFIARVHAPKKETRERKRILRQRSVWVKTRTQVRNRIHGVIDRQKDLKIPQLSDLFGKKGICFLRGLKLEEPSHTILRSCLDLHDWLQGEINLLEKKMREDILRMDEVILLQTIPGVGRILGSSIALETDGIARFKSSKDYCSYVGVVPRTHSSGGKTYQGGLVDHGNKWLKSAVIEASWVAISSSGYFGSIYRHHKSRGKNSNVAIVAVARRICQIIWRVLKERKDYFEEKPISPVAPSLD

SEQ ID NO: 166439 - protein, 411 aa, unidentified
MRVHHNVCCGIDVHKKSVTACLMWGPADKEPEFEIRRFGTMTRELQNLAEWLKQAGCEAATMESTGSYWRPVWNVLEGQIAKLILANAQHVRALPGEKTDRKDGKSLAKLTRHGQVRPSYVPPRAILELRDLTRYRSKLLSAGSSERNRIQKVLEDANIKLGSVLSDVFGVSGQKMLQALVKQDSVATAKVAQLAQWSLKPKIEAIQQALEGKLTDHHRFLIDVSMRHMRFIEEQLIRLDEEIQRRLQPYQEEYALLQTIPGIKETGAARILSEIGADMSPFADGDHLSSWGSVCPGNNESAGKKFQSKIRKGNVHLLSALTECAWAATKKKDCHFRNKYYRLKSRRGSQRAIVAVDHAMLKCVYVVLSQRKPYEEPKPVSLTEAQKQRKASSLCRQLRALGYDVKIQKTA

SEQ ID NO: 166440 - protein, 352 aa, unidentified
MLYTGIDYHKKYSVVSTQDATGARVCEARIEDNDPAAFAAYFARLPETSRVVVEACWNWGWLYDELGEIDRIEDVVLAHPFKTRLIADAQIKTDKLDARALATLLRGNLLATVHAPDPANRARKHVIRQRLFLARVRTMIRNRVHTLVARQRNLARPVFSDQFGKKGLHWLRTLSLSEPDASLLKQDLTTLEQLGTAIKELEGQISAANTADAATTRLQSLPGVGPILAAVMAAEIDGIDRFPRADKLCCYAGLVPTTHSSGGKTSHGRMMPFANRWLKWAFIEAAWVAVGCSSYFGELYQRHRRRGKKANTAITIIARRLCRIAWQLLHDGRDFSPNPPTLALSPVAPSKD

SEQ ID NO: 166441 - protein, 434 aa, unidentified
MSQQNISTPSTPPVYAAFVGLDWGDEKHALSLCAADATVIERTTLPQTPEALADWANVLRSRFPSGKIALCLEQARGALLAGLMQYEHIVPYPVNPKTLARFREALYPSRSKDDPIDADLLLDLLLKHREHLRAWQPDTVQTRQLALLNEQRRHFVDHRTALTNELLSHLKAIFPQALELVGQSLASRLATDFLKKWPTLQAVQKVKPAVLRQFYYGHNSRSEELITGRLQRVKNAVALTSDPALLAVHSLAIQTLAGQLQALRPFLDQHEQQIAELFAAHPDAALFESLPGAGSALAPRLLAALGSDRSRFPDALSIQCYSGIAPVTERSGKTQYWVHLRWSCPKFMRQSWHEFANCSLKFSTWARACYEDLNKRMDHHEAIRKLAYKWQRIVWRMWQERQPYDETRYLRSLQKRGLKIYADLAPQPVALAGE

SEQ ID NO: 166442 - protein, 316 aa, unidentified
MATNVAARIVGIDISKAHLDVYVLSAGESARLDYTDEGLAELTGGLGDPADTLVVMEATGKLEARCAVHCAQAGFQVAVVNPRQVRDYARATGRLAKTDAIDAEMISRFAKAVDLQASPLRSEEEKHLDELVTRRRQIVDMITSKKNRLETTVVKTLRHRIEVHIRWLERELRSADGDISDVIEMSPVWRAKEALFKSVPGVGDVLARTLIAEVPELGSLNRREIAALVGVAPMNRDSGKMRGKQMIWGGRREVRRVLYMAALTASTYNADMSLFHQRLIADGKPWKVAITAVMRKLLIVLNTVAERGTPWEHRIA

SEQ ID NO: 166443 - protein, 419 aa, unidentified
MMAVMIGIDPHKGSHTAVAINAGEEPLGRLRVRACPDQAGQLVAWAQAWPERAWAVEGATGLGHLLAQQLVAAGERVLDIQPKLAARVRVLEAGNTSKNDPNDALSVAVAALRSKACREVTADDHAAVLRMRSRRHQDLGQSRNQVACRLHAVLCDLVPGGLPKEITAAQAAMLLEQAAPAGAVGQARREVAAELLADLRRLDAQMAESKKKLAAVVRASGTSVTSLFGVGPVIAAIVIGDAVTVTRFPSRDHFAAWNGTAPVEVSSGGRKIYRLSRRGNRRVNSAIHIAAVTQIRYKHSPGRAYYERKIAEGKTPKEALRALKRRISDAIYARLVADAGTAAASKDPGGQPGNDSDSSAAGSHPDRRLFGQATPGPGHHPTTMARGRGSAGEGPAPTLVKPQSPKTTSHAAKKTAATP

SEQ ID NO: 166444 - protein, 387 aa, unidentified
MQSVTSATAVATTARANNITLFASLELSKSKWVVTINSPGSEKFSKHVVEGGDGACLLDLLSRSRAKAEQRYGVQVKAIVIQEAGLDGFWIHRLLLANGIESHVVDAASIAVDRRHRRAKTDAIDGETLLRTLMAWARGERRVCSMVRAPSPEDEDRRRLTRERGTLLKERIQHTNRVRGLLSGQGIGDYNPLRRDRFERLEALRTGDGRELPPMLKAEIRRELDRIALVTTQLAAVERARDALIRTDAEERNNPAALLLKLKGLGPEFASLLWLESLFRSFGNRRQVAAYGGLAPSPWQSGGVERDQGISKSGNRRLRKTMIELAWFWLRHQPDSALSRWFQARVGAAKGRIRRIAIVALARKLLVALWRYVTQGVVPEGAVFKAA

SEQ ID NO: 166445 - protein, 350 aa, unidentified
MLYIGLDVHDKSTMIHWYEQTTGELCPRAYSVPTSELVAHIAAMAGPKQAAVETSTTGMFIARSLESCNIEVVAVDAFKSHRLLGALSRAKTDRLDAEGLCTCLSRKLLDHAQVWVPDESTQQLRQVTRTREKLMKHGGSLRTQIRQLLASEGEGCPYTDLMGDGAQRWLKECGQRLSSATAICLQAFLRSLQAIAEELNQLDKLIRELAAAHPVARQLQTIVGCGPLSAMTLVAEIGDISRFRDAGRLRSYAGLVPKVHQSGERTVTGKLDKQRRNVHLRRILILMAQHFARHMGGEDWAVKSRYYRCLYKHGANPAKVSLARDLCTIIYAMWRDGTEFNPQRLASGGG

SEQ ID NO: 166446 - protein, 415 aa, unidentified
MALKIVYKICCGIDVHKTFVVACIASTNDKGVTSYESHRFSTYTSGLKTLLQWLLDRNCKDVCMESTGKYWIPVYNILESDCSIVLAHPKYVKAIRGKKTDKKDAKWIADLFKHDLVAGSFMPPADIRQLRDLMRYRFKLTCFKSSEKNRLQNCLTVSNIQLGNVVSDTFGKSAQAILDKLLENPADTSFDLEPLVYKSLKKKLPELRDAIDGYITPEQAGKLKVIKAHYENLESRKAELEELILALAAPYQQELTILQTAPGISSDFTAIGIISEIGTNMEAFPSAKHLCSWAGLTPTNNESAGKKKSVRVSKAGCYIKPLLVQCANAVVTSKKHPEIRNRYLRLKKRRGHKKAIIAIARMLLTALYHMLKNGENYNAELYRKSDLPPVNREITVEQALMIARNQGYKIKSATA

SEQ ID NO: 166447 - protein, 426 aa, unidentified
MAVVMIGVDPHKASHTAVAVNAAEQSLGQLRVRASAVQAERLLAWAHAWPERTWAVEGAGGLGHLLAQQLLSAGERVLDVPPKLAARVRLLATGNINKNDPNDARSVAVAALRSAQVRQARRDDHAAVLKVWSKRYRDLGRMRTQVACRLHQVLCELVPGGVPGEISAGQAVRLLASVTPAGAVEAARWELAAELTEDLRGLDARIRQTRTKAAAAVRAAGTCLTGLFGVGPVIAAAVIGDVRHVSRFGNRDRFAAYNGTAPIEVSSGGRKVYRLSRRGNRRLNHAIHMAAVTQIRYRHTKGRAYYDKKLAEGKTPKEALRALKRQISDAIFACLQQDARRAAAAAKSPGGQPGNHSATRAAGSHPEHRLFGQATPGPATHPTTPAAPVPAQLPSRASERLSPGPGAARPRSGARRASSTRPRASR

SEQ ID NO: 166448 - protein, 416 aa, unidentified
MVVYCGIDWAEHHHDIAVVNADGAVLAQRRISDDIAGFTALTEILCTHAEDVTQVDVALETDRGLLVVALRAAGYRVFAINPKAVDRYRDRYAVSGAKSDRVDAVVLANLLRTDRDRHRPLPDDTHEVEAIAVLARAHQDAIWTGRRDANRLRSLLREFFPAAVTAFPNLTTRSALTILAAAPTPAAARALTPEQIRQLLRDAGRVGVRASEVERLHRTFAVEQLHQPAAVEDAMGEAVRAIVTTLTATQTAIDGLQTALAARFDNHPDAEILRSLPGLGVVLGGRVLGEFGDDPTRFTDAASRRRYAGTAPITRASGKSRVVLLRRARNQRLAEACRWWAFNAMQHSAGTMAYYRRRRAAGDTHEAALRRLGSKLVGQLHHCLEHREPYREDIAWPTPAMDQPTQPGQTGQPTAA

SEQ ID NO: 166449 - protein, 367 aa, unidentified
MKKVSTGTAKQGTTFSQSTLTIGLDLGDRNSWYCVLDQAGQIRLEQRVRTHAKTLREVFAAMPRSRIALETGTHSPWISRLLGELGHEVIVAHARKVRLIGESRKKDDRLDAQTLARLARIDPGLLCPAKHRSAQAQADLTVIRARAGLVRARTSLVNTARSLAKSYGERLRGCNVGNLNPEKAEGLSPELQAALEPLLAGIESVSEQIAEYNQRIETLAQQSYPQTALLKQIKGVGTLIALTYMLTLEDPHRFGKSRDVGCYLGLQPGRRNSGQNEPQMHISKEGDPYLRTLLVQGAQHILGPFGVDSDLRRWGLKLAERGGKNGKKRAIVATARKLAVLLHHLWVSGEVYAPLHNSNRMAVAVAA

SEQ ID NO: 166450 - protein, 351 aa, unidentified
MTMLAEVAGAVVGGDTHRDTHALEMLAPNGTTIAALAISNDDDGFAGAIAWIAGNVPGPRVVAGLEGTRSYGIGLARAVAAAGLIVVEVQAPRRADRRHRGKSDPIDAHLAGLQVLRMPAGELPAPRADGDREALRILLSARRELTMARTRQINRLRALLPGGDDTDRDLSRGTLTGARLQAIARRRARASDTTEQSVRRAEARRLANAIRAAAAELAANKRHLAGLVRGLAPALLDKTGVGPVSAAQAIVSWSHRGRCRSDAAFAALAGASPLQASSGRTTRHRLNRGGDRQLNRALHDITLTRWRADPRTHDYIARRRAAGKNDTEIRRALKRYVARELHRALQASPAT

SEQ ID NO: 166451 - protein, 346 aa, unidentified
MLYVGLDLSRKRVDVCLLDEHGTRLETTAAPPDADGLRGLAARLASRGQPIRAAIESMNGARFVRDELEQLGWDVSLADAQKVKGLAPLAAKTDRIDAFVLAELARRDLVPAIWLPTPGVRAERERARFRLHLVRHRAALKARIHASLIAHGLSCPVSDLFGLHGRELLDHLALPEPWAATTAASLRVIEHLDDEIAACEAELRRLGAAHPYVPLLMSAPGIGWVLAYTIASEIGEIERFASPKKFAGYTGLCPRVYQSGASDRRGPLAKNGPEHLRWALVEAAVHAARHPCSAAHYQQTKKRLGRQRGAKVARVEVARKLSEAIWYMLTRSQPFAPAGPALPLVA

SEQ ID NO: 166452 - protein, 338 aa, unidentified
MAIAFMGIDLAKSVFQLHGADHEGRMLISKRLRRDQLLPELAKLQRCVIGIEACTGAFFWQRQFERLGHTVRIIAPQYVKPFVKHQKNDRNDAEAICTAMRQPNMKFVPTKNEEQQDIQGLHRARTRLVNHPTAPLSQMRGLLLDRGVTIGVSISRARRAIPMIIADLENGLTGMTREIIAELYEFLDQINVRIKAFDRRIEAVFRSNAACQRIARICGVGPKTATAVIAAVGDGAEFKNGRHLAAWMGLVPRQHSSGNRQILMGISKRGDQHLRTLLVHGARSVVRVAARKTDALSRWINALRERRGVNRTIVAVANKNARIIWAMLRKSMEFQPAT

SEQ ID NO: 166453 - protein, 355 aa, unidentified
MNQEKYIGMDVHQATISVAVMDSSGKLIMECILETKAATILDFIQGLRGSLRVTFEEGTSAAWLHDLLKPHVSQLVVCDPRKNALLKDGSKSDRIDARKLADLLRGNQLKPVYHGEHGVRTLKELSRSYLTITKDVTRVMSRIKALYRGWAIPCNGTTVYAPRHRAEWLAKIAEPGVRLRAERFYQQLDLLQPVRPAARGDLLVESRKHPAVKLLRQIPSIGPIRAALLVALLQTPHRFRTKRQLWAYSGFAVETHDSGEYRYVRGKLRRNRERMTVRGLSDHHNHDLKNLFKSAAISESTRPGPLRDFYVALLEKGMRPTMARLTLARKMAAISLTIWKKGVDFDAKQLQWQAA

SEQ ID NO: 166454 - protein, 315 aa, unidentified
MTKPLLAVNVGVDVGKSQLDLYLLERDRALTVPNDDPAIASLIRRLSRYRIERIVIEATGRLEQPFVRAALAAGLPVVVVSPLKIRRFADAIGQLAKTDEIDARLIARFAAAVKPLARPASDANAQAIKDLTVRRRQLVSLRTMEKNRRQVMPQELKAGIDRIIKTLDRELKKLEQLIDHAVDQHAPSRHKRELLTSMPGIGNSVAATLLGDLPELGSLNRREIASLTGVAPFNRDSGKLRGKRRIRGGRAHSRTALYLSAMVATRFNPDIKRFYERLLSAGKHKKVALTACIRKIVTALNAMIRDNSPWQSAIA

SEQ ID NO: 166455 - protein, 393 aa, unidentified
MVYVGIDVAKDKHDCFIVNSDGEVLYDVFTIQNDMDGFEDLLFKIKTASKDLNKVKVGLEATGHYNCNLLGFLKSKGLPTIVINPLHTNAYRKSLSLRKTKTDKADARAIASMIMSDVSLKPYSDIVYHNEDLKSLSRYRFDKVSERAKLKQSVSRLVNILFPELEKLVSTLHAKAVYELLSEFPGAHQVASANLKHLTALLSSASKGHFGREKANEIREAARRSISSYFPAKSLELKHTINLIRELSSEIAEIETEIKKIMDSIDSPILSIPGISYGIGSMIVSEIGDFSRFDSPDKILAYAGCSPTTYQSGQLYSSHAVMEKRGSRYLRWALINAARYVCNREPTFAAYLEKKRSEGKHYYVALSHAAKKLVRLLYHLETTGEKYIPQTLS

SEQ ID NO: 166456 - protein, 400 aa, unidentified
MECVFDIDVSKENANVAVLVDNVVIKQFKIGLDRLGFSLLSDELNSFNAPLIIYEATAMYSRRLRAFLQRDGWKYTELNPLAAKKVMEEFRHTKTDALDAVGLARAMIKNHFRPTYQESPVYTELHDLERTYQQFNKDIVTNKNRLHRALQLTFPEIEHFMSSTDGVLYWHIVQRFPHPAIVLSHEENELTEIILTETSKKIGLKRAMKLANRLLALAQNSAPAKEPQSHAVRAVIALAKEVERINQLKAQIIVEMTTLGENLSEVPLLVSIPGIGIKTALCLIAELGDVRRFHSANAINAYIGIDLIRYESGQYEAKMHIRKRGNPYARKILYRAILNIISVSQYQPTLISANYKRKKQSAQSHGTKKIAIAAMSQFNRLMHHLILNNELYDSTTFMPE

SEQ ID NO: 166457 - protein, 369 aa, unidentified
MGKYSEAFVAFDVAKRKHAVAIAEGGRTGEVRFLGDVENSPLPIERTIKRLAGRYDRLHVCFEAGPTGYGLYRQIQALGHDCMVVAPALIPKRSGERIKTNRRDAVTLARLHRAGELTGVWAPDAAHEAVRDLVRAREAAADDLRRKRQQLLSFLLRHSRIYSGGGHWTLAHRRWLANQKFDHPAQQIVFQEGIDTIEDALQRLRRLEKQLALIVPEWSMAPVVEAYQAMRGASFLVAVTFAAEIGDVRRFDTPRQLMSFLGLVPAESSTGDTIRRKGLTLAGNRRARRALIEAAWTYRYPARVSDTLRARLEGLPKPARNIAWKAQVRLCARYRRLSATGKKLPIVVAAIAREIAAFLWAIGREVAPA

SEQ ID NO: 166458 - protein, 344 aa, unidentified
MSKIIADLSVVTSVGLDLAKHVFQVHAVDAGGKVIVAKALRRRDVLPFFRSLPPCLIGMEACGSAHHWGRELMALGHEIRLIAPAYVKPFVKRQKNDANDAAAIHETLSRPGLRFVKVRSIENQATLMQHKAREMLVAQRTQLLNGLRGHLAEIGVIAAQGTCNMRSLGALIHEGDSSIPDAVRASLLPLVEQIAHLDAAIRQIDTDIAVAAKADPVSSRLMTIPGIGPVTASALSATIEDPASFAGPREFAAFLGLVPRQHSSGGKARLGRITKMGNAYLRKLLVVGAHAVLVHQARHDDPLRQWARKLLAAKPFKLVAVACANKLARMAFALMRQGTTYAAA

SEQ ID NO: 166459 - protein, 370 aa, unidentified
MKETITSYIGLDVHKDSIAIAVAEAGRCAPRFIGTTPPELATLCKALTRCAKRSSALVVYEAGPCGYGWARHLNAHGWRCEVISPAHITRKGAEKLIKTDRLDAVLLARESRAGNLVRVPLPDERDEAIRDLSRAREDAGTARLRARQQLKAMLLRHGRAYHGKSSWTLAHERHLANIKFDHSAQQIAFDEYRQAVKDAHERVERITQALREQCEQWRMKRVVKALMCLRGMDFVAAATFIAELGDLCRFAHPKALMKYLGLIPSEFSSGNTRRQGPITKAGNKHARRILVEAAWTYRFNPRVSRLIEVRQEGQPKAVREIAWRAQLRLTYRFRKLNAGRKMTQNKCCVAVARELAGFIWDIARQVKIPA

SEQ ID NO: 166460 - protein, 516 aa, unidentified
MATRTAKRVRRYLIHKPHGQLSQRVQAAGPEHFGVLCFDCAKARSKFMLANFYGTVLLAPQTVAHTRGHLQAALDQVRQTLRQHDLRDLVVAIERTGEYHRPVQRACKQSSFDTRLVHPLTSKQFRQPADPANKTDDTDLAAIFRATVNGFGLSEPELPEDYQRLQLLIRQRRDLVHKTSALRCQIRELLHALMPGYAECFSDLWRSALALPLGRVSGSATLLRQGQGAGLLELLTRHQLSAQRPTFAKILAWAEAAPAPPPQHDLLQQFLSALDDDRLAKNQQITALERHAAQYLARMPYVLLLVIPGLNVVSIADLAGELGPLSNYTDANAITGRAGLMPSRYQSDQVDHDGPLPRHANKRLRTALVQAADNLVTCNHYFAAKADGWRAQGKDQRWIRIKVAKRFSRLLFAMVAGRQLFAHPCCQDRHYILHKLMEFHRTHDTPMSQTLADLDAATLQLPRSAYAEEAKPLHQRLQQVQRKKGPQPLADIIPIVLARLGCMPVQSETSEASGPS

SEQ ID NO: 166461 - protein, 347 aa, unidentified
MKFYTKQHKYYCGIDLHTKKMYVCILDAEGQIRLHQNIKTDPEHFIQILTPFREDIVVAVECMFTWYWIADLCVEQNIPFVLGHALYMKAIHGGKAKNDKIDSHKIATLLRGGMLPQAYVYPARMRTTRDLLRRRNHFMRKRAELFAHIQNTRSQYNLPDFLGCIAKPQNRQGIVERFDDPAVQKSMAANLEIIQAYDHLLTQLEHDIITSAKEHDLRSYALLQTIPGVGRILALVILYEIESIKRFPQVQDFVSYCRLIKSIKESNGKKYGSSGKKIGNAHLKWAFSEAAVLFLKGNEPGKRYLERLSRKHGKPKALSILAHKLGRAVYFMLKNKEAFNQKKFLGF

SEQ ID NO: 166462 - protein, 427 aa, unidentified
MVAAARNFRRGKRMNRQQWYAGIDWATESHHVFLTDGSGRKIGQKIFKHSGAGLAEMAAWLMAASQAKEPGHIQIAIEVTHGPVVETLIERGFTVHAINPKQMDRFRDRFTLAGAKDDSRDAEVMASALRTDPRCFRLLAAPDPVIAELREWSRIAEDLSAERNRLTNRFRQQLWRYFPAMLELESDLGAEWFLDLWEAAPTPCKAARIRETAAAKILKRHRIRRFAAGHVVAVLRTAPVQVAAGTVKAACAHTETLIARIRLVNAQIKEAQRHLDALTARLIPTEDSEAGQQKQHDVEILASLPGVGRIVLATLLAEAWDALLRRDYAALRSLTGVAPVTKRSGKSCIVIRRQACHDRLANAMYHWARIAVQYDAKSKAKYTALRGRGHSHGRALRSVADRLLNVACAMLKAGTLFDPSLKTQNAP

SEQ ID NO: 166463 - protein, 371 aa, unidentified
MEHTRFVGLDIHKERISIAVAESGRSGTVEYLGEITNDSGAISKLCDRLRRPGKPLAFCYEAGPCGYGVHRQLTSLGHRCEVVAPSLIPTKPGDRVKTDRRDATMLARLHRAGELTPVWVPDADHGAMRDLIRLRSVVRQIVTRARQHLQGFLLRHGRKHGRGTAWRMAYRRWLSTLAFEHPAQQIAFQDYVDAVMDAERRLQRVEEQIFSLLPEWNLRLVVDALQAMRGIALLNAVVLVAEVGDFTRFANPRQLMAYFGLVPGERSSGETVRRGGITKTGNTHVRRALVEGAWAYRMKARIGRHKVDRIEALPKVVRDIGWKAQVRLCARYRRLTARGKTANVVNVAIAREMVGFIWSIACTIQSAPKAA

SEQ ID NO: 166464 - protein, 416 aa, unidentified
MEVVHARCCGLDVHKKSISACVVVRESGNVSKLEQRFGTYTGQLEELASWLEEQNVTHVVMEATGVYWRPVWNVLEGRFELMLVNPQHVKALSGKKYDRGDAAHLAELHQHGLLRGSYIPSVEIRQLRDLTRNRARTVQETVRIQNRIHKILEECNIKLGSVASDSLGVSGRAMLGAIIGGEQDPVKLADLARGKLKNKRDQLVLALTGRISDHHRRMLDKLLRSLEVREREIAEDERDIRRQVEPFAKTVQAWMQLPGIDEVTAWSLVAEMGPDMDPFPGAGEAASWSCVCPGNHESAGKQSNGRTRQGNPWLRSTICQAAWGAAHTRKSYFHAQFNRICPRRGPQRALLAVAHSMIVAGFYLIKYNLEYKDLGADFFDHRNREHSARRAIKRLNQLGYTVTVEQDPTHNVRALA

SEQ ID NO: 166465 - protein, 364 aa, unidentified
MVQRTSVGLDVHARSVTAHGLDRDTGEVFNRYFGKDHGNEEIVAWVAGLPGPAVACYEAGPTGFGLARAFSDAGVCCLVAAPSKLLPAPGDRVKTDRKDAAHLATLLAAGAVTPVRVPSVAQEGLRDLVRAREAAQVDLGRVKHRVSKLLLRYGLAWDGETTWNLTHLGWIAGQHFDQISTQLALDDGLAAVHQLMARLKHLDEHLEVLLPDSGYLPVVQALSCLRGVDMLTGLGLAVEIGDWSRFSGATIGSYLGLVPSEHSSGQTRAQGGITKTGNKHARRLLVEAAWHHRSVYRPGTSVRLRRRWVKVDPLIQARADEANRRLYRQWVKFDARGKRPVTANTAIARELAGFCWSLAMMTMR

SEQ ID NO: 166466 - protein, 397 aa, unidentified
MSAVVGIDVGAYKHAAAVCRSGEREAERAVFRLSANRAGFDELDGWLERQGPVERVVLESSGHYYWPLASHLYRGGYQVAVVNPLQAKYFAKSRLQRSKSDPADARTLAALGMSEEPRVKHPLLGAEAKEAARFWGGLVKEQGQVRQKLLRLVEIGFPELKECFEDPLCETALAVLREAPTARAAAHKRVSTLAEATSPGGRRRLGENKARRLHELAKDTIAPTELDAQMGFEVGMLIQQFDLLEKQIEIAEQRVSEVLDSELAERLQTIPGVGPALAATFIAEIGDIWRFEDFDQLAAYAGVHPKEQSSGTKGQNPETSWHMAKTGNAFVRSAAYRMAVVGTQHNPVIRAHYLRKRAQGKTAMNALGHCMSKSLAIVWGVWRSGRDFDPSLGGPRT

SEQ ID NO: 166467 - protein, 430 aa, unidentified
MDNVDEDELLVERVAALDLGKAALEACVRVPHDSRPGRRMQEVRGFATTTSALIGMADWFRTCGVSRVVMESTSDYWKGVYYLLETAGFDCWLVNACEVKNVPGRPKTDKLDAIWLAKVAERGMCRPSLVHPKPIRQLRDLTRYRRTLIRDRGREMQRVEKLLEDAQIKLSSVVSDLFGVSGRAMMHALIAGQRNPKVLAAMAKGRMRTKTIALQEALTGFFTDHHATILATMLDNIDRLGVQITDLDAKIELAIAPFAHQVDQLDAITAVGVTSAQELIAEIGIDMNRFPTPAHLVSWAKFCPQVHASAGKTKNKGRGGGNPWLAATLGNIAAAAARTDTFLGARYRRIARRRGKQKAIVATGNTLLTIAYHLLTDPEARFHDLGADHYESRINKERRARNLATQLQAATGQKILIRNGKAVILEPEAA

SEQ ID NO: 166468 - protein, 449 aa, unidentified
MSDIPTSSTQPEFGALIGIDWGDKKHAWALQVGDSTKIEKGDIEHTPEAIQQWAAGLRQRFPTGRLAVALEQSRGPLVFALSKYEHLTLFPIHPTSAAEYRKIFRPSGAKSDGPDAVLHLDMLARHRDKLRPLNPDTPETRALQLLTEDRRQLVNERTRYSNRLTANLKSYYPQVLQWFDDLYAPVTLDFLDQWPTLEELQKAKPGVWSEFFQEHNCRDAKTQQRLAAIPMAVTATTDFAVVTAGRAGVCAAVRLLRNLNQAIQEYDRQIDQLAKGHPDFAIFQSLPGAGKVMVPRLIAAFGTQRDRYQRAADIQQYSGIAPVTEASGQQLWVHWRWGCPKFLRQTFHEWAAQSIAQCDWAAAYYRVQREDKNKSHHAAVRSLAYKWIRIAFRCWKDRQLYDDSKYELALKTRAKATPEPKQPSAFPLPLRWISCAGFQKLAEKNGENT

SEQ ID NO: 166469 - protein, 336 aa, unidentified
MEKKGYLGIDISKKSFAVALKREEKYKHKNFSNEERGYQELKKWLESNEAKEIHCCMEATGVYGERLAEYLYAEGYEVSVENPVKISLYAKSQLTRNKTDKADAKIIAQYCEAYKPKLYEPVPKEVKEFKELARHLTELKEAKTRQTNRLEAVRSKVVVESIKAVVKTIEQEIEEVEKLIKKHIDSDPSLKADKELLKTIPGIGETTASLLIAEIPEIKNFSNAKKLAAFTGLSPSQHTSGTSVRKKTRICKIGNSRVRKALYFPAITAMKHNPIIATFSKRLADRGKHKFAIICACMRKLLHLAFGVLKSGLAFDPNFSALGSKKDEILEISSFS

SEQ ID NO: 166470 - protein, 367 aa, unidentified
MSSIAHREFIHLGMDVSKDSIAVAVLAPDRDAAEVDKIFHDADSVRRLVKRIGRPKAIWTCYEAGPTGYDLQRLLASMGVRCDVVAPSLIPKGSGDRVKTDRRDARRLAGLHRAGQLTPIAIPTPAQEGVRDLCRTRGDMVQDLTRARNRLSGFLLRHSVVWRGGSPWTERHRRWLATLSFDDPAIATTYSHYLATVKLRDTALESVEADLLPWCTKDPFGDQVQRLAAYRGVTRIGALCLAAEVFDWRRFPKARPFMSFTGLVPGENSTGLTQRRGSITRAGNSHLRGQLCEAAWAYQHSPNVGAGIRARQLGVPPETVARSWAAQVRLSRRFRQLAAHKNVRSVVAAAIARELAGFLWAEMVAEV

SEQ ID NO: 166471 - protein, 343 aa, unidentified
MNSTTIAVDVAKAVFEVAVSEHAGQVRERHRFSRERFRRYLGEQPPATILMEACGSAHYWGREAQTRGHRVVLLPPHAVRPYVVRNKTDRTDAKALLEATRNDEVRPVPVKSETQQALAALHRLRSAWLATRTARINIVRGLLREFGVVIPNGARHVVPALGLLEDADVGVPSLLRPALAEAAREIRELEGWIRTVEHQLEAVAEQTPVVSRLCSIPGVGLLTATALVAAVGDVQRFPSGRHFASYLGLTPRERSTGQRRQLGAISKRGDAYLRMLLIHGARAVLCHAKTKTAPTPDRLRAWALHLERFRGHNKAAVALANKLARIAWAVWKYDTDFAAAPAA

SEQ ID NO: 166472 - protein, 332 aa, unidentified
MSVYVGIDVHRKRSQVAVVDQDGKVLANRNVNNGVTPILSVIGGLPPGTPAAFEAAYGWGWLVELLEDYGFEPHLVHPLQCKAIASARLKNDKVDAAILAQLLRADLLPEAWIAPPEVRQLRALLRHRAQLVRLRTLLQNRIHAVLADHGHDRPAGCWSGPGRAWLASLELPAVSAEVIGDALALIDALESVTGRLDAEVRQHARSDPRVKILTTLPGVGPFTALVLLAEIGDITRFASARKLASWAGLTPTVRGSDRTVRHGHISKQGSAWLRWVLCEAAQKAKRHPDFAASYQSIARRRGIKIATTAIARKLLTRAYHLLTDAASAGAPS

SEQ ID NO: 166473 - protein, 313 aa, unidentified
MTKSKQVVGIDVGKEQLDVGLNAEKKVRVWANDDEGRQVLSDWVVQQEAQLVVVEASGGYEAAIVSELVDRGLEVALVNPTRVRAFARAEGLLAKTDKIDARLIARFGAIMKPEARARREQNQLELNQWVSRRRQLVLMVVAEKNRLQTAPVEVKADIVRHIDWMQAEIECLEQQINQAIANNPAWRETASRVESAPGIGVVTSSTLVADLPELGQLNRQKIAALVGLAPFNHDSGKRRGQRRIFGGRASVRSVLYMATLSAIRHNPVIKSFYDRLIAKGKIKKVALTACMRKLLVILNAMIKNGQDWSPTIS

SEQ ID NO: 166474 - protein, 381 aa, unidentified
MSSSRAPGTAKTVARGLDGGLDEIKDRPGQGFIRVHDRALIHQAFLALSQTVDRAKTILSLLSSPNKAEKVMNPKSRYNPVAVDVSKKTLQVQLEDKGFNVSNDAKGHQKLIDSMKNIQNPLVVFEASGGYERPLKKAMHHANIALCLVNPTRVRAFAISEGIKAKTDPIDAKVIRSFALEKNLKATKAIESEHEQLAALLDRRSQLSDHLTKEKNRLDKSEEWILPFIRKMIHQIEEQINTIELAIRNLIKSQEALSEKNKAIQEIDGIGEITTWSILAYMSEMTTCSRNEAVCLAGLAPFNRDSGSIQKPRHIFGGRSKIRTCLYMAAQMAARYNHVIKPYVEGLRERGKPYKCAIVAAMRKLLLHIRSILKKLEKSLA

SEQ ID NO: 166475 - protein, 345 aa, unidentified
MLNPFSQKEAMVETATTCNLEYTLERVLYMGIELDNNRWKLGFTVGFGQKPRERNVAARDIVSLKQEIQSAKRRFNVPKDCRVLSCYEAGRQGFWLHRFLIHSGISNVVVDAASMEARKKRRRAKTDRIDLEKLLRMLIRYHAGDEKVWSVVRIPSLEAEDRRQLHRARWTLTSEKNRHINRIKGLLATQGISLPVNEDLPEKLNQVRKWDGLPIHPMLRARLICEYAILQLVQQQIKDIEQKQRQSLRYPEHPSMTMVRDLMRLKSISIHTAWPLTMELFSWRQFRNPKEIGGIVGLEPVPHQSGGTDRELGMSKCGNARLRSLAVEFAWQWLFHQPNSTLSHS

SEQ ID NO: 166476 - protein, 408 aa, unidentified
MQVLYPRCAGLDVHKDVIVACVRCVSTPVHQEVRSFQTTTSGLQSLDEWLSSHACTHVAMEATGVYWKPVWHILEADFELVLANAQHIRNVPGRKTDVNDATWIADLLAHGLIRSSFVPPAPIQELRDLTRTRKQLVREISQHSSRIQKILEDANLKLGSVLSNVLGKSGLAILHALIAGETDPEKLADLAEGTARKKRAELIEALHGRIRDHHRGLLKVHLELVAALEQALADIDATVGKTLAPIRDSARLLTTLPGVSDLTAQVMVAEIGVDMSRFPTAAHLISWTGLCPRSDESAGKRRSTRVRKGAPWLKTALVTAAWAAVRVKDSYLQAQFHRLRSRRGAKKAILAVAASMLTAAYHMLKNGIPYRDLGADHFSSRDRSKAILRLVRRLNDLGCDVQLTPQAA

SEQ ID NO: 166477 - protein, 387 aa, unidentified
MPQPNDLSRSLVALDQNSTIIAVIEMSQSSWLVAGMLPGIERQPRKKLEPNPERLLGLLHRWRDEAVRAGRTITRIAVAFEAGRDGFWLARWLAARGIEAHVIHASSVAVSREHRRAKTDRLDTELLKRGFLGWLRGERGHCSMARVPTIAEEDAKRPNRERDCLVGERTRIVNRIKSTLARLGIRNFKPTLRKAAERLATVHTPEGMPLPPNTLAELQRDMARLGFVVSQIREIEDARQKRLEQQPETGPHAMVRLLARIVGVGVETADMLVHEVLSRPMRDRRAVARYAGLTGSPDESGAQRREQGLARAGNARVRRGMIQLAWRFLMFQKESALAVWYRARTADSRIGTRKTMIVALARKLIIALWRFVTIGEPLEGVVLRPAS

SEQ ID NO: 166478 - protein, 322 aa, unidentified
MSECILGVDIAKRKFDAALLVNDKLKHKVFKNNQEGFTELSSWIEKQRVGRIHACMEASSSYGDELATYLYDQEHTVSIVNPARIKGFAQSELMRTKNDKVDAGLIARFCFAMHPEPWIPVSPQMRELRSLVRRIDALISIKTQEMNRIDVSHESIRSSLSNHIAYLDKEIASLKRQIAAQITDDPDLTTKSSLLKSIPGIGAATIAAILAELHIFERCIQVGKVVAFLGLAPREFISGSSIKGKPRLSKIGHARLRKALYMPALVSIQCNPIIQNFYHRLRENGKNGKVIVCAIMRKLVHIIFGILKSGKPFDPNYMTHCA

SEQ ID NO: 166479 - protein, 525 aa, unidentified
MSSDALAPPVLPAFVVAPSIPENEIVQRRQALAGVQRFFGLDIHRDYLVATAVDHDLQIVFGPVRVGWERFEAWIAATLTLVDAVVVEMTTNTWQVHDQLAGRVHSVTVVHPPHVKLITDTPVMNDKKAAEALASLLATGLLRSVWVPDQITRDWRQLVAQRLDRVKAMTIAKNRLQSVLHRHQFEKPKASDPYTEPLRAFWLSLPVSPAEKLAVELDLETIAQSQAQLARIEAMMTAQVVTDARLPFLVQLPGVSVLGALTILAAIGPIERFASPKKLVGYAGLGTRLHDSGTTRWSGRITKAGRKDLRYVMVNAAQAAARSHPHWQAELARLEPRTGRNKAIIAIARKLLVGVWHILTKREADRFAEPEQVAKSFAQTAYGSIGAAELPEGETGPEFVRRNLDALKLGKDLQYVKYGNRRFILPQSGQPGAAPMAQPTGRGQLQNTREAKAKRAAEAARKRADLEAKRLEAEARMGRPRKQRADKGTKRGPNRITTGRPPAPTARTTSKSVTKTTAKAAAKTK

SEQ ID NO: 166480 - protein, 371 aa, unidentified
MKKTITFVGLDVHKATIDVALADAGHTGDVRFYGTIGGDLDALHKVVRKLQSNGTELRFVYEAGPCGYDIYRSLTKQGFDCMVTAPSLIPRKSGDRIKNDRRDALNLARLYRAGELTAVYVPTEEDEAMRDLSRAREDAVKALRVARQGLLAFLLRHGFRYNGKKNWTKAHNNWIAGIKMPHRGQQIALQEYVNTAQEQLERVDRLTGQIRDLLPHWSQAPLVTALQALRGVSLIVAVTTVAELGDLTRFRSAKQLMAYLGLVPSEHSSGGTVRRGGITKTGNVHVRKALTEAAHTYCHPARESRVLLERLEGLPPEVRQIAWKAQVRLCGRFRRLLGYGKNRKTVVTATARELSAFMWAIANAVAPKPTA

SEQ ID NO: 166481 - protein, 322 aa, unidentified
MSQPNPLCVGIDVSKATLDIAASSDIAQFTVSNDSDGFDAVITGLRRHSVALVLMEATGGLEVAVACSLQAEGFEVAVVNPRQARDFARAMGYLAKTDRIDARVLAQMAEVINHHPERKRFIRALPDAERQALAAMVVRRRQLIAMLVAERNRLHPSHPQNKKSINTIIKALEDELVRLEKEMDSHIRNHFKEIAERLSSIKGVGTMTVSALLAEIPELGTLSRREISALIGVAPVNRDSGTMRGRRTIFGGRAGVRSALYMAALVATRFNPVIKTFYVRLLAAGKAKKVALVACMRKLLTILNAMLRKNEEWDESYHHVAP

SEQ ID NO: 166482 - protein, 344 aa, unidentified
MIYVGVDLHLRFCYMTALDASGRVLQHGPVMNQGERLRGYFTGLQSSLKKEEEPVAVAVEACGFWAPFVEVVEPLVERVVLVHPARVKAIASAKLKNDRIDSATLAHLLRADLLPEAWKADRATRDLREVLRLRVALGQQRTRWKNQVHATLHRHGLRPPVTDLFGLAGRAWLATAELRAAAAQVRDTCLRLIDELDQEVYALDQQLRAQAHADPDARHLMSIPGIGPFSALALKAEIGDIHRFGSKRSLYNYAGLVPVLRQSANRKHTGAITHAGPGTLRWVLNEAALTAVRCSAGARAYFERLCRRRHPHVARTALARKLLGAVYFLWKHGVCFDEQVFAAM

SEQ ID NO: 166483 - protein, 460 aa, unidentified
MTSRKKKQREFSGDETLCPIRQNTAGIDVGATEHWVSVPPDRDGEAVRCFKAFTGDLHALADWLEVCCIDHVAMESTGVYWIPLFEILEERGFEIALVNAKHLKNVAGRKADWTDCQWIRIVYSRGLVSASFRPPQQIAALRSYLRHRKMLVEYAACHVQHMQKALSQMNLHLHHVISDITGVTGTKIIEAILAGERDPARMAQLRDRRIKSSPEIIAKALEGNYRIEHIFALRQAFDLYKTYCQQIDACDQQIHQHLQQLEAKIDPDHKPLPASRRQRRLRKRRNEIRFDSRREAYRIAGVDLTTIDGIDESTALLILSEIGPDLSPWKSEKHFASWLNLSPNHQISGGKILNRKTRKQKNRVRDGLRIGAQSLLHSQSALGAYCRRICSRIGHPKGIIATAHKLACLIYRLLKFGGAYVDQGQQHFEQRFKERAIKNIASRAKEHGYQLIPLPQVQVP

SEQ ID NO: 166484 - protein, 352 aa, unidentified
MQQGIILSVDYHDRVCVIRWLDPRSRKEMVFTEVPTSAEALSDFVDQARRAAGRRRVVWIQESTTGWARVKDLLGDRVDFQLANVVQMPQPPKARRRKTDKTDTARIQREYLNGRLPLAYQPPAWWRRVRRLVSFRENLVARRTALRNWINRYLAHETWFDRTGLWTTTGQQQLQALLKRLPAQDTFIITQKLEELKQLKEQLGATIKQLLAVFQECPEAQRLDAIPGINVVSAVSIVARIGPVQRFSSVDCLIAYAGLAPGIHESDQTRRDGHIGGGGTDRHLRHYLIEATTWAQKAPRYSAAYGRVRRRKGSKVARLVVARMLLRSIYKMIKEGVEFKAEPTAAVAAAGS

SEQ ID NO: 166485 - protein, 440 aa, unidentified
MKKRKERVCGADVHKDLIVATITGDEVPPIRENFGTTKSELKRFRDWLTTNKCEQVAFEATGVYWIPVYDALNGAIDTIVANPHQIKTIPNDKSDSKDSKRIATLCLNNQIKRSRVFSDEDRELRNLTRARSGYVKTRTQFKNRIHKYLSSNGVKLSSCMDDVFCKSGTHIIRGLAEKKPVEEILKSIPCGKIRKKQDEIRSALANELSETNRMLISDALEMMDNAETKIEKMSLEILKKVQQLRSNDLAIVMSIPGIAFISGSVILSEIGDCRDFQSPDQLAKWCGLIPGENESAGKKRKCGITKRGSKYIRVVLIQAAQSISNMKNTTLSRFYKRLSKKKEHNVAIVAVARKLICLIYHLLINQEFYQEVGCRKKRTGRNESRHEPSLKDEDLADRVAAIVDAFYGMSDSNRKKVLMRALEDISGNKPDRKRSSEGGG

SEQ ID NO: 166486 - protein, 400 aa, unidentified
MSLDRPFAETAAIRSELGAIFISLELSRSTWLMTSLSPGAGEKLSKREIKAGDVSALLARLAELRHKALARTGTSHPIIVIQEAGLDGFWLHRVLQEEGCESHVVDPASIAAPRRRRRAKTDRIDGEALLRALLAYKRGEPRVCSMVRPPTPEAEDERRICRERAELIGERVRHVNRIKGLLFSQGVRDYEPLRRDRRKRLLELRTGDGRPLGPHLKAQIERELDRLELLLEQVKTVEGARDRLLDRLVESRSQDATAPAEAQPSPVALLLSLNGVGPEFAASLWTEGLCRSFANRREAGAYPGLTPTPWRSGKIEHEQGVSKTGNPRLRTKMLQLAWLWLQHQPKSALAQWFHRRLPGMTGKAARKRLIVALARKLFVALWKFTSAGVVIEGAVMKTSA

SEQ ID NO: 166487 - protein, 340 aa, unidentified
MTITTVGIDLAKNVFAVHCVDQHGKTVLVKPKVSRAALPELIASLPPCVIGMEPCSGAHYWARLFRQYGHEPRLMAAKFVSPYRMAGKSGKNDAADAQAICEAVRRPHMRFVPVKDESQQAMQCLHRIRQGFIEEKTATYNRLRGLISEFGVIAPQSTDALRHMVSEQKSSLPLQVQQCVNDLLEHIDRIEDNITEYDRILSRMAKTDHRSQRLMELKGIGPTTACALVASIGNAHDFKNGRQLAAWLGLTPSQYSSGGKSKLGRITKAGDSYLRTLLVQGARSVLIGAEKRTDLFSRWVCSLVDRRGYWRAVVAIAAKNARLCWASLHYGDDFRLYSAS

SEQ ID NO: 166488 - protein, 343 aa, unidentified
MKMASIGIDIGKTTFHLVALDEHGSTVIRRKFSRKALLTYGAKLKTSLIGMEACGGAHCLARLLRDQGHQVRLIPGQFVKPYRQSSKNDYLDAEAIAEAVTRKKLRFVAIKTEDQLDVQGLHRVRERLVHNRTEVINQIRGFLLERGVTFSRGPQSLRKGMPDLLEDAERNITPQLRSLLAHLWQEWQYLDSQIDQISDAMEAVAESDAACRRLRKIPGIGPLVSTATIAAIGNGAAFQRGRDFAAWLGLVPKQHSTGGKAKLLGITKRGNRYLRKLFVHGARAVLLRVKYDTGGFGQWVHRLAARAPRNKVIVAIANKLARIAWVVLSSGNEYQHPPLAAVA

SEQ ID NO: 166489 - protein, 326 aa, unidentified
MVVLGVDPHKKSYTVVAADQAGRQLAVLTVKTTTAGHLKLFRWAAERFPGRRWAVEDGRHVAGRLLRDLIAAGEAVTPVPTKLMAGARAGARTRGKSDPIDALAVARAALREPDLPAAHLDAECLDLRLLVDHREHLVAERTRQINRLRWHLVDLDPDLEPPARSMTRYKTLRRLLAQLDRLPAGVRRDLAIEITGRVLEDTVRINQLERDITRAVTPLAPTLMSIIGISGLSAAKLLGEVAGIERFPTSAKLANHAGTACIPVWSGNNEKHRLNRGANRQLNCAVHRVAITQVQHHPGAKALYQRRRANGDTKAGAYRVVKRHGA

SEQ ID NO: 166490 - protein, 378 aa, unidentified
MKRIMRYVGMDVHAETIAIVVVEADGSERDLGVIANRPEAIRKWLKRLGPAEELHCCYEAGPTGYVLYWQLTQMGIECTVAAPTLIPTKAGDRVKTDRRDARKLARYLRSGDLTAVWVPDEAHEALRDLVRARQAAKIDEKRARHRLQKFLLRHGQRAAQGVTAWTARHRAWLAVLQLEQPTLQVVLQEYLHEVLHSEQRVQRLDTAIEQAVEEAPAAIRAVVAALQGLRGVRKVTAVGVVAEIGRFSRFAHPRQLMGYSGAVPSEFSTGGPGKHQRGAITKAGNAHLRRLLGEAAWCYRYRPAVRYPLKKRQEPLPPKVIDISWKAQLRLCHRYRRMVARGKLKQKVVIAVARELLAFMWAIGVEIEKRHEPPRAAA

SEQ ID NO: 166491 - protein, 375 aa, unidentified
MSNLSEAFVGLDTSKLRNSVAIAEGGRTGEVRFLGEIDTTPAAIRKLVKKLATKYERLSFCYEAGPTGYGAYRQITGLGHDCIVAAPSLIPKKPGDRVKTNRRDAVTLAKLHRAGELTAVWVPDCGHEAMRELTRARETAMTDLRRKRQQVSAFLLRQGLHYAAEKKTWTKAHMDWLAGQKLEHVEQRIVFEEMMLAVREAQARLERLADAIRVAVPEWSLAEGVTALMAMRGMDLVAAATFLAEIGDLSRFQGPRELMAYLGLVPSEASTGDTIKRGPITKTGNRRARRMLVECSWSYRHPPRVGRTKQEKVAAAPQAVREIAWKAQCRLHSRYRSLIRRGKLKTVANTAVARELAGFLWAVNRAITKTGAAAG

SEQ ID NO: 166492 - protein, 347 aa, unidentified
MSTAAIHIIGIDLGKNWFHLVGMSEKGDVLLRKKLNRNQLAEFVATSMTCIVAMESCPGSQYWGHRFQNAGYTVRIIPAQFVKPYLKSNKNDFNDAEAIAEAGSRGRMRTVQLKSLDQLEMQATHRVRQRFIVERTAVVNQMRALLLEHGLVVPVGRALFARRLPSILSDAENGLSIRMRQLMQRLHQRWQGLDKEIESITTEIHEIAKGSELCRRAATVPGVGPIIATAMVAAIGNGQAFGSGRDLSAWLGLVPRQYSTGGKSNLGSISKRGNSYLRMLLIQGARALMIHMKREKTGMGQWLHQLEKRSHPHVALVAMANKIARICWKVLSCDEVYRPFPGLPVSA

SEQ ID NO: 166493 - protein, 342 aa, unidentified
MNRKIYIGVDVSKNWLDLAYYDGVEIDWKSGHIRVDNNKSGYKRISIWLKKLQIAKESALFCMEYTGLYCYNFRVWLESEGIIYGMINPRKMHRFEPDLGEGEPALDRIKTDEMDSFRIAMYCEKHSRKIKSSPSRLPGSAFFNLKRLLAERRQYVKHSVLYKQQLHDISAYDTEESCKRKQAGLKSLSVLRRQTDIEMRKIIKSDEAIYKNYKLLCSVIGVGLVIAVETIVLTENFTAITNPRKYACYVGIAPGRKESGISIRGGDHVSKKGFKQAKANLSLVALQAIRHDSNIRSYWLRRKADGKHTGVVLNAIKFKMILRMFAVIKRQKPYVEMDAYMK

SEQ ID NO: 166494 - protein, 360 aa, unidentified
MNDSSRATPRVTAGLDLGDKYSYLCLIDTDTGKVLEEGRLRTTPEALRRRFCSEQRMSVAIEVGTHSTWVSRVLKECDHEVLVANPRKTRLIYGQGRKTDKLDAEKLGRLARVDPKLLSPLEHRGEASQAHLALIRSREVVVRSRAQLINHVRGTVKSFGARLPKCSTASFHKKVAACIPEELQPALEPLLETIASLSTRIRHYDRELEELAQEHYQETKLLRQVQGVGTLTALSFVLTLEDPGRFEESRQVGAYLGLVPGKDQSGERDPQRRISREGDEMLRRLLVGSAHYILGPFAQDSDLRRHGLKIAGSTAAKDARKRAVVAVARKLSVLLHRLWISGEVYEPLYNARRQPKGLAA

SEQ ID NO: 166495 - protein, 367 aa, unidentified
MKKVSTSAAARTKNLSNETLTIGLDLGDRHSWYCVLDGAGQVRLEQRVSTTAKALREVFGRLPRCRVALEIGTHSPWISRLLKELGHEVIVANARKVRLIGESRKKDDRLDAQTLARLARIDPELLSPVKHRSAKAQADLTVIRARAGLVRARTSLVNTARSLAKSYGERLRGCNVRNMNPEKAESLSPELQSALQPLLAGIESVSEQIAEYNQRIEALGQQSYPRVALLKQVKGVGTLIALTFMLTLEDPHRFGKSRDVGGYLGLQPGRRNSGQSEPQMHITKEGDPYLRTLLVQGAQHILGPFGIDCDLRRWGLKLAERGGRSGKKRAIVATARKLAVLLHHLWVSGEVYEPLHNRNPATVAAAA

SEQ ID NO: 166496 - protein, 334 aa, unidentified
MLYAAIDIHKHAFQAAVLDPDSGEVVEERFSADRESLARWAEQWRGRLEAVAIEATTGWRWVWRGLVECGFEVRLAEPVQTRALLGRRRSAKTDRLDARWLARLLAKEMLPQSWIPPEQIQQLRDRTRLRKALAEDRRRWGQRLHAYLLHEGWPCSRSNLLRPPGLRWAAALQLSEHARLQVDSLLAVMAALQEQLDTVDGELRRFARADERCQALQSIYGVGPILACHLLAEIGEASRFQRAEQITRLAGLDPVVDESGETRRRGHLAKAGSPHLRWALVEAAVHAHRPTAPDLALYRATRQRRDTTVARLTIARKIGKRAFHALRELELTAA

SEQ ID NO: 166497 - protein, 427 aa, unidentified
MTASTQLMPDTVCVAIDIAKRYHDVLVRWPDGREKVLKMPNTRAGHDDLIQFLQQQDVPVLAVLEPTADFHRPIAYRLAQAGISVHLASSLAGARVREALYTSWDKHDRKDARVLMYLLTQGMTHPFHDPLREGYFDLQEISNTYQQVARARTRCQHSLVNHYLALYFPEMERYLSASRAHWFCHFLLAFPTPANIIALTREAFVEAAWESVGRKVAKQQFLEGIYEAAQTSMGLPVVPDSPAVHTFRLQVKQYLSLTEQRQALEAMATTCLRDNKDFARLQTLPGVGPIIALMILAESGDLRRFSHHRQYLKFCGFNLAASQSGNTCSRYRLAKRGNARLRYAYWLAATVAIRMRENSFHTKFDRYVGKDPTDGDLKRKGLTAVAVKMARVAHALIKHDVDYRGYHEYCIPGGGTSLQSRRAARTP

SEQ ID NO: 166498 - protein, 394 aa, unidentified
MKLIGIDIGKNKHFFCVMDQQTGEIISQPVSFSNDKEGFDFLVQKIKSYPKDSILIGMEDTGHYHFALLKYLLDLQYTVALINPKTTDFNRKMQGGITKNDKLDTINICDVLDTPERKKQYRITKVNSFDLYEQKQLTRHHHNLKEEENVYKNRLQKCIDIVFPEFNNLFNSKYGTVYMNILKMFGSAENIANTDIRTIRKCFEIEGRGNRISLTPERLKECAGSSIGISSSAEVIQIKHLTAQIELIEEQLTEIDKKIEEFSIQNNSPILSIPGISHFSGTSILAELGDISNYSKPSQIIKFAGVAPLHYESSQFNAQHTSITKKGSKYLRKTLYQIILPVIRHNPVFTKYYQLKISQGKGHRCAQGHCVRKLIRIIYHLLKTNQQFDPQLLR

SEQ ID NO: 166499 - protein, 334 aa, unidentified
MQNITLIGIDLGKHSFHIHCQDKSGKALLRKKFTRTKLMQFLATCPPSVVVMEACAGAHFMARCISDFGHETKLISPQFVRPFVKSNKNDFVDAEAICEAASRPSMRFVQPRTETQQPMRALHRVRESLIRDKVKTTNQIHGFLLEFGISLPIGDAVIKRLSLVLAEHEIPEYLSRLLVRLHTHYFYLVEQIAELESELSQSINADDTAQRIMTIPGVGPITASLLSSQLGDGKQFSCSRDFAASTGLVPRQYSTGGKSTLLGISKRGDKNLRRLLVQCARSFIMRLERKHGKLAEWVREQLNKKHSNVVTCALANKLARIAWAITTQKKEYQA

SEQ ID NO: 166500 - protein, 494 aa, unidentified
MKTSKHSKITSVYRNQNVLIRAVFQRAGDTRKVLCVALDYAKRKHVALICDGNGDILKAAFPVENNPAGIDFLIKEVSATARRRKIPKNQIFLGGEDEASYVANFTAALREHDYLVVRVSAYEAKENRENLIASTDTLDLLGIAKTLLARRARLTGETDYSNPVYHHLRELNRCRRGLVRQKTAASNRIHALADQLCPGFLNDSKSGLTAFSEASLALMQERFSAPEITRRRPVALANLLRRHRIHNPDETATKIITLAREALPPPPHRVVTLQRTLTATTELYRCLERNALELRSEAAHALATTPYALLTSIPGIGFVLAAGIAGELGDPRHLAPLDSLCAYAGIVPSTYQSGGPDSPAIQGRTSRRCNHILKDWVVQSAQKISLHGPPELKDRIIRWNANGQHGIFAAARRYLRLVRALTQNEVPYLGPEGRARNVEPGQLDDAAHHTWAVLQRKWRTISGGIDLITDQSHPVGFWRRVIKETHGIDLPDRS

SEQ ID NO: 166501 - protein, 410 aa, unidentified
MWFAGIDWADKHHDVVVLDVAGQQVLSRRVAHSAEGLASLTAELRALAPAPEEVVCVVERAHGLLIAALLEAGLWVAPVNPKTVDRTRPASGAKSDQLDALLLARAGRSAWPDLRRLRPDTPVLAELKTLTRDEASLIRQQTRVVNQLIACLKAYYPVVTELFDKLTRPVAHAFLRAFPTLAQARAASEAELRTVLHAAHCPSSAQKAARFWATLHAPQLEASPPLVQAKARFALALVAQLEVLHQQLAEYDRAIGRLFRQHEDSSIFASLPGAGCRLAPRLLAEWGDERERYTGAAGVQALAGTAPVVVQSGQYRRVHQRTGCVKPLRAALYQLARESLLFEDWARVYYERKRAEGKTYAMAVRALSHQWVRLLYAMWSRREPYQRDRFLAAQQAHAILHATPPAQPAA

SEQ ID NO: 166502 - protein, 339 aa, unidentified
MSLYAGLDLHSSNTYIGVLDPQFNRIFKKRVCNDLDLILQTLEPFRDRLRGLVVESTYNWYWLVDGIMDAGYSCVHLANPSAIKQYEGLKHSDDQHDAFFLAQLLILGILPQGYIYPKEARPVRDLARKRMFLVQQRTAHILSLQSLLARCCGQKVSSSQLRKVTGQDLKRWLKEEHLVLSAQANLDNIVFLKQQIGRIEAAIQKQVKLTEAFNCLLTVPGIGKILAMTIMLEAGDIRRFANVGNFASYCRCVSTQRLSDGKSKGSGNRKNGNRYLSWAFTEAAQMARRFNSRFRSYYDRKAAQTNSILATRALSNKLARVCYYIMRDRVEFREELASH

SEQ ID NO: 166503 - protein, 322 aa, unidentified
MLKKKLNFCVMFEGKVVHEEETSNHQGAIMSLLHHLEEDYGIASGQMLVCAEHTGQYTFPLACACKAVECRLWLENAAEIKYSSGVQRGKSDKVDAKRIAIYASRFQDKVRYYERPTEDIERLKQLESERTLYVTDFAKYKGQMKDQKEYMPKSLYERKMKRLQALMDDLEEAIQSITDEMDEVIASCPVLFRQRELLMSIDGVGRVVATNMIIATEAFTRFDDPRKFNCYAGVAPFSYSSGSSQHSKARVSHRADKVMKRLLHLAAVAVTHRIGGELKKYYERKVAEGKNKMSVINALRAKIVARMFAVIKRNERYKPILS

SEQ ID NO: 166504 - protein, 316 aa, unidentified
MNNQNHNEINIGIDASQPRLDIHVRPVGAFQSFENNPEGIRRAIRFIKPFKPARVLIEATGRLEMAFFCAAHKAGLPICVCNPIRVRKFAQSNGRMAKTDKLDAEDIAYFGEALKPRLTDLKPAKLRLLSDLLTVRSQCLDMSTMQKNRLQRMPRTVQKPIRNILKRITQEIASIDQQLDKLIAEIPQWQERVDQLTSAKAVGKVVAYTLLSELPELGRLNRKQIAALVGIAPMNRDSGRYKGKRFIRGGRHKVRTVLFVSMMSAIQCHPKIKPMYERLVAAGKPKKVAIVACMRKQLTILNTMAKNGTYWDENMA

SEQ ID NO: 166505 - protein, 417 aa, unidentified
MKKHNNSRKKSEQPSKQAKSRGPVQRDTKEVLAELVGKLKEKLDPKKVAATSTGEKYQQGELSPNLDRLTVGVDLGDQWSHYCILGLEGETLAEGQLRTTPQDVAEFFEALNAARVVVEVGTHSAWVQEVIRGYGHEVLVANPRLMEGSKRRKRKNDRIDANKLARLGRVDPQSLHPIEHRSPEVRQDLVLLRARDALVAARTELINATRGLVKSMGTRLPKCSSPSFAQKVEEAVPAQIREALLPLVRMTAALSDGIQGYDEKIEKLASEKYGHTALLRQVKGVGPITSLAYVLTLENPERFEKSRDVGPYLGLVPKQEDSGESQPQLGISKAGDTMVRRLLVGSAHYILGPFGPDTDLRRYGLRLCERGGKNAKKRAAVAVARKLAVLLHRLWVSGEVYEPLRQGMAATTAHAAA

SEQ ID NO: 166506 - protein, 339 aa, unidentified
MKYTPVGVDIAKHLIQVHFIDENTGDVVDKQLRRRDFLEYFSNRESCLIGMEACGGSQHWARELTKLGHKVRLLQARFVKAFVMGNKNDVMDARAIWMAVQQPGKEIAVKTEEQQSVLVLHRSRRQLVKFRTMQINSLYGTLLEFGETIHKGRAAMEREFPEALERMKERLPPYLITVLENQYNRLNELDSLIEDIEKQLTSVAKQNETCKRLLDIPGVGPLIATAAVATMGEASAFKSGREFAAYVGLVPRQTGSGGKIRLLGISKRGDTYLRTLFIHGARAAALLTKEPGLWITELKKRRPVGVATVAMANKLARTVWAIAAHGRKYDKEYVSIRSY

SEQ ID NO: 166507 - protein, 343 aa, unidentified
MSIDTMIGVDLAKSVFQVHGASMNGEMRFQRKLSRQAFRTLMARHPAAAVVMEACGSAHYWARVLSGFGHEVRLIAPRYVRPFVKRQKNDAADAEAIVVAAQRPEMRFVEPKSEAQQSAAILYRSRQRLVRQRTETVNALRAALYEFGHVIPQGIQHVGRIHAILEAPNSDLPALMREECLAMLEQLAVLNGWIDTKTAKIKELAAATPVSKRLQTMPGIGPLVAMAVETFAPDMASFHNGRDFAAWLGLVPRQFSSGGKERLGRITKAGQADIRQMLIIGAMSRLNWMGRKSILESSWLARMMARKPRMLVAIALANKMARQIWAMLTNNEDYKNPMPVMAA

SEQ ID NO: 166508 - protein, 320 aa, unidentified
MRNAVGLDISKLTFDASAMVGNAEYSAKFDNNSKGLNQFSDWLKSLGCQNLHICMEATGNYYEEVADYFAQYYSVYVVNPLKISKYAESRFKRTKTDKQDAKLIAEYCRSAQESELVKRQKPTDEQYRLLRMTSAYTQIKSECAAMKNRHHAAKDEEAAKAYAEIIKAMNEQLEVLKAKIKEQTEKPKCKEGVKCLETIPGIGRMTAAVLFHHLTSSQFETSNKFAAFAGLSPQQKESGTSVRGKGKLTKFGNRKLRAVLFMPAMVAYRIRAFPDFIARLEAKKKPKKVIIAALMRKLAVIAYHVHKKGEHYDPSRYKSA

SEQ ID NO: 166509 - protein, 476 aa, unidentified
MPLLGRNQPRNMKSKALKHQKQSKKIIIDPAWEPINPHAAGVDIGSREHWACVPAGSSDRPVRKFGTFTADLEAIADWFTACGITSVAMEATGVYWIPLFQILERRGFQVVLVNARQTKNVAGRKSDVQDCQWIQRLHTYGLLQGSFRPEDAYCVLRTYLRYRDELVSARSTQCQHMQKAMQQMNLQLTQVLSDVTGVSGLAIIAAILQGERDPAKLAGLVDYRVRASAATIQQALKADFRPEHLFVLEQAHALYLTYEEKINACDEQIVSETAKLPAKVDPQLQALPPRKPGRKPADDRLCGQDLRPHLYEKFGVDLTAIEGIGVQTALVLLTEVGPDLNRFRSEKHFCSWLGLCPDNRISGGKVLRSKTRRVINRASDALRMAASSLERSQSALGGFYRRMKARLGAAEGVTATAHKLARIIFRLIKHGEAYVRQGLEDYEKKFKARKLNALEKTAKAMGFQLIPQQPLPHPVS

SEQ ID NO: 166510 - protein, 373 aa, unidentified
MPNYSTAFGMDVHLRSTTVCALDADTGEAVTRRFPGNPWGEIAGWMDGFPGPSLAAYESGYLGFAPQRELAGLGVECVVAAVSKIPRSAADSASKNDRNDAARMAKAILAHDISPVWVPSPEVEGIRDLAGAYDGATARLATAKQRLLAFLARRGFVYGGTTPAGNPRKYWTYDFLRWLDKVRPEDDGGVRALAALRNEVEAAAEARADLLSEYRAAVDASPIAAEVAALQSIKGCAFALAAAFSAEVGDFTRFRSGRQVTAYFGLAPSQRSSGDSVRLGGVSGAGNALVRKLAVEGSWCYAAARHQPKLMPRDTGVPLEIRVHGRKGSERLLRRREEMLARGMPAAKANAATAAELVRWLWALGMMCREGAE

SEQ ID NO: 166511 - protein, 339 aa, unidentified
MELYAGMDLHSTNTYVGILNSELERMFKKRVRNDLGLILETFEPFRKDLQGIVVESTYNWYWLVDGLMDAGYRCVHLANPSAIQQYEGLKYSDDNHDAFWLARLLSLGILPEGYIYPKEDRPVRDLLRKRSFIVRQRTEHIHSLQSMIERHTARRLKGNEVKNLETENLWEMFEHEYSTLAADADSCVIKFLTEHIERIEKAILKKAKLKEPFERLLTVPGIGKILALTIMLEVGDIGRFPEVGNFVSYARCAPSCRISNSKKKGEGNRKNGNKYLGWAFVEACNFARRFYPKFRSYYQHKASKSHPFVATKAICNKLARICYYVMKDGVCFREEAIFC

SEQ ID NO: 166512 - protein, 416 aa, unidentified
MDTVHSHCAGLDVHKKTVVATILIQEEQGGVHKETRTFETMTANLLELSDWLLGKGVTHVAMESTGEFWKPIYNILENNFEVLLVNAQHIKQVPGRKTDVKDSEWIAELLRHGLLKASFIPPLGQRELRELTRHRTNFVRERATLVNRVQKTLESGNIKLASVATNVMGVSGRAMLDAIVEGKANATEMAELAKGRLREKRDQLGKALEGHVKAHHQFVLAELLCQIDSLDESIARFDQEIEKYCRPFEEAVKLLDTIPGIARRSAEVIVSEIGTDMSRFPTADHLAAWAGVAPGNNESAGKRYSGKTRQGNKALNTVLVQAAHAASHTRNTYLAAQYHRLASRRGKKRAIVAVAHSILVISYHLIQRNEPYHDLGSDYFDKRRPEASAKRLMKRLEHLGYDVSHIQPVPVLPTAA

SEQ ID NO: 166513 - protein, 351 aa, unidentified
MGTDHESKISVYGGIDTHKDTHHVAVIDEHGRPLGDREFGATGAGYRKVIDYLRGFGVVVAVAVEGTGSYGAELARVLRRAGMTVLEVARPDRRARRLHGKSDPLDALQAAVTALSGRGLATPKDRDGLVESMRILLTERSSARKARGAAMNQIHALLVTAPEQIRATYRNLGNVKLVAALARSRPTPGHGPQQTLRGSLKRLAVRHQQHTSDIDGIDTRLGELATQVNPALLQLPGVGPLVASQLLVACGDNPERLSSEQQFAALCGTAPIPASSGKHQRHRLSRGGDRTANSAIHRIVLVRMSAGDTRTVDYIARRTAERKSEREIIRCLKRFVAREVFKIIGESAASE

SEQ ID NO: 166514 - protein, 430 aa, unidentified
MKSNTQNAKIEAITEKTLVLGIDVGSETHYARAFDYRGIEYSKKPFKFSNTEAGFVTFKEWILDIKERHEKDKVVLGMEPTGHYWFNLGKFLQDNEMKPVLVNPHHVKKSKELDDNNPTKNDRKDPKVIAGLVREGRYMIPYLPEGVYADLRTASNIRFQLQAELTRIQNRISRWFNIYFPEYKTVYGKPDAKSGILILKAAPLPEDILTLGIDGVNQIWRDAKLRAVGKARAKTLIEAAEHSVGSKEGAVAARMEIRMLLEDYESRSIRLQEVMTLIEGLVKQIPMAEKLLEIKGVGIRTVSGFLAEVGDISRFNNPKELQKLAGLALVENSSGKHKGETTISRRGRKRLRYLLFEVAMSLVAKNPEFRELHNYYTTRRLNPLKKMQSLMAIAAKLIRVFYAMLTKGVDYDPKKMVSDIKRPAVYLQAA

SEQ ID NO: 166515 - protein, 349 aa, unidentified
MQHYAGIDVSLELLSVCIVDAKGKIVKEAKVGSDPDTLVAFLRGLDLAIGRIGLEAGPLSQWLHAGLTSAGFEAVLLETRHVKAALSAMTVKTDRKDARGIAQLIRMGWFRAVHCKSAGSQEVRALLVARKLLLSKLLDVEFSIRGILRGFGLKMGMVTRKRFEARVRELYAGHAMLEQICSAMLTARSALQTEYAKLHKALLVIVRKDEVCRRLMTTPGVGPLVAITFKTGVDDPSRIHKSKAVGALFGLTPKKYQSGETDVTGGITRAGDEMVRTALYEAASVLLSRVTRFSALKRWGMDVAKRRGTKRAKVALARKIGVILHRMWVDMTSFRWTKGAPTTMRLARV

SEQ ID NO: 166516 - protein, 392 aa, unidentified
MSVTSDRVVIGMDPHKRSATIEVMAGDETVVGASRFDTGRGGYAAMRKYARQWPNRVWAIEGCQGIGRHIANRLLADGEQVVDVPPKLSARARVFATGQGRKTDATDAHSVALVGTRMAGLRPVVNDEQLALLRILVDRRRSLGEDHTRMVSQLHQLLLELIPGGAKKSLSAAQAKALLATVRPRDAVGKARRRVAAELIGDLERVYQRSKEADKELKDLVASTGTTLMDLHGIGPSGAARLLVEVGDITRFPNRAHFASWNGTAPIDASSGEQVRHRLSRAGNRQINRVLHIMATVQLRNPTEGRAYFDRKKASGKTSMEAMRALKRRLSDIVYRRMINDAAAAVATGPGGHRGTTTDSSVTNSHPQAGSSEKSLPGPAATQLRTPLATVS

SEQ ID NO: 166517 - protein, 480 aa, unidentified
MEATQQQKQKKGVKRPVQRGWHEMNRKQRREMTRRIQAEDLSLEVMHPEAAGIDIGNQSHYAAVPSSRDSQPVRCFGCTTVELRKMAAWLKQCGIRTVALQSTGVYWIPVYEVLEEAGLEVFLVNARDTKNLPGRKSDVQESQWLMKLHAYGLLRNSFRPPQEIRTMRTYRRQRNDLVQSAGRHIQRIQKALTQMNIQLANVLSDVSGMTGQAIIKAILAGERDPWKLAGFRDKRVKATEEEIARGLEGNWQDDLLFLLKQEQDSYEFCQKQIAECDARLEQYLQQRPDRSHGANLPEEKRKGRLQKKAKNPQFDLRTHLFRMTGADLTQIDGIDVRTAATVISEVGWDMSKWENEDHFVSWLRLCPDNRTSGDKIIGKGRLPTNNRLTVALRMAASTLRESDTYLGAQFRRLRSRLEGPVAVKAMAAKLARLVYRMLRYGMQFVDRGALFYEARHRQHQINFLRRKAVKLGFQLVACAN

SEQ ID NO: 166518 - protein, 347 aa, unidentified
MNFYTQQHIHYCGIDLHARAMYVCILDQTGTKLVHKNLPTTPEAFLRIIAPYREDLVVGVECIFTWYWLADLCEREGIAFVLGHALYMKAIHGGKAKNDKIDAHKIAVLLRGGMLPQAYVYPAEMRATRDLLRRRGHLVRKRAELLAHIQNTNSQYNLPEIGKKLAYKANREGVEEHFPDPSVRKTIEVDVSLIDHYDKVLGEVELYITRSAKAHDVQTFSRLQSVPGIGQILALVILYEIQDIPRFPRVQDFVSYCRLVKCAKESGGKRLGTSGKKSGNVHLRWAFAEAAVLFLRHNQPGKEYFTKLEHKHGKAKALTVLAHKLARAVYYLLSREQAFDLQRFVSA

SEQ ID NO: 166519 - protein, 316 aa, unidentified
MSKRKNHIGIDVSKQLLEVAVHESDFRYRCPNKTSAFAALVAELIAWRPARIVVEATGGLEKPVVAALQAAGLPVVVVNPRQVRAFAKALGQLAKTDRLDAAVLAHFAAAIKPPLRPFKAKEQQELEALMGRRGQLVEMLAAEKNRHHSASSEAVREIIKEHIDWLEDCIAELDEQLQTRLVSSAEWHAKDVILQSVPGIGPVVSFCLLAELPELGTLNRQCISKLVGVAPLNRDSGQQRGMRHIFGGRARVRSMLYMAALTAMRFNPVIKAFYQRLVGKGKPHKVALTACMRKLLSVINLMVRNQTVWKTDENSA

SEQ ID NO: 166520 - protein, 455 aa, unidentified
MRVMYERCCGLDIHKASITTCALITEKGKTREETRRFGTMTDDLRELARWLQEKGIRHVAMESTGVYWKPVWNILEPAGFELLLANAQEVKVVPGRKTDQKDSQWIADLHKHGLLRNSFVPPRAIRDLRDLSRTRAILTQEHSSICNRIQKVLEDANIKLGSVASDVFGVSGRAMLRALMKEETDAEVLANLSKGTLRKKIPQLRRALEGQVTAHHRGLLAGHWKRMEFLERQIADLETDIAERMKPTPTELPQTQDVAEGAPAPLSPREEAIQLWMEIPGVGWTAACSMVAELGVNMDQFPSAAHLASWAALCPGNNESAGKRLSGKTRQGNVWLRRTMCEVAWAASHTKDTYYAAQFRRIASRRGSKRALMAVAHSILVTAYHMLKHKRHYKELGGNFFDVINSDKVRDRLVQRLTKLGFDVTLQRKNTRESVSDNLVDKRGAATTTIAESGS

SEQ ID NO: 166521 - protein, 309 aa, unidentified
MTIAFDYIGCDISKAYVDIYDPKTGRRQSITNTAKALAAFLLAYQETSAFFVFEATGVYDSPLAKALAQAGLPFHRANPMMARRFAQAMGQRAKTDQLDAVMLAQLGSTLRPAPTPPPCPQRAHLAQLQRRRDQLVRLRAAEQTRLHDSTERVITASLKQVMAGLDRAIVAIDQAIAAALEASDHIAQSARMLTSAPGVGPVTATVLLAALPELGQVNPKQIAALAGLAPFNHDSGTLRGRRCISGGRARVRRALYMAALGAIKASARFRAVYTRIAEKAPAKKIAIIAVARKLLVTLNAMMRDQKAYA

SEQ ID NO: 166522 - protein, 337 aa, unidentified
MNEQATCVVGIDVSKRKLDIALLANSKIKSKVFDNTVTGHSELVQWLLERGAEQQRTHICMEATGPYSEAVAIALVESGWHISVVNPARIKGFAQGELARNKTDRADASLLARFCAAMRPSLWTPPSAEWRELRGWVDRLQALKDMHQQESNRLEAHTTTGQTSLIESVQTHLDWLAQQIGALEHDINDHINRHPELKHDAELLHSIPGIGSTTVAKVLAYAGDVRRFANAKALAAFIGVTPRQRLSGSSVKGRTMMSRTGHADLRRALYMPGLVARRHNPVLRAFGDRLSTTGLAPKAVVGAVMRKLAHLIYGVIKSGQPFDVSFAGRNLDFQDGI

SEQ ID NO: 166523 - protein, 346 aa, unidentified
MAHYAAFDVSDKETAIHVLDEHGKLVWKGKRPSEPEALAAALRRHAPELVRVGLETGRLTPWLFHALKGLGVPVVCPDARHARAATALQRNKTDARDAETLAQLVRTGWFREARVKSWAAHAVRHLVGARAQLVGMATDLSNQIRSLLRTFGLRITGRAGGTFERKVREQITGSPEVAAVAEPLLAAWRAMRDQIAALDRKLIEAARGDATCRLLMTCPGVGVVVATSFAAAVEAPDHFRRSRAVGAYLGLTPRRHQSGESDHSAGVSKRGDKLLRSYLFEAAACLLIRVQRPSALKAWGVGLVQRLGFKRAAVAVARKLSVVLHAMWRENRPFQAWPTPAVAAAA

SEQ ID NO: 166524 - protein, 326 aa, unidentified
MEHELHYIGIDTAKEKLDVDVLRPDGRHRTKKFANTTKGHDELVSWLKGHKIDHAHICIEATGTYMEPVAECLYDAGYIVSVINPALGKAFAQSEGLRNKTDTVDARMLAEFCRQKRPAAWEAPHPLERALRALVVRHQALTDMHTQELNRTETAREVQMPSIDAHLLWLEAELKRLEKQIKDLTDDDPDMKHRRKLLESIPGIGEKTSAVLLAYIGLKDRFAHARQFAAFAGLTPRRYESGSSVRGASRLSKAGHVSLRRALYMPAMVATSKTEWGRAFRDRLAANGKKGKVILGAMMRKLAQVAYGVLKSGVPFDASRHNPVAA

SEQ ID NO: 166525 - protein, 429 aa, unidentified
MNSTQNKKIDQVKETTMIVGSDVGSEKHYFRAFNWRGIELTRKPVAFSNSMEGFNSFYNTIVELMQKRELEEALVGIEPTGHYWFDLGQFMGEKNIKFVMVNPHHVHKTKELDDNSPSKNDRKDPRVIAGLVRDGRYFYSYMPTGVYAELRNASNRRFVLVEEQTRAKNRLQKWIAVYFPEYKGIYTHIDAKGGLLVLKQAPTPEEIVRLGVEGIIKIWKDAKLRGNGHKKAMLILNAAMKSIGLKSGLTEARMEIQDLIEDYELQTKRLERVNDLIKELCQQVRYADKLLEIKGIGITTVAGFIAEVGDITRFDSTKELQKLAGLELVSDSSGKHNGKTKISKRGRKRLRYLLFEAAISVVGKNEEFKEIHSYYTTREKNPLKKMQSLIAVACKLIRVFHVILTKGISYDASKMLKDIRHQGEQLKAA

SEQ ID NO: 166526 - protein, 318 aa, unidentified
MHWFGIDIAKRKFDITLLEGEKSRSKVFDNTPAGHQALVGWLAARGVTPGEAHTGMEATGQYYETLAEFLYASGFRVSVINPLQIKAFGESRLSRQKTDRADATLIAHFVKQQAPLLWQPAPPEIRELQRLLSRLEAVQQMRVQEQTRRHEAQGDALASIERVLALLNEEEGQLEQCIKDHIDRHPPLCRQRDLLTSIPGVGDRLSSYCLAWLQAERFADVRQAVAFVGLSPRHRQSGDSVRGKSRLCKLGHARLRRVLYLPAMSAIRYNPAARCLAERLKASGKLVIGAVMRKLVHWMFGVLNSGLPFDADRAIAKC

SEQ ID NO: 166527 - protein, 459 aa, unidentified
MVVEGSHENRGLLPSSTSVRLLKSSSPPRDRHLPIIHVFEKGEVTVDLVHPRCAGIDISKRDAKVCVRVASAGRAKATSTVTTWGSVTNQVLALREHLVAEQVTLVVMEATSDYWKPFYYLLEDSPFEVMLVNARHVRNLPGRKSDVSDAAWLAQLGAHGLVRGSFVPPEPIRQLRDLTRTRTAIVRERAREIQRLEKLLEDAGIKLSAVATDITGVSGRAMLEALIEGQRDPVVLADLAKRRLRSKIPELTEALTGRFGEHHGFLARLHLDLIDNHTHAISELAARIEVVIEPFRGARDLIVTIPGISTNVADVIIAETGADMTRFPTAGHLASWAGTCPGSNESAGRIKSTHTRPGNPYLKGALGVAAMSASRSKNTYLAAKFRRIASRRGPIKAVVALEHAMLVAVWNMLDTGTYYGDPGEDFFTRLNPDRAKSRALEQLRKMGYAVTLSPLAASA

SEQ ID NO: 166528 - protein, 351 aa, unidentified
MVIIGCDFHPGFQQIAIVDTEGGAVRELRLAHKAEAEQFYASLRGQEVLVGIEASGYSQWFEQMLERIGYRFQIGDAAAIRASYVRRQKTDRRDAGHILRLLVEGRFPALWVPSAAERDARQLIVHRHKRVQMRTRVKNQLHALAMNQGLRLRWQLWTAKGLEQLRALPLLPYAAARRADLLRQLEEMDAEIARLDEAVRKEAEARPAAVRLMSHPGVGPVTALGFVLTIGDVRRFKKARQVASYLGLIPSERSSGGKQRLGHISKQGSSLLRFLLVEAGHTAVRKDAELRRCYQRLQHRHSTGVAKVAVARKLALRLYWMLRNEIDYAQLRGPYAGKPVSFCGRKTRPAA

SEQ ID NO: 166529 - protein, 414 aa, unidentified
MFAVGVDVSNGRSTVAVLGAQRKIVMKPFEVPHTADGFASLSEKLRGLNGEARIVMEHTGRYYEPFAMSMYRAGFFVSAVNPLVIKDYREGVDVRKVKTDRADALKIAQFALDKWEILPQYTPMDTIRYDLKTLHRQFQLSGKTRTALNNNLIALLEQSYPGANRYFDSPVRPDGSQKWVDFVDTFWHADCIAGVSRSAFVERYRKWCKRHGYNFSERKAVELHVDARQKFPLVPKSDTCKLLVKEAVSQLRTVSRTIETYRAEMNRLAAQLPEYETVMAMTGVGKSMGPQLIAEIGDLRRFAHQKSLVGFAGTDPIKDDSGDKVSDSKPSSKRGSPYLRKTLFVVMTILLQLQLQDDPVYQFLDKKRSEGKKYYVYMTAGMTKFLRIYYGRVRDCLKARGLWEQPMLESGSSD

SEQ ID NO: 166530 - protein, 408 aa, unidentified
MKTLHKRCAGLDVHKVEVVACLRLVARGKASYEVRRFPTTTKGLIELAEWLEAAQCTHVAMEATGVYWKPVWHMLEGRFTLILANAAHIKGVPGRKSDVNDATWIADLLAHGLIRASFVPPQPIQELRDLTRTRKQLTREIVQHTQRIQAVLEEANVKLSSAITDVLGMSGRRILKAIIAGETDPAKLAEFGGPRLAASRSDLADALHGRVREHHRFLIDQHLKTIEQLEATITAFDARIEDALRPFRDAIERLKEIPGLSQTSAEILIAEIGTDMTQFPTAGHLLSWAGLVPRLDESAGKRRSTRVKKGAPWLKPVLVQCAWAAARKKNSYFQAQFLRLKARCGPKKAVVAVAASLLATAYHMLADGTCYQDLGPDHFARRDPARIVAKLANRIRSLGYTVDITAAA

SEQ ID NO: 166531 - protein, 328 aa, unidentified
MFYLGIDVSKAKLDCCLLKEETPEKRKSKVLANSVTGIAELLHWLARQGAQPGQTHVLLEGTGVYHETAATALHDSGVTVSILNPARVRDFGKGLGLRTKTDTVDSWLLARFGLLQKPAAWLPPPAHVRQLRALLSRRQALSEDLQRERNRLEKAQATETPALIHQSLQDCIAFLERQLAQLQKDIDQHIDRHPDLKQDLALLQSIPAVGPQVGSHLLCVMRSNSFRSAEQLAAYLGLVPVECQSGTSVLGRARLSKAGPARIRALLYMSAIVGIRHNRHVKALYERMINKGKSKMAALGAAMRKIAHLCFGVLKNQTPYMENLLSTT

SEQ ID NO: 166532 - protein, 400 aa, unidentified
MYYLGVDWATEKHDLCLLDEAGSIVQTLEIKQTNAGFKQFKKLVDQYGATTIRINIERSDGLLVDWMLAQQWVVYVTPPVVVAHRRPRRSKSDLSDAYLLAYLLRLNDPDCRPLTRSSATVLHLRELTRALETTVADQRRLANRLSYVLYQYFPIANYLFAHVECLICLAFLEAFPTPQQAHKLTPFRLKQFLKKQNYKNMGRVDAIYGLLQTPMPTAATCEGYVAQVKILIPLLRQLHYTRSHLERELPKLFSTHPEAGWWKSFPGTKGPLTPARLLAWIGDDRSRFPSAEMLQAVAGTAPITRRSGKALSVEFRHACSHPLRKAMDDFARQSVRYSAWAREYRDEQLKRGHNKARAYRALANRWVKIIWTLWQRGEQYDEAKHVANRTHQGVPKLKTM

SEQ ID NO: 166533 - protein, 477 aa, unidentified
MEQNSIPKPPIKGRVVGFDCHPDTFTAALVQGKTPAEAVVQKVFTKVPLSQMLSWAKKHLSPDDMIVMEASGNSAEVARQFRANHFQAEVLESCHLGKLKEAHANNDRISAVRIAKAFLAGTAKIVWIPDAKTQERRDVMHAHRKAVKRHTQMNNRLDSYLSDNGVRLEASLKALEPQIAFAQIRQAKEWSTSQWLIIDSFMAELQAAGHVRQKWEQAMAMEVISDPLLLSLTRLSGLRAISAYCVGAVIGDIARFKRPKSLVNYLGLHPCFDDSGNEQWSGGVGGGHGRKDLRSLLIESAQSILNTTSPLARWGRSLMARKGSRNLAAAAVARKLAIAIWYLLKGKWETLENIDRSLSLKIGKIISKVGSQTLQNMQTDRKTLRQQIEQKLKSGRVYQLDPTLVYKPKPTESTQPLTLAEEHGPEVKRPMALKKNLSALSRSRSTTRPVRGIQPQSAGPRSAPLRASGPQSPDAHP

SEQ ID NO: 166534 - protein, 349 aa, unidentified
MTTQRLSYVGQSVYVGVDVHKDTYAVTCVCNKQIVKTATVKADPAGLTASLSQWFPGARLYTAYEAGFSAFVLHRALTKAGIMNIVVNPASIAVAANDKVKTDRRDSKKLAIDLSDGRLQGIYVPTEDEELARLLPRTRAQIVEHRATIARQIKAKLHQFGLIAPARRRLISNRYLREIDAWPLPPDLRVSLTFLAEQWRFATRQLIEMRRLLREQAKAHPAIEQVYRSVPGIGEVVARTFATELGDMTRFANERALFSYTGLTPSEYSSGPSVRRGHISRQGSSRVRHLLIDTAWRALPRDAVLKEIFDRIAATRGKKRAIVAIARRLTGRIRACFRQGTTYAVGTYA

SEQ ID NO: 166535 - protein, 321 aa, unidentified
MQIPSKALDIGADVGKAEIAFASAKGSFSRRKVPNQRTELKAFLKTLPAGSRIGMESTGIYHELLAELAYKLGFVVFVLNPKDVRHYAKGVGLRGKTDRVDADLIARMIAREHENLHPWIPPTPEQRQIDRLLTRRAKVSRIQIALNQSIKGLTGFGADLKMVNERLDRLVKCIDEKVKALIEANTDRRQQYARLSKIAGLGGVVVRSSVLNTLERVPLRSADAFIAFTGLDPRPDESGHHVGRRRLSKRGPAELRRLLYIAAMAAVKTKLWRPIYEHYRAKGLSTTAALVIIARRVARTAWSVYTHKTDFDPKRVALGLT

SEQ ID NO: 166536 - protein, 385 aa, unidentified
MFQCSGSSQAAVDYNSTIIGAIELSEKKWVLAVQLPEVGRHSRHALDACGDGLVSFIERLKAKCASAGRKIARVILTHEAGRDGFWLARFLARRGIEVHVMQPSSLPVDRRARRAKTDMIDVEMLLRTLMAWLRGEPRVCSMVPIPSEADEEARRANREREDLTRERRSIVNKIDGILATLGIKGYKALRRGRREQMNCVRQPDGEPIPSQAKARIERLLDRLELVMKLIEQVESERDAVLKKDAPADEAERMIRSLTALRSIGPDTATLLVREAFVRQFRNRRALGGYVGLGGTPFSSGGSEREQGIGKDGNRRVRAAMVELAWTWLRWQPESALSVWFRARAGAMGGRIRKTMIVALARKLLVALWRYVNDGVVPNGARLKAA

SEQ ID NO: 166537 - protein, 336 aa, unidentified
MERQYVGIDLHRRTSTIYRMSGEGETLDCVRIVSEPLALAEAVSAAGPEPEVVLESTYGWYWAADVLADLGARVHLAHALGNNWGNRRVKNDERDARDLAAMLRLGRLAEGWIAPPEVRELRELVRYRFRLVRHRTSCKAQVHGVMAKNGVLPARVEMWGPGGSAQLDALELPMAYATRLDSLRRMIDIYDREVVKFDRLIHRQLKNDPGYQAVQHINGVGKVLGAIFVAEIGDVSRFPSPEKLCSWAGLTPKHRESDDKVKRGPITKQGSPLVRWAAIEAVTKYRGGPKLRADYHRIAERRGKFKARVAVARKLLTLVYYGLRDGEIRCLDQQVA

SEQ ID NO: 166538 - protein, 335 aa, unidentified
MQIYGIDLAKEKFDVSFFDLTSKKVSNQPSHKVVKNNLKSIGRFLETLPSDAVLVAEHTGVYGDTLLKCCMDCNVKIAFVGGYVIHRYRATPDRAKTDVLDCALLRDFGERYPDKLKYKTFPEEALYELRQLARHREMLVEQRKQLITADKSEDCRPVRSLVVKRSMDRIKEMLDTEIAETEKEMLKVINGHDSIHHNYELVKSVDGVGLITAVELLVKTENFTKITTARQYSAYAGTAPYEKSSGKMDKGAHISKIGNRRSKTLLYICAESARLHNKEIKLYYERRTLIDKKPRHYVLNAIANKLLRIIFTLVEKGEYYDANFIRQDPRVVKYN

SEQ ID NO: 166539 - protein, 412 aa, unidentified
MDRFVERCAGLDVHKDSVAATVRFPGPDGQRLQETRTFSTTTRGLLTLADWLDSYPVTLVGMESTGCYWKPIYYVLEERFECWLLNAQHLRNVPGRKTDVADSAWICQLVEHGLVRASFVPPKPIRELRDLTRYRKAQIEERSREVQRLDKVLQDAGIKLSSVASRTLGVSVRLMLEALVAGTHDPELLAELARGRLRRKLPALKEALTGRFRSDHHGLLVAQILAHIDYLDETIATLSARIEEVIAPFSRERELLETIPGVARLAAEVLIAEIGVDMSVFPTDAHLASWAGQCPGNNESAGKRRSGKPRQGSKWLEKTLTESAKAAARTKGTYLAAQHARLRGRRGPGKATGATRHSILIAAYHILERKLPYHELGADYFDQRRSHQQRTKRLVRQLEQLGHSVTLEPLAA

SEQ ID NO: 166540 - protein, 321 aa, unidentified
MESAILGIDIAKQTFQVALLVEQKVTTGKFNNTTAGFGMLERWLVKHGAERVHACLEATGTYGEALAEHLHHAGHMVSVANAARIKGFAQSELSRTKTDKADAQLIARFCSVMQPEPWQPPAPEVKELQSLVRRLEALNGMLDQERNRLETAEDIVKESIERVIKHLQQEIKATRKLIRTHINRHPDLRGKRDLLETIPDIGPGTSAMILAEFGDVSRFHDAGCMASFCGLTPRHRQSGTSVRGRSMLSKTGSSRIRKALFMPALAAIRYNPVIKAFRARLLANGKHKMLIVGAVMRKLVYLAFGVLKSGRPFDPSIAAVA

SEQ ID NO: 166541 - protein, 368 aa, unidentified
MNEHITIVGLDVHKATVVAAILPPTATRPTQTVTIENCPKAIERLVRRVAGEGRLVLVQEAGPCGYQVQRQMTEMGKKCVVVAPGLTPVRPGDRVKTDRRDAEKLARLYRAGELTEVHVPSCAEEAARDLVRIREDALEDRLRARHRLNKFLLRQGRMYRETKAWGVAHRAWLRGQRFEWPLLQQTFEGNLRAVEEAEARLESLNQQVLDFAQSGPYRMAVRYLRSLKGLDTLGALTLAVETLDFGRFERAPAYMSLTGLVSSEHSSGGRERRGSITKAGNAHLRRILVEAAWSYRLKNTVSPQLAERRRSCPPEVIQIARKAQDRLHRKFWRLVSRGKPSQVAAVAVARELAGFVWAIAQQVPAAAT

SEQ ID NO: 166542 - protein, 353 aa, unidentified
MMIIGCDFHPSFQQIAYVEQETGEYEERRLNHRGEAEAFYRSLAGRAVRIGVEATGNDRWFHKLMSELGHELLVGDASAIHASAPREQRTDKRDARHILRLLLENRFPAIWQPSAGNEEQRQLLLHRCRLVRMRTRIKNQLDSIAKSEGLTGSRVWSAKRRQQIEALPLTGWYAERRKDLLALLEEMDKRIEPLNKAVKAAAEQNAEAQLLMTHPGVGPVVSLAYVLILGDWRRFPRGKQVGSYLGLIPAEASSGKHQQQMGHVTKQGNTFLRWLLVEAAIKAQSKDPSWHRQYVRLSMNKHHGVAKVAIAHKLAVRLYWMLRSGQNYTQVMERGSHAGQSVHPNGCGLKPSL

SEQ ID NO: 166543 - protein, 456 aa, unidentified
MQTFYLGIDVSKGYADFIILNSQKKVVVENFQLDDTFEGHCLLFELLSRFFRDHPESIIYAAVESTGGYENNWYNALLAFQGSLNLQTARLNPLGVYHDSKAEMKRNVTDKISAKSVAGYMIGHPEKVSYQQQDHLASLRKQWGFVKMLTKQSTQLLNQLESLLYNANPEILVYCKEGVPAWVFKLLVKYPTASNLTKAKVTSIARIPYVSSAKAQAIVLNAKRSVASATDKITQQLVVATVKQILHLKKTIKTQTEIMAKECSVPEVELLKTFIGVIDYSAIGLILNIQSVKQFKTAKKLASFFGLHPKLKISGDGVVVVRMSKTGRTEPRQILFMVAMTAITKNPLISGIYQEHVQKGMEKMAAIGLCMHKILRIIYGMLKHNSAFDPEIDIRNRQKSVQRRKSRKDNKIRRYQDYDPKAPISSWHKTKRMEQRQSQSDNGAEYGILAPVPFPT

SEQ ID NO: 166544 - protein, 409 aa, unidentified
MDVVHARCAGLDVHKKSVYACVICSEANGEKRQEKRSFGTVTADLLSLADWLREHAVTHVVMEATGVYWRPVWAILEGQFELMLVNPHHVKAIPGRKTDAKDCEWIAELLQHGLLRGSFVPPTEIQDLRDLTRYRVELTQAQNRVTNRIQKLLEQANIKLSSVASNALGVSGQHMIEAIIAGVEDPERLADLAQRRLRGKIPELQLALEGRVREHHRFLLREFLDEWKALGTRIRRIEEEIDRRMVPFEEAVRLWRSIPGMDHVTAYNLVAELGVNMAQFPSAQHLASWAGLCPGNNESAGKRMSGTTRNGNKWLRRTLCQAAWAVTRKKDCYLSAQFRRLAARRGIKRAVMAVAHTMLIIAYTMLKTGRTYHELGGSYLERVNADQLQRYYVKRLQKLGLTVTVAPAA

SEQ ID NO: 166545 - protein, 381 aa, unidentified
MPTLVIGLDPHKASNTIAVLDAEETLVARRRFENTADGLVAMLDAVSGWSERIWAVEGANGIGRSVAQRLVAAGEMVVDVPAKLATRVRVYSTGHGTKTDDTDAVAIARAALHSRRLRMVRPDDENVALKLLSDRRHELVGSRTQSVCRLHRLLRELVPGGMPRALTAERAEALVTGLEVSDPASLMRVELALDHIEDMKRFDRRIDDVTLKIHAAVKASGTTVTRIYGVGAVSAGLILGEVGDISRFPTRNHFASDTGTAPVAVSSGDQNRHRLNRAGNRRLNHAIHIAAIAQIRYDNPGRAYFRRKLGEGKSRREALRCLKRRISDAVWRQLQLDRETDQHQDRSWPRWPSSRGDFPSYRSPDTPRQNGQPKKVKTMPA

SEQ ID NO: 166546 - protein, 330 aa, unidentified
MKKWNFILGVDVSKLTLDVHCAELNEHIQIENGTEGFKKLRKWFKQFGIDPTKSIMVMEYTGGYEYKLIQFCQSFSIPYTRIPGLEIKNSLGITRGKNDQVDARRIALYTEEKIKKISASKPLNKRILCLKELLAFRKKLVRQAAGMKASVQERIFMSEVPQKDLIRSISEDKIRRDNKDIEKVDKALQELIKEDESMLLNYRIVKSIKGIGPVNALMTIAYTENFTSFTNPRAYAVYAGVIPFDHSSGTSLKSRRRVSHLANKELKQELNQAAKTAIIWDKDLSEYAARKLKDKPYPLVLNNVKFKLILRMFSLVKRGEPNVDNYQKAA

SEQ ID NO: 166547 - protein, 432 aa, unidentified
MKAVVERCAGIDVAKKTLNVCVLTGAADLEPEAELGLFGTFNADLDRLRNWLLEKGCQEVVMESTGSYWKPVYAALEGSGIEVKLANGEDVKARRGHKTDWDDCQFLANLLRHGMIRASFIPPQAIRDLRDLTRRRRQLCGAAVSERNRVQKVLEEANVKLGSVLSDVFGVSGQLMLEKLLDGEPDVGAIAELAQRKARQKIPEIRQALEGHRLRDHHRRMLRLSLEHIAFLEGQIGVIDEEVGKLIEREGYQGSFDLVRSVPGVQEITAAALLAETGVDMNVFPSEGQLSSWIGVAPGNRISAGKNKSGATTRGNRWARTTLVECAWAAAAQKNSVLQERFRRLSVKGRKVALIAVAHQLAIILHRTLSSKLPYQESAQPLPDERKRQRLIRHYVRRLGKLGVTVHSLRPDTESHHKTKTGTTIHRHHGEP

SEQ ID NO: 166548 - protein, 347 aa, unidentified
MKKIIIGIDVSKEKCDATAILSENGIFEVSKLDYISFENRPCGFRRLLSWSRKLVKGIADDEILFVCEATGAYDHSMCEYLYSKGMDIWREAALKIKWSSGVRKGKNDTADSMMIAEYAIRHMDKMLLYESPDKRIVEIRALFLYRRRLEQERVSKLVRIKELEATAGKSEAVAFILRDAKKCVRMLEKSIQECETRMRQLIKEDEELNKNYEHLNSVKGLGLINITALMVYTNNFKNFRTARQMASYWGVASFRCQSGTSIDRRCDVRKLSNPMLKEYITQAVIHTVTENGIFHDYYSRLIERGKPKQVALNNAKNKLLHLAMSLVRNDRDYDKNHMTLHTEKVYM

SEQ ID NO: 166549 - protein, 342 aa, unidentified
MNLPIRVGMDTSKSVFQLHGVDENEVVVVRRQFRRAEMIRYFERLPPVLVAIESCGSSHHWARLLQSFGHVVKLIPPQYVKAYVKRGKNDAADAEALCEAVTRPSMRFVPVKSKERQAACMLMTVRERLVSVKSQLSNAFRSYAAEFGIVGPAGRQNVTALIKRVLEDNSLPEMAQDLFRLQADEYAAVEARLAKIEAKLMKWHREDDVSRRIATSPGVGPIGSSMLSMKAPPPETFRSGRDFAAWLGLTPKDHSTGGRQRHGGITKAGDSVLRSTLIVGATALLRHIRKGRHKPTPWLASLLERKPPKLVAVALANKFARIAWRLMISGGVYNRPVAAMPI

SEQ ID NO: 166550 - protein, 304 aa, unidentified
MNGIGIDVSKRQLDVGTTDGETLQVWNSRSGFSELDDWLKKRPVSQIVLEATGGYERPVLDFLHAAGHPVVRANALRARRLAQGMGQMAKTDRLDAYALAQMAALVKLPAYQPLEPWQQKMREFVRARRQAMHALTIARQQQEMVGDRELRRLLQANITRLQTLVERLGKQIAEQVAQQPQLAVLKSMKGVGSGLQAVLASYLPELGKISGKAIASLVGVAPMSHDSGTMRGKRSIHGGRAEIRQVLYMAAMSAMRHEPRLRDFYQSLRARGKEGKVAIVAVMRKMLVILNARVRDARSRPIPA

SEQ ID NO: 166551 - protein, 340 aa, unidentified
MPLYGGIDLHANNSVVVLLNEQDQVVYQKRLPNDLPTILEVLAPHHAEIKGLVVESTYNWYWLVDGFMEAGYRVHLANPAAMQQYSGLKYSDDHSDARWLAHMLRLGVLPEGYIYPKAARAVRDLLRKRAHWVRQHTANVLSVQNIMVRNTGARLSVKRIRELPKKELEGLLPEADQVLAITSSLAILDCLSQQIKALEKIVHQRLHHTPSYEQLLTVNGIGTILAQTITLETGDINRFPTVGNYASYCRCVDSNKISNGKRKGQGNVKNGNPYLGWAYMEAAQFALRFNPSAQRFYQRKLAKSNNNTTLARKAVAHKLSRACYYVMRDLVPFEATKAFG

SEQ ID NO: 166552 - protein, 370 aa, unidentified
MNATTFVGLDVHARSIKAVALDAMTGEVRSATFGYDACAVAEWARSIDPAARCVYESGVTGFDLQKKLAALGVDCVVGAVSKMIKPAADRRRKNDRNDAEFLARMLSVGNVVEVWVPDDECEAARDLVRALDDAREDLKRQKQRLSKFLLRHGLVFDEVNAAGQRKGNWTGAYWSWIKSISFGEKADNDAFAFYVDAVRRAEEDKKRLEKLVADEASGPRWKKKVDSMRCLKGVDVMTAADIVFEAGEFARFRNARSFAAWLGLTPSEHSSGEKVAQGGITKAGNKHLRRVMVEAAWHYLNASPHSKGLAPGQAPDPAARRHASKGVRRLVERRAALLERGVHKNKANVATARELACWCWAVGLMAEGAR

SEQ ID NO: 166553 - protein, 493 aa, unidentified
MVLTRPFFSVVMGHVGDIGEPVATDIPFERVSITTYPNQRDIPTDMMEDVMSKRKQSKLELTHPNAAGIDIGAASHYVAVPHDRDDEAVREFKSFTADLNDLADWLEACGIDTVAMESTGVYWIPLYELLESRGLTVYLVNARHVKNVSGRKSDVLDCQWLQQLMSFGLLSGAFRPNDEICALRAISRQRDMLIRYQARHVQHMQKALAQMNVQLANVISDIVGVTGQKIVRAIIAGERDGGELAKLKNKHIRASKEEIEKSLRGNWREEHLFALKQAVALYDAYNDRLNECDRELEIMLGALQVHEVEPEQKKRRSNVKNTPKFDLRAHLIGMCGVDLTRIDGIEVTTALKVLSEVGADMSKFKSAKQFASWLGLCPGTKISGGKVLSGASKRTANRAAQALRMAAVSLKSSQSALGAYYRRLCGRLDKAKAITATAHKLARLIYTMLTKGTEYVDKGQDYYEERYRQRVLHHLTVRAQKLGFNLTPVPEAV

SEQ ID NO: 166554 - protein, 340 aa, unidentified
MGIVGGIDIHRRQLTFDIVDLATGENLRGRVSPADRVELRRFLAGLDDAGGDVAMEGCTGWRYVTEELERAGFRAHVAEPADTAALRGNKRRAKTDRGDARHLRKLLMTGELPESWIPPRHVLEARGVVRLYKDLADQRVAWTQRLHATLYHQGIPMLGCPVASEQARTLLHDAELSPAARRAVEVALAQIEVVNEMLAPIKLDLARLSRHQPGCQALTAHYGIGPVTSVAIWCEMGDTRRFSSSSDAVRHAGLDVTVYQSDSNRAKGHLARQGPGLLRWALYEAAMSSTKKASPDHEYFCSLRERLGTQRAALAVARKLARWCHHALRAAGDDAWAEAA

SEQ ID NO: 166555 - protein, 444 aa, unidentified
MKTELPNIYEQAAGIDIGADKIFVCAKDGEYQVFGCFTKDFQKAAAYIKENGVSRVAMEATGVYWIALKDVLEQEGLVVDVVKAGDAKQLPGRDKTDGSDCQWIRTLYQKGLLRPCVISDAAIRELRTYVRMRQDHIEMAAQHVQQMQKALIQMNIRLPQVFSDIMGASGKRIIEAIIKGERDPEKLVLLCDRQILKNKKEEVVLALEGNYREDYLFLLSQAYQGWQFYNELMKECDKKIDEWLERHTKDKAPLEKVTPAKSICHHKLDIEKLHEKVLLLNDGKDITRIPGFTDYTVLRLVAEVGTDMSKWKSAKHFVSWLGLAPKKRYSGKGKRHYRGIANTKAAQILRESAQALLRSKHCALGSFGRRIRSTRGPAIAIKAMARKLGILFYNTLTKGIEYVEQGIKKYEEQVRQTELYKVTKWAERLGYTLIPNQQINVVHQ

SEQ ID NO: 166556 - protein, 336 aa, unidentified
MNEATWFLGIDVAKRKLDIALLVTDKIKSKVFDNNTSGHAALTRWLIERGAIQSHTHICLEATGPYSEALAIALVDAGWHLSVVNPARIKGFAQGELARNKTDRADASMLARFCAAMRPGFWTPPSSEWRELRGWVDRLQALKDMHQQESNRLEAHLASGQAALVEAVQTHLDWLTKHIEQLERDIDDHIDRHPELKRDAELLHSIPGIGNTTIAKVLAYAGDVRRFASAKALAAFVGVTPRQRLSGTSVKGRSMMSRTGHADLRRALYMPGLVARRHNPLLKVFGDRLSAAGLAPKAVVGAVMRKLAHLIYGVIKSGQPFDPKFSTARLDFQDGI

SEQ ID NO: 166557 - protein, 372 aa, unidentified
MNYNTVYVGMDVHKESFTLCSMTIEDEKASHYQKTEADYKKVLKYLEFLRTVYGNDANFICGYEAGCLGYTLYHQLTEHDVNCVILAPTTMLEQRSKRRIKTDRRDAEIIGKCLAQHNYSPVHIPTATDEETKEFLRMRDDHKLALKKVKQQILAFCLRHNYRYDGNSHWTAAHIKWLKSLSPEALYKEILDEYLLTYTTLSDKVERLDKRIEELASKDEYRESVKKLCCFIGIKTHTALSVLVEVGDFQRFASAQNFASYLGLVPGEDSSGDGQTRLGITKAGNRHVRMLLTEASQCYARGQIGFKSKELKSRQAGNSPQVIAYADKANERLRRRYYKMVLGKSKKHNVAKTAIARELACFMWGMMTEHIA

SEQ ID NO: 166558 - protein, 391 aa, unidentified
MIYIGIDVAKDKHDCFITNSDSEVLFKAFTIFNNLDGFNDLYQKIESVMDDVTKVKVGLEATGHYSYNLLGFLLDNGLPTFVINPLHTNLYRKSLSLRQTKTDKVDARTIASMLMSDVNLKSYSDTSYHNEELKSLTRYRFDKVKERAKLKTSVSRLVCILFPELEKLVPTLHMASVYALLSEFPSAKHVATAHLTRLTNLLSESSKGRYGKDTAITFRDSARASIGSNMPAKSLELKHPIKLIQELDSEIDEIENEIKIIMDEINSPILSIPGINYRMGAMIIAEIGDFNRFDSPDKILAYAGFSPSTYQSGQLDGAYAHMEKRGSRYLRYALYNATKYVCHWNPTFAAYLAKKRAEGKHYNVAISHAVKKLVRVIYHLEKTKQQYIKAA

SEQ ID NO: 166559 - protein, 436 aa, unidentified
MKRHLPILDAKAAFVDVGSERMHVSVGGDEPAVFGTVTSQLHALRDWLLAQGVHSVAMEATGVYWLPLYGVLEAAGLDVRMVNGRQTRNAPGRKTDMQDAQWGSTLHMHGLLRAGFVPTADIRRLQDYLRLRADHVGQAGSCVQLMQKALERMNIKLHDAISSLAGASGMAVMRAIVAGERDPAALLALCDVQIRRAKAELVKETLRGTWCDEHVFALAQALQSWDHYQRLIAECDRRIASVLPPHDPTLPPLAGPAKRGGANAPEIGMLREILAQMCGGRDLTQLPAHTPYGVLQIVGETGTDLSKWATEKHFAAWTGLAPGNHDSGKRRARVKRRRNRAGQLFCMLAVSLVRSKTIALGAFYRRMAARRGKAVANKALARKLAVWFWRVMVKGDNFVEQGIAHYEAQVRKGKERTLRRLASEFGQRLTPIDCTA

SEQ ID NO: 166560 - protein, 315 aa, unidentified
MSEKGYIGIDVSKNYLDVFVLSTQQAFKYPNTQSGIKDFLNKSKAFSHFQVILEATGGLERPLVEALGIEEREVVVANPKRVRDFAKSMGFLAKTDKLDAKILALFGERIQPSVYQSKPKIAATLADYQVRAQQLTQMLVAERNRLHTASAIIQKNIEANIAHLKEEIIKIEKEIEILIVSNKEYQERQKLLISVNGVGQKTALALLAHLPELGSLNGKEIASLVGIAPLNRDSGQFQGKRGIWGGRSQVRKALYMATLTACKYNPKIKEFYERLCNAGKMKKVALVACMRKLLVILNAMVKNNQPWQETIIKSC

SEQ ID NO: 166561 - protein, 349 aa, unidentified
MEQIGIDVHKNESQICMLTAEGEVLEPRILTRRDRFAAVLGNRPRARILIEASTESEWVARCLEELGHEVIVADPNFAPMYATRSRRVKTDRRDAQALMDACQRGSYRPAHRTSEPQRRVRALLAVRDHLVRTRVREISLLRSLLRREGLRVRSGAAYSFAERVGELEVPEWLRLGMGPVLATMEPINQQLEEVERSIHRIVQGDPVVQRLSTAPGIGPVTAVAFVAALDGVERFDGAHQVECYLGLVPRERSSGEKQHKGAITKAGNPRMRWLMVEAAWRVLISHHSNAEELRRWAERIAARRGRRIAVVALARRLTGILYAMWRDETAYDPRRACGRVTPVPTEAVA

SEQ ID NO: 166562 - protein, 390 aa, unidentified
MNEPTNNKHTMKKSLLFVGLDVHAQNITLALAEGDGSAARLYGTIPNDLHALEKVFAKLKKAHPGVELRVCYEAGPTGFVLARRLGQLKIACTVVAPSLIPVRSGERIKTDRRDALKLARLHRAGELTAVHVPEASDEAMRDLCRARTDAVQDLRRGRAQLKAFLLRNGYRYTGKSAWTEAHRRYLRELVLPHAAQRVVLEDAIAAVGSAGERIARLEEQMSALLESWPMKPVVQALMGMRGFARVGAMVLVSELGGAWRFDHPRQLMAYLGLVPTENTSDQKRRQGGITKTGNSHARWLLIEAAHHYRLSPKVSKELSVRQQGLSPEIKACSWKAQTRLHQRMMQLQARGKQRNKVTVAVARELVGFVWQIFQLMAPRMTQTQDAAVQS

SEQ ID NO: 166563 - protein, 384 aa, unidentified
MKVVCGLDVHKDSVFCCILCANGEKIQHKFGVLTEELVTLRDLMVSEGVEECAMESTSIYWIPIWRVLEGSVKLHLVNPYFIKQLPGKKRDVNDAEWIATCLSKELIASSFVPDDKIQRLRQYDRRIFDLNASISRNLVKLDQCIQRCNIRISNYISTTDSKGYRSIVKLISQGVTDAEVLVKELHGRTINRHGRETLVKALTGVVSETDIDIIKQLVEEIELQQRHKDEAQQKMTALCMEWFPQEVENLQTIPGVKERSATSIIAEIGTDMTHFQTPKKLVSWVGLRPRNEESAGKIKARGITHGNRFVRKTMIECSWGAARMKDSFFAEFSYRQCIERRKNKMKVQVAIARKILVAVWYVLSQGTQYIKPTDHYTAAHMTAV

SEQ ID NO: 166564 - protein, 336 aa, unidentified
MNKFKTFIGIDVSKKTFDAAVLQDTDPQQIHHHSFAQNAPGYASFYQWLQDQGDTSQVLVCLEHTGVYINGLVEFFVHYELAVWVEMPLRIKKCMGLQRGGNDKLAAIHIAKYAWRYRDELRLWQPTDTHLEELRHYIAQRDRIVMALTQLNVPVEELAEVGQQKHSQRLARLQAPVIRSLEKSKAKIEITIEELIESDIKMKAIVERVSSIKGIGKQTAINLYVYTKGFTQFENGKQLACYCGVVPFTKSSGTSVRYKTGVSPFANRKLKKLLHLCAMAAIRWNEDMKQYYERKVKEGKNKMSVINAVRNKLVLRVFAVVREERNYVEKLYPASA

SEQ ID NO: 166565 - protein, 423 aa, unidentified
MNTSKDNTSVQSAPAAWIGLDWGDKEHAFAIQDAAGASEAGTLAHSAENLHAWLKTLGERFGARPIALAIEASRGAVIHALLEYPWLMIYPINPITSARYRSAFTPSGAKDDLPDAKVLLELVRDHAAKLRVLESQDPVTIKLAGLVEARRKLVDRRTQLILQVQSLLKSYYPQALEVAGDLKSEVALAFLNRWPDLISLKAARPATIKRFYYLHQVRSQDLITQRLALIAQAQALTTDAARVEVAVLHLRALLDQLKVFHQHISRLDEAIHQTVATHADRDLFRNLPGAGRQLAPRLCVAFGTLRSLYPDPASLQKYAGVAPVREKSGNQVWTHWRWQASTFLRQTFVEWAGQTVHYSEWAKVYYQRMLKKGKKHAVVLRALAFKWIRVLWKCWQDRQPYDEARYLKQLIRRKSPNAVPAKS

SEQ ID NO: 166566 - protein, 387 aa, unidentified
MSQVSDLSRSLVPFDQNITLTVVVELSEASWLVAGLLPGVDRQPVKKQEPEPVALLRLLERWRVEAVRAGRTIGRIALAFEAGRDGFWLARWLQARDIEVHVVHSTSVAVSREHRRAKTDRLDTAMLMRVFLGWLRGERGHCRMVAIPTLEQEDAKRPSRERESLVGERTRIVNRMKAALARLGIRGFKPTLRKAPQRLDALRTPEEVSIPPNTLDEIRRDMVRLAVVREQIDVIERARLARLEQAPAAGPHAMVRLLARVIGVGLETADMLVQEVLSRNLRDRRAVARYVGLTGSPDESGRRRREKGLAKAGNARVRRGLIQLAWRFLRFQRDSTLAQWYRTRTGGPKGARKTTMIVALARKLLIALWRMVTIGEIPAGVALRQVI

SEQ ID NO: 166567 - protein, 465 aa, unidentified
MKPHRRPHRKQPASGPSLLERLNPNAAGIDCGSAMHYVAVAPDRDATPVRAFTTFTTELHRLADWLTACGVTTVAMESTGVYWIPLYEILEARGLDVVLVNARHVKNVPGRKTDVVDCQWLQELHSVGLLRGSFRPTAAIAALRAYLRHRETLVQGAATHVQRMQKALVQMNLQLSIVISDITGVTGLRIVRDIIAGQTDPHALAQHRDRRCQASAAEITGALTGHYRPEHVFVLQQNLELFDAYQRQMAACDAAIEAHVHALAAQAPAPARPVPAPRTKKKPRDNEPRFEIRSPLHQLTGVDLTQIDALGPYSALRLLGEIGTDMSRWPTEKHFTSWLTLAPHNKISGGRLLSSKTQPSANRAAAIFRMAAMNLGRTETALGAFYRRLAYRVGKAKAITATARKLAILVYRTLKDGLHYQDPGAAAYDAQHRTRVLHRLRQRAANLGFSLLNRETGELLEDAVS

SEQ ID NO: 166568 - protein, 334 aa, unidentified
MKELKSCVGIDISKDSFEVCIRQLKDDRSVIKATRSFQNDYPGFEKFLSWTLSKVSNPIFVMETTGVYHEDLTHFLYESDQKVSVVLANKMKHFAKSLNMKTKTDKADAQMIAQYGLERPLEWWKPMMPQMKDLRDLCRERLSLKKDLVRSKCQVHGLRHAHSTLDVVLKLKEQQIEFLEKNIQIIETEIIRITEQDKEFNQRVKNIEAVKGLRLLTIVTVLCETNGFTQFNNIRQVVSYAGLDIAERQSGLFKGKTRISKKGNARIRECLYMPALSATSYNEPIKALYERVVELNPTIKRKGVIAGMRKLLILIFVLWKKNEAYNPGFQWAAH

SEQ ID NO: 166569 - protein, 405 aa, unidentified
MQAPTVSTPITDHISTIFVAIELSQKTWLVTMHSPDKDKISRHKVPGGDHASLLALIDRVRDRAARTLGAVPAVASCYEAGYDGFWLHRLLMAAGITNYVIDPSSIAVDQRARRVKTDRIDGEKMLRTLMAYLRGEPRVVRIVRVPTPEQEDARRATRERDRLVKEQTAHTNRIKALLRLHGFAVGNPRRRDWLTWLAKQRDWQGQGVPPRVLSEIENEHGRLMLVRKQLDALERAPAAVDPTPAAAEMARRSELLQRLKSLGPAFATTLTQEVFYKDFRNRREVASYFGLAPSPWQSGGIDRDQGISKAGNPRAAAPRSSCPGCGCGISRAASSPSGTGNARSRPASASSASPSWPWRASWWWRFGATSQPVLCRQGRCSSRRRRNDLTNASASRHLPRSARDG

SEQ ID NO: 166570 - protein, 407 aa, unidentified
MSTNTNVFAGLDWAVHTHAVCIIDASGAVRDRFEVAHDRQGLAELMRRLARFGTNVRIAIERPSGLIVDALVEAGHQVFPIHPNAVKASRPRYRSHGAKSDASDAYLLADLLRTDGHRWAALSPQSDSIRALRAQVRSRDDLVTTRVALGNQLHSTLEAFWPGAACIFADITSPIGLAFLRRYPSPASAARLSEAQLLRFCRAQHYSGRRSPVELLARLRAAAQALPGKLTTESMAQVVRSLVAVLNPLVAQISGLTRRIENFVESLPDGQIIMSFPRAGRVCAAQILAELGDVRERFSTFDRLAAEAGTVPVTYQSGKTRSVTFRWACNHRLRQAITCLADNSRHANAWAHSLYAAARARGCDHPHAIRILARAWLRVIWRAWTDRKPYDPKLHLAALKLASNTGG

SEQ ID NO: 166571 - protein, 333 aa, unidentified
MKILKQSIGVDVSKNDFKVCLGIINDGLEKTIVYESSYANDKKGIKKFIKDAATKTCHPIPSLFIMEATGVYHQELAYALAANHLSVAILLPNKAKSFAKSINIRAKSDVIDAKLLCQMGLERNLSTWQPPEAIFATLKTLTRERETIVLQRSKLKNQLHAYKTAFIKTDKTISRIKKHILFLDKQIKDTEIDMKLLIKHDQRVETKIKKISKVKGLSFLSIVTILAETDGFNIIMNQKQLIGYSGLDVRVDQSGEKNTKGRITKKGNSHLRKALYMPALNACRTNKTMQVFYTRLNERQKAKKQGIIAVQRKLLLLTYSLWKTDQDYLENCA

SEQ ID NO: 166572 - protein, 420 aa, unidentified
MKVYNVNDFAALIGIDWADTKHDICEHPNLTKKYQYTIIKSKPEALHEWAMSLKQRYPNQQIAVACELKKGPLIYALAKYNHLTLFTINPSTVAKYRKAFTPSGAKDDPTDAFVQVEILTLHMDKLCVIEPESAAIRSLAQLVEYRRSLVQDSVDLSNKITAALKNYYPQALEWFKEKDTFIFCDFVSKWPSLVHAKKAKKQTLLSFLNTHNSHYPDVNEARILSIKNAMPLTDDTGVIVPNQMLVEVIITQFKVLLKGIETLDKAIKLAYKAQQDNIIFDSLPGAGPQLAPRLLVAFGCNRDRYHDASELQKYAGIAPVIERSGKKMWTHWRYSCPTFLRQTFVEWAGFSVRYSFWAKAYYDQQKSKGKPHNSIIRALAFKWIRIVFICWKTKKPYDESKYLEALKRRGSPLLKYAINS

SEQ ID NO: 166573 - protein, 350 aa, unidentified
MLIIGCDYHPGFQQIALVETDTGELSELRLLHREEAEQFYRNLQEQGRKARVGMESSGHARWFERLLQELQFELWIGDAAEIRTKRVRKQKTDRQDAQLLLKLMMEERFPRIWVPDAENRDLRQLLWHRHRLVQMRTRVMNQLHVVPLNEGLRRKKALWRPAGRKELESIALAPWASRRRQDLLDLLDQLTPKIQELTRALEEEVEKRPATRLLMTHPGVGPLTALAYELVIGTPERFHCGKQLASYVGLVPTEESSGDRRRLGHISKQGNVLLRFLLVEAAQVTVRSQPEWRSTFFHLALRRGRKIAKVAMARKLAVHLYWMWRQRLDYGQLHKLGSHAGEPGNPDGEQ

SEQ ID NO: 166574 - protein, 418 aa, unidentified
MSREKRKVCGIDVHKRFLVATILDREGTSETRRIQQNAESLLEFRRWILSENCDSAAFESTADYWRSLYLVLEGHVPVTVANAYHIKHVPGRKTDITDSRWIAQLELNSLIGPSRIFSGDLYDLRSLTRSRELLVQNRTELKNKIHHLLDSASIHLSSVLSDLFGKSGTIILNGLVQNKPFEEIIKSLPKKMRGSADAIAATVPASIPQVTLVLLQSYLKLVDDLDNEIKLLEGRIRESLAGKSREIQILTSIPGIGFIGASTLIAEIGNIHDFEDADKLTKWAGLTPSVYQSANVTRTGSITKQGSRHIRWILVELAHVAIRSPGRLKSFFERLMPKKGYKKAIVAVARKMLRIVWHLLVHDEVFADEVPRSKQVKFPKMPKKIQAFGITRIIDLLSKASEVIIRDQDREIFRIGPD

SEQ ID NO: 166575 - protein, 336 aa, unidentified
MSRYLGVDLHRNCFTVCTRTEGGRSYLREWKLKDLAWFASKLRCKDEIAVEVTGNTRLFYDAVVGKVSRVVVVNPNEFKVISHSVNKTDRNDARKLALFLSKGLLPEVRMKDKAHAQLASITQTRDKLVKLRTALKNKINNIVSAHGINLKKEELSSEKGLKKVSGMMFDPMVDLEVEVLVNQIRSLNKSIFELEKAIKEEGSKLEGHKNVKSIKGIGDIGAGILLSVIGDVNDFANEGKLASYFGIVPRVSNSNETERSGRITKRGSKLGRTTLVQCSLIAKRYSPYLNRYYERIKARRGGGKAIIALARKFLGIVYKTLKNNWVWEDFPNGVLA

SEQ ID NO: 166576 - protein, 363 aa, unidentified
MQYHNDTELSSLEETRCQFNGGKCVIKLGIDVHQEFYVVVEQVGGNNPKPPQRFGKGVFLGWAAKLKRPAAEVHAVYEACGFGFTLQRQLVALGIKCYVVCPQKLDERNKRVKTDSLDAKALCLKLDRFVEGNRDALALVRVPAEKEEQLRAIHRQREQLVKARKQLEAQGRSLMVNHAIEPVQQWWKRRAFAQLQVPQWMRTLLLNSQPILLVLEEKIRALTVQRQSAATPNQPRGLGQMTSVVIDREIGNWHRFNNRRQVGSYTGLCPGEYSSGNTRLQSCVTKHGNPRLRAALVELAWRMVRFQPNYKPILKWRALLAKGRLASGAARKKAIVAVARQLAIDLWRFRTGRGTPEQVGLTI

SEQ ID NO: 166577 - protein, 391 aa, unidentified
MFAGIDIASERHTLARLDDTGAPIGKPVAITEDREGYDALLKALSPAPVLVVMEATGHYWKNLFATLTAAGHDFALLNPFVARRFQDSSLERTKTDAIDAHGLARLGFEKRPAPARLHDEVAESLREMVRHRDRLRQDFDDRVRQLHRLVDLGFPEFTRYVRTLDSMLATCLLAEYPTAQAFARANPRRLARLRYDGRHLIGAELAEQLVEAAKRSIGQHHGPAYTLQARHICQDLDLWRRRLADIERDIENLLDTHEVGKLLTTIEGIGPQSAARVIAAVGDPARFRSAAAFAAYVGVVPGLKQSGKRTSARAAIGPLGNARLRMALWMPVLGAVRRNPWLRAFYERLRAAGKPPKLALVAAMRKLLHAVYSVAKNRKPFEIRTEQARAA

SEQ ID NO: 166578 - protein, 472 aa, unidentified
MFSWLGHLRVLPVSNARLFGVLHLVDALIHSEMKGCVTVSKFFNDFVVGIDVSSEFSVVAMLEPNGSLIRKPFRIDHNPKGFNKLLEILKKEEERLKQKPIYFVESTGIFHLPLFFFLRSNDLKGFVLNPLCVHSTKNFDLRKVKNDAKDAESIARLAKFQEVKYSLVPEPKILALRMMSREYYAMSDMLTEIKNRLCTDLYLLFPGYIDVFGNPFGKASLEILKRYPSPRSLSEADPHELAIMISKISRKTVPWAMKKVETLLEVTNHAMSMPMEFDILSLKIKAHVENIESFQDRLEGIVKQLKAMILSSDFPAKERCYIRLLEEMPGIGFLTAVTLIAEIGDFSKFHSPKAFVAFFGIDPSVNDSGKFRGDRNKISKRGTRFGRRVLFTAALASIRTTRKGDAINSILRDYYHKKCESKKKKVALVAVMHKLLHYIFAVLRDKKPFALRSPEDHQTWRQSKELALKLVA

SEQ ID NO: 166579 - protein, 354 aa, unidentified
MSRILAIDLGKFKSVTCLLDSDTNQTEFWTMATDRHYLLAVLKNYTPDLVVIESCGLAGWVHDICTEEGYEVLVCNPNQEAWKWKNVKRKTDRDDALKLAKLAALGQLVPVYVPSQQQREYRRLVKYRKVLVGRVNRVQNNIRAIFAQRGIDMVRGQKAWALERHDQIAEHRKPLAECALDELWRGELDLELQQLASLREHQHEVHKKLKSLAAADERVQLLQTIPGVGRKTAEVVVAYLDDPHRFQNARQVSSYAGLVPRRYQSGEMDRQGRINKRGPRQLRSALVEAAWLMLRYNPWAKSVYDRLTSGQKTRKKKAIVAVARKLLVRCWVMLLRKEPWKETPTTNTVAANAA

SEQ ID NO: 166580 - protein, 486 aa, unidentified
MSALEASSLGRCATSSGSEQHIRQSSRKGTPVQLWCGIDWAENHHDVSIVDESGRQRVRLRIDDTAAGFAQLMSVLGEQQAVSSEPITVAIETATGLLPAALRAASVALVAINPLAVSRYRDRHSPSRSKSDAGDAYVLANILRTDPHSHRPLPVDSELAQSIQVLARAQQDAVWDRMQIANKLRSVLREYYPTFLAAFDDLASKEARATLRLAPSPEQARLVRKSSLSAALRRAGRTRGIPAAVEVIHAALHVEQLRQPTLVESAMAEHATALLRALDTAVANVARLEQSLTVAFDQHPDAQIITSFPGLGSVLGARILAEIGDDRSRFASARGLKAFAGTAPVTRASGMKTLVTRRVVRNKRLGQAAYLWALPMLAHSPGAHAHFTTRRERGDSYSAAARNLTNRGMGMLHHCLQTRQRYDETRAFPNRPEQSVTSGRPPARNAHQETEAHPATPGNNRARKRPVTSIAPPANQARPKTEAQPA

SEQ ID NO: 166581 - protein, 372 aa, unidentified
MFNSIVYVGMDVHKKSYTLCCYTFSDDEVKYKQKIKADYRMILKYIEGVRDRYPEGSTFLCGYEAGCLGYSLYHELTDHGVDCKILAPTTMAVTNNRRVKTDKRDAANIARCLALKTYSEVFVLSDEDNAIKEFIRMRDDQMKMLKSTKQQILAFTLRNGFKFEGGKTHWTIKHKQWLRTLKLDGVFQETLDEYLVAYECLVDKIERLDRRIEELALGEKYEENVKKLSCFIGVKTHTALSFLVEIGDFHRFARANNFSSFLGLTPGEDTSDERRNGLGITKAGNGHLRKLLTESAQGYTKGQIGYKSKALKARQKGNSSEVIAYADKSNERLRRKFYKLTLNNNVNRNKAKSAIARELACFMWGMMTDNIA

SEQ ID NO: 166582 - protein, 424 aa, unidentified
MNFKMQNKQNQLIERITAQHLVVGVDIAQHVHVARAVNFRGIVVGKPLSFENNEEGFTRLLNWIQELKQMKNLDTTIVGMEPTGHYWINLSKWLVKQNMDVVTVNPHHVKRNKENRDNTQSKSDKKDALVIADMVKNGYYTFVRSTSESFEKLRVLMANRDVIVKRLVSSINQINRWVDVVFPELRQVFKDVSCKGAIATLRLFPTPAELCSLQPQDIVTGWKSCMKRHSGHKKARSLLVLAKRSIGTKQALDAYKLHLGQLLEEYDLASSQLERVTQEVTNVLEQIPFVKQILTIKGISEISLAGILGEAGDLSGFAHGNALLRHAGLHLAEASSGKWKGQIVLSKRGRSRLRRYLFLATMSLVMNNPEFKALHSKNVKVKKIKKMKSIMKLCGKLARVLVGIARNGSAYKPEMIFPLEQLAA

SEQ ID NO: 166583 - protein, 346 aa, unidentified
MTVTIVDEARAVTGGVDTHADTHMAAALDTIGGLLGVQEFPATPDGYARLLAWLRGFGTVHLVGIEGTGSYGAGLARHVAAAGIRVVEVDRSDRQDRRRQGKSDPLDAVSAARAAQSGRASGAPRGRDGQVEAIRALMVAKRTARAQRTQAINQARALIITGPDGTRARFTGQTPAGLVAELAALRPRPGSMVRYHTLLSLRELGRRAQFLDAQLERLDELLIPLVTARAPGLLSLYGVGPDTAAMLLIAAGDHPGRLRSEAAWAHLCATAPIPASSGKVTRHRPGRGGDRQANHALWRIVITRMGSHPPTRGYVARRAKEGLSKPEIIRCLKRYAAREVYPHLRG

SEQ ID NO: 166584 - protein, 341 aa, unidentified
MKNLFIGVDFSKEKVDVAIIFADGLTETAARVFNEFKTTVSGYKQLVKWVEQNSYGIDSSLWLFCGENTGDYSKGLCNFLYGKGYDMWLENAKSIKDASGLRRLKSDRADASMIAEYAMRNYDKAVMYEPLSESLAQLRELFLYRQMVVRYRCSFQVRRGEKRLTMEKSPIKTMISQSGRHIVSELNKEVEKIDKRIAELIKSDEELTEVFTSVTSVPGIGTQNAVCLMVYTDNFRRFNYDSRKIACYYGIAPFGKDSGTSVHSDPHVHYMANRQIKAMLTQAALAAVKFNPVMARYYMRLVERGKKKPVALNNVKNKLVHLVTAMVRNRQTFTPEYKISA

SEQ ID NO: 166585 - protein, 449 aa, unidentified
MSKIKTKNEKVKRISQLPVIRPATAGIDVSDAEMMVAYPISSEQLEIRAFGCFTTDLHSIVKCLKENGITSVAMESTGVYWVALFLLLQEEGFEVYLVNAKHVKNVTGRKEDESDAEWIQKLHSCGLLNASFQPDNMTRTLRSMVRHRKNLVRTSSSYINRMQKALELMNIKLHTIISDIDGKTGLRIIEAILEGERNPEILADMRDKRIKASREDIVKSLEGYWTTEHLFELRQCYQLYCTHRQMIEECDREIEKQLVEQIASGNEGIIPDIPKVKRKVSRGKHKVPFNLTAHLREILGVDVTEVVGISEISALTIMSEVGTDMSKWKTEHHFTSWLGLAPNTKVSGGKTISSRIMKKKHHAGQAFRMAANSLYNSKSPLGDHYRRIRAKAGAAKAVVATARKLAIIYYKMVANKEAFNPKALEDYQQKYKQKKINQLKKKIALLEAA

SEQ ID NO: 166586 - protein, 376 aa, unidentified
MKKFNDVYVGLDVHKSTIAVAFVRGVRSQAQYFGEIANEPQAVVKLLEQLSPDGEVMNFCYEAGPCGYELYHQLRRLGHQCEVVAPSLIPRKAGVRIKTDRRDALMLAKLYADGSLTPVWVPDKEQEAMRDLSRAREDFKQMETKARQRLGAFLLRNGKVYPGKSKWTQAYWRWLETVTLETAVQHIVLQEYVQAVREAQRRVQALEGQIRLAIRGWSLEPVVQALMAMRGSSLVTAVTIVAELGDISRFRGPRQLMAYLGLVPSEYSSGGKRRQGGLTRTGNGHVRRVLVESAWNYRFMPRKTRDIQKRAEQTSEAVQAIAWEGQKRLCGRYQSLLRAGKAKQQVTAAVAREMCGFIWAIACEVGGKRHASKATA

SEQ ID NO: 166587 - protein, 334 aa, unidentified
MLYAAIDIHKRTFQAAVLDVETGETSERRFGATREELNDWAMPLQGRLAAVAIEATNGWRWVWRELSARGFDVRLVDPAQAKALRGRIKRAKTDRLDARWLCVLLAKEMLPESWLPPAEIQTLRDQTRLRKALAEDRTRWAQRLHALLTHEGWPCQRARLLTVEGRRWVQSLSLSPAARAQVDRLLRLIEAVESELRSLETELRRFARNDRRCIALQTIYGVGPILACHLLAELGEAARVRRARQAVRAAGLDPVVDESGDTRRRGRLAKHGAPVLRWALVEAAQHAQRANSPDRALYTQAATRVGDKRALLTVARKIGRRAYHVLHELETQAA

SEQ ID NO: 166588 - protein, 342 aa, unidentified
MQVTTIGLDIAKNVFQVHGVDAAEKVVVRKQLRRSQVLEFFKVLPPCVIGMEACATAHYWARELMKLGHKVRLMPARDVKAYVKRNKNDAADAEAICEAVRRPTMRFVQVKSAEQQSLLMLHRTRDLLMRQRTQVINALRAHMAELGMTAAQGNAGLRELLAIIAGAADERLPAEAHASLIVLAAELQAMRTLIASIEKRIIAQHRSDEASKRLRSIPGIGLVGATAIVATITDPKAFRSGRDMAAWIGLVPRQDSTGGKQKLGPISKQGDRYLRRILVVGAHAVLKLARQKPEKYPWLTQLLARKPFKVVAVALANKMARIAWALLVKGGPYRARALVAAA

SEQ ID NO: 166589 - protein, 353 aa, unidentified
MKRDKYMGMDVHAATTVVHVLDAGGKSVLETIVATEAAAIMDLIGILNGPIHVTFEETTQAQWLYEVVRGYVSEVIVCDPRRNKLLDEGSKGDKPDSRKLAELLRAGLLRSVYHGHQATQELKELVRAYETMSADTARTMVRIKAIYRSRGVGTPGRGVYQVQQREQWLAKLAQPGARQRVTWLYEEMDQLKALRRKAKQAMLIESRRHRAFGLLRTIPQLGAVRCALIVATIDTPHRFRTRQQLWSYIGLAVVTHMSSEYEVHQGRVVRSRKPIATRGLNRNCNRRLKDVFIGAATGGSQTEPYRSYLNHLQQRGVRSEMARLTLARKIAAVALRIWKKGETFDPQKLNWQT

SEQ ID NO: 166590 - protein, 410 aa, unidentified
MSSLLREVLPAETLVVAIDPGKVANRVWLASGVGHLIGEPVSLPTLREGVDELERLVSGSGIGGEPLIAIEATGSLHRPWTTELERRYPGRVRLLAPSETQAARTQLGTRRFKSDDRDCAALVWLVRQGLGRVPDEPGLEALLGVVRHRRQLVAELKVLRQRLHDQLNRLCPGLSAPQGHGRTLDLLEPSGRAVLACAVAFAGRAPSVRSLLARSPGRLTRANAEYWRQRWRGCLPPPDAELRAHRLELDLDRLDLLLRALETAAQQLTALLAQTDGQVLTSLPGVAAIRAAAFAAHSLPIERFPTAEHLYSATGLAPASYQSATLNRRGGISRQGLPEHRDALMAIAWGLSQASPAFRERAAEYRARGFAPIQLRVALARHACRLCHTLIRNQQPYDEERYRQARKRGR

SEQ ID NO: 166591 - protein, 410 aa, unidentified
METIVERPAALDVHKAQVTACVRVPAADGKGREQYVAEFATTVRGLLALRDWLAAHRVQQVTIEATGVYWKPVWAIIEDEFPLLLVNARHVKQVPGRKTDVSDAAWLCQLAEAGLLRASFVPPKPIRALRNLTRYRKTQIQERAREANRLHKALEDTGIKLDCVATDILGASGRAMLAALIEGTTDPQLLAELAKGRLRAKLPALREALEGRFDGLHAVWIGAILAHVDFLDEQIDRLSDAIEEQLAPFAAAVELLCSIPGVQRRSAEVIIAEIGVEMSVFPSPKHLASWAGQCPGNDQSAGRRRSGKSRHGSKWLDWALEEAALAAVRSKDVYLAAQYARLRPRRGHKKALGAVKHSIICACWHMLTTGELYHDLGGDYYQRRDPERTTRRLVGQLEALGHTVILQEAA

SEQ ID NO: 166592 - protein, 421 aa, unidentified
MNEKAVVYSVYVGIDWADKKHDVCICPRDSDTREFDVIQHRAEAIDAWVKDLHQRYGGRIAIAVELSKGPIVSALQKYDFIDIYPINPGTLAKYREAFQPSRAKDDPTDAELALDLLLRHPEHFKALKPQSVGMRTLTTMVEQRRCLVNDQIRITNRLRSALKQYYPQVLEWFEHIDTLLFCAFVKRWPTLTQAKRARANTLRRFFHEHHMYREGVLVHRRQAINGARPLTLDDAVIVPYRLQTLVLVEQLELMFRAIGQFDDEIEKLACGHPDYALFQSLPGAGPALAPRLPVAFGEQRERYKSAADIQKYSGIAPVTERSGQKHWVHWRLQCPTFMRQTFVEWAGQTINKSYWAGAYYRQQRDKGSTYQAAVRSLAFKWIRILYRCWQTGVAYDESRYLKALERRGSPLLKRQTMLESA

SEQ ID NO: 166593 - protein, 366 aa, unidentified
METIYIGVDFHARQQTICYLKTETGELVFHELKHQDKQQVRAFYAQFVGQVIVGLEASGYSPWFERMLEELGCQVWLGHATEIRRRARWRQKNDRRDAELILDLMLHNEFPRLHRPAVQSREVLRMLRYRQKLIKMRTMSKNSLQAIALQAGLAKGSRLFTKAGQQELGTAEMSPVLHWQREHWLQLMEPLNQQLLETMVWFKSQSKDDDRITRLRTHPGIGLLTSLCIVHTLQPVSRFRNTRKVAAYAGFDPIERSSAERKCFLGISKAGSRLLRYLLVEAAQTAVRKDEDLKRFYQRLADRRGRPKAKVAAARKLLIRAYIMMRDEIDYAEFRHRAVAARLARRSQGPANVPEVLIGQPASPEQ

SEQ ID NO: 166594 - protein, 446 aa, unidentified
MSESSNMAAASEPEWAAFAAIDWADQKNFWRLVPADSKKHEQGELENTPEAVEVWAAGLEQRFGGRPIAVCLEQSRGALVYMLAKYAHLVLFPVHPTTAARYRETFCTSGAKADPSDTASLLDLLLRHREKLRKLRPDTKETRLLQFLVEERRRTVDEKTRQSNRLTACLKLYFPQILHWFGDVSGPLVGDLLERWPSLEQLQRAHPGTLHKFFHQHNCRGEERMQERIRAIYQAIPATNDEAVLEAGAMIAGGLVAMLATLRRQIEVFEKRIEELVNSHPDGALFGSLPGAGAALVPRLIVAFGTYRDRYQSAYDLQCYSGIAPVKEASGKSEWIHFRFTCPKFLRQTFHEFAVHSIRQSEWAKAYYEHLRNDDKKSHHAAVRSLAYRWIRIIYRCWKDGKPYDEQLYLNSLRRRGSLFAGALSLATGAGWKTVAGFQKFSAKNA

SEQ ID NO: 166595 - protein, 342 aa, unidentified
MKIIGCDFHPSFQQIAMVDTESGEQTEKKLTPAEAVEFYRQLPGPVLVGMEACGNTLWFERLLAQFGHQLWLGDAGKIRALEVRKQKTDRRDAELLLQLLLEKRFPRIWVPSPEQRDQRQLLLHRHKLVGMRRQVKNQLQHLALNQGVQQKHKLWTAAGRKQLEELALTGWTAQRREELLSMLDDLDPRIEKLDQAVKAAAEKDRVAQRLQTHPGVGPITALAYSLTLGEVGRFQHSRQVVSYLGLNPAEHSSGGRQRLGSISKQGNPMLRSLLVEAGQSAARLVPELKRAYQRLKHRKHSSVAKVMVARKLAVRLYWMWRNQQPNSATRMQGSPSHPVAEV

SEQ ID NO: 166596 - protein, 417 aa, unidentified
MQYALPLVLPDVPAGGVCAGIDWATADHVACVVDMTGRVTDRFSAAHDKAGIAALITRLRRSKVTEVAIERGDGPLVDALLAAGLTVVVITSRQVKNLRSRFGAAGAKDDRFDAFVLADTLRTDRARLRPLVPDTPATISLRMTVRARRDLVRHRVAVCNQLRAHLAVAFPAGITLFHDLDSPISLAFLARFGSQDAAAGLDEQAIGAWLATIAVRGRPAPASVLHARLQAAPPGATGTDGAAQAGITAALTAMLTALSAQIKALATQIAGQLAAHPDGHIFTSLPRPGTVRAARLLAEIGDCRPRFPDPESLAGLAGVAPVTRRSGTRIAHGFRWAVNRQLRDALCDFAADSRHASPWAAAIYDDARARGKDHPLAVRITARAWTYVIWRCWHDGTAYDPAKHNALQAVLARQQDQ

SEQ ID NO: 166597 - protein, 347 aa, unidentified
MSISMIGLDTAKSVFQIHGVNETGKVELKRKVRRSDLIAFFEKQERCTVVMEACGAAYHWARILTGLGHTVKLIASEAVKPFVKKGKKNDAADAAAICEAAARPDVKFVPVKTVEQQGILAVHTARALLVKQQTMLANAIRGLATEFGHVVPKGLHNLEPLVALVGADEDMPAQARQAIGELYKRFGELATGIQSCEAAIVKHARSDATARRLATIPGIGPITASLIAATVVDISRFKSARQFAAWLGLVPRQNSTGGKTRLGRITKTGNREIRKLLVLGATSMVGRAEGWHSTAGSWLRSILERRPARLATVALANKMARIAWAVMTRNEVYRPQGGVAAKAQAAA

SEQ ID NO: 166598 - protein, 416 aa, unidentified
MSFALPEALFFTGIDWAAETHAVCVTDAGGKITAEFTIEHSADGIAGLVRRLARYGEAGVMPVAIERPDGRLVDLLLEAGHPVVPVSPNAIKTWRDGEVLPGAKSDAGDAAVIAEYLRLRAHRLRTAAPYSDETLALRTAVRARGDLVEMRVAATNQLSALLDAHWPGAKAVFADVASPISLQFLTRYPAPASAAHLGEKRMAAFCVKHGYSGRRPAAELLARLRAAPAGTGREALSEALRAAVLAAVGVLAALNAAVKSLDRSVAAHLGEHPDGKIFTSLPRSGQVNAAQVLAEWGDCRQAYDGPDSVAALAGVTPVTSQSGKHRDVHFRWACNKRFRVAVTTFADNSRHASPWAAKVYTDARARGKDHPHAIRILARAWIRVIWPCWLNGVPYDPAQHGAAAALAEQQVKHIAA

SEQ ID NO: 166599 - protein, 430 aa, unidentified
MKSNTQNAKIEAITEKTLVLGIDVGSETHYARAFDYRGIEYSKKPFKFSNTEAGFATFKEWILDLKERHEKDKVVPGMEPTGHYWFNLGKFLQDNEMKPVLVNPHHVKKSKELDDNNPTKNDRKDPKVIAGLVREGRYMIPYLPDGVYADLRTASNIRFQLQAELTRIQNRISRWFNIYFPEYKTVYGKPDAKSGMLILKAAPLPEDILTLGIDGVNQIWRDAKLRAVGKARAKTLIEAAEHSVGSKEGAVSARMEIRMLLEDYESRNTRLQEVMVLIEELVRKIPMAEKLLEIKGVGIRTVSGFLAEVGDISRFNNPKELQKLAGLALVENSSGKHKGETTISRRGRKRLRYLLFEVAMSLVSKNQEFRELHNYYTTRRLNPLKKMQSLMAIAAKLIRVFYAMLTKGVDYDPKKMVSDIKRPAVYLQAA

SEQ ID NO: 166600 - protein, 312 aa, unidentified
MPQDRVFVGVDVSKDRLDVAVLEGEVFAVANNAAGLRDLIKRLKAAKASLIGLEATGGYEKPAVEALVAAGLDARLLDPRKVRRFAQACGVLAKNDRIDAELIARFVALMPSRSARIDKAAARLAELVDARRRLLEEQTRLDNAARLVREPVLVRLAEGRRRRTRLDLILIEKRLAQLIAEDPELARKDALLRSVPSVGPVLAWTLLARLPELGDLDARQIAALVGVAPYDHDSGARRGRRAIRGGRPIVRNVLYMAALVGARFNPALVAMKERLAKAGKPPKVTLVALMRKLITILNAMLRDNAPWRATNA

SEQ ID NO: 166601 - protein, 400 aa, unidentified
MLSIGIDVSKGKSTVCGMKPGGEIVYTPFEVQHTREGMSELVSLLRGSGEEVRVVLESTGSYHCPVVAALLESGIFVSVVNSLRMKRFCSQSIRKVKTDRIDAMQIALYGLAYWQELQPTRLPEDTYRELQLLARQYYQMTSLLIKAKVDFNAICDQVLPGMQELMNDHAGRHKLSDFVLRYRHTTHILEMGETRFRKDYCKWAEKKGYRNHERMAALIFATAQNGIPVLPNAPSTQIVITEAIRVLHTVEASRDAILTQMQALAKTLPEYSLVREMPCIGDTLAPRLIAEIGDVRRFHSKRALIAYAGIDAPPYQSGKFSANNRHISKRGNRYLRKTGYEVMQSYVMHKPANDPIFTFIEKKRSEGKSGKLAMVAGLNKFLRVYYGKVTELYRSLPAIE

SEQ ID NO: 166602 - protein, 255 aa, unidentified
MKRTDEIFVGVDVSKAWLDVAVHEHEAGFRTSNADEGITSLVKRMKTVRPTLIVLEATGGLETLTVAELAHAGLPVVVVNAKRVRDFARATGQLAKTDTLDAKVLAHFAAAIRPPVRALQSEAEEQLTALMTRRRQVVDMLTVEKNRLGTVRASMRAAIEAHIQWLAASLKDLDSAIADFVEQTAVWKEKDALLQSVPGVGRITSATMLARLPELGKLNRQEIAALVGVAPVNKDSGKKQGRRRVYGGRADVRSV

SEQ ID NO: 166603 - protein, 360 aa, unidentified
MFSERTSVGLDVHARSVVAAAIDGVTGEVFKARLTPDFQDVLRWVKGLPGPAAATYEAGPTGFGLYRALTAAGVRCEVAAPSKLQRPSGDRVKTDQRDALHLARLLRLDEVTSVTVPSVGQEAARDLVRAREDARGDLMRARHRLSKLLLRHGIVYCGGQAWTGRHDAWLRQQHLPMPAARLAFDSDYDAVLTVAARRDRLDEAITAMAAESEFTEVTHRLGCLRGISTLTGFALAVEIGDWSRFTGASIGSYVGLVPAEYSSGASRVQGGITKTGNGHARRLLVEAAWHHQPRYTVGKTMRERWDLAPAAARARGDAGNRRLHQQWVRFNDRGKRHVIANVAVARELAGWCWSLAVMED

SEQ ID NO: 166604 - protein, 361 aa, unidentified
MSSMPEPKPSDPDEVVLGVDTHKDVHVAAVLTSLGLLLATSSFPTTAKGYRQMLAWARGFGAVNRAGVECTGSYGAALSRHLSSEAVIVIEVNRGDRADRRRRGKTDTLDAESAARAVLSGRATAIAKSGDGHVEMLRMFKLAKASAIKSRGQATNQVKAILVRADPALRESMTGLSNPALFRRCAQLDHLDPTDPASAAAFTLRLLARRILELTSEIDELNAQIAAAVDVRAPQLLKRYGVGPDTAAALMLTAGDNPERLNSEASFAALCGVSPIEASSGKTQRRRLNRGGDRQANSALYTITIARLRWDKRTQDYVRRRVAEGKTRREAIRCLKRYIAREIYRELNWAISTSLTAQSDG

SEQ ID NO: 166605 - protein, 333 aa, unidentified
MVEGTWGSHHKEGSTKMSKTSTVAAGIDVAKERLDIVVRGCSRVWQLANAPEGFHELTRLMREHRVTRIGLEATGGYERGVVEHLRAEGFAVVVLQPLQVRAYAQMKLKRAKTDGIDAAMIADFTAEHAIVREVADARLAAIAEHLTWLEQTEEDMARIKTRLEHVRTPEVQRSWKNDLVRLKQRRASMIAKISATLRLHEDLATRLKLLLSIEGIGPRTAIALLIRMPELGRLSRGEAAALVGLAPFNNDSGKRVRQRSIAGGRTRLRTSLYAAALPAAFRWNAALVALYNRLKAAGKPHKLALVACARKLLCYANTVIARGTPWTKSATPA

SEQ ID NO: 166606 - protein, 354 aa, unidentified
MKQTTKHVALDVHQATTLASVREDSGRVIARSILPTEAPALVEFFRGMRGTIHVAFEEGTQAQWLHELLTPLVDQVVVCDRRGEARQGNKGDQVDADELSEQLRRGGLRPVYHGDAHRATLKELTRSYLNLVEDATRVMLRLKALFRARGIRTPGKRVYHPAGRAAWLARLADRGARLRAEALFAELEVLRALRPPAKGAMVAEARCDPAWPVLQSIPFMGPVRVALLVATMQTPGRFRTKRNLWAYAGLAVVTRSSADYDLVDGRPVRRRRAPFTRGLNPNHNRVLKNVFKGAATAAKTQPGPLQDWYHGVLARGVPEELATVTLARKLAAITLRLWKKGERYDPTKLTISAR

SEQ ID NO: 166607 - protein, 380 aa, unidentified
MAGRKELAVREEDNSKVPTIYMALDLGRRRWTVGIVLPGDRHARLFQIVAGDWEALSVLIQRQRQAISHPGVRVVSCYEAGRDGFWLHRWLRDQCIENRVLDPASLEAPRRRRRVKTDRVDTLGLLRVLLRLERGETEMTRVVWVPAPAIEDARRLTRERERLVTERTAHRNRIQGLLAAQGVTTIKIGTRDWLDRLVVARTGDGRTLGVALLAEIRREAERLVLVEHQIKELEAAQRAALRADNALVAKACKLKRLKGVGEIFASGLIHEAFWRDFENRRQVGGGFGLTPWPWDSGDRHGDQPISKVGNRRARTLAIECAWMWTLHQPNSALTRWWRERFAGGGRRLRRIGIVALARKLMVAMWRYLKDDLIPEGAVLA

SEQ ID NO: 166608 - protein, 338 aa, unidentified
MKKFSGIDLHSNNSVVVVSDEVDHIVYQRRLPNDALQIRAALAPHREELEGVVIEATYNWYWLVDALLADGYHVHLANPAAIRQYEGLKYSGDFTDAAHLAQLLRLGLLPEGYIYPADGRQVRDLARKRMQLVQCRTAQILAIGNLFARHTGSQMHGPQVKRLDGAQVSRFGFAPDVTHAIRANLAVLGTLQQQIEIIEKRLMQQVKLNPDYALLNTVPGIGPVLATTIMLETGTISRFATVGHFSSYCRCVDSRRESNSRKKGEGNTKNGNRYLAWAFVEAANFAIRTCPQARRFYERKKRMRNGIVAIKALAHKLARACYHMLREHKPFETVRCFG

SEQ ID NO: 166609 - protein, 487 aa, unidentified
MAKRKMSTFERLQKGKWSREQRKELAQKLHAADPGLTIVHPDAAGIDVGNDSHFVAVPAGRDAQPVQEFGSWTADLQRMAAWLKACGIRTVAMQSTGVYWIAVQEVLEEAGLKVYLVNARGTKNLPGRKSDVQECQWLMKLHTYGLLANSFRPPEEIRAVRTIWRQRDRLVQDAGRAIQQIQKALTTMNIRLANAISDVSGVTGLAIIRAILKGERDPRELAKLRHPCIQASEEEVVRSLEGHWRDDVLFELKQVVEGYDFYQRQMEACDEELQRYLAVLPDRRRESAAVGVDPEPTKGSKKRRRSKAERKGKTRRKNQPGFDLQAELHRTFGVDLTRIDGIDIMTGQVILSEVGPDLSDFPDEDHFASWLELAPRRNITGGKVISQKSRESRNRVANALRMAAESLSRSDAYLGARYRRLRGRKEGKKAVKAMARHLACLVYRLLTKGQDYVDRGAAYFEKKRTEREIVGLQRKAAEHGMRLVPVV

SEQ ID NO: 166610 - protein, 424 aa, unidentified
MRMKKYTRQIDKRQRISKSTLVIGIDIGSEFNAVCLMDKEGNVLGRYPKIYNSRKGFDYYHRIVEQTRKKQGFVDVLIGMEPTGHYWRKIGFFSLDKGYEVRFVRTTALKHQRELDESSSAKNDVRDALTIANIVREGKYIDTVIEDGVFRQLRMLSHTRERIVRHNTGSKHALKAVLDDYFPELTKIFWSMKAKGLLALLGIYPFPEDIRSAGVPAIAELLAKSTKRKAQALGKAETIVRAAVQSVGLKTVSPADRMRLAVYLDDIKRSEERLKEIEHQITDLLRQIPLAEYILSIPGIGAVTCGVFLGELGNPDYFKNPQQIVKYAGYDPKENDSGLHTGRKIISKKGRWLLRKYLYFMAMRVVHRSAFFKEYYEHKQKGMIRPLTKKEALCAVILKLIRVIFALMRDRRLFTEEICCAQAA

SEQ ID NO: 166611 - protein, 342 aa, unidentified
MSIVILGIDLGKNSCSVAGLDAGGRVVLRRRLRRQTIAGFARQWRGCVVAMEACCGAHHLGRQLVAQGHEVRLMSPEYVRPYVKAHKNDDRDAEAIAEAATRPTMRFVEIKSEAQLDLQSLHRARERLVSERTALINHLRALLLERGIVVPRGRRKLERALPGILADESSGLSARLRRLASDLREEWRALDERIAAFDAEFVSQARTDEAARRLATVPGIGSLTATALVAAVGNAKAFARGRDMAAWLGLVPRQMTTGGKPKLLGISKRGNRYLRKNLIHGARAVLPYLATRDTPLGKWVQGLLARAHKNTVVVALANKLARIAWAVLAHGRSFEAAHVTAV

SEQ ID NO: 166612 - protein, 386 aa, unidentified
MQASTVATPTAGHIGTIFVAIELSQRSWRVALHSPDKDKISHHKLEGGDHAELLALVGRVRERAARTLGGVPAVASCYEAGYDGFWLHRLLLAAGITNYVFDPASIAVDQRARRVKTDRIDGERMLRTLMAYLRGEPRVVRIVRVPAAEQEDARRGSRERDRLIKEQTAHTNRIKALLRLRGMAVGNPRRRDWLSWLATQRDWQGQAVPPRMLSEIRHEHARLMLVRDRLDALAQEAAAAEPMPAEAEMTRRSELLRRLKCLGPAFATTLTSEVFYKDFRNRREVGSYFGLTPSPWRSGGIDRDQGISKAGNPRARCAAIELAWLWLRHQPDSKLTLEYRKRTLDAGKRIKRVAIVALARKLMVALWRYLTTGLVPEGAVLKAVKI

SEQ ID NO: 166613 - protein, 348 aa, unidentified
MTMSMIGLDTAKAVFQVHGVDERGRVALKRQLRRGELIPFFEQQPRCTVILEACGAGHHWARLLSGLGHEVKLIAPEAVRPFVKKGKKNDAADAAALCVAGSRPEMRFVPIKSVEQQAVLALHTARSLLVKQQTMLANALRGLAAEFGLTVAKGMGKLAELIALVSMDKSLPAAGRRAMAELYAHGREVADRLVALEAKITSHARHDETARRLATIPGIGPITASLIAATVGDNIGAFRSARHFAAWLGLVPRQYSTGGKVRLGRITKAGNAEIRKLLVLGATSMVWRAAHWNSRAGLWVQGVLARRPVRLVTVALANKMARIVWALMTRAEVYRAQGRALPTVEAAA

SEQ ID NO: 166614 - protein, 344 aa, unidentified
MVIIGIDAHKRSHTIVVVDEQGRQLAETTTGTGSSDHLQLLGWAARHGADRLWAVEDCRHLSRRLERDLLAAGERILRVPPKLMANARDGARSFGKSDPIDALAVARAALREPNLPVAKLDGRDREVRLLVDHREDLVQERTRMISRLRWHLHELDPENEPPARSLNHLRNLDKLALRLDGGDGLVARLARELTDRCRQLTIEIKELEKEITTLVATLAPSLVAICGCGPLTAAKILGETAGIDRFKSNDAYARHNGTAPLPVWSSNKQRHRLSRTGNRQLNAAIHRIALTQAHWHPDAKAMIARRRANGDGGLEALRILKRRLSDVVYRALKADAAVELLLAA

SEQ ID NO: 166615 - protein, 386 aa, unidentified
MSRPSNILVRAINYDQTLVLAVELSNKSWVLAAQVPGLPRTKAQRTIEPNKNALLAAIDGYRARAAAVGYTVDRVITTYEAGWSGFWLARWLVAQGVEVHVVQPSSVPVDRRLRRAKSDGIDAELLLRTLLAWLRGEPRVCSMVPIPDEADEDARRCVRERTELLSDRVGLTNRIGAVLATLGVNDYNPLLQSRRRRLAELRTGLDEPIPPNALAKIERLLARLELVLAQIAELERERDEVAAADAPDRAGKMIQQLASLRGIGVQSATVLVREAFVRHFANGKALGSYAGLTSTPYSSGGIDREQGIGKAGNRRLRTVMVELAWLWQRYQPGAAQVAWFRDRVGSTGRRIRKVMVVALARKLLIALWRFVIDGVMPEGAVMKPSI

SEQ ID NO: 166616 - protein, 422 aa, unidentified
MNVKPNVCEPEFAALIGLDWGDASHAVALAATDGTEVETARLVHSAETMHAWLQSLESRFAGRAVAVAVETSKGPLIHLFSNVPWLVIYPIHPATSARFRKAFSPSGAKDDQPDALVLLDLLTHHRHKLRPLIPDDAPTRLLGRLCELRRKTVDRRTQLTNTMRAVLKDYFPQALHLVGEVLYSPLALDFLERWPDLLSLKVARPGTITRFYHSHNVRRPEAIRERLDLIARAVALTTDDAIVKVGIRQLERLVQELRILQKHILEDEKQIAALFKEHPDARVFRDLPGAGAALAPRLLAGFGTDRTRYQSATEFLRYSGVAPVKEQSGSRVWIHWRWNAPRFLRQSLIEWAGQTILYCPWAQAYYQHQKAKGKRHWMILRALAFKWVRILWKCWTTRQPYDEARYLQALIRHKSPFVPHGT

SEQ ID NO: 166617 - protein, 367 aa, unidentified
MKDSIFIGLDVHKATISVAVADGERGGEVRDWGKLPNRPDRVRKLAEQLGAKGHQLYFCYEAGPCGYGLYRQLVELGHDCLVVAPSLIPVKAGDRVKTDRRDARMLAKLHRANELTAVWVPDVEHEAMRDLVRARATAVRVANQARQHLQSFLLRHGRQYPGKKSWTKAYRRWLSTNRFEHSAQQIVFQDYIHAVTDAEARVARLEAQIAELLPDWSLAPVVQAIQAMRGVAFIVAVTVVAEVGDFRRFATPRQLMAYLGLTPTEHSSGNTVRRGGITKVGSSLARRVLIEGAWSYRMQPRVGRKQVDRMEGLPQGVRDIAWKGQMRMCRRYKHLVACGKPTVVANTAIAREMVGFIWAIAQEVTPA

SEQ ID NO: 166618 - protein, 392 aa, unidentified
MVVSVGIDVSKDKHDCFIVSSEGEVLADVFTIPNTMDGFAYLLQRIRECTTPQDKIKVGLEATGHYSYNLLGFLLDNGLATYVLNPLRTNLYRKSLSLRKTKTDRVDARTIASMLLSDAGLKPYTDTAYHNEELKSLTRYRFDKVKERAKLKTSISRLVCILFPELEKLVSTLHMASVYALLEECPGAKQIAAAHLTRLKTLLETASKGHYKRDIALEIRDAARSSVGSRMPAKSLELQHTIRLIRELNSEIAEIEEQIQAIMDELNSPIITIPGIGFRMATMIFAEVGDFARFDSPDKLLAYAGMSPSTYQSGQLKNCYPHMEKRGSRYLRYALYNATKYVCHWDPTFAAYLAKKRAEGKHYNVALSHATKKLVRLIFSIEKSGQPYCAAA

SEQ ID NO: 166619 - protein, 385 aa, unidentified
MTVRTVSRAATHGETVRCLFAIELSKQSWVIGFITPLSSRISRRILSGGDWKGLLELIEEVRARVSREMGRTVEVMSCYEAGYDGFWLHRQLEAHGVRNYVIDPASLQVDRRMRRVKTDRIDTERLLRSLMAYLRGEPKVWSVVRVPSVAEEDARRLHRERDRLICERVQHVNRIKGLCARQGIYDYHPLRPQAVARLEQLRTAQGGALPPRLKSEIKRELHRLEVVVEMITTLEAERDAIVEDEASTHVNAEKIQALHKLKAIGPEFAAVLVGEIFHRDFNNRRQLASYVGYAPSPFQSGNVAHDQGISKAGNRKGRTTGIELAWLWLRYQPDSDLSVWFRARVGTVKGRIRRIAIVALARKLLVALWRYLETGLVPRGAVLKG

SEQ ID NO: 166620 - protein, 412 aa, unidentified
MEVIYPCCCGLDVHKKSITACVLWAEARGKSRKEKKRFGTFTHDLLQLADWLAERGVTHLAMESTGVYWKPVWNILAEQFEVLLVNAQHIKAVPGRKTDQKDSEWIADLLQHGLLRGSFVPPQPIRELRDLTRYRVSLVQEINRIANRIQKVLEDANIKLASVATDALGASGRAILQAMLAGEEDAARLAEMSKGLLRNKIPELKLALEGRMTEHHRFLLRQLFEHLRFTESKRSEIEQEIDKRMRPFEDKVTRLCTIPGVDRVTAWGMLAEIGMNMNQFPSSGHLASWACLCPGSFESAGKRLSGKMRKGNVSLRRCLSQAAWAISMMKNNYLSALYRRIAARRGAKRAIMAVAHALLVIAYHMLKRKEDYRELGADHFDRIDVNRIRRSLVRRLERLGHKVTLEPLAQTA

SEQ ID NO: 166621 - protein, 319 aa, unidentified
MAQKDIVVAGIDVAKDKVDVCIRSLSLRRTFASTAEGRRELAALLRRKKVGKTVMEASGGYEREWAKALRDAGIEVRIVDPKGVRSFARSAGRLAKNDTIDAEMIAWFAETFDEARGQAYDATREQLHQMVHARQALKDMQSKLTSQGEHAVPAAVQRSHAEISKTIAVELVKIEDEITALIEVTPYFAELAEIIESVPGLGRTTAAALIADMPELGQANNKIVASLLGVAPYDDDSGRRRGERHIKGGRRRTRNIFYMACLGAATQHNPVLKAFYDRLVAKGKLKKVALTACMRKLISILNIMIERRQKWDAKRYSVC

SEQ ID NO: 166622 - protein, 341 aa, unidentified
MEQATTIGLDIAKHVFQVHGADAAGHVLFRKRITRVKLLGFLAAQTRCVVAMEACAGAHYWAREIAKLGHHVRLIAPAYVKPFIKRQKNDAADAEAICEAAQRPSMRFVLVKTEEQQANGIVFRARDLLVRQRTQCVNALRGHLMEYGYVFPKGITHVETLIAVVEDLQSSLPDSVRVILKLLIDTFTALEAQIAVLDAEINQRSKSDPTARRLMTIPGVGPITSTAITALVPAAEGFPAGRDFAAWLGLTPLQKSTGGKQKLGAVSKRGERTIRRLLIIGASAVVQQASRRGAPKGSWLAQMLARKPKMLVTVALANKTARIIWALLVKGGTYRTPAAAA

SEQ ID NO: 166623 - protein, 346 aa, unidentified
MRYKGMKNKSFIGIDISKNVIDVSIFCEETPIKDFSHDVFNNSRKGFGEMCTWLKKNHVVLSNCLFGMEFTGSYSMELEKFLNARNYQFCMLSTHVVKHYPMGPKDKSDKIDSAKIADFLYRYNGTECVKPYNMPDKTMQRLKALMNERKFLVEQRTCFMNRRQLCITKEDAQLYDGYIKKFSRDIENIELEEQKLLATDDSLLSTYKNLLTIPGIGFVNAINVIVITRNFTAFETARQYASYVGVAPHFRTSGTSVKWRPRPSARCDGQAKADLSMAATVVVQYDAELQSFYNRKLGGKQDSDTKRKALNAVKFKLVLRMFAIGKQNRKWEPLDSKSSNEKLAIS

SEQ ID NO: 166624 - protein, 360 aa, unidentified
MRPEECCGKPSAFGEDAEGYAYLFHLLGAPKDCLVALEATGHYWRNLFVSLVTKGYEVAVLNPLRTRRFAEEELERTKTDAIDALGIARFAAQKRPAPTMLPEPAAEELRELVRLRERLLGDLGDQLRRLHRAVDLGFPEFTNHVRTLESDLAISILSRYPTATAYRNVSPKKLARLCYDGRHEVGEQLARALVNTAKNSVGHHHSDTCRREIAYACEDIVALRGRLRELADDIKQKLEQHALGKLLTTINGVGVQTAAYLIAELGDPARFHNAAALASYVGVAPRLRQSGKRRFSGTAVVRLGNARLRKALWMPVLTAVRFNPWLRAYYDRLVSRGKPRKVALVAAMRKAARRGLERCN

SEQ ID NO: 166625 - protein, 402 aa, unidentified
MSINTSDPAGSAVRVGRVQVGIDAAVVADHHVTIRETTPDGQVHLSRFRTPPTIAGLTRLGERLSDYPQVVAVAEPTSMTWLGLHVALREAGCDLALVGTRHAARLRGAISGKNKSDVIDADVLAMAGDVFDLAPRRPPAPSQLALRRAVVRRGKLVIDGNRARRRLISLARWAFPDVWEAFAGSWPTAVAVLTRWPDLTALASARHSSVTGVVAAHTRGVPDVDARAEKIRTAAARTAQFWDGHLDLSALTWESSEHLRDITIAAEQIERATVQAHHYWAALYGDDPLLLSLPGMGPMTAPTIRAFFGDAAAFPSAKAAAAYVGLTPSTWSSGTVVQPSRAITKEGPPCCGWRSTRPPAVPAASTPSSPPATGTSWSNAGTATPRPPSPSPASSWSGPGPS

SEQ ID NO: 166626 - protein, 338 aa, unidentified
MFEYMEMTGFAWLGIDIAKQKFDVALTWSTRRRAKVFRNDGEGWQALLRWLKDLGVGHVHACLEATGRYGDGLAIALHEAGHRVSVVNPAQIKHFGRVKLGRNKTDRADAALICDYCRLFEPAAWTPPSAALRQLRDLVRTREALSASRVEWANRRASGQETAVADAAMAKVIAQLEAEIAALDQAIDDALGQDDDLQAKHDRLVSIPGIGTHTAAVVLCELPGPDVLRTAREAAAYAGLNPSHRQSGSSLDAPARISRIGNATLRAALYLPALAALRWNPLVAALRQRLKDQGRLKPKQIIVAAMRKLLHLCFGVLKTGKPFDPEHTTSTEEAASTV

SEQ ID NO: 166627 - protein, 310 aa, unidentified
MSTELFVGIDVSKDTLEIGIYPSLEAYSVPNSDQGRDDLSQRLKALSPQLIVCEATGGYETAVVSRLAAAELPILVANARQVRDFANSIGKLAKTDAIDAGVIARFAEAVRPELRSIKDQPSQELAALITRRRQIVEMITAERHRLPTTSRRGRRDIELHVRWLRKRLEQIDDQIKRDIHDSPIWRTKDKILRSTTGVGPAMSATLIGYVPELGQLTGKQISCLVGVAPLNHDSGRFRGRRMIWGGRAHVRSVLYMIAVSAMKHNPVIREFYQRLRAKGKCFKVAITGCMRKLLVILNAMLRDQTNWKPC

SEQ ID NO: 166628 - protein, 356 aa, unidentified
MPMLADLVDAVVGVDTHRDTHQVEIALPNGAPIAVTTIGNDTTGYAELLAWIVDHAPGPRLAVSIEGTRSYGVGLARAAAAAGLIVLECEQPSRKVRCGKGKSDPIDAHLAVLAALRLDADRLPSPRADGDREALRILLSARQELTTASTAQTNRLRALLLGGDDTDRTLARGALPETRLAGLARRRPPREASREQAVRHAEIRRLALALREAARALKANRLQLQTIVNDVVPGLIERRGIGPVSAAQAIVSFSHPGRCRNDAAFAALGGVSPLPASSGRTVRHRLNRGGDRALNRALHTIAATRMRSCPTTQAYVARRTAEGKNPKEIRRCLKRYIARQLYRTLTTSMTPAAEIS

SEQ ID NO: 166629 - protein, 311 aa, unidentified
MPIVGGLDIHRKQITFDYLDTVTGEVRRGQIAPADRAHLRSWLARFAGRGDVAFALEGCTGWRYVAEELALAGCAAHVAESADTAFARGRKRHAKTDKTDSRHLRQLLAEGRLPECWIPPPAILECRALLETYHGLRAEHTAWVQPIHAVLFHQGAPALGEQALRTSRGVEALRAAAPACLSPAGQLQVATALDLLAALETHLEVLRHRLLDASRHLTGAKVLAERLYGVGPATGLALTCWLGGAGRFSSSRKAVRFTGLDVTVHSSDGKRSPGRLSRQGPPVLRWAVYEAGKTHSRASAPDHAYYAQAFR

SEQ ID NO: 166630 - protein, 386 aa, unidentified
MRASTVDTLTARHCGTIFVAIELSQRSWLVTLHCPDRDKISRHKLESGDHAGLLALIDRVRERAARVLGGAPAVASCYEAGYDGFWLHRRLLVAGITNYVFDPASIAVDQRARGAKTDRIDGERMLRTLMAYLRGEPRVVRIVRVPAAEQEDARRTTRERDRLIKEQTGHTNRIKALLRLVGMAVGNPRRRDYLTWLAAQRDWQGQAVPPRMLTEIKHEHARLMLLREQLAELAQPQAAADLSPAAAQMAQRSERLQRLKCLGPTFSTKLTNEVLYKDFRNRREVGSYVGLAPSPWKSGGIDREQGISKAGNPRARCAAIELAWLWLRHQPGSKLTQEYRRRTLDASKRIRRIAIVALARKLIVALWRYLTTGLVPEGAVLKAVEM

SEQ ID NO: 166631 - protein, 317 aa, unidentified
MTRAESPALYVGIDVSKDTLDVAVGEDSEIWTVPNTAQGVAECVTQLQAVEPALIVLESTGGLERRALEELCAAELSVALVNPSRPKAFAAAWGQQAKTDALDARNLARFAAAIRPEPMVLPSEAQQRLTALVARRRQVLQMKVQEQNRVHTARKGQRASLERHLAWLTAHLEELETQITTLIATDPLYQSQAALLTTVPGVGTITAHTLIAELPELGQCNRKEIAALVGVAPYNHDSGNKRGHRAIRGGRVSVRCALYMATLSGLRFNPVIRAFYERLLAAGKLKKVALVACMHKLLLILNAMLKTGTTWQPAGTA

SEQ ID NO: 166632 - protein, 469 aa, unidentified
MAVMIGVDPHKASHTAVAISAAEEPLGEVRVRACAAQAEQLLAWAAAWPQRTWAVEGAGGLGHLLAQQLLAAGERVLDVPPKLGARVRLLAAGDTNKNDPNDARSVAVAALRSAGIREVRPDDHAAVLKIWSKRYRDLGRTRTQVVCRLHAVLCDLVPGGVSKPIYAAHAARILQQITPPDAVAAARCELAAAFLDDLRRIDAQIRETRKKLATAVQATGTSLTRLFGVGPVIAAAVIGDVRDVSRFPGRDHFAACNGTAPIEVSSGPRKIYRLSRRGNRRLNHAIHMAAVTQIRHRHSDGRAYYDKKLAEGKTPKEALRSLKRQVSNAIFACLQADARRAAARPGGPGGQQGNDSVASAAGSHPRHRLFGQATPGPGHHPTTAAISAAPGPASARGRAGHSSIAATLPPAKSQVQVERPQRSEDERPGGAARRRPYSAARKATGQDSLLKTQRPKGTSHAAKRTDGTP

SEQ ID NO: 166633 - protein, 344 aa, unidentified
MIRQRDKACGADIHKKTIVATILSADGTKVEGEFGTIVSELIRFKEWLKENNCNLVAVESTGTFWQPIYSVLEGSVEVIVANPYMIKHIPGRKTDKVDSNWIAELCLKEMIEPSRIFSKKDRELRRLTRARESLGKMRTQLKNRIHKDLDSSHIKLSSVISDIFGKSGMHILRRLLNGQNLDAIIEGIPSGQVKKKADQIKEAIHNNLDLTQVILIEASLNLIRAVEEKIDMIEAEIASRIRPREDDLKIAMSIPGIDFISGATVLAEIGNYQDFSSPEKMAAYFGIVPSFNQSAGKLHTGSITKYGSKHLRWILVQKMMGAISLNPKRNIELPLPKSWIFRRW

SEQ ID NO: 166634 - protein, 425 aa, unidentified
MEVIHRRCSGLDVHKETVVACVRLVSDGKITREVRRFETTTSGLLLLLAWLTEMGCTHVAMEATGVYWKPVWNILSDGDFELVLANAAHIKNVPGRKTDVSDAAWIADLLAHGLIRSSFVPEQEIQELRELLRTRKQLTRQQSRHILRLQKTLEGANIKLDSVITDIVGKSGRAMIQALIGGETDPVKLAALADRRIKASAQELREALRGRVTDHQRFLLHLHLQHIDFADSAIQDIDRNVSALIARMDQEVEAGQTRATFQSLILLLMTIPGIDVLSARIILSEIGRDMGRFSTAGHLLSWAGLCPRNDESAGKRRSTRLRKGAPWLKTLLVQCAQAAARKKGSYFNAQFLRLRGRRGPKKATCAVAASLLTTIYHMLKDGTQFQDLGANHFDRRSKDVRAKRLVAQLANLGFDAKLTPFAQAA

SEQ ID NO: 166635 - protein, 359 aa, unidentified
MEQKRFVGIDLGKRTFEIKFIASNGSVTGTNGKTCPSGRKELYKKLLPTDRIAIEVCSLGMVMAKEIIQQVGAEVVLLNPSQIALIYRSVKKNDKEDALKLARLVQKFTNEELPKVELPTEHEENLRQILTELRQLKNDRTKEINRVHAIFVECGITEIKKSNLATHKNRSECIRILKGIFLSQAERSLRKLELIEAQILEVEELLDKEIDGDKSIETLITVPGVGKQLASSFVAFLGDGSRYPNVSSIGAATGLVPRLDMSSTSLRLGHITKKGNSNLRSLLILAAWSHVRAKNGGALKEKYLYMTIAQSKSKKVAIVAIARKIAELMYSLLKNNTQYEKRAPVSIKKLATEALVVAS

SEQ ID NO: 166636 - protein, 443 aa, unidentified
MARKRKGQWLRVVYPNCAGIDVGSREHWVAVDPDRCEEPVRRFTTFTDGLEALAEWLASLQITHVAMEATGVYWIALFELLEARGFEVLLVNARATRQVTGRKSDVLDCQWIWQLMSYGLLRAAFRPPDAVCALRALVRQKAGKVEEQSRCIGHMQKALTQMNVQLDNVVSDLMGKSGSTILRAIVAGERDPHTLAQHRDRRLRADAATVARSLHGNWRAEHLFALSQALAHYDFLAEQIAACERAIAEALARLPSVCEHTSAPVKSLRGGGRSSEGQRQLHQALQQVLGVDLTAIPTIGLDTALVLASEIGADLSRFPTSRHFCSWLGLAPPTRISGGKPLPGRAPKVRNRAGQALRQAAANARRSDSFIGASHRARLARMDAAKAIKATAHQLARLIYALLNQGQAYVEQGIEAFEARRADCQLRALERKARKLGLALVAA

SEQ ID NO: 166637 - protein, 485 aa, unidentified
MKTKQQEGAQEAKKANPSANQDKWHDMNRKQRREMMRKIQSEDLSLEVIHPDAAGIDIGNESHYVAVPPSRDSQPVRRFGCTTAELKAMAAWLKQCNIRTVAMQSTSVYWIAVYDILEHADLEVFLVNARDTKNLPGRKSDVQESQWLMKLHTYGLLRNSFRPPQEIRTMRTYWRQRNDLVRAAARHIHRIQKSLTQMNIQLANVLSDVSGLTGQTIIKAILGGERDPYKLAAFRHPRVKASVEQIARSLEGNWQQDLLFVLKQEQDGYEFCQRQMTECDQQLSHYLEQREDRSQAAPLPEEKRQQRLKKKKGNKPQFDLREGLFRMTGTDLTQIDCVDVMTATTIISEAGWDMSKWETEHHFVSWLRLCPDNRISGEKIIGKGRLPTNNRVTTALKIAASNLRVSDTYLGAQFRRLRTKLGAPIAIKAMAAKLARLVYRILRHGMKYVDQGATFYEAQHRQLQIKHLKWKAAKLGFKVIEVPAA

SEQ ID NO: 166638 - protein, 344 aa, unidentified
MQPQEYVGIDLHRRRSVIVRRSAEGETLEVTKLDNDDLLAFERAVTAAGEHPEVVLEASYGWYWATDLLEELGCKVHLAHPLGNNWGNRRVKNDTRDAEDLAELLRLGRLAEAWIAPPEVRELRELVRYRAKLVSLRTNCKLQVYAVLAKEGVSVPMTDLFGVLGTELLETCHLAIAYRTRVESLRELIEVFDREITKLEGDLRQKLRGHAGYQAIQQIPGIGPLFASVFVAEIGDVTRFRSPAQLASWAGLTPKHHESDLTVRRGPITKQGSRLVRWAAVEAAQRQANGTKLRADFVRITAHHGDNAGARKIARVAVARKIVTLVYYGLRDGTIRSKAISEAA

SEQ ID NO: 166639 - protein, 339 aa, unidentified
MQLYAGLDLHSRNTYIGIMDEEFKRLFGKRVSNKLPLILSTLDPFRDQLNGVVVESTYNWYWLIDGLMDAGFKCVHLANPSAMKQYEGIKHTDDQHDAFFLAQMLILGILPQGYIYPQEDRPVRDLARKRLFLVRHKTSHILRLQSLIARCCAQRVSANEIRKFTVEDLQQLLKQEHIVLSAQANLDTIIFLKQQIKLLEKAIQKKVKLSKAFQQLMTVPGIGLILAMTIMLEVGDIGRFAQVGNFASYCRCVSSQRLSDGKRKGHGNRKNGNRYLSWAFTEAAHLSRRYNEHFRSYYNRKVAQANTSLATKALSNKLARICYYIMRDQVPFRQELLSH

SEQ ID NO: 166640 - protein, 342 aa, unidentified
MDEYDGRQFVGIDLHRQRSVIVRQSESGEQLSAVRIVNDPVALELQLEEAGADPEVVLEATYGWYWAVDVLQACGARVHLAHPLGVKGFRYRRVKNDVRDAADLADLLRMGRLPEAWIAPPETRELRELVRYRAKLVAIRSGLKAQVHAVLAKAGVLIAVSDLFGVTGRQRLAKVALGPAYAERIRSLLELIDILDGHEARFAAMIAERLDTHRGYQAIQQLPGVGPTLAAVFVAEIGDVHRFTDPAHLCSWAGLTPRHRESDTVVHRGHITKQGSKAVRWAAIEAVQRHPTTAKISADKDRIEARRGKNIAKVAAARKLLTLVYYGLRDGQIRALDRARAA

SEQ ID NO: 166641 - protein, 371 aa, unidentified
MNSIVYVGMDVHKEQYTLCCYSYDTDKVEYKQTIPSDYKLVLKYMEQVRSRYEGEVSFVCGYEAGCLGYSLYQQLKDHAVDCKILAPSTMAVTNTHHVKTDKRDAANIARCLAFHTYSEVYVPDNDDNDVKEYIRMRDDQKLYLKKVKQQILAFILRQGKRFEGGKTYWTIAHLKWLKTLGLSDLQREALDEYLLTYEYLTEKISRFDERIEELASVERYEEKVKHMSCLLGIKTHTALSMIVEVGDFERFEKAPKFASFLGLVPSEDSSDTRVNRYSITKAGNSHLRRLLVEAAQSYTRGNVGHKSAALKQRQKGNPPEVIAYADKANERLRRRFYKMTLNKGVNRNVAATAIARELACYIWGMMTEPVS

SEQ ID NO: 166642 - protein, 340 aa, unidentified
MNAMTYGLDIAKSVFQMYWVDPSSGEIHNRRFQRRELIEFLSNCPPGKVVLEACGGAHWWARKIRSLGHEPALIHPRYVRAFVRTNKTDAADARAIWTAAQQPGMPVVAVKSEEQQALLSLHRIREGLVQTRTRECNQLRGLLGEYGLHFAKGRKALLAELRTRRAEIEQGVPPTLLRAIERQQMALRQLDEQIQLIERDITAWLQSEPAAQAVEAIPGIGAMTATALVATMGSAQAFRSGRAFAASLGLVPTQSGTGGNVHLGHISKRGDSYLRRLLIHGARVVLTRSRHRPAWAEALLARRPTNVVIVALANKMAREAWALLAHGRQYDPDYVSRRPA

SEQ ID NO: 166643 - protein, 350 aa, unidentified
MDATTVAVDVAKTVFEVAIANPQWHIVARHRFNRRQFTRFLATESPTHVVMEACGTAHYWGRCAQRHGHTVTLLPPAYVRPYVRRNKTDRTDAEALLEATRSGQIPSVPVKSVAQQTLVGLHRIRAQWMTTRTARINVLRGLLREHGLLLPAGAGPALHAIPAILEDGDTPLATPLCHMISLIYAEVRQVEDRICALERELRAMAHADPVATRLREIPGIGLLTATALLGTVGHIHAFRRARQFASWLGLTPREYSSGARRRLGGISKRGDVYLRCLLTHGARAVLRAAHRRTTVQEPLPRLHQWALVVQARRGHNKATIAVANKLARIVWAVWTRDAAFDPRPALADAA

SEQ ID NO: 166644 - protein, 341 aa, unidentified
MEKTTIIGLDLAKNVFQAHGAKADGSVAFRKKLTRNQVLPFFAEQPVCVVAMEACASAHHWARSIRDLGHEVRLIPPIYVKPFVKRQKNDSADAEAIAEAASRPTMRFVAVKGVEQQAAGMAFRTRDLFIRQKTQTINALRGHLAEYGVIAPAGVANLGRLVEVIQRQDSDLPIAVLELARMLVDQIGALQHRIDELDHEIRHRAREDSVASRLMTVPGIGPICASAMMALAPPAESFARGRDFSAWLGLVPKQHSSGGKERLGRTSKMGQRDLRRLLITGAMAVVRWAALRGPRVGSWLEKMMIRKPRMLVAVALANKMARIAWALMAQGGVYRDPTTAA

SEQ ID NO: 166645 - protein, 471 aa, unidentified
MPAGQQVEVDEHEQIVERVAAIDVAKASGMVCTRVPHATKAGKRTTTVWQVRSTTNQILELADQLVGEGIERVVVESTSDYWRPFVYLLEARGLVVWLVNARDVKHLPGRPKTDKLDAVWLGKLNERGMLRPSFVPPVQIRRLRDDTRLRADLTQERSRHKQRLEKLLEDALIKLSTVATDIFGVSGRAMLEALITGERDPKVLAELARGRLRVKHAALVEALTGQFSDHHAFVARMLLDQIDTLGGQIDQLTGRIEETITAIPTATPPALGPGGDPGAAVHDGIGPARSVPSPAERVDPQTGEVLAAALPVVDRLDEVAGIGRHAAQVIIAEVGLDMGQFPTPGQLVSWARLSPRTIQSGAKHRGGATGKGNPYLKAALGEAAAAAAKTDTFLGERYRRLVRRIGKLKALVAIARSVLVIVWHLLADPTARFHDLGADYYASRIDKGRKTRNLIRQLEALGHRVTLQPAA

SEQ ID NO: 166646 - protein, 343 aa, unidentified
MQSITTIGLDIAKSVFQVHGVDAGGQVVVRRQLKRRYVLAFFQKLTPCLVGMEACASSHHWSRELQALGHTVRLIPPAYVKPYVKRQKNDAADAEAICEAVTRANMRFVPTKTLEQQSGLVLHRARHLFIRQQTAVINAIRAHLAEFGIVATVGRHGVEELLNVVADPNDKRIPEIARACLSALGAQLRGIKEQILEFDRLIRAWHRSNEISMRLDEAPGVGPVLATAVVAAVADPKSFRSGRNFSAWIGIVPRQHSSGGKNRLGNISKQGDRYLRGLFVAGALSVIRYAKIHGTKHRPWLTALLARRPTKVAAIALANKIARMVWAMMARGERYKEPVAIAR

SEQ ID NO: 166647 - protein, 331 aa, unidentified
MTNAADIATPDARPQEYIGIDMAKAKFDWNVHGTAACHSASNDLAGFEVLHKDLRDRRVKLIVVEATGGLEQALIGFLVGHGFPVARVNPRAARDFARSQGHLAKTDAIDARALAHYAHTLAHKADQAGIQFEAVPEQVEALQMLALRRKQLLDMRTAETNRRAGAMRVLRTSIDAVIKILNEQIAKLDSDIDNHLREHFKDLGQRLESIKGVGPNTCAMVIAFMPELGLVNGRRAAKLGGLAPLNNDSGKQRGKRSIWGGRSLVRCALYMATLSAVRYNSVIKAFYDRLIGAGKPKKVALTACSHKLLRILNAMARTGQAWNPEFHGLPA

SEQ ID NO: 166648 - protein, 320 aa, unidentified
MDRIIGIDISKQDFVVAILTNNKPIIKKFVNNESGFHKLVKYLKMLKIDNAKICMEATGKYGEKLANFFYDLGYKVSVVNPACIKAFAKTNLSRNKTDSADALLIANYANKCDPKLFIPKKPILKEIQEIHRCIQDLKSQLNQVTNRLENVDLLTQVVSSTWQDLASSIRLKIEALQNHLVKLALSDENIKKDYENLQTIPGIASISAIAIIAEVPDIDILPNARALAAYTGLNPKHTLSGSSVKGKSRISKIGSGNLRKILYFPAIVSSSVNRNFQEFKQRMRAKGKHNMVIIVALMRKLLHIIFAILKNKSIFSYELA

SEQ ID NO: 166649 - protein, 350 aa, unidentified
MNVNHYIGFDVHKKSISYCVKTADGTIVEEGKLRATHLALQEWAEKRRERWHGAMEATLFSGWIYDALKPYAAELQMGHPAMMKAISASKKKNDQLDARKTADLVRCNLLPACYVATPEIRELRRMLRYRNVVVAQAVRMKNKMSGLLMEVGAEYNKQRLHGKEYFTELLDTIEEVPESVKDLLRLSRGALEMFQTTQQQLLSKLQKDPLLAKRVTVLKSIRGVGEVTALTWALEVGDPHRLGSVGDAVSYCGLTSALDSSADKQRRGPISKQRNPHLQTVLVEAAKLAPRWNPQLAAIHAREVQRGHRNRATLAVARKLVAYLLAVDKSGKPFQIRTPAAAEQEVETAA

SEQ ID NO: 166650 - protein, 353 aa, unidentified
MGIVVALDVHRKQITYKALDRDTGELRRGRIAPAARVDVRAWLAQFAGCEAEFALEGTTGWRFVVEEIERAGHTAHLADPAETAAKRGRKRRAKTDNADCDLQLRLLLAGELPESWIPPVHILELRTRVRMRKTLIDQRTAWQQRIQAQLFHQGIPAGLRLRTQAGRDALAQAELSPGGRELVTLGLRMIDALDLELAPLDRELRGFARRQRGCRTLIAGLYGVGPVSATAILAELGDARRFASSDDAVRHSGLDVTVYQSDSKRSPGRLSHEGPELLRWALFEAAVSAARAGSPDHAYYLRVADRLDHTRACLSVARKLCRRAYHILRELGDEALAPVDCDPHAEEAIAAAA

SEQ ID NO: 166651 - protein, 407 aa, unidentified
MKHDGRVVYGGVDTHQDVHVAAVIDDVGMLLGTKSFPTTPLGLKGLQRWLVKHGQVAKVGVEGTGTYGLGLQRVLQGAGIEVVEVNRPNRQLRRAKGKSDTIDAESAARAVLAGHATAAPKGHDGVVEAIRVLLVAHASTMGALQKAGARIRSLTVTAPDALRVELAHLTTPARAARAARMRPGEDLADVATATRIALRLLGRQYLALVEDQKMIEAQLEELTTRANPGLRQVPGVGPLVAATLLVAAGDNPDRMTSEAAFAALCGASPVQASSGKTTAVRLNRGGNRQANSALFRIAVVRMSHRHPATIDYVNRRTAEGKTKRAILRCLKRFIAREIYSHLVNPRPAIRTDDLRARRIAISQPMRVVAEAVGATLVEISRLERGLNHDPGLAQRYRHWIDHQETAA

SEQ ID NO: 166652 - protein, 359 aa, unidentified
MEAQVKKFDFTDQNIYVGFDAHLNSWKVTVMAEDIVYKTFTQPPKPDVLYNYLKKNFPGGNYHSAYEAGFCGYWIHDKLLSFGIRSIVVNPADIPTTDKERVQKEDKRDSRKIARSLSTGTLMPIYVPSIQTQRDRSLLRTRAMLVKDLARYKNRIKSFLYFYGINIDDSFSNPQSHWSNRFMSWLESIEIDGGSGKEALNVLILECKNLRASILEVTRQIRRLSQMATYREQVILLKSVPGIGLLTAMIILTELESIDRFNNLDKMCGYIGLIPSTKSSGEKERTGDITPRGHSVLRTAIIESSWTAIRNDPSLMKSYLTYCKRMESNKAIIKIAKKLLSRIRFVLSNKKPYICLLEK

SEQ ID NO: 166653 - protein, 362 aa, unidentified
MGTSSKVSRFGVDVHGKFSVATARDASGQVLSRHRLDHTDREALRQTLRQWPSGAPVILEASFGWGWMCDELMAAGLQPHLASSVKVAAWRKARGLAKSNRIDADLLAELWDQQPRWWEVWLAPQEVRDQRELLRHRMGLVATQTQVKNRIHALLHRHGIVHGYSDLFGVSGRRFLSLLVEDHQRLRETARRTLKDMLILLDALRRLIARATRQFRAVIRRSEGAQRLTTLPGVSTVLAYTLMAEIGQIERFANARKLVRYSLLAPMADDSGETREGKPIGRCLSRAGRATLQWAWIEAAHGAIRKDAHLRELFNRRTDNGKQDRNRGYIMIANRLCRIAYAMLKHKTDYQMTPPPRRGSQG

SEQ ID NO: 166654 - protein, 318 aa, unidentified
MNEVYIGIDVSKNTLDVASFPTSKSWQFENHATGINQLVSMLRKQSPALTVAEATGGYETEMAYALKKAGIRCAVVNPREVRDFARATKKLAKTDRLDAYVLAHFAALIQPEPRPLPDEDARELEAILSRRRQVVEMITSEKNRLHHAMSPVKEDILAHIAYLEQRLQDQEFALEGRIDESPVQREKYNLLKTVPGVGPNLARTLLIGLPELGDLDRREVAAVVGVAPYNRDSGKRRGIRHIRGGRPDVRSALYMSTLVATRYNPVIREYYLRLCGSGKAKKVALVACMRKLLTILNAMVRNHSPWAVSRPELAFSVA

SEQ ID NO: 166655 - protein, 423 aa, unidentified
MSQNQPEIQYAAFLAIDWADQKHVWSLQDANSSTCERGEVDHMPEAVEAWAAQMSQRFAGRPIAVAVEQSRGALVFLLSKYEQLHIFPVPPAMTANLRKAFYSSGAKSDPSDADLLLDLLQRHREKLRRLSPDTEATRRIQNLVEERRKLVDEKTAQSNRLEAHLKIYYPQIPRWFGDVDSPLVCALLERWPTLEALQKARPDTLRSFFRKHHSRKEELIENRIKAIGEAMPALKDRAVVEAKVAVVKVSVQLIQVLHEGIEGLNRQIQEAAEAHPDFFIFDSLPGAGAVMAPRLLAAFGSQRERYQDAAEVQILSGIAPVSESSGKSSWVHFRFACSKFLRQSFHEWAALSIPQSQWARAYYELQCRRGKKHHAAVRALAFKWIRIIYRCWKEQVAYNENVYLAALAKHNSPLVAATKAVAL

SEQ ID NO: 166656 - protein, 379 aa, unidentified
MNSIGYIGFDIHKKTISFCAKEQDGQILDEGVIPARREDLASWAEKRPRAWVGAMEATLFTGWVYDQLKPAARELKVAHPLMLRAIAASKKKNDKVDARKIADLLRCDLLPECYMAPSAIRELRRILRYRNLVVRQATRMKNRISGLLMETGTAYNKGRLHGKAYFSELLRSLRETPPSVVELLKLSRKQLEFFTTIQKRLLKGLSEHPQLKERVERLQSIRGVGEILALTWALEVGEVKRIPSISQAVSYCGLTSAQRNSAGKEQRGPISKQRNKHLQTMLIEAAKLAPRYNPRLAAVHERELKRGDCNQATLEVARKLVAYLMAVDQSGKRFEVRAVAGEEIEGSGRSGPGKKIVGGGAGNRPKQRRPVTAGDPRCA

SEQ ID NO: 166657 - protein, 297 aa, unidentified
MKYFAGLDVSLEETAICVVDESSRIVKETRAASEPQALSDALRKLDLPLERIGLEACSLTAWLHDGLCAEGLPAICIETRQANAAMKTMPNKTDRNDARALAQIMRTGWYRQVHVKSRLWRALLVARRTVLNEMRSTENVVRAILREAGVKLGRPSRTAFADGVRELADAEAMVMVEPQLSILGSMLKEFARLTKQVLDIVRKEEVCRRLMSAPGVGPITALTFRATIDRPERFGSSRAVGAHLGLTPARNQSGETDIPGRVSRCGDELARTALYEAAHSLLVRPRKWSSLRAWACF

SEQ ID NO: 166658 - protein, 359 aa, unidentified
MRQLYAGCDLHGNSNLIGIVDGEGKRVFKKKLSNDFSLVRDTLKLFQEELVGIAVESTYNWYWLVDGLMGEGYKVHLANPSAIQQYVGLKHADDKHDAFWLAEMLRLGILPEGYIYPKQERPVRDLLRKRGHLVRLRTSLVISLQNILSRNLGRKVNVNDVKALREDRVTPLLESSEELALAGRVSKEAIDFLTHQIRRIEGVVEKRIELKEAYRYLLTLPGVGKILALTMMLETGPIGRFATVGNYVSYCRKVPSQWTSNGKRKGSGNKKNGNKYLAWAYAEASELARRFYPEPRAYYNRKMQKTNAPVAHSALAHKLARAGYYVMRDQVPFESQRLFGRGRGWNGEPELGLVKSHEA

SEQ ID NO: 166659 - protein, 427 aa, unidentified
MSEVQPVKPEPQFAAFVGIDWADQKHVWCLQAVDSEKRESGELEHTPEAVEAWVGQLCQRFANRPIAVAVEQSRGALVFMLSKYEPVHLFPVPSTMACNMREALYPSGVKDDPRDADLLLDLLLQPGDKLPRLSPDTEATRRVQNLVEERRKLVDEKTTQTNRLRSQLKIYFPQFLDWFEHLDSELVGALLERWPTLEELQKVPPAKLRTFFRQHHCRDEALIEGRILAIRQSIPAIRDRAVIEAKSMVVNVIVQLIRSLREGIADLEERIEEAAAAHPDFFIFESLPGAGAVMAPRLLAAFGSQRERYANAAEVQSYSGIAPVTERSGKKKWVHFRWACPKFLRQSFHEWASHSMAYSVWARSYYQQQRSKGQDHQAAVRALAFKWIRVAFRCWKDGVAYDESKYLAALARRGSPLAALVAAGKTL

SEQ ID NO: 166660 - protein, 345 aa, unidentified
MNSIAVGVDIAKQVFQVHYVEPETGEIVNRPIKRARFLEHFANRACCLIGMEACSGAHHWARQLVKMGHEVKLMPAEFVKAFNIRNKNDAADARAIWLAVQQPGKAVAVKTETQQAMLALHRMRQQLIKFRTMQINNLRGLLTEYGEVMAKSRAALDRAIPAVLERVAERLPAVVIDTLREQWAGLTKLDEQIAQIERRMRAWKKEDQAVKAISEIPGVGLLTATAAVAMMGDPKAFSSGREFAAWAGLVPRQTGSGGKVNLHGISKRGDTYLRTLLIHGARSVLEHSKEPGPWVEQMIKRRPKNVVIVALANKIARTIWAVLAHDRRHQKNYVSVRPAEAVCGL

SEQ ID NO: 166661 - protein, 311 aa, unidentified
MTNDSIGIDISKDKLDACRLSDGAFAQFPNSPRGFQRLRQWIGTTPPGRVVYEPTGACHASFETALAGHLPLVKVNPRHARRFAESCGSLAKTDRADARMLAQMGAAHALQPDRLAARDQSVLRELQSARTALVKDKVRLKNQLDQQRHALTRRLSRRRLRLVEAQIAELDYAIRAQLETCPERQRALHLIESIKGIGAVAATTILIEMPEIGSLRKKAVAALAGVAPITRQSGRWRGNAYIQGGRKPLRDALYMPALVALRYNPDLKAQYERMKAAGKPSKVAITAIMRKLIILANTLVKEDRKWQPKLA

SEQ ID NO: 166662 - protein, 366 aa, unidentified
MLEATTYVGLDTDKTGIDVAVAEGVIGGEVRWHGRIANTPEALAKVLGKVQKPGVRLEVCYEAGPCGYGIYRRLNGRAGVACQVVAPSMVPRRPGDRVKTNRRDAVKLAKLHRAGELTAVWVPDPAHEAMRDLVRARGQTMADLTRHRQRITSFLLRCEVGYAGAAWTKKHRAFLAGLSFAHPAQRLMWSELLSALDQAAARRARLDQLIGEQVAGWSLAWLVEAWQALRGFGRLNAAILAVEIGDPRRFQSPPQLMGYLGLGVSEDSTGEKRRQGRLTKTGNGRARKVMIEAAWTYARQAKPIERTGDHAPAVVAIADKARHRLSQRYRKLRARGKPAPLAIAAVARELSGFVWAVAKAAEPDKA

SEQ ID NO: 166663 - protein, 358 aa, unidentified
MRKINVLNFEGQTIFCGVDVHKKSWQVNIRCSEFELFSFTQKPSVDGLFNHLRSRYPGADFQVVYEAGFSGFGLQRRLRESGINCLVINPADVPSSDKDKKRKSDRIDARKLSRELSNGMLSSIYIPTVEMEHARTLVRQRSMLVKDSIRCKARIAHKIMFSGLEMGEHDSQQYWSRRYVEHLRSLPCATPALRQALDLAIDEYVMVRKLLNQATCQIRSLARQEPFTQTHELLKTIPGIGLINAMIILTEIQDMARFSNLGKLCSYCGIVPDKFSSGEKEAVRGITHRSNNHLRVAIVESSWTLIRKDPAMLMLYKKYCQTMVPNKAIIKIAYHLLSRMRHVWKTGEPYQIGLAGDV

SEQ ID NO: 166664 - protein, 468 aa, unidentified
MGAAKSRTGPRSVEIVKDNEVLQENEINDIIYPDGTHLVSAPNNDIVRLICGGIDVHKKVLMAAAAITNPSTLKAVYYVKKFSTMNADISSMANWFKQHGVIDVVMESTGKYWIPVYNILEGEGLKPIVTHPKYVKQISGQKTDFRDAIHMANVFRMDLIISSFIPPADIRNMRDLCRYLMKLTYIRTSEKNRFQNSMTTAQIRLDSVFSDPFGATASRIMDYILSTPKDQVSKDDIFKLIDHRVKAKPEDIMASIEGFDLSSVQRDKLLIVGQHIKDLDALIESVLECLYPYKEKYSSYIDLLKTIPGIGDRAALFIISEIGVDMSVWRNDASLASWAGLCPANNESAGKKKSTRIGNGGHYLKPVLVQCALAAIRSEKNSYYAIKYNRIRSRRGHKKAIIAIARMMITAIYHMISNGATFQPNDLNKEVKASAKKVELTVDNTCDYLRELGVSEDLIAQVKCQCRK

SEQ ID NO: 166665 - protein, 345 aa, unidentified
MSESYEGKQIVGINLHRRRSVLVRMTEAGERLETVRISNDPEYLRQVMARAGEAPDVALEAAYGWYWAADTLAELGAQVHLAHPLGVKMFSYRRVKNDERDAADLADLLRMGRLPEAWIAPPATRELRGWVRHRAKLVGLRSNLKCQVHAVLAAAGVQVPMSDLFAPGGQRLLAGCPLAPESRSRVDSLLRLIDALDFEIDTFARLVAGRLREHPCYIAIQQIPGVGPILAAVFVAEIGDVTRFPGPAQLASWAGLTPKHHESDTTVHRGRITKQGSRLIRWAAVEAVQRVPAHTRLGQVRDQIGACRGRNIGVVAARELTELVFYGLRDGHIRRLSAPQHTPAA

SEQ ID NO: 166666 - protein, 360 aa, unidentified
MDPFAPSDTEALITLGVDTHADVHVGVALDRLGRRLGSKNIPTTEAGYAELVAWAESFGALDCVGVEGSGSFGVGFVRFLRARGVGVVEVNRPNRQHRRRFGKYDTADAEAAARAVQANMATGEPKAADGIVEIMRALRVARRSAVKARTQAANQLRTLLFTAPEELRTQLCGLSTNRLVSTAAGFRPGREPRDLVAVTKLAMRSIARRHRDLSEEISALDERLKQLVAQAAPALVALKGVGTDTAVSLLIAAGDNPERLRSEAAFARLCGVAPIEASSGMIRRHRLNRGGNREANRALYVLVLGRMSWDERTRGYVARRTAEGKSKREIIRCLKRFVAREIYRILTATPPVLPSPLWGS

SEQ ID NO: 166667 - protein, 453 aa, unidentified
MTINKLWQNRKERKELARRLRSEDPGLEVVHPNAAGVDVGNSAHYVAVRPDRDSQPVRRFECFTADLNRLADWLESCGVKTVALQSTGVYWIPLYDILEERGFEVYLVNARHTKNLPGRKSDVQESQWLLKLHTYGLLKNSLQPTSEIRVLRTYWRQRAEHLREIGTCILRMQKALTQMNLQLANVISDVSGVTGQNIVRAILKGERDPRIHASKEEIAKSLEGNWRQELLFVLQQEVDMYDVYQKRIAECDQQLQKHLARFADTVPAQTREEAKKKKGKQKNHPQFHLADELQRITGVDLTRIDGIDVMVAQTLVSEVGLDMSRWKTEAHFASWLGLCPDNRTSGDKVLSRGTRHVVNRAATSLRLAATTLLRSQTYLGAQYRRLRSKLGAPKAITAMAHRLARLVYRMLKYGQQYVDKGAEYYEQRNRQQQIEFLRKKAAKLGLQVIAANT

SEQ ID NO: 166668 - protein, 401 aa, unidentified
MKNYSYFLGIDVSKDSFDACLIDVKQKVKMNEKFSMNSDDFEKLIQKLERYEKESILIVLESTSIYHLNLLFHLQDNGFNSALINPVLIHNFVKSVTLRKSKTDKIDAYRIACFALYNKENIKVKKDLPNSIRNLSRERENISKQIAKIKTEIKNLLQILFPELIANFNVFTKTFLMLLYKAPGAFPIKRLKPQQIKRIFDKSNGNKVQISPKKLIKMAKRSFGIEDEYRQAILVMKIEMLLFLQKQKESLSDKIKNYIDENLKQEFKIITSIDGIGNTTAENFLIEIGNINNFNSHKQLRAFISTDPSIKQSGSSVNVRGKISKKGNAHLRRTIWQMAFAVRKFSPNFKEYYIKKRNEGKKYKQATIAVANKLIKTLYALLKTNKYYIKNYNDYSKFIYS

SEQ ID NO: 166669 - protein, 333 aa, unidentified
MTSKGLEKMSHSIPHASDEITIGIDISKETLDVHLHPEGIVRQFPNDRKGHANLIAWARPYQATRIVFEATGRYHRALEMALGKAGLPAVKINPLQARRFAEASGKRVKTDPIDARMLALFGATLRPEIPPAKDETIDILAELLSARRGLVKDRTAASNRGKSLTLALLKRQCEQHRKQIDNQIDAIDQEWMAVLATNPRLKARLDILLSIPGVGAATAIALLVDMPELGTMDAKQAASLAGLAPVTRQSGTWKGKSFIRGGRASLRQAIYMPALVAIRFNPPLKEKYEALRGAGKVAKVAIVAIMRKIVITANALIRDNRKWTLDMTAAGSK

SEQ ID NO: 166670 - protein, 333 aa, unidentified
MTTMTETPRRITGGVDTHRDTHVVAALDDNGAELGVESFPTTPAGYRAALRWLRRFGQVERIGVEGTGSYGAGLTRFLQGETIEIVEVSCPNRQLRRSHGKSDPVDAVAAARAALSGSADTEPKSRDGKVEAIRALRTADRSARHARVKALNQMRALLLTGPDELREQFRGSTVWQLAHSAARLRPGDPTTAVGGTKYALRLLARRVLELEAELAELKAILTPLVAATAPELVARHGVGTDTAGALLVAAGDNPERLRDERAFAHFCGVAPIDASSGTVVRKRLNRNGDRQANAALWRIVMVRMVSDPATRHYMERRTKEGLSKREAIRCLIG

SEQ ID NO: 166671 - protein, 341 aa, unidentified
MEKFIRTAVDLGKNYFQVHGLESEGGRSISRKVKRSKMHEVYSQIEPCRVGMEACGSAHYWARQLTAMGHEVVLIPPAYIKPYVKRGKNDAIDAAAICEAMSRPDMRFVPIKSADQQAVLMLHKTRELLVKQRTMAVNALRGHLAEFGIVAAKGIGRVDELLALAKADAALPHIAGAAVTCVAQHLEGLDLSIETVDEEIARAHRQNPTSRLLDEIPGVGTLIASVIAASVPDPGVFKSGRDFAAWLGLTPRQNSSGGKEKLGAITKQGNRYIRKMLVTGATSVLRVAGKRIGVLADWINALRARKPERLVAVALANKLARICWAIMTTGEGFRTATYVKA

SEQ ID NO: 166672 - protein, 343 aa, unidentified
MKPAKHSLGIDIAKDKFDVNLRTLESAEGRSATTFKNNPKGFKALHQWLVKKGAASSELVHACLESTSRYGDALAQFLHQNAYQVSLVNPRRTRRYADSQLTRNVNDKIDAGLIADFCAAQRETLSLWEPLSPEHRQLRDLTRARQTLVEERERFANLLETASGLARNTFLKQVRQLDQQIKQMDKAIKQFLRLAPDLHKQVELADSIKGVGWVTAATVIAELPPIDKIPQAAQAVALFGLDPIKKTSGSSVDTPARLSRMGSRRGRRALYLPALVALKWNPIIRQLGQRLQNKGRSGKYVIVAAMRKLLRLIYGVLKQGCPFDPNWNGKAQRAPKTQTLVLT

SEQ ID NO: 166673 - protein, 412 aa, unidentified
MLKIVYRICCGIDVHKKFLVACIASTDEKGVTTYKSCRFPTFTSGLRKLAEWLNANSCIDVCMESTGKYWIPVYNILEATCNITLAHPKYVKAIRGKKTDKKDAKWIADLFKHDLVAASFMPPLAIRQLRDLMRYRVKLTNFGSSEKNRIQNCLTVSNIQLANVVSDTFGKSSMKIIDHLLENPTDKDFDFVPLLHASMLNKVDNIRLALDGDISPEQRQKMNIILQHYDELGKCKSNLESLILSLAKPYAKECALVSTVPGIKNPFSAIAIISEIGVDMSVFPTAKHLCSWAGVAPQSDESANKKRSVRISRAGVYIKPLLVQCANAIVKSDKHPEIRHRYLSIKKRRGHKRAIIAIARMLLTAIYHILKNGEAYNPELYRKALFIPQSREITVEQAILLAQKHGFLVKAS

SEQ ID NO: 166674 - protein, 354 aa, unidentified
MLIIGCDYHPGFQQIAFVDTGTGELQERRLGHSQEAEAFYRELKQRGASVRVGMEASGQARWFERLLAELQFELWIGDAAQIRAKRVRKQKTDRQDAQHILDLLLENRFPRIWVPSWENRDLRQLLWHRHRMVQTRTRLMNQLQAVALNEGVRRKKGLWREAGRKQLETLALAPWASRRRRDLLEMLDRLTPRIAELTEAVEQEAEKYPAARRLVTHPGVGPLTALAFVLIIGEVERFRCGNQVASYLGLVPAEDSSGEHRRLGHISKQGNTLLRFLLVEAAQVTIRSDAEWRRKYFHLALRRGREIAKVAMARRLAVRLYWMWRKEWDYEQWKKFGPHAGQPGTGVGVQSNTE

SEQ ID NO: 166675 - protein, 387 aa, unidentified
MPQPNDVSRSLVALDQDSTIIAVVEMSQSSWLVGGVLPGIERQPRKKLEPSAERLLGLLLRWRDEAVRAGKKITRIALAFEAGRDGFWLARWLRARGVEAHVIHPSSVAVSREHRRAKTDRLDTELLKRGFLGWLRGERGHCTMARVPTIAEEDAKRPNRERECLVGERTRIVNRMKGTLARLGIRNFKPTLRKSAERLATLHTPEGSPLPPNVLAELQRDMARLGFLICQIREIEEARQKRLEQEPETGPHAMVRLLARVVGVGIETADMLVHEVLSRPMRDRKAVARYAGLTGAPDESGAKRREQGLAKAGNARVRRGMIQLAWRFLLFQKQSALARWYQARTADARAGARKTMIVALARKLLIALWRFVTTGETLEGVVLRPAG

SEQ ID NO: 166676 - protein, 286 aa, unidentified
MAEVSTIGLDIAKTVFHAHGADARGQMVFSRRLTRAKLLEFFSAQPRCVVALEACGGAHHWAREIASLGHEVKLIPPAYVKPFVKRNKNDAVDAEAICEAAQRPSMRYAAIKTEAARTMFLVMTGQLEQLNEQVALLDKEIARRAREDEAARRLMTIPGIGPITATALLALAPPAEGFARGRDFAAWLGLTPKQHSTGGKERLGSISRMGERTLRRLLIIGSSAVVLQASRRGAPRGSWLEQMLARKPRMLVTVALANKTARIVWAVLMKGEDYNEGYRAPVAAAA

SEQ ID NO: 166677 - protein, 376 aa, unidentified
MNQDSTLYVGLDVHKDSITVAYAMGLDEVELFGKIGTTQSEVDRLCKRLQSKARHVHVVYEAGPCGYGLNRRLLEKGFDSMVCAPSLIPRKPGDRVKTDRRDAFKLVRSLRAGDLSAVHVPSVEDEAFRDLARAWSSARDDLKQARLRLKSFLLSHGVQYSGRANWGPAHRRWLSTLSFDSTWQQLAFNEHRRTIEDRLAQCDRLEAALREAVVNWRFYPVVLALQAMRGIQFTSAVGLISELGDLSRFDHPRQLMAWLGVTPSEHSSGNKRRQGSITKAGNSYARKLLVESAWSYQHPARVSKDIQKRQEGIPKPIVDRAWDAQLRLCGRYRRLVARGKSRQVAIIALARELAAFIWDIGRMGMTLAVPQSEQPA

SEQ ID NO: 166678 - protein, 401 aa, unidentified
MNEFTPEQHRTETASALEIVRTAENVDVYAAYVGLDVHKETIAVAVAEAGRAEPIYRGEIANKPKAAEKLLAKLSADYDGGLLLFCYEAGPCGYVLYRQILASGHDCQVVAPSRIPKAPGERIKNDRRDALKLARLLRGGDLTAVWVPDQEQERMRDLSRARDDMKGQERKARQQLNAFLLRHGYHWPRGKSRWTPAHENWLAGLKMEHPWQQVVLEEYIAAERAAGERVAQLSDHLMRALPEWSLAPVVDSLIALRGVDKLAAIVLLAELGDISRFDSPRQLMGFLGLVPSEYSTGTRRRQGGITLTGNAHARRMLVESAWSYRFPARQTKHLKGKARNASAQAKQIAWKAQTRLCGRYRTLTRAGKNTKLVCVAIARELAGFIWDIVRREMPRLAPQQG

SEQ ID NO: 166679 - protein, 344 aa, unidentified
MNFIRFIGIDVSKKTLDVSVFQSGEVINKFPHIQVRNDKQGFKDLLRWTKEQGVKPKDALFGLEFTGYYSDELEQFLTKKQICYTMLPTTVVKHYQRGTHDKNDKIDSAKIADYLFRFNGTECIKLRVLPSKAMQELKSLKSERKFLVQHRVACENRLQVAKSKSEEKHLQKLIDLCKEEVEQVEKQIADVVTSDEEIYTTFRLLTSIPGIGFVNAVNTIANTQNFTAFETARQYAKYLAVAPSEHSSGTSVHWRRRPSPHADLQAKADLSMAALHVIELSAEMRQLYERKLGNRPKDKDVQKKALNAVKFKLIREMFAVAKQARIFELRGLDKAQTETHNTEK

SEQ ID NO: 166680 - protein, 339 aa, unidentified
MNLYVGIDLHSTNSYIGIINDDFKNVMEKRVPNNKDKILNILAQYSDKIIGVVVESTYNWYWLVDALMAAGYKVHLANPAAMKQYEGIKYLNDKHDANWLAKMLKLGILPEGYIFPKNTRAIRDLLRRRGSLVQKRTAFKLMLQQIYSNQKGESLSNNAMEKMKYAEAEKLFEEEAWQMNGLCLYETSQHLKKQITEIEKYVLKQCKDEWSYKGLQTVPGVGVVLGLTIALETGPIERFLTAGDYASYARCVPTAYWSNKKKKGTGNQKNGNKYLAWAYAEAASFCMRHCEEAKMFYQRKTAKTNKPKAYRALANKLSKACYFIMRDGMAFDVNKLFQN

SEQ ID NO: 166681 - protein, 356 aa, unidentified
MTKVKTNFCYHRVDVGLDVHKRSWNAAVFLDGVYIRNVHQPPSPKALHHFLTSYFPGADYRRAYECGKFGFWIQRQFSQLNIEYLVVNPADIPSTHKDEVYKNDCRDARGIGDALTKGQLRPIYIPSPEQEADQHLVRMRKKIWRDLVRCKNRVKDFLDYVGVPIPAQFDNPNWSRNFIKWLKQLPIEYATGRLTLDYKIREVELLRRELLSICNDVRKLMRSKKYKEIYYLLRTVTGIGPLTAAALITEIGDIKRFPTFYHLNSFIGLMPIEHSSGEKIMKGRITIRKHRQLRSDLIECAWAAKRNDPALALYYNEQIKKGKNGKAAIVKVARKLLSRIRYVWLSGKPYETAVVQ

SEQ ID NO: 166682 - protein, 344 aa, unidentified
MWIIGCDLHARQQTLAILDTATGEVVNETLAHEGDGVREFYSTLPGPVRVGIEATGSMKWFLNLMEELGIDCQVGHPATIRAAEPRRQKHDQRDAELLLKLLVENRFPSIWQPSKELLDLRALLLHRHQWVRLRTRIQNALQAIALANGLRRGSSLWSQRGQQAIRSLPLATHTAHRRSELQAMYERFEAEIEELNERVLEQANRRTTAGLLMTHPGVGPITALATDVFLGDPKRFRDGKALASYIGIIPRENSSGGRQRLGGLTKQGNPLLRFLWCEAAVHAVHRDPELRQFYRRKLVQKGLGKARELAALTGQVPFNVVSVRLVRHPAAESANRDLHSLFLP

SEQ ID NO: 166683 - protein, 350 aa, unidentified
MIVGIDVHKHNHAAALIDDRGGEIATLITPNTPKGYRGLIDWLVDNSAAKAIIGVESPGSYGRCLVAAMAGAGFEVLQVPAWRTHRERHRRGPGKTDPGDALSIAHVVRTKREELGPAEEPELVRALGMLELQRRRFVRDRTQAIQRLRSDWTQHDPVAEAGVIRCDRQRELAKLKRLQLGSSLAARTAARCIRELAKDIADLNARITDLDREIAELLVEHENPLADLQGAGSNLAATIIAQAGDVRRFRSASAFARFCGAAPIPCGSGKTASRHRLHRGGNRQLNAALYRIAIVQQRHHPDAKAYLARKIAEGKTPREARRALKRHLANVLYRRLYTWAEQAPAMNLLT

SEQ ID NO: 166684 - protein, 391 aa, unidentified
MIYVGIDVAKDKHDCFITNFDGEVLFKAFTIANNLDGFNDLYQKIVSVTEDITKVKVGLEATGHYSYNLLGYLIDKSLPTYVINPLHTNLYRKSLSLRQTKTDKVDARTIASMLMSDVNLKSYSDISYHNEELKSLTRYRFDKVKERAKLKTSVSRLVCILFPELEKLVPTLHITSVYALLSEFPGAKHIATAHLTRLTNLLSEASKGRYGKDTAITFRDAARASIGSNMPAKSLELKHTIKLIQELDSEIDEIEKEIKIIMDEINSPILSIPGINYRMGAMIIAEIGDFNRFDSPDKILAYAGFSPSTYQSGQLDGAYAHMEKRGSRYLRYALYNATKYVCHWDPTFAAYLAKKRAEGKHYNVAISHAVKKLVRVIYHLEKTKQQYIKAA

SEQ ID NO: 166685 - protein, 361 aa, unidentified
MSESMALVGLDVHRAQSVAAVLDPVTGELSVQRLRGAPAAVVPAFLAGLERPVRAVYEAGPTGFALARAAAERGLDVRVIAPGSIPKAPGDRVKTDRRDAMRIARLFAAGELSFVYVPSEPDERFRDLVRCIDDARTDLMRSRHRLSKFLLRRGLHFPGRAWTAPHAQWLRRLGLEDRLTQAVFVDYLGAVEMLVERRRTLIAVLEDAIPASSHAPVVARLRCFRGIDTLSAAGLCAEVGSFDRFARPTLLSGFLGIVPSEYTSDSKRTQGSITKAGPTHARRLLVEAAHHYRHRPTVGKALADRQAGQDPRVIQVAWHAQRRLHQRWAHLRNERGKPSGTVAVACARELAAFCWEAATLN

SEQ ID NO: 166686 - protein, 377 aa, unidentified
MRAASSEAQGDEVRVTVGVDTHTDRHVGVALDQFGRRLGTRSVPTTPAGFAALLTWAGDFGVIERIGIEGTGSYGAGLTRWLRARGVAVIEVERPHRHDRQARRRRGKSDPLDADAAARAVQAGTVIGQPKAGDGQVEMIRTLRLARRSAMKARTQAANQLHALVVTAPDDLRARLRPLPMAELITLVAASRPVRTGTALGTPLAAAKLALKGLAIRYRQLGAEIDALDVHLEQLVASAAPELLAVKGVGTDIAGALLVAAGDNPERLRSEAAFASLCGVAPIPASSGKTNRHRLSRGGDRDANRALYLLALGRMGWDPATRTYVTRRTADGLSKAEIIRCLKRYLARELYRLLVKPPASLSPPADGNEARPSTIAS

SEQ ID NO: 166687 - protein, 309 aa, unidentified
MSPPCFVGIDVAKATLDVAATDHAPESFANDERGIRALVAFCQPRHPTLIVLEATGGYETTAVTALALAGLPVAVVNPRQVRDFARALGILAKTDTLDAHVLRRFATDVRPIPRPLPDETQADLLALVTRRAQLLEMRTAELNRMPTARRTLQRSLREHVTWLNRRIKDTETDITRLIAASPLWRTQDRLLQSTPGVGPLTSARLLVSLPELGRLTGKQIAALVGVAPLNCDSGTRRGSRATWGGRAPVRAALYMAAQVATRHNPIIKAFYQRLRAAGKPPKVAMVAAMHKLLMILNAMLKHQRSWSPA

SEQ ID NO: 166688 - protein, 431 aa, unidentified
MSKFFYRPTVGIDVSADFSMVAILAPNGDIHRKPFKIKHTKDGFDHLEEQIKKAEEEFAMKIAIFMESTGVYHLTLFHFLCDKFETFIFNPLVTNCNKNVDIRKVKNDKKDSIKIAKIGKFQDVKCSSSFDIEIYTLKSLCRDYYKITDSKSTFKKKLSTDLRVIFPGYITVFSNITCKTSMAILKEFSSPESILNADKDYLINLISSNSKKGLVHSEAIYKKLISASEDAVYIGINSPSLFVKITNTLSIIENFEIQLANLLKEINFLMKSNRIPDNFKQNVALIYSIPGIGEFTAITIMSEIGDIKGFIKPKHLVAFFGIDPSVNQSGKFNSDRNTVSKRGTRIGRRALYAVALASVRTNRNGQPINEVLLKYYKENLEGKSKKVGLVAVMHKLINYIFSVLKNQKEYELRDPQIHARMYLNNYYNQVA

SEQ ID NO: 166689 - protein, 349 aa, unidentified
MDIYAGLDVSLEATNVCVVDGDGKVVREAKLDTDPDAIELFLAAWGIDLKRVGLEAFSCSAWLFTALSEKGLPVICIETRHAKAALNAMLNKTDRNDAKGIAQMMRTGWFRAVHVKSEGAQTLRALLVGRKALLGKVLDMENMIRGLLRPFGLKVGEISVGRFDVRVREIMAGKKELEAIVTPLLDARSAMRLQLAKLQRLVLAAARSDNAVRRMMTVPGVGALVALTFRATVDDPARFKRSSNVGAHFGLTPRRYQSGQTDRVGSISKCGDELTRAMLYEAAVAILTRIHKNFKLRLWGLRLARKKGLKRAATAVARALAVLLHKIWIDGTTFRFGAGGKRGRVAAAM

SEQ ID NO: 166690 - protein, 444 aa, unidentified
MAGSGMILIREVADAPVIMGISKPAGLKSPCGEVKIVNPLFVGIDVSSKNNVAYLMKPDGSKHSSFSVQNNLGGAKLLSEKIVSVLHSMQLNDVVIGLEATSIYGDSLVYALREDGSLGRFQRKIHVLNPKQVRKFKDAYPDLPKNDWVDAFVIADHLRFGRIAKEVYMDDYRYQALRTLTRARFDIIQNLTREKQRFANYLFLKCSGIAQAKDIQNTSATTLALMEHFETVDDLANADLDELTAFISEAGRGRFVNPDATAKAVQAAARGSYRLPKTVNDTVNQAMAVSIASMRALKEQAKVLDKAIEQQFEIIPNTLTSIPGIGKVYSAGIIAEIGDIHRFNSQASVAKFSGLVWHRNQSGDFEAEHSQMIKSGNRYLRYYLLEAANSVRRCDSEFRRYYDLKFKEVNKYQHKRALALTARKLVRLVFRLLKDNRLYIPPEG

SEQ ID NO: 166691 - protein, 314 aa, unidentified
MKKVFIGIDIAKDKIDISVLPSGESWTVDTGSTELSETVKRLAALKPTCIVLEATGGLETRLAASLATAGLPVFVVNPRQVRDFARAMGILAKTDAIDAQVIARFAEKVQPEYRPLPTEEERTLKELLTRRRQLVNMRSAESNRRQRIVSKHVHDSIATLIESINHEIDSIEREIDDRIKASPVWRAKEKLLQSVPGIGKTTSSMLLIALLELGSLNRRQIASLVGLAPMNRDSGAFRGRRMITGGRASIRAGLYMPILSAVRYNPQIKSFYVRLIGAGKLEKVALTACMRKLLTMLNAIVRKNQPWHSFPLDF

SEQ ID NO: 166692 - protein, 351 aa, unidentified
MSHYRVGCDAHRRYSQFAVLDQDGQLRQQTRVDHEPGAIQGFLESLPEGTPVALESVGNWYWIADEIEAAGCVPLLTQAAKAKVMMGNVNKTDKLDAKGLARLLHLDSLPTVWLPPGEIRDERELHRTRMALSKLRTALKNRIHATLAKYGITTSDHSDIFTGTGRGWLQTSLSRLPPETGRCVAQELEALDGLQLQITQLEERIRERIALTPSIQLLKSLPGVGDILGIVIDRFDTSGQFTSYAGLVPTVHASGGKTRFGHMRKPSNQYLKWAFIEAANVVVRHRHHPAWKTKYVCQIYDQVCQRKGHAVAVGAVARHLAEGAFWILKRQQAYRPPANRQASPKQVRGRA

SEQ ID NO: 166693 - protein, 378 aa, unidentified
MKQTTREVEYTTEPSLYLAFELGKAKWKLALSTGLGQNPRLRTVDAGDLTALEEEIRQAKRRFHLPELVVVRSCYEAGRDGFWLHRYLVQKRVQNLVVDSSSIEVNRRARRVKTDRLDATKLTTMLIRYHSGEEKVWSVVQVPTVEAEDMRHLHRQLSSLQVARTRHICRIGGLLASQGVNVPIHADFLSTLPSVRLWDGSPLPPGVRARVEREHAALQYVRQQIKELVVERDKLIETSDKPSIQQVRQLMKLVAMGPNSAWLFVMEFFAWRQFRNRREVGGLAGLTPTPYQSGGESREQGISKAGNRPVRAMAIEIAWCWLRYQPDSELARWYYEHFGQGGKRMRKVGIVALARKLLVALWRYLETGEIPEGAQLKP

SEQ ID NO: 166694 - protein, 400 aa, unidentified
MMRTVFGIDVSKHTINLAIVVNKVKVDELKLTLDRPGLDDLLKLLKSFHQPEVVFEATGIYSRTLQHFLDCNKFNYTMLNPLTAKKQLDSLRPYKTDRADALNLAQTSFIIHRSLSYKQAPVYEQLHDLSRFYQEVSRDVINHKNRLHRALQLTFPQLESLFSNTNNELYWAIVQHFSCPLKVLNISYTELSSFILNSTNKVISTNRANHLAKKLLVLAKKAYPVVNDTSYVYEQIQYLTKRIVEEVHEKDKIITEMQHEAENLPEYNLLLSIPGFGVRTVTSLIGELGDIRRFHSSNALNAYIGIDLRHYESGNFVATDHISKRGDAVARKILFKSIQNIAVASHFHPNHINDFYQKRKRQSSQHGTKKIAIAAIHRLLRTIYHLVKYNQSYNYQIAKA

SEQ ID NO: 166695 - protein, 350 aa, unidentified
MFIIGCDFHSRFQQIAVLDPATGEVVERRLEHENGEAKMFYATLPSPARVGMEATSDAPWFERVLQEHHHELWIGDAAEIRAAMVRKQKTDARDALHILDLLLADRFPRIWVPSPAERDLRQMLRHRHKLVRFRTSVMNQLHALAIGQGLCRKKKLWTKVGRKDLEGLLLDPWASLRRQELLQLLDQLDPWIAKLDEAVIQAAESRPPAVCLMQQAGVGPVTALAFVLIIGPVSRFANSKKVVSYLGLNPSEDSSAGRQRLGAISKQGNPMMRYLLVEAAQTAARLDPELRRDYQRLKFRRGSAVAKVAIARKLAVRLYWKLREAEQPVPSARMQGSPVGPVVGESLSPN

SEQ ID NO: 166696 - protein, 391 aa, unidentified
MSMYFIGIDISKYKHDCCIISAADQKVVSKVTIKNNKAGFNELLTIIHSLANPADIRIGFESTAHYALNLELFLENSLLTFMEVNPVLISEYKKSKTLRRTKTDSVDCESIARWLMTVEYKPHSKGFYHAYSLKSLTRLRDKLIRQRSFYLVKITNVLDHTFPEFKPFFNERLSKTALYLLENYGSAGKMARMNSASYEKLRSLSRGKSSPQQFLRLKELAANTVGVNNSIFDVELNSLLSLYKSLVKEINTIEKEINKLIEEVHPHYMSVPGIGPLSAAVIYSEYGDISNFTNPGQMLAFAGIEPGINESGTESHGGKMVKRGSSQLRYTLINCCLPLIRFDMTFATYYAKKRGEGKPHRVAITHVAKKLIRVIYALERQDIDFNAQKLR

SEQ ID NO: 166697 - protein, 349 aa, unidentified
MEQNEVILGVDTHLDTHVGAVINDIGRLLGTRSVSTDTAGYLDLLTWANSFGHVCRAGVEGTGTYGAGLARMLHDHEIEVLEVNRPDRAMRRSKGKSDPTDAENAARAVLSGRATAIPKEQSGAAEAMRAVSVARRSAVKAKTQAINQLRALLVSAPQEIRDRLLKVKTAECIKGCIRLRSLGKTPMLQTLTTTLRLLAKRWLTLAEELKSLDTMLDDLTSQHAKRLRERFGVGPQTAAVLVAVAGDNPERLKSEAALAALCGTSPLQASSGKTVRHRLNRGGDRSANNALWTIAMVRMRSDPRTRAYVDRRTKEGMSNKEIHRCLKRYIVRELYPLILADLADSTRVI

SEQ ID NO: 166698 - protein, 316 aa, unidentified
MTTQLFVGIDISKKHLDVAISPGEQTFTCPNTEAGIQKLVRRLQELNPQIILLEATGGYEFLLIAALREAELPACFINPKLVRNFARGAGIAAKTDRLDAQVLALYACRMRPQPRTLPTQQQQELKLLLTRRRQMLEMIQMENNRLDPTPLPRIAQSIRQTIQSLEAQLAALNREIDDFFQQHPLWVGLEQTLTSVLGVGHLSALILIAYLPELGRLNRKEIAALAGVAPFNRDSGQWRGQRHIDGGRSALRQGLYMATLVATRFNPVIQACYQRLLAKGKAKKVALIACMRKLLTILNAMVRKQQLWCPPALINS

SEQ ID NO: 166699 - protein, 362 aa, unidentified
MLAEEAVYSESGRTVLDEEKEVMARYVGVDLHRDCFTVCIRSEAGRTQTREWKLKDVREFARRLKPADELAVEATGNTRYFASVVKEKVGRFVVVNPSQFKVISQSVKKTDRNDAETLALYLSKDLVPEVRMKDEAHAQMASLAQTRDKLVKLRTTLKNKIHNILSARGIVMPKEAFSGEAGLNKVLAMRLGPMVELELQVIVEQIRSLNAGIAKLDGLIKSGGEKLPGHENLTSIKGIGPTSASILLSTIGDVKDFADEGKLASYFGIVPKVDKSNKTEHIGRITKRGSKIARTTLVQCTLIAKRYSPYLKKYYERIKKMRGTGKAIIATARKFLGIIYQTLKNNWVFEDFPNFVIADRPA

SEQ ID NO: 166700 - protein, 364 aa, unidentified
MEIMQYVGMDVHKDQIEIAVFSKEGRTAELVTKTPNQESSLRKFFAKLQERGEVIAGYEAGCLGFDLFRTLESIGVLCVVIAPSKIARKPGDKVKTDRKDAILLAKVLRTGDYQPIYVPSRKDEQVREFLRAREDRKSDLTKTKQRLLKFFLRNGYRYEGKKNWTQKHRKWMQQIEFVSPLQESTYQLYHTTLVSQEQQLARIDERVREIAMNPEYTERVGVLRCFKGIDFLTALSFVVEISDYRRFMSAEAFMGFLGMTPKEHSSGTRRNQGGITKAGNSHLRKLLIESSWHYRYKSMPSKTLEARRTGQSEAIVAYAEKARIRLQYKFGKMIYQGKPKQLVVTGVARELSGFIWGAMTAHIA

SEQ ID NO: 166701 - protein, 476 aa, unidentified
MRRLLGIDLAITADNRACIMEETGRVIAERRFGRTRGELEDLLAVATDGLGQGDELVVVMEPTANAWVAPAALFSSRGAVVHLVPPEQSADLRRYYTKHVKNDRIDAKLLARIPLLHPEGLHPAPLPVGARGTLRRVVTRRARLSAECARHRGRIRSLLQLAMPAMPAALGDELGKGALAVLGRYGDPRSLIRLGRARLTQVLIKATRGAWREERAEQILAAARDAVQLWQGLEGCDFAEVAEDLAAEVRLIRAIESELRELDARAAGLLDEIDPAGLHRSMPGFGERTATTVAGRLGDPSRFSGASKVRSFAGVIPGTNQSGESESRPHLTKAGDHVLRHALFLAAETARRLDPQLAAIYHRQVVERGSHHTKAVCAVATALASRLVAVLMQERPYEIRDTDGTPVDAAAARAIIAARFTVPPEIRAARRQPRSAQRMKGRPVHGVRSKTSPSSPPVDEASEVDATRVLVGVDLP

SEQ ID NO: 166702 - protein, 420 aa, unidentified
MEVTALPAPVFCGVDWAEDHHDIALVDAGGKQLAKQRISDDAEGFAQLMALLGEHGDRADAVIPVAIETSRGLLVACLRATGRPVYAINPLAVARYRDRHSVARRKSDAIDAAVLANILRTDMAAHRPLPADSELVQAIAVLARAQQDAVWDRGQASNKLRSQLHEFYPAILDAFAAHKHGLCAREARTILAAAPTPTIAASLTRRRLQSLLKKAGRVRGIEAEADRLHEVFQRDYLHQLPQVEAAFGQQTTALLRQLNTACLNADQLEGSTAAAFEEHPDAPVIRSFPGLGSLTGARVLAEIGDDRTRFASADSLKAYSGSAPVTRASGKSRTVMSRRIKNQRLAAAGYVWAFVSLTKSAGARAHYDRRREAGDRHVAAQRNLFNRFMGMLFHCLQHGQLYDELKAFPIHPDDRSATAA

SEQ ID NO: 166703 - protein, 357 aa, unidentified
MHINNDNKLFVGMDLRKNSSSFCVKDYEGNILRQEKVLTDKNQIRDFMRSLGQRASIVLEPVSQWYTYADVLEQLGHEVHLAHPMKVKAIASARIKTDKIDASVLADLLRSNLLPESYFATKEVRTWKELVRFRASLLNLRTQVKNKIHAILHKHALRHTFSNLFGKGGRIWLAGLALEEPFKTNLNQYLSLIDVLTKQIDEAEQKVEQQVADHPQAKLLTSIPGISYVSALTIMAEIGDINRFPSAKQLMGYAGLVPSTYSSGDTTRHGRITKTGSKWLRYIMTEAAHHQVLCKRQPGFGSYYLGLKKRKGSGTAAVATARKLLAVVWRLLKDNRPWQEVPPQRGTSGPLAPIVSS

SEQ ID NO: 166704 - protein, 347 aa, unidentified
MDQIIIGVDTHKSSHIAVAINTQGARLGTMTIPTTRQGYRSLEAWATGFGPVKAFGIEGTGSYGAGLSRDLQTKGHTVLDVIRPNRQLRYLHGKSDIPDAESAAKSVLNGQATALAKTQSGASEMIRHIKIARDSAVKSKSQAMITLKTLIINAPAELRASLDQIRGPITLVRHISALRPGEITSPTASAKAALRALAQRWLALHEEIQIHEAELERLVADKAPKLMKSHGISTLTVAEMLILVGDNPERIRSEAALAKLCGICPIPASSGKTTRMRLNRGGNRQANAAIYRVAVVRMRDDDKTKAYAARRTAEGKTRREIVRCIKRYIVHEVYTALCATKSTQFPT

SEQ ID NO: 166705 - protein, 339 aa, unidentified
MVAVGVDTHKERHYAAALDQLGQLLGERTFAASAAGYAELRRWGESTAAGHELVFGVEGVGSWGAGLRQHLQHGGHAVVEVERPRRRDRRAGKSDRIDALTAAKCALNNENVSIPRRRGALTAIRALLIARRSAVAERTRLLNQLQALNATAPIALRERIGEGTGKQLERRILSMRARPGADVETRTVFAVMRDTAARSRALEADARRYKNEIAQLVRSLDPTLLDEPGIGPISAAKLFACDPARFKHEAAFARCNGTAPIPASSGKTVRHRLSRGGDRQVNNAIHTMAIIRAKHQPETRAYLDRRIAEGKTKREALRALKRHISRDVFKRLNEIPLTS

SEQ ID NO: 166706 - protein, 347 aa, unidentified
MRFYTKQHPFYCGIDLHARTMDICILDQAGETRFHRNMPATPEALLKAIAPYHDQIVLAAECMFTWYWLADLCAEHGLPFVLGHALYMKAIHGGKAKNDKIDSQKIAALLRGGMLPQAYVYPAKMRATRDLLRRRLPLAHKRAELLAHVQHTNSQYHLPAIGKKLADKANRDGVAERFADPAVQKSIEVDLALITYDDALLGAVERTIVNTAKHHDATTLYLLHTVPGIGKILGLVLLYEIHEINRFPRVQDVVSSCRLVTCAKESAGKRLGTSGAKIGNAHLKWAFSEAAVLFRRDHPAAQTYLARLEKKHDKGKALTVLAQKLARAVYDMLQHQVAFEREQFFQR

SEQ ID NO: 166707 - protein, 340 aa, unidentified
MSLYGGIDLHANNSVIVLLNEQDEVIYQKRLPNALPTILEQLAPYHTAMEGLVVESTYNWYWLVDGLMEADYRVHLANPAAMQQYSGLKYTDDHSDARWLAHLLRLGVLPEGYIYPKAARAVRDLLRKRAHLVRQHTANVLSVQNIMARNTGARFSVKRIHELTKQDLTTLLAEETQVLAVTSSLVVLDCLRQQIKTLEQTVHKRLHHTPAYEQLLTVQGIGTILAQTITLETGAISRFPSVGNYASYCRCVDSTKLSNGKRKGTGNVKNGNPYLAWAYMEAAQFALRFQPEAQRFYQRKLAQSRNNTVLARKAVAHKLSRACYYIMRDLVPFKATKAFG

SEQ ID NO: 166708 - protein, 421 aa, unidentified
MRGIRGKKITMVKEGTLIATVDIGMTTNTGYCTTVDGRDMKPFKFENTREGFEKFLHMIVASKNKFGCTEVMVGYESTGPYAEPLAQYLMGKPVTIVQVNPLHTKRLKEVNDNSPRKTDEKDPRVIGDVLRLGHALSVVVPEGDAAYLRRLNNARERHVGERTALLNQIQQLVFLIFPEFKKVFNDITIKTPRHILKIYTTPERIRTLDTDALGEEIRKRSWGKFGMREAEALINLARTTVGIKEGVAGIALDIQHILVQLEAVNAFIDEIETEMKKALDRIPYSARILSIKGLGVVTVAGLIGEVGDFSKFRTQSEIMKLAGLDLFEISSGKRKGQKRISKRGRSLLRKILYNAAVGTVRKNGIMCNHYERLIGRGMVRTSALIVVAKKLLRIIHAMLRDDCDYIYNYESPKRVVIQKAA

SEQ ID NO: 166709 - protein, 429 aa, unidentified
MSYRIAGIDVHKKMLAVVVSDVEVDSEYQFERRKFSSNPEQLRLLAAWLLEQEAEEVVMESTAQYWRPVWEALERYWKPICEKRAGARRKSGTLHLAQALSNRGRRGRKRDFPDAERLVKRLVAQELTLSFVPDAEQRLWRTVTRKKYQLRCDRVRLQNQLESLLEEAHIKLSSLVSDLLGLSAQRMLQALAEGETDPAALAVLADERLRATPQQLCDALGACTELNPVYRRLLKMALEELRLIDEQIGELDKGMASLLSEHQDAVQRLAEVPGLGVDSAQQIIAEVGPNAATFPSEKCLSSWVGACPGDDESAGVNHSHRSPKGNRHMRRLLNQAANAAARTKGSIFEIVYRRSVPRLGHNQAIGAIAHRQCRLIWLILHQRVRYEERGPAVTKRSKQLRTWKMIRQLRSFGYRIEPPNPEPSQAQGQ

SEQ ID NO: 166710 - protein, 428 aa, unidentified
MEEITEEAVSLAERVCAIDIGKAAVVACVRVPHPAKPGRRVQEVREYTTMTGDLLCLADWLEGQGVELVAMEATSDYWKPVFYLLEAAGFECWLLNARHVKNVPGRPKTDKLDAVWLAKVVERGMCAPSLVHPKPIRELRDLTRYRRALVREQTREKQRLEKTLEDAQIKLDSVIASVHGVSGRQMLEAMIAGQRDPAVLAEMAHGVMRRKIPQLREALTGHFGDHHAYLCAAMLRRIDALAADIAALDARIGELIAPFAAAVAQLDEVTGIGVRSAQEIIAEVGVNMAVFPTAAHLVSWAKFAPLDHQSAGKNKGASTGKGNPWLAATIGESVAALARTDTFLGERYRRLIRRRGKKRAIVATGNSMLTIIWHLLSDPEARYRDLGPGYYESAISKGRRQRDLIRQLERLTGQKVTLTPPPDLPTAA

SEQ ID NO: 166711 - protein, 309 aa, unidentified
MSHSSTLYVGMDVQKDSIAVAYVAPDHGAEVTYLGTIGTRQCDIDHLIRTLQSKATHLALVSEAGPCGSWLSRYLTKKGYEGGVVAPSLIPKKAGDRVKTDRRDALHLARLMRSGDLTPVSVPTVEDEAMRDLTRAREDTIGDRKAAKCRLKAFLLRHDMRYTGRATWGPAHLRWLSEVVCPTPAQQIVFQEDIRAVNEHPERLQRLEHDLHEQAKAWRLNPVVEALQALRGVQFTVAVTLVAELGDLSRFETPRKLMTCLGLVPSEYSTGERRRQGSLTKAGNTHARRVLVEGAWAYRDPANVSRHLQ

SEQ ID NO: 166712 - protein, 424 aa, unidentified
MVRAVGMDVHRDFCEVAIAEARAVRSAGRIETSPEALELFAASLARTDVVALEVTGNAGEIARILRPHVGAVVVVSPHDTGISRARAKTDRLDARALAKLLAAGELDAVWMPDEWTRAMRRRLARRDQLVRARTRAKNEIHAVLIRRLAGRPPVSDVFGVRGRRWLSELELPEDERETVAGCLRHVDFLDGEVAALDGAIAGEALRRPELLRLMTVPGVSVVTASTFVAAIGDIRRFSSARKLVGYLGLDPRVRQSGPGPARHGRITKQGSASVRHVLVEAVWTAVRSPGPMRAFYERVRARRGAQVAAVATARKLASLFWCLLTREQDYSFAQPSMTRRKIRKLELVAGAPSRKGQVPPGQGVRNKQIRAAERALAQQAEDAYRRTIADWKAVGPAKAGASVTPGRASQRPSKGKAARQTTSP

SEQ ID NO: 166713 - protein, 440 aa, unidentified
MGSYAGVDWASEKHDVRVADAAGEKLLAVTFAHDEQGLRSLCRQLVRLEVELVAIERPDGLLVERLLDAGLRVLALHPNQVAAARDRFRVSGGKSDGFDAFVLCELARTDSHRFRVLEPDSDQTKALRALTRGREDLVGMRTALTNQLRAELERFWPGPLGLFTDLHGRISLAFLERYPSPADARGLGEARLAGFLARERYSGRQKPAELLAKLRRAAAARVGELELSTRRQLVLGLVAMIKSLSAQIKELERQLARTLGEHPDGEIFRSLFRDPRSVICAGELLAEIGDCRGRYPSRDSLAADAGQAAVAIESGKRKAACFRWGCNKRLRAAFATLADSTRHWHPWAQDVYAAALARGHDHPRALRTLGRAWCRVVWQCWQKRTPYDPARHRALQQHITVTIPTASGPVVDQLATESMAAGLFATNAPTSRQQQVTAAQ

SEQ ID NO: 166714 - protein, 443 aa, unidentified
MQSRMKEKDSLPIRNSHVAGIDVGSQKMFASVAGGSPKIFGSCTADLRALRDWLAEQKVTSVAMEATGVYWLCLYGLLEEAGMEALVVNGAHVKSLPGRKSDMQDCQWLATLHSRGLLRSGFVPTSEIRQLRDYQRLRSDLVTMASTHVQHMQKALERLNLKIHTVISSVIGVSGLGMIQAIVSGERNPEALLKLCDEQILEKKEGALRKALEGNWQPEHLFALRLALEAWQFYQGQIEQCDAQLGARVAALAKDEPAPPLAPKKELRNNAPRNLPELQKHLAQIYGADLTRIPGLNHYTALLLLSEVGWDMSRWGSVKQFTAGLGVAPATRQSGNRKRNQKRHMGRAGRIFCLAAQSMASAKKSWLGSFYRRIRATRGGPVAVKATARKLAQLFYLTLTKGWDYVEQGIAEYEKRYREGQIRRLNRLARELGITVGLTTSTL

SEQ ID NO: 166715 - protein, 423 aa, unidentified
MKYALVRVLPEVPPGGVCAGIDWASADHAVCVVDLAGQVADRFAAAHDRAGIAGLIARLRGRGAAEVAIERGDGVLVDALLAAGLTVVVIGSRQVKNLRSRYGSSGAKDDRSGAFVLADTLRTDRARLRPLVPDSPATLALRAAVRARRDLVAHRVSACNQLRAHLAVAFPGAIGLFSELDSPVSLAFLAAFPGQQAAARLDEQALAAWLATVPRRGNTAPAGVLAARLAAAPRGAAGADAAQAAVTTQLAAATAGLAGRVRALEAEIAAQLAAHPDQHIFTSLPRAGTLRAARLLAETGDCRARYPDPWSLAGLAGVAPVTRRSGTYISHEFRWNVNRQLRDAICDFADGSRHASPWAATVYAAARDRGKDHPHAVRITARAWVLIIWRCWQDGTSYDPAKHRALQDVLTRQAAAGTPQPHR

SEQ ID NO: 166716 - protein, 345 aa, unidentified
MKITTVGIDLAKNLFQVHAVDERGNAVLRKQLRRRQVAVFFGNLPPCVIGMEACASAHHWGRALQRFGHTVRLMAPQFVKPYVKTNKNDVADAEAICEAVGRPNMRFVPIKSIEQQAILSVHRVRQGFVKARTAQANQIRGLLGEFGLVIPQGIINVAKRVPEILEDASNELPVPFRHLIDRLTEHLKELDRQVKEFEKEIIVWHRSSDLSRKLEKIPGIGPLAASALVASIADARSFKNGRQVSAWLGLVPRQCSSGGKATLLGMSKRGDAYLRTLLIHGARSAILAAQHKVDNTNGWLANLLNRRHPNIAAVALANKNVRTVWALLAHGREFKADYVPVRMAA

SEQ ID NO: 166717 - protein, 439 aa, unidentified
MTTPSLPVLDLTAAAIDVGSEQLHVSVAGGRPMVFGTTTGQLHELRDWLKAQGVRSVAMEVTGIYWLCPYEVLEKAGLEVVVVNGKYVKNLPGRKTDMSDCQWQATLHAHGLLKPGFVPPAHIRRLQDYLRVRTDHITMAGSHEQHMQKALDRMNLKIHEVISDLTGMSGLKMIEAIIGGERNPVALVALCDPQVQKNKVGRLLGALEGTWKEEHLFALRQAYELWQFYQKKIAECDQAIEKVLQQMAGPEDPARPAPPTMKRGGINAPEIRGLHSLLWRLCGHKDLTTLPGVADYVLLQLLAEVGTDLGKNWQTEKHFTAWLGLAPGSRQSGKRRGNQKRGRNRAGRLFCVIARSVGRSVDKALGGFYRRLKGRRGGLVANLALARKLAELFWRLMVHGSTYVEQGLKKYEEKVAQTEQHLLQKLARKYNLVLQPKAA

SEQ ID NO: 166718 - protein, 408 aa, unidentified
MNPLFVGIDVSSKNNVAYLMKPDGSKHSSFSVQNNLGGAKLLSERIVSALGSMQLERVVIGLEATSIYGDSLVYALREDGRLGRFQRKIHVLNPKQVRKFKEAYSDLPKNDWVDAFVIADHLRFGRINREVYMDDYRYKALQTLTRARFDVIQNLTREKQRFANYLFLKCSGMAQDKDIQNTSATTIALMEHFETVDDLANADLEELTAFITETGRGKFADPDATAKAVRAAAKGSYRLAKTVNDTVNQAMAVSIASMRALKGQVKVLDKAIEQQFEIIPNTLTSIPGIGKVYSAGIIAEIGDIHRFDSQASVAKYAGLVWNRSQSGDFEAEHSRMIKSGNRYLRYYLLEAANSVRRCDSEFRRYYDLKFKEVNKYQHKRALALTARKLVRLVFRLLKDNRLYIPPEG

SEQ ID NO: 166719 - protein, 418 aa, unidentified
MQTELSQFKAIIGLDWADKKHDVCVQATASGQRKTYQIQHKAEKIDEWARALYRRYGGPIAVALELSKGPIVSALQKYDFFVIFPIDPTTLANYRKTFTPSGAKDDPTDAELALDLLLCHPDHFQPLQPQSVEMRTLMTLVEQRRRLMNDRVRLTNRLRNALKQYYPQALEWFDRIDTPLFCDFIKRWPSLAQARRARKATLQKFFHEHHMNRKALLEQRVTAIKSAVALTTDDAVIVPFRLQALTLVAQLEVALESIRIYDDEIAALAPQHPDYDLFRALPGAGPLLAPRLLVAFGEQRERFTSAAELQKYAGIAPVTERSGQSTWIHWRWQCPTFLRQTFVEWAAQTINKSYWAGLYYYQQRAKGCSHQAAVRALAFKWIRILYRCWVTRTPYDEAKYLKALQERGSPLLKMAEAA

SEQ ID NO: 166720 - protein, 452 aa, unidentified
MKRKKKMEMDIINSSAAGIDIGSRSHYVAVGQALEDVKEFGVYAEDLTDICLWLKSYDITSVAMESTGDYWQNLYTELIKHGFEVILVNGKFTKNAKGKKTDVKDCRWIQKLHALGLLTSSFLPDQTTETLRTYCRQRANWIDAASSTSRKMQKYLKFLNFRLDVVVKDVCGLTGLKIIEDICKGNLDPLELAKHRHYNCRKSEEEIAKALQGNNREDFLFGLKQEFDTYKFYQKKITACDKQIDRLIKDELKKYPSKKKLKTTNKPYKRINKNAPNIKNLNQIAFKYFDGVDLFAIEGLSHATILSIMSEIGPDGFKKFKTSKQFASWLRLAPNNKISGGKILSNRIPKGSNRLKIALRQAANSIGNLKDTHLSDFFKRVAYRKGRQSAVSATARKLAVIIWTMVTKKVPYSPPTQYLFLDQKRKLRMLNRIKKNIAKFDLNLEELKIATN

SEQ ID NO: 166721 - protein, 334 aa, unidentified
MAQITTAGIDLAKKVFALHGIEGSGNVALRRTVQRDQLLGVVASLPPCLIGMEACSGAHEWARQFQKFGHTVKLMAPKFVAPYRKSGKNDGNDAEAICEAVTRPSMRFVPVKSAEQQALLVLHRVRKGFIVERTSTINRLRGLMTEFGVVLPLRSVTVRRQAAQAAEALPEIARRSVHDLLEHLRRLDERVDAYDRELEVQARLSEAAQRLMQIRGVGPTTALAIVATIGDAREFKNGRQFAAWIGLVPNQHSTGGKSRLGHISKKGDAYLRALLVQGARSVLHSAKGRADGISRWALLLQERRGYYRTLVAIANKNARIAWALLAKNEELRTA

SEQ ID NO: 166722 - protein, 390 aa, unidentified
MDVLYQSCAGIDVHQANIVVCILHGPLTSTRPKREMATFDTTTKGLRACHYFLSQFRVEAVGMESTGVYWRPVWHALCDDFELILAQPAHMKAIPGQKTDKKDAHWIAKLTRIGLLPRSFVPDETIQELRELTRQRKHYVESRNRETNRIHKILQSGGIKLTTYIEDIMGLSGRNLLQLLVDGTPITPRIVHQLVYTSLKKKVLQLLEALDGYFSDHHRFMLKQSLEIYDFYQKQIEMLEERINGYLSQYEKQVEILDSIPGIDVITASVIISEVGVDMSQFPTAGHLASWAGLCPGNNESAGKKRSTKIRHGNSYLKKCLCQAAFAVKKQKGSPLADRFYQIQSRRGSQKATIALAHQLLKIAYILLKEQITYPEFLAQKKTTRDELVA

SEQ ID NO: 166723 - protein, 317 aa, unidentified
MAQKSKLVGIDVAKDKIDAAIRSGQEASFANCPDGRAALVSWLREHGIGKAVMEASGGYERSWAGLLREAGLEVVIVDPKRVRHFARSAGRLAKNDAIDARMIAWFGEVFDDLDSQAGDAGREELDRLVTTRLGVLGLKEQIDNWTEHEQPKAVQKVLHALRKAIDAQLAKLHQLIAAKIDRTEPFAQRAELICSVPGLAGVAASGVIAFFPELGRIDRQAAGALVGIAPFDDDSGQRHGERHIRGGRRKLRTLLFMPVLSAATRHNPVLKAYYQRLIARGKKPKVALIACMRKLIVILNTMLARGEKWDPTKHAIA

SEQ ID NO: 166724 - protein, 458 aa, unidentified
MSRSNTHPHPRVPEALPHLNPDAAGLDIGAEEIWACVPADREAQPVRRFGTFTPDLHALADWLAQCGVKTVAMESTGVYWIPIYEELETRGFEVYLVNARHLKTVPGRKSDVQDCQWIQRLHSYGLLTASFRPAEEMRVLRAYLRQRALLVEHRAAHIQHMQKALQQMNVQLPQVVSDITGHTGLQIIRAIVAGERDPHVLAQLRHGRCHASQAEIATALSGQYRPEHVFALKQALALYDCYTQQVQDCDAYIEQHYAAIRPTYDDTTPPPPLGPAPKPTAHAKNAPSFDVRGCLYRILGIDLTAVHGLEASTAQTLLSEIGTDMSPWPTEKHFASWLGLAPHNDISGGKVLRSHPLKVRNRAAQALRLAAQALGRTQTALGAYYRRRRARQGPKAAVTATAHKLARIVYHLLKHRDPYHPLSPEAYEHHLRQRELALLKRKAARLGFTLLPRPATAA

SEQ ID NO: 166725 - protein, 403 aa, unidentified
MKHVIAFDVSMGKSYMVIYNVQKQCVFESEIKHTKPDFKKLQEKIHKLTDETGESPEIVFESTGIYSRQLERFMQNNQYTYCLLNPLEAKIQCDSLRIHKTDRSDAHRLALTHFTVTRRVSTRTDNLFYQLKSLSRLYSELDDELSIIRGRMHKVIQLTFPELERIFTSKSDLFLNFVQLFPHPDYVLGLSKTIIKNRIRANTNKKISNITAEKKAIQILEIAKICYPAVSQNDVLCDQLKLYARRYQELLHQKESCISKMVYVAEQRAEYDIIRSLPGIGPNTAVRLMAEIGDITRFNNNKQLNAFAGIDIRRFQSGKTFFKDKINKRGNKHLRKLLFLIIQNMIKQRRYGQNHIVEYYDKLKTQPYNKCHKVASIACVNKLLKLLFYLITHNIHYDYRLTA

SEQ ID NO: 166726 - protein, 397 aa, unidentified
MYIVGIDIAKRKHEAAVIDGEGTVIIKPFSFTNNCSGYNRLLAMLTKAKLPLDEVSFAMEATGHYWLALFTRLQKEGFRVQVINPVQTNSIRNFYIRQAKTDPRDALLIAEVIRFGHFSESTLHPENIYELRELCRGRHAIVSMQADVKRKVVALLDQVFPEYETAFTNLFGDTSMAILQTCPTPKELSEMRLEELCHLIEVSSHKRFRMAKAQELQALARNSFGFVMAGDVFSTMIRLYAKHLVFLKQQVREMDRKIAEIMDTLDTPITTITGIGPTLGAYILSEIGDISRFPSAAKLAAYAGIDPTMRQSGEYNGVRNRMSKRGSPYLRHAIWLAASSAVLHDPALKLYFQKKRDEGKPYMASVGHACRKMVSIIYAVMRDNKAYTPCIPNEISA

SEQ ID NO: 166727 - protein, 275 aa, unidentified
MKYTPVGVDIAKYLIQVHFINEHTGEVVDKQLRSRDFLEYFSNREPCLIGMEACGGSQHWARELTKLGHKVRLLQARFVKAFVMGNKNDVMDARAIWMAVQQPGKEIVVKTEEQQSVLILHRTRMQLVKFRTAQINALHGTFLEFGETIHKGRAAMEREFPVALERMKERLPPYLITVLENQYNRLNELDSLIEDIEKQLTSVAKQNETCKRLLDIPSVGPLIATAAVATMGEASVFKSGREFAAYVGLVPRQTGSGGKIRLLGISKRGDFRRPN

SEQ ID NO: 166728 - protein, 365 aa, unidentified
MAIQSGKDKVVIAVDPHKASWTASAVDSSLQPLASVRVPVSRDGYQALRRFARQWPTAGWAIEGAAGLGAPLTTWLRTDGIEVVDVPGKLAARVRVLSSGHGRKNDDADALSVGIAALTSPALRTTEIDAATTALRAIVEHRDDLVKTRTQTINRLHVVLTRLVPAGAKRHLSADHAAEVLRGVRPRDPAAKTLRALAMDLVSEVRQLDRRIAKAANDIQMAVSASGATLTELHGLGVLTAGKILGRVGDVRRFRSAAAFASYTGTAPIEVSSGEVVRHRLSRAGDRQLNFCLHVMAIAQIRHDTPGRAYYLRKRSEGKNHNAAMRCLKRRLSDIVYRQLIGDAVKQKAGPGGHSGAALSSRAAS

SEQ ID NO: 166729 - protein, 357 aa, unidentified
MGKSNQLDFSGHNIFVGLDTHLKSWKTTVIVGSNVFKTFSQNPNPQVLKDYLVKNFPNGNYYSAYEASFCGFTSHRELLNLGIINIVVNPADIPTTDKERKQKEDARDSRKIAKQLSQNDLKAIHVPAIDLEADRHLVRYRKTISKDLAREKARIKMQLYYFGIEIPIQFADKPYWSKKFMDWIEQVKLPAQSAKMVLNGHLDMARMLRKKQYATLKEIRTLALKECYNDNFILLQSVPGIGPLTAMILLTEVGEITRFKTLDRFCSFIGLVPTTNSTGERESVGKITPRGNRTLRSALVESAWVAIRHDPALMLAYQKLVKRMKAKNAIIRIAKKLASRMMFVLKNKQEYVCAVVN

SEQ ID NO: 166730 - protein, 341 aa, unidentified
MNIKRVGIDLAKLVFQVHGVDYQDKVLLRKQLRRNQLLSFFAKVPPCLIGMEACGGAHHWAREQQKQGHTVKLIAPQFVKPYVKSNKNDVNDAEAICEAVGRPTMRFVTIKTVSQQDLQAIHRIRSELVRQRTAKANQIRGLLAEYGLVVGRHIHTLRRALPDLLEDAENGLSFDFRALLDDLWKDLITFDERVAEMDKKVHAMAQSEPAAKRLLSIPGIGPINATAIVCAVGDGKQFKRGRDMAAWLGLTPKQHGSGGKDRLLGISKRGDTYLRTLLIHGARSALQAIDKKTDPRSQWLQNLCGKRHKNVAAVALANKNARIAWALLTKETDYLPEGRPA

SEQ ID NO: 166731 - protein, 302 aa, unidentified
MAARPGGERMTLTNDRAGIKRLVGRLGELKPRLVVVEATGGLQRQVVAALWTAGIAVAAVNPSWVRNFAKGRGLRAKTDRKDAELLALYAERERPQVRPPADAETQALQELVMRREQLVEMLVAEEHRLTHALGPVRKELRHHISYLEGRLKQIAEDIDKTVRRSAGWRRKSEIVRSVPGFGKVFCSMVLAKVPELGALNRKQIGALVGVAPVPDDSGTRHGRRAIAGGRFEVRNKLYMCALVASRANPVLKEFYQRLVARGKPKKLALVAVMRKLIVTLNAMLKTNSMWRPPCLAVSVREN

SEQ ID NO: 166732 - protein, 416 aa, unidentified
MTYRIAAIDIHKNVLMVVVAIAATEVADTAGEALEFMCRQFGTGAEERQHLVSWLQRQQVTEVVMESTAQYWKPIWLELEPHFQKLHLAQAQSNRAPRGRKNDFRDAKRLARRLLAGELSLSYVPEPEQRLWRMLTRGKQQLVRERGATRNRIEAFLEEIQIKLASVISDLLGASGRRILKALSEGETDPDKLAHLGDERLKCSPAELADALGGHPTPTHICMLKLFWERVELLDRQIADYDRLAAQALKPYQEAVLRLAEVNGFGVDSAQQLIAEVGVLADAFPSAAEFSSWVGTCPGSNVTAEENHSSRSPKGNKFARRILTQAAQAAIKKKGSHFQNVFRRFVGKLGYQGAVWVVAHRLTRLVWLILNKQVRYVEQGEETNPKAKQRRAQKLARALRRLGYEVSLKPIQTAQA

SEQ ID NO: 166733 - protein, 355 aa, unidentified
MNDAKYIGLDVHQATISAAVLDTAGKLLMESILETKASTILQFIHGLRGSVQVTFEEGTCAAWLHDLLKPHVASILVCDPRKNALLKSGNKNDRIDARKLADLLRSGLLSPVYHGENGLRALKESARSYLALNRDVTRVMNRLKAIYRSWAVPCAGQRVYAPRYRSEWLGKITEVAVRRRAEIYYQQLDGLRSLRQQVRRDLLAESGKQGATKLLRQIPSIGLIRAALLIALIQTPYRFRTKRQLWAYSGLALKTSASGEYRFVEGQLKRSQKFLAIRGLNVNHNPDLKNIFKGAAVRAAAIPGPFQQFYAALVAAGMKPTMARLTLARKIAAITLIVWKKGARFDAEHLKPQAA

SEQ ID NO: 166734 - protein, 315 aa, unidentified
MNQELLVVGIDISKNFLDVFVSGSATLQRYANDASGRAQLATDMLALAPNLIVAEATGGLERLLIAELAAQQLPLVLANPRQVRDFAKASGQLAKTDALDARVLATFGIAIRPTVRPLPEEQALELADLVGRRRQLVDMMVAEKLRLQQAAGKALRRDIKLHIQWLEKRLRASDAGLNDAIQKSEIWRAKDDLLAEVKGIGPVCRITLLALLPELGHLNRKQIAALVGVAPFNRDSGYYRGTRRVWGGRSEVRKVLYMATLSAIRSRNEVVHSFYRRLKEQGKPGKVAVVACMRKLLTILNAMLRDQAHFRPQVA

SEQ ID NO: 166735 - protein, 349 aa, unidentified
MKKIVIGIDVSKKTLDATAIKLEIEQLGYTKLDYQVFDNSPMGFRRMLAWGRKLVPGIALEDVLFICETTGAYDRALCDYIFGKGYDIWRESALQIKESSGLRKGKNDKADSLMIAEYAMRHMDKVHLYQSTDGKILEVRALLLYRRKLEQEKTSKLVRVKELKATAAKSKSLTFILRDANKSIRALEKSIAECESQIQKLINADEDLKKTYTHLDSIKGIGIVNATALIVYTNNFKNFRTSRQLASYYGVASFRNKSGETIDKRADVSCYSSSMLKSYITQAAECTIKSGGIYKEYYDRMRAKGKLHGIAINNIKNKLLHLAFSLVANDCDYEENHEFLRAQRLTTSA

SEQ ID NO: 166736 - protein, 342 aa, unidentified
MEQYVALDVSLKEISVCIVDSNRDVVFEGKTGAEPATLVELIRSKAPQVKRVGLETGATSPWLFHALASAGLPVVCMDARHAHAALSIRPTKSDRSDARGLADMLRMGWYREVHAKSVTSHERRTILGARHQLVTMRSELDAQIRGILKTFGLILGTGNKDTLIQRAEKLAAGHPVMSGLVAKLAEVRRHVTSQIAAIDRDIRHLVHTEPTLKRLMSVPGVGPITALAFLSAVDDPRRFKHARDVGPYLGLTPTRYQSGETDRQGRISKCGDTFTRTCLYKAAHVLLTRVQRLSPLKAWGMRLAKRIGGRKARIAVARKIAVILHCIWTDGTEVWWTREKAA

SEQ ID NO: 166737 - protein, 355 aa, unidentified
MIYVGIDVHKKHCQSALMDETGKVLEQVPFKNTGDGVAYLIDKIKPYGEAKAVLESTGNFWLKSYEALEKADIHVSLSNPLKTRAIAEARIKTDKIDAKLLAHLLRANLVAESYVPDKETRNRRALLRHRSSLVKTRTELKNRIHNLLDKYDLQPEYTDLFGNKGMEWLRNLQLQSTEKTILNSNLELLEALNSQIQKISLEIASIAVNKDDVKLLMTLPGIDYYAAMVIANEIGDVTRFPEANKLVSWTGLAPSTRQSGSRVKHGTITKQGNKTLRWILIQATHNACRNDERFQNFYQRIARRRGGNKAMVALAREMLVIIYHMLTRNEPYRSMDPELYRSKLKRLERLGNSSL

SEQ ID NO: 166738 - protein, 355 aa, unidentified
MSQEKYIGMDVHQATISVAVMDARGKLIMECLLETKAATILECIQGLRGTLALTFEEGTSAAWLHDLLKPHVSRLVVCDPRKNALLKDGNKSDRVDARKLAELLRTNQVKPVYHGKHGTRALKELGRSYLTITKDVTRVMNRIKAVYRSWAIPCAGTSVYAPRHRAEWLAKLLEPGVRIRAEHLYQQLDSLEPVRLEARRQLLLESRKHPAVKLLRQIPSIGPIRAALLVALLQTPHRFRTKRQLWAYSGFAVEIHDSGEYRSVRGKLQRNRERITVRGLNDNHNKDVKSLFKSAAISASTRPGPLHDFYVTRVESGMRPTMARLTLARKIAAITLTMWKKGVSFDPKQLQRQAA

SEQ ID NO: 166739 - protein, 310 aa, unidentified
MGDCVGVDVSKHHLDWVLGGNGSVDRLPNTRAGVRRLVSAVRGLNADLVVVESTGGYERGLTEALTAAALPVVLVNPWRVRRFGEGLGVLAKTDPLDARVLAMFGERARPAQRPLPGARQREMADLVRRRRQLIAMIVAEKSRLDTASPIIRRDINSLVQLLERRVAKLDERVDRSIANDPEKSEQWARLQTAPCVGPGVARALIVDLPELGSLGRRQITSLVGLAPFAKDSGKKSGYRRIRAGRAAPRSALYLAAMNGARFNAVLKDMYQRLIAAGKPPKVALIAIARKLLTILNAMVRDGTDWQQATV

SEQ ID NO: 166740 - protein, 340 aa, unidentified
MGVFVGIDVSLESSAVCAVDEHGKLVKETKVASDPGALNACIRNMPGVVEAIGIEAGPLSQWLHKSLTDLGLPVVLMETRQVKAALKAAPVKTDRRDAAGLARLLQMGWFRPVHCKSLSAQELRVLLGARRSVQDAAINIEMSIRGMLRNFGLRLGRIGKVSFEDRVRELTDGNKLIQLSIEPMLRARAALRSELVRLERLARDITREDPVCRLMMTMPGIGPVVALTVRSTIDDPGRFRRSKDVGPSIGLTPRRYQSGETDIIGGVTKAGDLDMRTALYQAATVVIHRSKKPTWLRAWAERVVRRRGVKRAAVALARRMGVILHRMWVDNTEFQAARMA

SEQ ID NO: 166741 - protein, 481 aa, unidentified
MPRQKQQPNELGEGNTTTGKGKRGRKQKGMCLGDRPILEPNAAGIDIGAREIFVAVPPDRDEDPVRVFSTFTEDLQKMAKWLMSCGITTVAMESTGVYWIPLYDVLEQNGVKPCLVDARGMKNVPGRRTDWHECQWLQFLHSVGLLRAAFRPDGDVCAVRSVMRHRSEQVLMANQHIQHMHKALTQMNVQLQHVISDITGVTGLAIVDAIIGGQRDPAALAKLRDPHVKASEETIRKSLEGSWRPEHLFTLEQSRKSYQHYQQQITACDEEIEKLVTAFAPRVNPEEKQLPPDRKRKQRGRKKKNVNPKTGFDLRTESYKLFGVDLTQIPGLMAMVLVLFSEVGRDMSRWSTAAHFASWLGLCPDNDISGGRVLWRGLRRVHNRAGDLFRLAAYSLHHDESPLGDYLRRMKSKLGPAGATTATAHKIAIIFYTMVKKQVEYDASLWAQRDAERTQRFEAKLKRQAQQMGYKLVPIEEMPAA

SEQ ID NO: 166742 - protein, 415 aa, unidentified
MNRLIERCAMLDIHKSQITACVRVPDGDGGRRQEIREFSATTAGLLVLADWLRSYAVTVIGMESTGVYWRAVYYLLEDEFDCRLYNARHLRHVPGRKSDVQDAEWGCQLVEHGLVRPSFVPPRPLRELRDLVRYRKAKIQERVREVQRVEKTLQDAGIKLSSVASEVLGVSARRMLDALISGTNDPEILAELAKGALRKKIPALREALQGRFTGHHALLIGQMLAQIDFLDETIQTLSERIEELTRPFSRELELLDTIPGVDKRAAELILSEIGPDMSRFPTEHHLASWGGMCPGQRESGGKQHSAKTRKGSKWLRGTLTECAKGVVRTKGTYLSARYHRIKSRRGHAKATIATGHKILTAAYHVLNQGVPYHDLGEEFFYRRDTEATERYRRRLIKQLERLGHQVTLEPLPEAA

SEQ ID NO: 166743 - protein, 437 aa, unidentified
MRRKKNKANKSVNLQVLPLVHPNAAGIDVGAKEHVVAVPCDRDPRPVRTFQAFTPDLHELAAWLKRCRIETVALESTGIYWISLYEVLEQYGFEIRVVNARHVKHVPGRTKTDVLDCQWIQKLHSFGLLNGSFRPDQQIRKLRTYMRLRDNLVVASTQAVHHMQKALFEMNVQLSNVISDIVGETGLHIIEAIIAGERDPKQLAALCSTRIKASRETVAKSLHGNWDEALLFALKAALETYRFNQTKIQECDCCVQQHLVQFESRAQLTNSPRDLKTQLHRVCGVDLTKIPGIKEQSAQIIISEVGLDMGNWKTEKQFCSFLGLCPHNSISGGKVLHRATRKVYNRAADTLRLCAQSLTYSKSALGAKYRRLKARLGAPKAIVAMAHHLARLVYRMLRYGQNYVEQGIHQYELKFQLQRIKWLKKEAKSLNLQLVPA

SEQ ID NO: 166744 - protein, 326 aa, unidentified
MRVHHNVCCGIDVHKKSVTACLMWGPADKEPEFEIRRFGTMTRELQNLAEWLKQAGCEAATMESTGSYWRPVWNVLEGQIAKLILANAQHVRALPGEKTDRKDGKRLAELTRYGQVRPSYVPPRAILELRDLTRYRSKLLSAGSSERNRIQKVLEDANIKLGSVLSDVFGVSGQKMLQALVKQDSVATAKVAQLAQWSLKPKIEAIQQALEGKLTDHHRFLIDVSMRHMRFIEEQLIRLDEEIQRRLQPYQEEYALLQTIPGIKETGAARILSEIGADMSPFADGDHLSSWGSVCPGNNESAGKKFQSKIRKGASGNPMRNRNPRP

SEQ ID NO: 166745 - protein, 360 aa, unidentified
MSFNGTSVGLDVHALSVVAHAVDEESGLVERARLCPDHGEVLRWLDQLRGPLRVAYEAGPTGFGLARALAEARIECVVAAPSKLIRPAGDRVKTDVSDAAHLTRLLRLGEITPVTVPEADVEAVRDLVRAREDARADLMRVRHRLSKLLLRQGRVYSGGQAWTGLHETWLRQQRFTDAHTAAAFDHHFDAVLSATAARDRLDEQIVGVAASPRWADTVDRLGCLRGISALTGLALAVEIGDWSRFTGASIGAYVGLVPTEYSSGASRVLGSITKAGNAHVRRLLIEAAWHHRACYRNPGPTMRARWAKVDPALKARGHAGNRRLHQQWCRFLERKKHPAVANVAIARQLAGWCWSLATLD

SEQ ID NO: 166746 - protein, 342 aa, unidentified
MHNPDVCGLDVSAQELVVMVRRDGKTEPCRSFPNTHPGHQELRRYLTRPAERVRVCMESTGLYGLDAALALQADTRIELMVANPRAVKDFSRALLQRSKTDPLDALVLLEYAARMPFQRWQPPLAEALQITALARRIHALTQQCTMEKNRLHAVEATATTLRVIVQDLRRSVRGLETAIAKLSREAHKILAATPELERRFRWLQSTPGIGPVSALQLLGELVLIPANCDVRQWVAYAGLDPRHHESGTSVHQKTRISKVGNRHIRRALFMPALTAVRFAPHLRAFYLHLQARGKCKMVALVAVMRKLLHAIFGMFKYDAPFDGAKLCPALTLAVPPEVACAA

SEQ ID NO: 166747 - protein, 341 aa, unidentified
MNVKTIGIDLAKEVFQVHGIDEHGKRLFNKQLKRAKMLSFFANIPPCLIGMEACASAHFWASKLMSMGHNVKLMAPQFVKPYVKTNKHDAADAEAICEAVTRPNMRFVPVKTPEQQAVLALHRSRQSFIKQRTAQANQIRGLLAEFGIVVPRGIQQLQLQLPEILEDADNSLPPLFRVQLSLLQHHMAYLFDVIATLEKQIEQCYRQNALCQRISKIPGIGPITATALIATIGNASNFENSRQLSAWLGLVPRQHSSGGKQVLLGISKRGDIYLRTLLIHGARAVLQSVKRKQDAVSGWASRLLARRNNNIASVALANKNARIVWALLAKDQEYCAPVMNV

SEQ ID NO: 166748 - protein, 464 aa, unidentified
MKMKKEKLAGTVEKPRRKKVDWKALEIVHPHAAGIDIGGREHWVAISRERDEDPVRRFDCFTADLEQMAKWLVEKGVRSVAMQSTGVYWMPVYEVLEQSGLEVYLVNARHTKNLPGRKSDIQECQWLLKLHTFGLLNNSFQPRDEIRVARTLWRHRSNLVAQASSAIQRMQKALTEMNVQIHNVLSDLSGVTGMAILKAILSGERDPWSLAALANPAVKASPADIAKSLHGNWREELLLVLRQEMELYQTYRDKIAECDDRLRRHLQSLAPKVDLQAQPLGPRPKGKKIPRGNAPKFDLRSELYRITGVDWAQVNGIDVQIAQTVITEVGVDLSCFPSEHHFTSCLGLCPMNEQSGGRILNRRTPKVVNRATVAFRLAAQGLLRSQSYLGAQYRRLRTRLGAPKAITAMARKLACLFYRLLRHGQPYVDKGAQYYETRYREQQIRSLMKRARKLGLELVQPEAA

SEQ ID NO: 166749 - protein, 375 aa, unidentified
MDTIYIGVDFHARQQTICYLTTETGEFVTHELKHQDKDEVRTFYAQFGGRVIVGLEASGYSPWFEQLLEDLGHEVWLGDATEIRRRARWRQKNDRRDAELILDLLVHDEFPRLHRPSLESREILRMLRYRHKLVKMRTIIKNSLQALALQSGLSRRTKLFTKIGQQELRAAPMSPVMKQQQEQWLELLLVLNQRIVETTLWLKQQSLNDARIRLLRTHPGIGLLTSLGLVHTLDPISRFRNQRKVTAYAGLEPMERSSAERKRFLGISKAGSRLLRYLVIEAAHTAVKKDDDLKRFYRRLQERRGRPKAKVAVARKLLVRSFIMLRDEIDYAEFQRRAVAARLARQSSRPSVPDRLIGQPASSESQERVLSAAKK

SEQ ID NO: 166750 - protein, 400 aa, unidentified
MECVFGIDVSKENANVAVLVDNVVIKQFKIGLDRLGFSLLSDELNSFNAPLIIYEATAMYSRRLRAFLQRDGWKYTELNPLAAKKVMEEFRHTKTDALDAVGLARAMIKNHFRPTYQESPVYTELHDLERTYQQFNKDIVTNKNRLHRALQLTFPEIEHFMSSTDGVLYWHIVQRFPHPAIVLSHEENELTEIILTETSKKIGLKRAMKLANRLLALAQNSAPAKEPQSHAVRAVIALAKEVERINQLKAQIIVEMTTLGENLSEVPLLVSIPGIGIKTALCLIAELGDVRRFHSANAINAYIGIDLIRYESGQYEAKMHIRKRGNPYARKILYRAILNIISVSQYQPTLISANYKRKKQSAQSHGTKKIAIAAMSQFNRLMHHLILNNELYDSTTFMPE

SEQ ID NO: 166751 - protein, 347 aa, unidentified
MRFYTKQHKYYCGIDLHTKKMYLCILDSTGEIVLHRNIKTDRDVFLKTIEPFREDVVVAVECMFTWYWIADLCTQEGIPFILGHALYMKAIHGGKAKNDKIDSHKIGALLRGGMLPMAYVYPARMRATRDLLRRRNHLMRKRAELFAHIQNTRSQYNLSDCLGCIAKPQNREGIAERFDDPSVQKMMDTDLAVIEAYDPIIAKMERDIIKMADQHDPVAYSLLKSIPGIGRILGLVILYEIEDINRFPTVQDFVSYSRLVKSVKESNGKKYGSSGKKIGNAHLKWAFSEAAALFLKGNEPGKKYLDRLANKHSKGKALSILAHKLGRAVYFMLKNKKPFDQDKFLGL

SEQ ID NO: 166752 - protein, 341 aa, unidentified
MDQFIGLDVSLKDTFISVREGGNRIWRGKCPSDPALIGETIRKRAPNVKRVVFETGPLSIWFYHAMKQDGLPAICIDARHAKAALDMAPNKTDANDADGLARLAEVGFYREVRVKTFDSMLIRTLVAARTQMLRTTTQMSNQIRGLMKTFGLVVPGGTGRVFEGHVRRLLASNAGLEKIILPVLEAWRGMRARAAELSRQLIASARASTQCQLLSSIPGVGAVTASSFVAAIEDPKNFPKSRAVGAWIGLTTRRYQSGEVDYDGHISRRGDNHLRGLLYEAAVVILTRATADSALRTWGLKLREKIGFKRAAVAVARKLAVIMHAMLKTGELFDQSIAAKA

SEQ ID NO: 166753 - protein, 312 aa, unidentified
MSEFIGIDVSKAQLDVAAHLSSNSFAVENTEAGIKRLREQLKALAPELVVMEASGGYERLCVAALAAAGLPVALVNPRQVREFARATGVLAKTDRLDARVLAHFAAVVRPPVRPLPDAQHQVLEELLARRRQMVAALVAEKNRLGLARTRLVKRTLREVVSTYERLLELIDRELDDLIKASPLWREKEDLLRSFKGIGPVSARTLLAELPELGLLNRKQIAALVGVAPIARESGSWRGRRSIWGGRGQVRAVLYMATVTAMRANAQIRVFYQRLRQAGKPGKVALVACMRKLLTILNAMVRTHTRWQQPSVA

SEQ ID NO: 166754 - protein, 425 aa, unidentified
MIGDVMIAIDPHKASNTAAVLDPVTKTVIEVARFANSQEGYGRLTGLARRWDQRRWAVEGCRGAGRSLAQRLVADGEHVLDVPAKLAARVRVYSQGHGRKTDRDDAISIGLAALDGAGITEVTCDDALVSLRLLCDRREELGRLRTQAVCRLHRLLAELTPGGMRGELCASKAEAVLVRVRPADEVGQIRLQLAGDHLADIKALDAKMKATGAQIAAAVTATGTTLTSLFGIGPVIAGRLLAETGDVARFATKDHFASYNGTAPIDASSGEQARHRLSRAGNRRINHALHMMAVTQIRYPHTQGRQYYERKRTEGKTPKEALRCLKRRLSDLVYRQLVTDQRGRIGTCGSPTTPRPTPSTSTSPATRSRPAAPPSRPPRRPAQLGSSRWTGKTTAWSASRSSTPAPASTKTSSKRSKSTAKTAAS

SEQ ID NO: 166755 - protein, 338 aa, unidentified
MAQFEYFVGVDIASASFMACVGTTPWKLVEKPVEVDNHEDGYTFFLGWLKEHSLTSENTVVCMEATGVYGEGLAYFLSASGYAVAVEAPLNIQRKFPTNASKTDWLDCQYIAEYACRYVDKLTLWQPRDEVLEQVKVLLTTRQQFSVQLAAHKNALHAVNRKKVSSAVAKQVLQDMIQQITKHIADIDVEIRRLIDSNPTFKQTLLLLLSIPGIGLQLAAHLLILMQDSLDPRELAAFVGICPYQHESGSSVYSAPTSRHYGPPALRKLLYLAACSVRTHRKEFRQYFLRKTAEGKPGKLVLNNIQNKLLKIACAVVRSQKPFTPNYVSVNPLVLKKA

SEQ ID NO: 166756 - protein, 319 aa, unidentified
MFIGIDVSKPKLDLVELPSGEHWQVENTHQGIKALVERFKKEEPTLIVLEPSGGYEALAYRELSQAGLQVAMVHATRVRDFAKALGKRAKNDKIDARVLALFAQKVAPETRALPSVERLDLELLVARRVQIVEMLVSEKNRLALCSSQTVRENIQKHIGYLETEQRALETDLDTRVKASSEWLRLATVLSSVPGVGDVTVRTLLGSLPELGQLARGEIAALVGLAPFDRESGGMKGKRFVSGGRANVRHALYMATLSAKRFNCSIKAMWERLEAANKPFKVCMVACMRKLLLILNSMARSGEVFDPNWAAKGGGILAGA

SEQ ID NO: 166757 - protein, 346 aa, unidentified
MEHYVGLDVSLKQTAICIVDQTGKIVREGAVASDPEAIAAFIKSHAPHVARVGLETGATSTWLWTELNKLGLPVICIDARHAKAALKMQINKSDRNDAVGIARIMQCGWYREVRVKDLDSHAIKALLVSRALLVKIKRDLENQVRGLLKNLGLVIGRAKMNVFAVRAAELAEARPELAAAVEPLLKAREAIGQQVADLDRKVLRLARNNAQVRRFMTAPGVGPITALCFLATIDDPTRFRRSRSVGAYAGLTTRRYASGEIDWTGRISKCGDKMLRSYLYEAANVLLTRVAKWSALKSWGMRVAKRSSLRKAKVAVARKLAIILHRMWIDGTEFKWSSKEDANQPA

SEQ ID NO: 166758 - protein, 354 aa, unidentified
MLIIGCDFHTRYQQIAMAREETGELLVERRLDHASGEAHAFYRSLQSSQEPVRVGIEATGPIHWFERLLADLGHELWIGDSAKIRASEVRKQKTDERDAALILDLLLAKRFPRIWVPTPAQRDLRQLLWHRHKLVSMRTMLGNQLHALAMSQGLCRKKKLFTKKGRVELVSLGLAPWASRRREELLKLLDQLEPPIAELDRAVLEEAKRHADAVRLMTHPGIGPVTALAFVLAIGPITRFRRSKKIASYLGLNPSEESSGGRRRLGAISKQGNTMVRWLLIETVHHAVRQDPELRQDYQRLKFRRGHAVAKVAIARKLAVRMYWMLRSGADYARLVRRQGSPGGTLVGASPSLA

SEQ ID NO: 166759 - protein, 362 aa, unidentified
MRIIGCDLHARQQTLAMLDTTTGEVVEVTLKHEGDNVREFYSSLPRPVRVGIEATGSMQWFLNLMEELGIECLVGHPAQIRAAAPRKQKNDRRDAELILKMLVEGRFPAIWLPSKELQDLRALLRHRHQWVRMRTRIQNALQSIALANGLRRGTALWSHDGQNRIASLSLAPHTAYRRSELQAMYEKFEAEIEKLNQRVEEQASKRPGARLLMSHPGVGPITALATEVFLGDPARFADSKALASYVGMIPREYSSGGRQRLGGLSKQGNPLLRFLWGEAGAHAARKDPELQRFYRRKLVQKGLGKASVAVARKLGIRLWIMLRDQIEYNEFCRRGQKQQKSSDACAGMPETPNGAKSHRPVD

SEQ ID NO: 166760 - protein, 345 aa, unidentified
MNEVSTIGLDIAKSVFQVHGIDDEGNVVIRKRLSRKKVLAFFADLPPCLVGLEACPSAHHWSRELGKLGHTVGMMPAAYVNAYVKRNKNDANDAEAICEAVTRPTMRFVPVKSREHQAALMLHRSRQLLIKQRTMLSNAMRSALAEFGIVAPTGRGGLMRLLDAIEGPDDLDVPSAAWICLMSMAEQYHNTHREVLRLEQAIHTWHRSNELSRRLEEIPGIGPIVATALVGSIPDATVFKSGRSMAAWIGLVPRQNSSGGKDRLGGITKQGNRHLRWLLVVGAMAVIRHHQRNGFATRPWLAQLVERKPTRVAAVALANRIARMAWVVMARGERYRDPLQLAASA

SEQ ID NO: 166761 - protein, 355 aa, unidentified
MTMLAEVVDAVVGIDTHRDTHQAEIADATGRPLTVLQVSNDSDGFARLLATIAAVAPGPAVAVSVEGSRSYGIGLARALTAAGLLVIECEQPARRQRRGNGKSDQIDAHLAVLAALRLDDTRLPALRADGDREALRILLIARQEMTTASTAQASRLRALLLTGGDADRRAARKALPTTALSTLAGRELSSNASREQLIRQAEITRLALALIQARGQLKHNKAQLLAIADELAPGLTSRYGVGPVSAAQAIVSFSHPGRCRNEAAFAALGGTSPIPASSGKTIRHRLNRGGDRSLNSAIHTIAVSRIRSCPRTRAYVARRTAEGKTPREIRRCLKRYIARELYRQLTQSMNRPASP

SEQ ID NO: 166762 - protein, 309 aa, unidentified
MNEVYVGIDVSKERLDVATIPSNKKLQFVNDEAGMNKLLSKLVELSPNLIVLEPTGGLEIPIAAAIAAEDLAIVVVNARQIRDYARAMGKLAKTDSLDALVMAEFAQAVRPEVRPLRSEDNLEIKALVSRRRQLMEMLTAEKNRLAIARKHIKPNIQSHIEWLKKEIEDIDQNLRHEIEASPIWKEKDNLLQSIPGVGNVLSATLLAELPELGTLNRKQIAALVGVAPFNRDSGSMKGKRSVWGGRAPIRAVLYMAALVSTRCNPVIKPFYQHLLERGKAKKVALVACMRRLLTIMNAIIKTRRPWQYA

SEQ ID NO: 166763 - protein, 412 aa, unidentified
MFYVGIDIAKSFNVSCVIDDKDKVIKKSFKFNNNELGFRDFNNFLSSIDNNRYNFIIGMEATGLLFENLYLYLKNKGYNVILLNPYQTSKFREMNTMKKVKNDNIDCLMIASLIKSGRYSKAYVSEEVYASLRALHRHRASLQDELKKHKRQVSTLLAVVFPEMEQIIKDPFSVSGLALLEKYPTAMHYKYASAQRILKIFRNIKGNNFNLEKAKKLLELAKSSIYQGNAYDERAYIIQSHIRFIKILDEEIKAIDNQMLKLFNQPISFSKDEEQEVMDIIDNLRTIPGVSDKTLFTLMGECGNLDRFKNINSFIGYLGLYPTLEQSGNTIKYGKLAKRGSKLAKKALYQSAVASIRHNSEMRKLYCDTLSKGKAKKEAIIIVARKLATIILAVYKHNIPYNPNRVFNQNIS

SEQ ID NO: 166764 - protein, 389 aa, unidentified
MKIYVGIDIAKLNHFAAAISSDGEIIIEPFKFTNDADGFQLLVSKLESFDKNSLIIGLESTAHYGDNLVRFLVTELYQVCVLNPIKTCQMRKNNVRKTKTDKVDTYVIAKTLMMQDNLRFVSFFDLDMMDLKALGRFRQKTIKQRTRLKIQLTTYVDQVFPEIQYFFKSGLHQHAVYALLKEAPSPKEIASMHMTHLANLLKVNSHGHFTKELAKELRVLAQKSVGANDSAISIQITQTIQQIELLDSQLEKIEAEMTDIMKFNDSVIMTIPGIGYINGGMILGEIGDIHRFSNPNKLLAFAGLDPSVYQSGNFQAKTTRMSKRGSRVLRYALVNAAWNVVRNNATFKAYYDAKRAEGRSHYNALGHCSGKLVRVIWKMLTDNVEFNLK

SEQ ID NO: 166765 - protein, 350 aa, unidentified
MEYISIDAHKRYSFVSIESTEGKLCCAARIEHHRGAIREFLNRRLPGSPVAIETVGNWYWIVGEIEEAGMVPRLVHAYRAKMMLASTNKTDRLDARGMNRLQRCGTLPTVWIPPKQVRDERDLFRTRMILAAQRTRLKNRIHATLSKYGLGVEESSDAFNKKGRKELEKCILLLPDHTRFSVERVLEQLDCTERQIGLLEERMKEVFSPNEEIQLLMTLPGIGLILAVVILNEIGEIGRFGSAGQFASYSGVVPRVKASGGKVRMGQLHSDVNRYLKWAYIEAGNSVAINRAAHPQWYVRQLYERVRARRGHQAAIGAVGRHLAEASYWMLKRHEEYRPPKMGSISSRKG

SEQ ID NO: 166766 - protein, 603 aa, unidentified
MIQKLADQVAGWFVPAALAFIVWLIFRPEPSVAFALVSVVSVLMIACPCALGLATPMSLMVGVGKGAGSGILIKNAEAIERFAAVDTFVIDKTGTLTEGRPTLMDVKSANGFTEVELLTTVVGLERSAEHPLARAIVEGAAERGVSAPAMQDFESVISKGVRGTIEGRPVAIGNAAMITGADAGALQAMTEERQRCGETAMFVADDGRSDAIQHLNQRHRQPKHRHKSEQFAFRTKLRHFRRCGHWARSGRHCPGNPPKEMTAMPFYAALDVAMEKTALCVLNHEGQVVLEMNVSSDPSAIADRLEPYQDALSRFGLEAGPLSEWLVRGLVDRGFAPLLLETRHVRAALSARIAKTDRNDARGMADLLRMGWFRAVHLKSLDAREQRTLLSARRTLINRLKDIENSVRGLLRGFGIRLPLALRLKWEGKVRETIAGHPTLSTALEPLLVIRKTLREQVAVLDKKVRDAAKDDPVCRRLMTVPGVGSIVALTYRAAIDDPSRFSSSKSIGACFGLTPRRYQSGESDRVGAISRAGDASVRVALFEAAHVMLTRSSKWSSLKAWAMKPAVRRGAKRAKVALARKLAVILHRMWRTEADFRFTAAA

SEQ ID NO: 166767 - protein, 361 aa, unidentified
MAGTVTWVGLDVHARSTHAAAINPVSGELVRARFGAGLAGPLAWLGALPGPVKACYEAGPTGYGLYREARKAGVDMEVIAPGKTPRGPSDRVKTDRGDAERLARLLLAGSLTSVVVPPPEIEAARDLVRAHDACRRDLMTARHRVSKMLLRHGLVYPKPSTWTMEHRRWLARQRFEEPASELTFADLVAAVDGLSARKGALAERLSQLALNEQWWPTLARLRCLRGIDTLTALALHLELGGDWRRFERAPALSAWLGLVPTLTQSGESSRQGAITKTGSTLARRLLVESAWHYSREPRIGATLRNRQQGQPDHVLQIANRAQQRLYRVHRRMRARGKPGNVTVLACARELACFLWAAATAD

SEQ ID NO: 166768 - protein, 312 aa, unidentified
MIKIICGVDVSKAWLDAHILPGAASGRFANDAGGVEELASFCRKQTVELVVMEASGGCERRPFAMLWAMELPCAIVNPRQMRRFAEAMGYLEKTDRIDAAVIAHFGQVKPVAPTPLPSTAAERLKALVARLSQVTRDITVNKQRRSSAFDPDALASIEEIIALLNRQSRRLEGEIASLIDDDPLWARLNEAFRQIKGVAGRTVARLMAELPEIGTISSKAIAKLAGLAPIANDSGRRSGRRSIRGGRAGPRSILFLVAGIAAKYDPHLMAFHHRLKQAGKEKMVIRVALARKLLVILNAKARDARDEFAHAA

SEQ ID NO: 166769 - protein, 432 aa, unidentified
MEEARDEPLYRDRVCGIDIGKASMAATIRIPLDGGGRREQETREFGTTRREVLALADWLRCWQVPAVVMEATGDYWKPVFYRLEAEGFECVLADARQVRNLPGRPKRDPSDSRWLAACFERGAVAGCFVAAPEFRVIREHTRYRRDLTAERTRDKQRAEKLLESAAVKLSSVLSDVHGVTGRDIMGHLVAGERDPRALAALARGRARARTRQIEQALEGTEFLSPEIAALLGVILGRIDRVDAEIAALGAVIERLLAPWEEQLQQAESMPGWGRRAAQDVLAETGPDMSRFPTPAHLASWAGRTPLDRQSGNRQGAARRKHGNRYIGAVTGETSAAAGKTQTREGARYRALSRRRGKAKANVALGNTQMRVYHVLLSTPGARYRDLGPDYYERDRSTARQVSHHVGRLGALGYEVTLCRRPDQPPATDPHAA

SEQ ID NO: 166770 - protein, 374 aa, unidentified
MVMSGVRCQDSTNVEVVLGVDTHLDFHVAVALDELGRYLGELRVPTTTKGYTRLVCWAEEFGVIRCAGVEGTSSYGAGLVRYLTSAGIAVAEVERPKRRHLRRNGKSDPLDAEAAARAVLAGETAGTPKSADGHVEMIRALRTARRSAVKARSQAANQLQALVVTAPDALRDRLRWLSTRRLVAVACRLRPGTQPETPQAATKLALRSVARRYEALSEEIAELDVQLDRLVAQAAPELLALPAVGTDHAATLLIVAGDNPQRLRSEASFASLCGVSPVEASSGKVVRHRLNRGGNRDANRALHMICMVRMGMDGRTQQYVARRTAEGKSKREILRCLKRYVAREVYRVLVEAVEAPPLTTAYPAPTSKRISVMS

SEQ ID NO: 166771 - protein, 411 aa, unidentified
MEVVHVRCAGLDISKKDAKVCVRVAGAGRRKTVETVTTWSSMTSQILALREHLIAERITCAVMEATSDYWKPFYYLLEDAGFDVLLVNSRHVKNLPGRKTDVADATWLAQLGAHGLVRASFVPPAPIRQLRDLTRTRTAITRERSREVQRLEKLLEDAGIKLSAVASDIVGVSGRAMLESLIAGNSDPAALADLAKRRLRSKIPALTEALSGRFTDHHAFLARVHLDLIDQHTAAIDEITIRIEQLIAPFHGFRDLICTIPGISTLTADVIIAETGADMTRFPTAAQLASWAGTTPGNNASAGKVKSSRTRPGNPYLQGALGAAAMSCAQNPRTYLGARYRRIASRRGPQKANVAIQHSILIAIWHMGTNGCLYDDPGADYFNRLHPDRAKKRAINQLEAMGYQVTLTHAS

SEQ ID NO: 166772 - protein, 525 aa, unidentified
MQRNASREKMVGAGRMTATARADIGAFKPDRKAWVWGCVQTCDDVCRFPATISIGSLLCVRAPGIRPAQSEEQMARKSKRRCDTLPVLHPDAAGIDVGASELYVAVSGDRDPHPVRSFPTFTRDLHALADWLVQCGIRSVAMESTSVYWIPVYQILEARGLEVYLVNAQHVKNVPGRKTDVSDCQWLQYLHSVGLLRASFRPPGFICAIRSLWRHRGSLIQMAAEHVLHMQKALDQMNLQIHRVLNDITGVSGLRILDAILTGERDPLTLARLCHGGVKSSEHVIAKSLEGDYRPEHLFALRQSLAAFRYYQQLVLEADREIQLQLAELKTAATAQPTTPARTKANAHYARHYEPRTFDLRGELYRVFGADLTNVPGISALTAQTILCEIGTDVSRFRNASAFASWLGLCPEKKISGGKVLFTKSRRVRSRLATALRMGAQSLHHAKDYLGEFFRRITRKLGRPQAITATAHKLARILFHLLSTKEAYNESVFHKTEEETIRRAQYRLRRQAAQLGFQIIPVENS

SEQ ID NO: 166773 - protein, 377 aa, unidentified
MHSENIAAYIGLDVHKETLAVAIAAPERLGEVRYYGTINNEAQAVRRLFQKLQGLYGNILSCYEAGPCGFGLYHQLTAMNIKCQVIAPSRIPKSPTDRIKNDHRDAISLARLLRAGELTPVWIPDLTHEAMRDLIRARAAAKRDSRVARQRILSMLLRTDKRYAGKHWTGKHRTWLANQSFSQPSQQIAFQHYCQSLEQIEDRILQLDQEISRLLPEWSLCNLVCQLQALKGVGQLTAITLVAELGDFSRFSSPKQLMAFLGLVPGEYSSGNSIRPRGITKVGNSELRRLLYEAAWSYRTPAKVGAWLIYYRPDSVTQYSKDIAWKAQQRLCSRYRTLTAKGKKSQVAITAVARELTGFMWDIALAAQSSFSQQKQN

SEQ ID NO: 166774 - protein, 381 aa, unidentified
MEHYAGIDVSLESASLCVVDATGRIIREAKVASEPDVLIAWFRGLEFAVTRIGLQAGPLSQWLYASMREAGLTVELLATRHVRAAFKAMPVKTDRKDARGIAQLMRLGWFRPVRCKSLLAQEVRALLTARKLLQTKNHDVEMSLRGVLHGFGLKVGPTTPRTFATRIRELVAGHPTLSTAAEALLAARSTLFEQWQQLEKRLRSLAREDHRVRLLTTVPGVGAIVGLTYVSAIDDPGRFRSSKAVGAHFGLTPKKYQSGETDVTGRISKIGDGGVCTALYEAANVILTRPVKGSTLKSWGIRRHAQGEGRARPQARRGTAPYAGRQHGIPRRQSGCGRSPLTKETRDPGGSGYQPPRARSRRRGDGSGQTDDISAGRCHCA

SEQ ID NO: 166775 - protein, 387 aa, unidentified
MTARTVSNLPAAMHVETARCLFAIELSKQSWVIGFITPLSAKISRRILSGGDWKGLLELIEEVRARVSRETGRAVDVISCYEAGYDGFWLHRLLEAHGIRNYVIDPASLQTDRRARRVKTDRIDTERLLRSLMAYLRGEPKVWSVVRVPSVAEEDARRLHRERDRLVSERVQHVNRIKGLCALHGIYDYQPLRPQAMARLEQLRTAQGLSLPPRLTSEIKRELQRLELVVEMIATLEAERDAIVEDEASTHVNAKKIQNLHKLKAIGPEFAAVLVGEVFHRDFNNRRQLASYVGYAPSPFQSGNVAHDQGISKAGNRKGRTTGIELAWLWLRYQPDSDLSVWFRARVGALKGRVRRIAIVALARKLLVALWRYLETGLVPRGAVLKG

SEQ ID NO: 166776 - protein, 370 aa, unidentified
MSESSTIFVGLDQHKESITVAYVGADRSLEPICLGPIGPRNSDVDAMVRKLQSKGKKLVFAYEAGPCGYGLYRHLTRKGHTCLVVAPARIPRKPGERVKNDKRDATNLCRLLRSNDLKCVYVPQIADEAIRDLCRAREDAVSDLKAAKHRIKSFLLRHDIRFNGKTDWKTPHLRWLGEVKCATSAQQVVFQEYVRAMAQGFERVGRLEIELTQHVKSWRLSPVVEALQALRGVRFTVAVTAIAELGDLTRFEKPRQLMAFLGLHPSEHSTGERRRLGGITKTGNSHARRVLVEGAWAYRFPARVSKQIQARQEHLPEVVRDIAWRAQVRLCKRFQKMIARGKNSNIVVTAIARELAAFMWAIAKQVPVAA

SEQ ID NO: 166777 - protein, 363 aa, unidentified
MNSVYHTELSSLEETRGQFNGGKADIKLGIDVHQDFYVVVMQEGGSNPKPPQRFQKQAFLLWAAKLKSRSAEVHAVYEACGFGFSLQRQLSQLSIHCYVSCPQKLDEHNKRVKTDSLDAKALCLRLDRFVRGNREALAMVRVPSEEEERSRAIHRQREQLIKVRKMLEAQGRSLMVNHGIEPVKNWWKRNNFAALPLPAWIKELLQNSQPILIALQQKISALTLQLQVAAAFNQPRGLGAMTSVMIDREIGDWHRFNNRRQIASYTGLCPGEYSSGHTRLQSCVTKHGHPRLRAALVELAWRLVRFQPNYSAVRKWKERLAKGTLTTGAARKKAIVALARQLAIDLWRIRTGRLSAEALGLEI

SEQ ID NO: 166778 - protein, 386 aa, unidentified
MGTQTFIPRDYDVFAGLDVDKKSISVTFTDHQGFLKSLTMPYSVEYLVNHVRKHYGDKKVAFGYEAGPTGYGLYDGLEAHAYKCVIASPSMIPKAPGQRVKTNRLDSRGISENLRGGQLKPIHVPTPLYRELRHLTQLRDTLVSEMVGMKQRIKSLLLMEGLEFPPAPAGSQWSLLVKKKLRALPCSSTVRFKLDRLLDSLEFDEKQVLKTTQEIRRFCQTDPELSQCINYLKSLPGFGWIVSSQLMARVGDWRQIKNIRQLPAFVGLVPTERSTGERIERGSITHTGDGRLRSKLIQASWSAIRQDGELREFFRTVAKKHPRHCASRVAIVAVAHKLSVRASVVLMQQRPYEVRQKVKSAPLTQEETVPQGTTRRRAEAGELTTP

SEQ ID NO: 166779 - protein, 362 aa, unidentified
MNKGSKKSAVTTKPSKTVGLDIGDRYSYYCVLNADAELMEEGRIRTTEEALRRHFADSQRRRIALETGTHSPWISRLLQDLGHEVIVANARKLESISASRTKNDRHDAEQLARLAHSDPKLLSPVRHRSPERQRDLNLIRARSVLVRARTMIINAARGLVKSSGGRLPSCSSQSFEEKVKASLSAELADLVMPLLTQASSLSQQIKKMDQRIDQLRERYAEIGILRSAPGVGPLVAATYVLTLDHHQLLRQSRSAGALLGLRPGQSQSGDYDPQCCITKTGNSYLRSLLIQSAQYILSRFGPDSALRKWGLKLAGSGGKCGKKRAVVAVARKLSVILHRMWRSGQRFLAFPQSAIALAAVEA

SEQ ID NO: 166780 - protein, 337 aa, unidentified
MVYVGVDLHRKSSHVAVLDAEGELLASRRVASRPDEFLRVFGELEAQPVGVAFEATYGWGWFADLMHDVGIPAHMAHPLATKAISSARVKNDRVDAKTLAHLLRTNLLPEAWAAPAEVRDARKLGRTRVSLARISSRLKCQTHALLADQAITPPVTDVFGPGGRRFLQDVRLRPIPQARLEANLRLIDLLGPELAQADRELRELFRGDPRVARLVPIPGIGFMTAAVVIAEVWDVTRFPSPQHLSSWAGLTPIERTSAEHIRRGHISKQGSRWLRWAMVESASRPHLNDPVLRGFRDRIARRRGGKIAKVALARRLLTLCYYALRDEGGCRAYPVAR

SEQ ID NO: 166781 - protein, 353 aa, unidentified
MQIVGALDVHRRQITFKTVDLESGEVRRGRITPAARQSVREWLAGFAAGEAQFALEGTTGWRFVVEEIERAGHRAHLADPAETAAKRGRKRRAKTDNADCDLQLRLLLAGELPASWIPPAHFLELRTRVRMRKTLIDQRTAWQQRLHAQLFQQGIPAGLRPRTRVGRDALARVELSAAGRELVELALRMLDFIDRELVPLDRALRSFARRQPGCRALIARLYGVGPVSATAILAELGDARRFTSSDDAVRHSGLDVTVHQSDSKRAPGHLSHEGPELLRWALFEAALSAARAGSPDHAYYLQVAERIDHNRACLSVARKLCRRAYHILRELGDEALAPVEGDPHAEEAIAAAA

SEQ ID NO: 166782 - protein, 393 aa, unidentified
MVCVGIDVAKDKHDCFIISSEGEILADVFTIRNNAEGFDTLLQAIRRSTRPEDKIKVGLEATGHYSYNILGFLLDKGLPTYVINPLHTNLYRKSLSLRKTKTDRVDARTIAAMLMSDVDLKSYTDTAYHNEELKSLTRYRFDKVRERAKLKQSVSRLVTILFPELEKLVSSLHSASVYALLSEFPGAKQISSTHMTHLKAVLKNASQGRYGQEMAETIRNAARSSVGSVMPAKSLELQHTIRLIRELDAEIEDIETAIQAIVDEMQSPITTIPGMGVRMGAVILAEIGDFSRFDSPDKILAYAGMSPSTYQSGQLSLSGAYSHMEKRGSRYLRYALYNATKHVCHWDPTFAAYLAKKRAEGKHYNVALSHAAKKLVRLIFAMEKSQRPYCAAA

SEQ ID NO: 166783 - protein, 410 aa, unidentified
MLKIVYPICCGIDVHKKFVVACIASTGDRGVTTYRSSRFSTFTSGLRKLSGWLYSNTCTDVCMESTGKYWIPVYNILEDTCQITLAHPKYVRAIRGKKTDKKDARWIADLFKHDLVAASFMPPLRIRQLRDLMRYRFKLTGFGSSEKNRMQNCLTVSNIQLSNVVSDTFGKSSMKVTRYLLENPYDKDFDFVPLLHGSMTGKADDIRLAIDGMITVEQRQKMNIILNHFSGVQKCKADLESLILSLSEPYTRQCSLVSTVPGIKNPFSVIAIISEIGVDMSVFTTAKHLCSWAGLTPQNDESAGKKFSVRISRAGVYIKPLLVQCANAVVRSDKHPEIRGRYLSIRKRRGHKRAIIAIARMLLTAIYHILLKDEPYNPELYKKADILPKTRNITVDQAILLAQRYGYSVA

SEQ ID NO: 166784 - protein, 464 aa, unidentified
MPFEGQARGFIWLPGGYFNLGRRIEAPEPESVVAKSQPEIRAPDFNLEYSMKGQPESRTIHRYVALDLHKEYVMAGAMNAAQEWVLRPRKVEMMRFREWAAANLRQGDAVILETTGNVWDIYDIVAPLVTRTVVAHAGAVRQIAEARVKTDSEDIKRLLRLLIADIVPEVWVPPAHVRELRGLISYRNRLVKTATMIRNRLHSLLHRHNLKLGENGLTEADWWESQPLSALEKLQVRQELALLSRVEQSKAELETELAKMSMSAEWGKAAVHLMQLSGLGLITAMTVLAAIGDIRRFASPKQLVGYAGLGAGIHQSGKEHQDKGITKSGRKELRWALVEAAWRAVRSSEVWKKRFEQLAKRRGEHKAITAIARKLLVTIWYVLTREETDRYASEEDLAYKMLVLSWELNEEARLGLTYKQYAKYALMKLGIETDITRFVRKNVPRRVAPRDEVLARMKELGLSL

SEQ ID NO: 166785 - protein, 385 aa, unidentified
MANQNDLSRSVVAFEQHNTIIAVIEMSLNSWLVAGILPGIERHPLKKLSINEEVLLKLLHRWRDEAVKAGHTISRIVVAFEAGRDGFWLARWLRARGIEAYVIHPTSVAVSREHRRAKTDRLDAELLKRAFLGWLRGEPDHCSMVAIPSLQEEDAKRPTRERENLVGERTRIINRMKACLVRFGIRNFNPTLRTAPERLNALCTPEGVSLPPNTLAELRRDLARLRFVMDQINEIEVARLQRLERAPTAEPHAMVRLLARVIGVGIETADMLVHEILSRKLRDRRAVARYAGLTGAPDESGSKRREKGLAKAGNARVRRGMIQLAWRFLLFQKDSALSQWYRTRTESAGKKRKTMIVALARKLLIALWRLVTTGEVPAGVVLRAA

SEQ ID NO: 166786 - protein, 326 aa, unidentified
MDILGIDLAKLTFDVTLRMSAEQQHYAQFANTPDGFAQLQVWLLSHGITTLHACMEATNIYWEAPATFLHAQGYTVSVVNPARIKGFAQSQLLRNKTDKQDSATIATFCAQQHPRAWTPPNEAQHRLRALVRHREDLLQTRLQQQNRLRDTTDALVRASLQLVLDAVETQVAAIDRQIKAHQAAHAELRANVQLLSAIVGISTVTATKVLAEVADMEHYESAKAAAADVGVTPSHFESGTSVRRRPRMSKVGNASLRAALYWPAITAIRCCPAFKAFAERLAAKGKPKKVIIGAVMRKLVHVIYGVLKHKTPYDPAKVLGPTTAAT

SEQ ID NO: 166787 - protein, 339 aa, unidentified
MKELKSSVGIDISKDSFEVCIKQLKDERVIIKATHSFQNDFKGFENFLKWSLSKVLQPVFVMETTGVYHEDLTHFLYSNDQKVSVVLANKMKHFAKSLNIKTKTDKADAQMIAQYGLERQLEWWQPMMPQMKNLRDLCRERLSLKKDLVRCKCQVHALKHAHSTLDVVLQLKEQQIEFLEKNIQIIENEIIRITEEDKEFSQRVKNIETIKGLRLFTIVTVLCETNGFEQFNNIRQVVSYAGLDIAERQSGLFKGKTRISKKGNSRIRESLYMPALSATSYNEHIKALYQRVIERNPTIKRKGVIAGMRKLLILIFVLWKKNEAYNPQHQWNAPLIDIG

SEQ ID NO: 166788 - protein, 308 aa, unidentified
MPEPDRSATGQFPNNQKGHVKLLKWAKRLAGNSTIHFCMEATGSYGDAIALYLAEAGHLVSVINPYRIHHWAISRGLGNKTDKVDARAIARYCLNEKPDVWRMAAPEVRELTAFVRHLDNLKQQATQQNNRLSEPGLPPLVIKSLKKLLHQIEEQIASLEQGIEEHINNHPGLKQDRDLLVTIPGIAQTTAAKILAELPDVHQFNSAQSAAKYAGLSPSQYMSGSSIHKRTKLFKGGKRRLKATLYMPAMTAIRYNEPVKQIYQRLVAKGHKGASALAAAMRKLLMIAVGVLRSQTPFQADFAKIAKA

SEQ ID NO: 166789 - protein, 313 aa, unidentified
MSKQTHIGIDVSKNSFDIFVYETSLRKNFSMTKGHIHKAVAWIKKSHPGLIVLEATGGYERTLVSELTTAKLPVVVINPRQIRDFAKAIGRLAKTDAIDAQVIALYAQRIKPQIKPLANEQERKLSALVARRRQLVRARAIEKNHREQAYLPEVSSSVEVMIQKLTSEIENIETMITDIVNSDPFMQDKINRITSVPGIGKTTAAVLMADLPELGKLNRRQIASLTGLAPINRDSGQYRGIRMTGSGRKAIRTALFMSTMAIIQYNLKLKTFYKRLVQQGKSKMVALVATMRKLIIILNSMLKNNESWRLENA

SEQ ID NO: 166790 - protein, 332 aa, unidentified
MFKTRPAPPAVAATPKPQVYAKQLSTRSPVAHARTRFLLAAVQRHRPYHAVIEACGSYHWIYALLRQDGEVTLAHPYKLRALWTARAKTDKLDAIRLAQLLRAGLIPAAYVPPPPYQQLRDWVRSRVRVVRDRAEVYHHLHSILARFNWHSPYAQPFCKRGLVWLRTQDLPSPFDCIRQELLERLTHYDQVIQHMDEQLDRLAADYPQIEALTALYGIGTFSALLIVAELGEVGRFTREEEVAAYAGLTPKVHQSGSQDYHGAISKSGSPWLRWILVEASIKVIRKDPALQAFHHRVRRRSGWRRARVAVARKLAVICWKRLRAWERQRPAA

SEQ ID NO: 166791 - protein, 365 aa, unidentified
MRKAGLSDEADPENYLGGSSETMYYIGLDVHKKTISYCVKNAAGCVHREGKIGSTRRELDAWVRTLPEPRMIAMEATIFTGWIYDHLLPHAEKVKVAHPLMLRAIAAAKKKNDRIDAGKIADCLRCDFLPECHMASTEIRDRRRTLRYRSLVIKQMVQMKNRVSGLLMETGVSYNKQRLHKLGYFEELMTTNEDVHDSIRPLLKLSREMISRSQKLDYALISSLERDPLLKERLRRLRTVPGVGPITALTWALEIGDFTRFTSNKQAISYCGLCGDENSSADKVLRMPISKQRNKHIQRVLIEAAKLATRESPELAMIRAKELERGNRNRATLAVARKMVVYMLAVERRQQDWVPAEQFSPTAAA

SEQ ID NO: 166792 - protein, 317 aa, unidentified
MTQTSMTTAGIDTSKGKLDIAVHGRAEQWQVANTLPGWRILTNKLTKAGVSRVGIEATGGYECGVVQYLRAAGFTVQVLQPVQVKAFGRIHLRRAKNDALDAVMIAACTAALDQVRDAPDPRLAELAEQLTFLEQIEEDIKRFKTRLEHTSEPRLRRMVLGEITRMTARRLAQLRYIAKQLRAHRDLAARLDLVLSIPGIGERTALAILIRMPELGRISREEAAALAGLAPFDNDSGQQKGQRRIAGGRARLRRSLYAAALPAAFRWNRALIALYQRLIAAGKAHNAALIACARKLLIYANTVVQRGTPWTERPLGA

SEQ ID NO: 166793 - protein, 357 aa, unidentified
MRPSSCGLATMESCDGALCRTGRVIEADIDLCGEPGRTVLREGVVASNPDAIGAFVRSNAPGVVRIGLETGPTATWLWTELRRLGLPVICIDARHAKAVLKMQINKSDRNDAAGIARIMQTGWFKEVRVKDIDSHSVRALLTSRALLVKIKRDLENQIRGVLKNLGLVIGRAKFNVFAVRAEELIEDRPELMAAVRPLLEARKAIEQQVGDLDRKVLKLARHDVQVRRFMTAPGVGPITALCFKATIDDPTRFKRSRSVGAYVGLTTRRHASGEVDWSGRISKCGDAMLRTYLFEAANVLLTRVPKWSALKAWGIRLAKRNGLRKAKVAVARKLAVILHRMWVDGTEFNWSTKKAAA

SEQ ID NO: 166794 - protein, 403 aa, unidentified
MRRCIGLDVHRDFAQVAIWEGGVVRDAGRVSTSPEALRDFAELLGPDDEVALEATMNTSAIAALLAAHCQRVVVSNPLKTRAIAEAKVKTDKVDARVLAELLAADYLPSVWLADDNTRALRRQVARRVHIVRQRTRLKNQVQAVLARNLLPRCPAADLFGHKGRRWLATQPLPDDEAVTVAALLRQLDFQGEELRLLDAALAEDALRRPDVLRLMTIPGVDMAVAVSLVATVGDFSRFSSPNKLVSYFGLNPKVRQSGGLPAVHGHISKQGRAYARGMLVEAAWVASKAPGPLHAYYERIKARRGFQIAVVATARKLAVLCWHLIRTDTDYAFARPSLTAKKHRALELRAGHPSRRGQRGTAAAYSLRDVRNRERAVLEHAEAVYNHLVAGWQPQRSRAMTGG

SEQ ID NO: 166795 - protein, 387 aa, unidentified
MIKINYMSTLFVGIDVSSKCNVVCAMDFDENQYISSSFKNNQPGADELAKMILECMKTHSNLNTIVVALESTSVYSIHIANFLSTCEVLMPYKPYVFCLNPKATANYRKSYIAMEKSDPMDAYLIADFARCSRTKKCEPWRGGQFLALKRLTRHRLHLAECITREKTYMVSNLYLKFSELQLLDDDKQPFSNIYGATSSAVLTEFMSLQEIIDASEEDLLQFLAQKSRNRISDISKTSELLKKAARDSYRLDKCMYEPLNVSLASSFNCIQTYQKEMKLIDQAIEKCINGMNPNAFTILKSIPGIGPVWAAGILSEIGDINAFHSSDALAKYAGLIWLKNDSGDFVSEDNRVSKAGNTYLRYYLGEAANSVRRHIPEYKEFYSKKIC

SEQ ID NO: 166796 - protein, 425 aa, unidentified
MSCLLHPTRVIDLPESSRKASPIMTAPARPAPLVVGGADTHADTVHVAAITTLGREIDDREFPTSAAGYQAAVAFLTSHGPINQVGIEGTSSYGAGLARAVTKAGLQVIEVNRPNRADRRRQGKSDPLDAYHAARAVLSGRATSDPKDQSTEAIRSLHNTRRSAVKSSTAATNQIVAMLITAPEPIRAKYRALKGQPLIKALARCRTTVPDPVDAAVLTALKALAHRHQFLTTQSDELSTLIDALVTTANPALRAAYGVGPDTAAQLLITAGANPDRLRSEASFAALCGVSPVPASSGKTTRHRLSRGGDRHANNALYRIAMSRMAHEPRTRQYVARQVAANRSTKEILRMLKRAIAREIHRLLTHKVALPEYADLRPARQAKNITVTAAAKAFNMWPAAISRIELGQRRDDDLANRYRTWLQAA

SEQ ID NO: 166797 - protein, 335 aa, unidentified
MLSIGIDISKKKVDVAIYDGMKYVFETYENSVRGVKGMLRKIKKREPIDSELVFVMEATGVYHLRYADSLYESGYKVCIVNPLIIKRYGEEKLRRAKTDKADAKLISEFGYYNIIRFDSDAEDKLPYQYSPNSEVSSKVKLMLKAIEQLQRQKNKNINYVEALKQHKKEYSKDLIKMFNDINRETDKKIKKLEKKTEKLIVESEEHKETYDKLLKIPGIGKRTAGAVIGYFDKFDNFENAKQVAAYIGLNPRIRESGTSIKGKGKISRIGNAYLRKLFYMDALSASQYNVQCKSLYERLLMKGKDKPKIFMAVGHKLLRQMFAVAKYDRDYDPNY

SEQ ID NO: 166798 - protein, 388 aa, unidentified
MIYVGIDIAKLNHLAAVISSDGEILIEPFKFTNDYDGFYLLLSKLAPLDQNSIIIGLESTAHYGDNLVRFLISKDFKVCVLNPIQTSSMRKNNVRKTKTDKVDTFVIAKTLMMQDSLRFMTLDDLDYIELKELGRFRQKLVKQRTRLKIQLTSYVDQVFPELQYFFKSGLHQNSVYALLKEAPTPTAIASMHMTHLAHLLEVASHGHFGKEKARELRVLAQKSVGVNDSSLSIQITHTIEQIELLDSQLFHTELEMANLVTCLHSVIMTIPGIGFINGGMILGEIGDIHHFSEPKKLLAFAGLDPSVHQSGNFQAQRTRMSKRGSRVLRYALINAAHNVVKNNATFKAYYDAKRAEGRTHYNALGHCAGKLVRVIWKMLTDEVEFNLE

SEQ ID NO: 166799 - protein, 409 aa, unidentified
MKLYVGIDVSSTDLYTCIMDQEGNTCAQFKVDNHLLGATFLRDQILLWANKRQPSEILIGMEATSVYSWHPAMFFHQQEELKSWHVKVFTINPKLIRKFKEAYTDLDKTDGIDAWIIADRLRFGRLKVTAVMHEQFIALQRLTRMRYHLVHQLTREKQYFLQHLFYKCSSFTQEVDSSVFGHAILELLLESFSLDDISQMDVQQLADFLRQKGRNRFADPECIAKSIQKAARSSYRLSKCVEDSIDLLLGLSIQSIRSLQAQIKELDKAISRHLEGIPNTLQTIPGIGPVYTAGILAEIGQIERFDNQAALAKYAGLTWSKHQSGRFQAEDTSLIRSGNRYLRYYLVEAANSVQRHDATFRAYYRKKYEEVPKHQHKRALVLTARKLVRVIDALLRNGQIYTLRKGEDR

SEQ ID NO: 166800 - protein, 339 aa, unidentified
MSVLRKQTSALSTVKVSTEPAAIRSAVEGYADRLDRVGVEASSLGIWLYRELQPAGVPIIVVEARHMRVSLSTMRNKTDRNDARGIAQMMRLGWYRAVRVKNIDVPKMRSLLANRKLLKRKLIDIENHIRGTLRACGLLIGAVGRGGHEARVRELLEHGDPIFSVMIEAMLDVRRSIFEGYERLHRVLLQVVQHDAVCCRLMTVPGVGPVAALSFKVGVDDPRRFAQSRTVGAHFGLTPRRHQSGTSIDYEGRISKQGDVAVREALCEAAASLLLRVRKRSALRAWGLRIAKRSSMLCAITAVARKLASILHWMWVSETDFHVGFGAKVTQRLRLKPAQ

SEQ ID NO: 166801 - protein, 342 aa, unidentified
MVYVGLDVSGKSLVTYAVNERKQRVSAGEQPATRAGLRALVRQIGVGPKLVAFEAGNQMKWIAETLKKLDGIAVHVVHPNEVKWITESRGKTDRVDAKKLAELARAGILPRAVHVVEGPVRELRELVSARQQLQRKRVALINTIRGYVYQEGHRLPEKFFAGAAWREKLARLPVSVPLQLIIATFMASIEALVAAEQQLTQRLRAIADPRCDLVETIPALGPLASRVVLSAVDEARRFDDQKAVANYGALAPTIYQSGAVRHLGRINRDGRQEVRRVLLQCAHTVVRMKSHGAKPLQQFFLRIARRRGKKIAVVALARKLLTTAYGVLKSGQPYDPQKLQPA

SEQ ID NO: 166802 - protein, 333 aa, unidentified
MDTHADSHVAAALDPVGGLLGIEEFPVTPAGYARLLSWLGGYGTVALVGIEGTGSYGAGLARHVTAAGIRVVEADRSDRQDRRRQGKSDPLDAVSAARAAQSGRARGAPKGRGGAVEAIRALMVAKRSARAERTQTVNQARSLLVTGPDDLRARFAGYTVAALVSGMASLRPRPGSTVGYATRIALRELGRRAEFLDGQLGRLDELIIPLVTARAPALLALHGVGPDTAALLLIAAGDHPERLRSEAAWAHLCAAAPIPASSGRVTRHRLNPGGNREANHALWRIVITRMSSHPATRAYVERRTAEGLSKTEIIRCLKRYVAREVYRNLRPAA

SEQ ID NO: 166803 - protein, 335 aa, unidentified
MANHQTTPLVEDTAEALYVAFELSKAKWKLGFSDGSHRAARVVTVDAPDVEAVDRQILKAKQSFGLREGAPVYSCYEAGRDGFWLHRALTDRGIDNLVVDPASIEVNRRKRRVKTDRVDAVKLLGQLIRYYRGERRVWAVVRVPSEQDEAARQLHRELAVLRNERARHRMRIQSLLFAQGIRVLQQERRRLLTASRGKNVQKVKRLVQLRGIGLESAWVFSMELFAWRQFANRRELAGAVGLTPTPYSSGDTERQQGVSKIGNKRVRTLLVEIAWVWLRYQPDSALSRWFNERFAAGGARLRRIGIVALARKLLIALWRFVEYGVIPEGARLKMV

SEQ ID NO: 166804 - protein, 344 aa, unidentified
MVTIGIDVHKRTHTVVVVDEQGRKLAQKTIGTTSSEHLRLIAWAATQGDARLWAIEDCRHLSRRLERDLLGAAERIVRVPPKLMANARDAARTFGKSDPIDALAVARAALREPDLPSARLDGPERELRLLVDHREDLVSERTRMINRLRWHLHELDPGSEPRARSLKHLRNLDSLAASLEDREGLVARLARELVRRCRELTVEIKALEREIAALVEVLAPSLLAIRGCGPLGAAKIIGETAGVERFRSRDAYASYNGTAPLPVWSSNHARHRLSRSGNRQLNAALHRIALTQAQWHPEAKALLARRKAQGDGSLEALRVLKRRLSDVVYRALKADAAIELSLAA

SEQ ID NO: 166805 - protein, 339 aa, unidentified
MNKVSTVGLDIAKKVFQVHGVDAAGVVKVRRSLRRSQVVTWFAKLAPCLIGLEACATSHYWGRELRKLGHEVRLIPPAYAKAYVRRNKNDAADAAAICEAVSRPGMRFVAIKTEAQQAIGGVHKVRALLLKQRIMLINHLRGLMAEFGLVVATGPQHVGELLAILADPEEGGVAEPLRGALLGMTEVLRGLERRIEAIDRQVVAWGRSNTTYRHLITIPGYGPILASAVAALVTDPTTFRSGRDFSASLGLVPRQEGTGGKVKLGPISKRGNGYLRRLLVNGAMSVLGSKRARQDPWIAKLLASKPRKLAAVAVANKLARIGWAIMMRQEDFRTQPAAA

SEQ ID NO: 166806 - protein, 400 aa, unidentified
MRAVFGIDVSKASSEVAIVINSEKIHGYSMTNDAIGFSRLLEDLKTVSNPEIVFEATGVYSRRLQAFLENNDYAYTRLNPLEAKKQLDSLRVRKTDKIDAEKLAQSQFLLNRKPTDVQEEVYQNLRDLSRFYQNLTEDIVRAKNRLHKVLQVTFPEVENILSTPTGEQYWNLVIAFPCKDFVLDLSKDELSKSIRLSTSKWISDKRVAYLAEKLIALANQSYCAVKKTSPMLEEVRYYGKELLRLSEQRQTVLDQMVELAQPLPEYDILLSIPRIAETTATSIIGELGDIRRFQSANQINAFIGIDLRHYESGNYLAQEHITKRGNPYARKILFKCIHNMASASHTNPCHIADFYEKRKRQSQTTSTKPHTIASIHRLIRTMYYLITHNKLYDYALTQNL

SEQ ID NO: 166807 - protein, 354 aa, unidentified
MKQVCGLDVHKDSVFVCVLNDEGVVYQEKFGVLTSDLNQLVAILSEHHVREVCMGSTSIYWMPVWRVLEPYFELKLVNPYFIKQLPGKKSDVKDAEWIATCLLKHLIKGSYVPNDCIQQLRQYDRRIFDLNKDIVYKLTKLDSALQRCNIRISNYVSTTNGKSYQKVVQLISEGITDSGELVKVIHGRTVNRIGMEIIKGALTGVITDVDIDIIRQLRDEVALANRHKDECQSRMDALCSKWFPRQLANLKTIPGIRERSATAIIAELGVDMSSFEDAAHLVSWCGLKPRNEESAGKTQNCFYNKFSYHQTVVRRKNKMKVQVAIARKMLTAIWFILKCNVPYRDFTPDIIPAG

SEQ ID NO: 166808 - protein, 366 aa, unidentified
MQKISTMRATGRGIFKGCQLTIGLDLGDRWSLYCVLDEAGQVILEQKLPTTPEAMRQAFEKMPRSRIALETGTHSPWVSRQLAQLGHEVIVAHARNVRLIGESRRKDDRIDARTLARLARIDPQLLSPVQHRSAKAQVHLTVIRARAGLVSARTALVNAARGLVKSYGERLRKCGTQQVSREMAAGLSAELREALEPLLREVESLNERIKEYDRRIEQIAKKDYPEVELLQQVKGVGDLIALTYILTIEDPHRFRKSRDVGCFLGLRPGRRNSGQSEPQMHISKEGDRYLRTLMVQGAYYILGPFGEDSDLRRWGRKLAERGGKNAKKRAVIAVARKLAVLLHRLWVSGEVYEPLRNSQKAVCAAA

SEQ ID NO: 166809 - protein, 448 aa, unidentified
MRTIVASVMPAKAGIHDFAGRTKARTYAGGSGSQALDRVRYASHSTREQPMRIETQPQDHPTATTGETARLLVSFELSQSKWVLTVRAPASAKLSRFTVPSRDTEKVSSLLTAQRQQAERRTARPVQIVSIYEAGLDGFWLHRWLETQEVESHVVDAASILGPQRRRNAKTDRIDGEKLLRSLAAWLGGEVGVCSMVVPPSVAQEDLRRLSRERGELVDERTRLSNRVGGLLANQGIAGFKPLKKGARQALQTLRTGDGHELPPHLRTAIERILQRLELLSEQIKAAEAERDALLRAAQVAAAPEAATAASPEMAAAPLLLRLRGIGPEFATVLPLECLNRDFDNRRQLGAFAGIAPTPWCSGSVEREQGISKAGNRRLRTILIEAAWSWQRHQPDSALTQWFRKRIKGQSARVKRIAIVALARKLLVALWRYVKHGVVPQGAVLKAV

SEQ ID NO: 166810 - protein, 339 aa, unidentified
MVLIGIDPHKATHTAVVVDDNERELARMKVRADRGQVAALLEFADEYRPRRWAIESAGGLGFLLAQQLVRAGEDVVDVPATLAARVRLLGSGRGSKSDPNDALSTAIAALRDPHLRTVMVEDHAMVLRLLADRHQDLTSLRTQAVCRLHALIAAMTPGGIGRRISADSAASRLRTIHPATAVEVTRKQMALELVGDIRRLDKSIAQVKKTTAAAVTASGTTVTDIYGVGPIVAALLIGHTGDITRFPTAGHFASYNATAPIEASSGKVVRHRLNPRGNRQLNHALHMAAVTQISHDTPGRAYYQRKIDQDGKSASEARRALKRRISDAVYRQLRADART

SEQ ID NO: 166811 - protein, 442 aa, unidentified
MNSRAYRATRVNDVKWDEIATGREGLGIMLGVDVGKLSLWAVCRWADGRFERPWRTDNPMEIPTLVSLIKRMSMGRKLVVAMESSGTYGDSLRQALADSEIKVERVGNKASHDYAEVFDGVPSQHDGKDAAVVAELAALGKSMPWDYRPADAWDEELAYWVEWMVVHRQALTLWQGRLEGLVGRHWPEATQVLKLSSVTLLRALKHYGSPQALAADPQAARQLAHWGGKFLELKKVKQVVENAGSSVGVRAAEWQRRQIQDFAQQALAARAEGQRAERQLRRLAAGHPVLQAQGKVVGVPTACVLWTSTGDPRTFHAAAAYRKAMGLNLVERSSGQYKGRLRISKRGSARSRQWLYFAVLRLIQKSGVRPWYEAKKARNEDNARIAVVAVMRKLAVALYHVGIDNREFKPRRLFGRICKRVGNSTELPSRMKIKRKAADVKA

SEQ ID NO: 166812 - protein, 341 aa, unidentified
MQVSTIGIDLAKSVFQVHGIDAVGKVTITKQLRRSQVLPLFAKLPRCLIGMEACSTSHHWARELKALGHDVRLMPASYVKAYVKRNKNDAADAAAICEAVTRPSMRFVPVKTAEQQSALMLHRTRDLLVRQRTQLVNAMRAHLAELGLVAPRGGEGLQALIIVVRDGTDELPDLARKALQALLGQLDALARQISEIERDIQAQHRLSEASRRLETIPGIGIIGATAIAATITDPTIFKSGRELAAWIGLVPRQNSTGGKERLGSISKQGDRYLRRLLIVGATAVIRQARTHPDKHPWLIQLLARRPAKVVAVALANKTARIAWAVLARGGTYRAPVLAARA

SEQ ID NO: 166813 - protein, 349 aa, unidentified
MTEYIAFDSHQHYTLAEREDAATGRTRQRRIDHRRGAIAAYAQRCPPGTPVAVEATGNWYWIIDEIEQAGLEPRLVHPRKAKLMMGMINKTDRLDVHGLNRLQRAGTLPTVWIPPGHLRDLREVTRTRMVLVAARTRAKNRLTAPRTKYALNLVGVSDAYGPRSRSCLEAAIDALPTETCWTSRLLLQQIDLLTDQIKQVDARLEALITVTPEMERLMTLPGVGVILAAVIALEVGCIDRFPSAEHLAAYAGTTPRVHASGGKVRYGPLRPDVNRYLKWAFVEAGNSVALNHRRRPGRHVSRRYRQVRRRKGHATAVGAVARHLAEATYHVWSRAEPYRDPDVGRTRKA

SEQ ID NO: 166814 - protein, 318 aa, unidentified
MSHGYDKFVGIDVSKDALDVHGLPAGSPSRFDNTAAGRAKLLSLLPQAGACLSVVEATGGYERDLVAEAVTAGHHIAVVNPRQVRDFAKALGLLAKTDRIDASVIARFAETTRPVPKGYDERQEQLRELIVRRRQLLDHRTAEKNRSEMAHSSLVRKSVLKHIEMLNKDIQRIEKAILQLVESNDDWRERFEKLKGVPGVGGQTAATLMAELPELGQLNRQQVAALVGVAPFNRDSGQFRGRRAIWGGRQSVRNALYMAALSAKKHNPVIREFAARLMAKGKPPKLVLTACMRKLLIILNAMLQSGDSWSPRLATLTP

SEQ ID NO: 166815 - protein, 340 aa, unidentified
MYYTGIDLHKKTSFITTIDARGKIVTRANLQNVEEDILAYFAALGDKTKIVIESMSSWYWLYDLLTAEGYEVLISNPVKTKAIASAKIKNDKVDSHMLAQLLRADLISTVHVSSLERRKLKELLRHRSRLVRDATRMKNRIHMLLMKNNFKNPFSDLFGVKGLSYLKEIDLPDYHRQQVETYLLLYEKVQEQIKPLTKRVRALAKQNHTAQLLMTIPGIGPITAMFILAEVDDISRFRSYRNLASYAGLVPSLDASAGKEKMGRITKQGSRYLRTALVEAAQAAARMQNCRLRIFFRRRIVKAGYQKAIVATAHKILQYAFYVWKNQTPYQETYPVCVTR

SEQ ID NO: 166816 - protein, 421 aa, unidentified
MEVIVSRCAGLDVHKNTVMACVRTPSPDGGRVSTVRQFRTFTAGLRQLRDWLLAEHVTQVAMEATGVYWKPVWHVLEAATGPDATSLELMLVNAHAVRNMPGRKTDVADAVWLAQLCECGLLRPSFVPPPVIAQLRDLTRYRKKLIEERARETQRIQKLLEDAGIKLDSVVSDILGLSARQMLEALIVGVRDVAALAELAHTRMRPKIPQLRQALEGRFAAHHALMLRMHLDHIDQLSANIERLDMEVDRVICPFSDQLQQLITIPGVGRRTAEVIIAEIGVDMRRFATAAHLASWAGMCPGNHESGGKRRSGRARKGNAALRAALCEAAWASSHSRSGYLPAQYRHLLRTFGKKGQTRAIFAVGHSILVIAWHLLANNSTYEDLGGDHFVLHNDTEARKRYLVRQLEALGQKVTIEPAAA

SEQ ID NO: 166817 - protein, 343 aa, unidentified
MNRFVGLDVSQKITAICIVDNAGRRLWRGQCPTIPEQISVLVRRHGGDDARIGIETGAMTPWLVHELRNLGLEVVCLDARHARAALEMQINKTDQNDAEGLAQIVRTGWYRSVHVKSFDSHRARALLGARTQLIGMTTRLSNHIRGVLKTFGLLPGAMRGLPFDRKVEALLLDRSDVALIVRPMLVAWRQLREQIAVFDKAIRVLVRLNSSCRLLMSVPGIGVLSALAYVSTVEDPGRFSRSRSVGAHLGLTPRQYQSGEVDRSGRISRCGDTLARTLLYEAAVVILTRLKKASSLKDWGHAIARRSGNGKARVAVARKLSVILHSVWRSGQPFRWSEHAGAA

SEQ ID NO: 166818 - protein, 315 aa, unidentified
MAVQQAFMVGIDVAKAYLDVAVEGKRAVSRFNNDASGCAALTAAVAGAELVVVEATGGYEMAIVRTLMAAGIAVAVVNPRQVRDFAKASGRLAKTDQVDARVILHFARAMRPAQIPHIDDGRIALAALVTRRRQLIDMAVAEKNRLEHAPQAVAALIGETLAALKAQLARVDAAIALAIEAEPDMAERRNLLLGVPGIGEVNAAVLIAELPELGAIDDKKLAALVGVAPMAHDSGTWRGQRHIAGGRATVRCALYMATLSAIRCSPAIKAFYTRLRAAGKPPKVAIVAAMRKHIIMINTILRRKIPWKEPQQHGC

SEQ ID NO: 166819 - protein, 371 aa, unidentified
MNNIAYVALDVHKNTIVAGMSLKAGESIIMGEYANSSSGLKKLLSRLNKLKNDFAEIRICYEAGPCGYEVKRILEKNGYHCEVIAPSLIPQRSGDRIKTDKRDALKLARLYRAGELTAIAVPTEFQESVRDLVRCREDISRALLAARQKTNHFLIRHGHFYEGRNWTKGYFAWMKTIEFNNKYLKETLNQYITHIEHLYFQLEDLDREIAKIAESDDYKMKVDALKAYRGISTLSAMVLIVEVVSFSRFAKARELMSYLGLVPSEYSSGGTMKKGALTKCGNKRVRRILVEAAWHNRHEAKVTYSMKANLKKIDAELRNPPLKALKRLNKRYYHLIFAGKPKSKVAAAVARELVGFIWHSMIIVESRLCTN

SEQ ID NO: 166820 - protein, 363 aa, unidentified
MRPVKLEEALMEIVGALDVHRRQITYKTVDRETGEVRRGRISPAARADVREWLAAFEGCEAEFVLEGTTGWRYVVEEIERAGHRAHLADPTETAARRGRKRRAKTDQTDCDLQLKLLLAGEVPESWIPPAHILELRTRVRMRKTLVDQRTAWQQRLKAQLFHQGVPVGIQPRTRVGRAALRRVELSPAGGELVSLAVRMIDMIDGELDPIDAWLRSFARRQPGCRALIEQLYGVGPVVATAIVAELGDCRRFSRSTEAVRHTGLDVTVYQSDRKRAAGHISREGPDVLRWALFEAAQRACRSASPDHAYYRQVADRIDHNRACLSVARKLCRRAYHILRELDDQALAPVELHQQREEASAAAA

SEQ ID NO: 166821 - protein, 355 aa, unidentified
MKNQATQYLALDVHQATCVASMRDEHGRVVMRATVATEARALLGLVRGLRGRVEVAFEEGTQAQWLHDLLVPHVARVVVCNIRGRGQKANKNDQLDADDLSEQLRLDALKPIWHGSRVVGTLKELVRCYDNLVDDSTRVMLRLKAIYRGRAIGTSGKSVYRPSQRKAWLDKLKTHGARARAESLLTQLDTLTTLRHAARAAMIAEARRQPGWKTLRSMPFFGPVRVAVVLAVIGTPHRFRTRRQLWPYVGLAVVTRTSSEREFVDGKLRRKQRAPLTRGLNANHNRMLKDVFKGAANAAAAKAGPLKEIFDRCVAGGVRPTMAKLTLARKLAAIVLRLWKKGELWDPKKLTMQPT

SEQ ID NO: 166822 - protein, 394 aa, unidentified
MDRALVGVDISKDTFSAAGLDAEGNECFCGSYSMDSEGFGKFLEIVTTHCPDRQKVLVGMESTGCYHINLFSFLTSRGIQAVVINPLLIANFAKRSLRKTKTDKKDAKTIAKFLMENREEISQLSISQDLQDLRDLARERESISHLITATKVEIKRVLRTTFPELESVGDLFTRSMLRFLKEYPSARRVKMARLKDLAKVLNQPQVGNKLSFSVEDILRAAHSSIAMVSPAKEVILQGKIATLVHLQERLAELTKLLTDFCKATRVEDWKILRSIKGVGPKTAVPFLAEMGSIENFSSHKKLIAFAGMDPSVCQSGKYIGKSKLSKRGNRHLRRAIYLMASAVVSQNAFFKAYFIRRKREGLTPQRALLATAHKLIRVIFGMLSHRTYFQVKMA

SEQ ID NO: 166823 - protein, 379 aa, unidentified
MGDCSEAFVGFDTSKLRNAVAIADGGRDGEVRFFGEVENSEAATAKLVRKLAAQYQRLTFCYEAGPTGYGLHRQIESLGYECIVAAPSLIPKRPGDHVKTNRRDAVNLAKLLRAGELTAVWVPDRHHEAMRDLTRARETAMLDLRAKRQQITSLLLRQGRRYQEGNQKRRKPWTKIHKGWLMRQKFDHAERRLVFEEMMLAMRQAEERLARLEQAIRVAVPDWSLAEVCTGLMAMRGIDLVSSAGILAEMGDLNRFPTPSELMAGLGMVPSEKSTGETIKRGAITKAGNRRARRLLVECAWAYRHPPRVGVTKQAKVAAAPRAVREIAWKAQHRLYGRYRALIRRGKLKNVATTAVARELAGFIWAVNREITSAGAAAK

SEQ ID NO: 166824 - protein, 318 aa, unidentified
MRIKERDLQARQQTLAMLDTGTGEVVNRTLPHEGESVREFYSTLPGPVRVGIEATGSMKWFLQLMQELGIDCQVGHPATIRAAEPRRQKHDQRDAGLLLKLLVENRFPSIWQPSQELLDLRGLLLHRHQWVRLRTRIQNALQAIALANGLRRGSSLWSESGQRAIASLPLATHTAQRRSELQAMYARFEAEIEQLKQQVLQQAGPRPTAGLLMTHPGVGPITALATDVFLGDPKRFSNGKALASYIGIIPREHSSGGRQRLGGLSKQGNPLLRLLWCEAAAHAVRRDPELRRFYRRKLVQKGLGKARVAAARKLGPGN

SEQ ID NO: 166825 - protein, 382 aa, unidentified
MKHITLHLGLDVHKDSITIAIAEPGPKGEIRLFGSITNDVDRLEKALRRILKAHPGAHLEVAYEAGPCGFVIARRLKQLDIPCLVAAPSLIPKQPGSPFKTDKRDARAIARLLRAGELTAVYVPEATDEAIRDLCRARTDAVDDQRRCRHRLKAFLLRHGYRYQGKANWSQPHMRYLRELVLPHPAMKAILEEYLQGIDAAHNRVQRIEGSMLALLGTWRLKSAVEALMAFRGFQLVAAMITVSELGDIHRFAHPRQLMTYLGLVPTESSSGPRQRMGAISRCGNGHQRWLLTECAEHYLVPPKVSKELSRRQEGQPQSVRDLSWKAQTRLHLRFSKLLGRRLQRNKAKVAVARELCGFVWGLLRTLDCYKQAQSLQLPLTS

SEQ ID NO: 166826 - protein, 366 aa, unidentified
MKKNSTVAVGRKQIFKQAKLTIGLDLGDRSSHYCMLDEAGNVILERSLPTTANGIRQAFSRIPRCRMALETGTHSPWVSRQLSELGHEVIVAHARNVRLIGESSRKDDRIEARTLARLARIDPGLLGPVRHRSAQAQIHLTVIRARAALVSTRTALVNAARGLTKSYGQRLNKCGTEQMTRDRAKGLSPELREALDPLLREIESLNERIAEYNRRIEQIAKEVHPEVARLKQVKGVGTLIALTYVLTLDDPQRFRRSRDAGCFLGLRPGRRNSGQSEPQLHISKEGDRYLRTLMVQGAHYILGPFGQDSDLRRWGLKLAERGGKNAKKRAVVAVARKLAVLLHKLWVSGEVYEPLRNSHKVVRAVA

SEQ ID NO: 166827 - protein, 323 aa, unidentified
MMSTQHNYAGIDIAKRNFVIAVSSLSKTKTETNNPKGIAHTIEYLKKHNVALVVMESTGGLEIPAAKAIHRSGIAVIIANPRQTHQFAQSQSLTKTDAKDAKMLAFFAQMTAQKEGWQTMLYHPPTEAEEVLEALVNRRNQLVDMRTAEKNRLHQVHETQVESVKQLIAHFDRLIDELDKQIDDHTHTHFDGKAKVAKQIKGIGSTTTATLMAMLPELGRLSHKRLASLVGIAPHPRESGETKFKSRCFGGRSAVRKALYMATVVATRFEPLIRDFYQRLLSKGKPYKVAVTACMRKLLTILNARMRDYFTENGTTENGIQTA

SEQ ID NO: 166828 - protein, 445 aa, unidentified
MYLEGETRGSREIPKPRACDEDRLPALVTKAEEYLRPESQHLQGRQVRVQGREARVLNNAGWRGNATDQDAGGDRRERETLAVARWRENEDKGKAKEFENDAGGHSELVQWIGKGARVCMEATGVYHLQLALKLVSAGIEVMVVNPRVAKDFGRALSNRSKTDRVDAWSLLEYVQRMEFVPWKAPSAAVLELRELGRRLSELIQARADEKNRLHAKKTAGISATVVKDVKAHIAQLESRIKQIEKAAVAVVRGDAGLREQFGILTKITGVGGRSAILLLTELAVLDPTMTVKQIVGHAGLDPRQYESGSSVQKPPRISKVGNARLRRILYMNAITAIRHDRGARLFFAQLVARGKKRMQAIVAVMRKLLHGIWIVLQRRVPFDSSVLFAASLAKAESSDSAVAADQPEPSQDHPKGRSEAEELRQQLDPGSAQATHSAKTTSKAA

SEQ ID NO: 166829 - protein, 355 aa, unidentified
MSQEKYIGMDVHQATISVAVMDASGKLIMECLLETKAATMVEFVQGLHGTLSLTFEEGTSAAWLHDLLKPHVSRLVVCDPRKAALLKDGNKSDRIDARKLAEMLRTNQLKSVYHGEHGLRTLKELGRSYLTITQDVTRSMNRIKALYRSWAIPCSGSTVYAPRHRTEWLAKIEQPGVRIRAERLYQQLDSLQPLRLQARCELLRESYKHAAVQLLRQIPSIGPIRSALLVALLQTPHRFRTKRQLWAYSGFAVETHDSGEYRAVRGKLQRNRERITVRGLNDNHNKDLKNLFKSAAISASTRPGPLQDFYAALVGKGIRPTMARLTLARKIAAITLTMWKKGVSFDPKQLHRQAA

SEQ ID NO: 166830 - protein, 434 aa, unidentified
MKKHAYRARNINQFSFEKLQGRLRGERIIVAVDVAKHDFAAGIAGDDGLVLEHFKFKHPKQTHQFLDLLEQPRRLGSRVEVVMEPTGTYGDAVRYQVSARGIPVFAVSPKRCHDAAEIFDGVPSLHDAKASTILARLHAQGLSKPWPEGESSRRALRATVERRELYHDPLERDRGRLEGILSRHWPEYGEHLDPQQQKTALALLAEYPGPATVAQNAEAASEFMVRTSRGNLSRDKIAGVIDSAKTTLGTPMVEQEQTLLKELADQMLALRGELDRIDAQIEELIQSEPEAATLASTVGAVTAAVLIAMLGLARSYPSAGAYVKAFGLNLTEHSSGQSKRPGSGLHISKRAPGIVRKYEWFAVLRLIQSEPLARAWYEGRKAFQCDQKPKAVVALMRKHVRALWHVGKGEAFDVEKMFDTARLKVPVAAQAADG

SEQ ID NO: 166831 - protein, 338 aa, unidentified
MPMYAGLDVSDKTTHVCVVDGEGAIVWRGVCATDPEAIARALGRHAGGLVRVVLETGSLSAFLYHGLIERGVPVICICARHAKGALSARVNKSDPHDAEGLAHMARTGWFKAVRIKQEATHLDRAALKIREQLTGSRLAMTNQLRGMLKLFGLRMGKVTTPAKRAERLTVLFAQKPEIREIMMPLVETIEALDAQLKRSGKLLAASAAADPVAVRLMSVPSVGPIAALAFKSSIEDPGRFARGEDVGAFAGLVPKRNQSGERDYKGRISKAGDAMLRSALYEAANVLLVRVKRPCALQTWGRNLAETKGPKRARVAVARKLAILLHRLWLSETEFCWN

SEQ ID NO: 166832 - protein, 338 aa, unidentified
MKKFIGIDLHSNNSVVVVSDEADRVMFRKRMANDLKLIEAALAPHRDETVGVVVESTYNWYWLVDGLMDAGYRVHLANASAIKKYEGLKYSGDVADAAYLAHLLRLGLLAEGYIYPREERGARDLARKRLQLVRYRTAQILSIEGILMRQMGARMKSESVKGLTPEQVEKFGFAPDVALAVEANRAVSQTLGQQIEALEKRLRERVSLRGEFKLLKTAPGIGETLATTIMLETGTIARFAQVGNFSSYCRCVDSLRESNGKKKGEGNAKNGNKYLAWAFVEAANFAVRYCPQAKSFYERKKRRTNRIVATKALAHKLARACYHMLRDHKPFDVNRCFA

SEQ ID NO: 166833 - protein, 313 aa, unidentified
MGISNFIGIDVSKKSLDVAALPEGTVRTVSHTVQGRRELLAELPEPGTCLVVVEATGGYERLIVADLATAGHLVAVVNPRQVRDFAKGIGIFAKTDRIDAAVIAKFGQHVHPRPLAEVHEKQGELDQLVTRRRQLVDLRTAEKNRMGMAHSRPVRRSLQLVIDLLNKQIKRIEKAILALVESDDQWKGTARLLKSVPGVGDVTAATLIAEFPELGHLNRQQAAALAGLAPFNRDSGSFQGKRSIRGGRRSVRNVLYMAALSAKRYNPVIRTFAQRLETQGKLPKVILTACMRKLLVILNTMLKTNTQWNPQFS

SEQ ID NO: 166834 - protein, 412 aa, unidentified
MNAVGIDVSKGKSMVAVLRPLGVVVTKPFEVSHTATELFKLAGFLQRLEGETRVIMEHTGRYYEPVAQVIHNQGLFVSAVNPLLIREYGGNSLRRVKTDKANAKKIARYGLDNWVELREHTPMDTIRYELKTLNRQFHLTSKNKTACANNLIALLDQSFPGVRGWFDSPVRKDGSQKWVDFAMAFWHVDCVRSTSQVAFAERYHKWCKRNNYLFNAAKAEQIHREAREMIALISKSDTTKLLIQQASSQLKNVSCMVEVLRAEMNRLAAQLPEYPVVMSMYGVGESLGPQLMAEIGDIRRFAGKQSLVAFAGVDPMPNQSGIKNVRSNRSSKRGSPYLRKSLFNLMSVLLKLAPSDEPVYQFLDRKRAEGKPFFVYMTAGANKFLRIYYGKVRDHLAMLGSVSHDPTSANPR

SEQ ID NO: 166835 - protein, 407 aa, unidentified
MPNADQATHVVGIDIGMESCTMCCLARNKQPLIPATSFANTLAGFCILFARLDDLGVPPEQVLIGLEATSRYGENLFQALLKRGYQVCLLHPAQMHAFAQQRGMRAKTDQLDALTIARALLSGEARFGYVPSEQVAAYRELLRVHHQLSDDIVRYKNEIHALLVVQFPEFTQVFVDPTRPTALAVLKRYPSAQAIAQTPVETLSALLHELAPHHYGRPTAQKLIRLADTSINSGVAVTARASSLRILCDQLEHTQHNLEDLQREIDQFLEQDPKVKGMLSVPEFGSLTVAVLRAELGDLTRFARIDQVVAYVGLDLLVKQSGKWRGQTKLSKRGSGRVRRILYLAALRSIALQTSPFGIYYHRLVARGMKKGMAVVAVMRKMLIVSVHLILTEERYDPGKVAVQAGS

SEQ ID NO: 166836 - protein, 281 aa, unidentified
MPRRIDVHIHPAGCVQQFSNDRTGHARLIAWIKPQQPSRIVFEATGASHRGLERALAKAALPGVKVNPWQARRFAEAAGRRAKTDEVDAAMLARFGVTLQPEIRPARSPEIDVLAELLAARRALVKHRTAALNRAKNLTLPLLKRQSQQHLKQIETQIAEIDREQTTLMAQQADLKARAGILCGIPGLGLVTAVGMLIDMPELGSMEAKKAASLAGLAAMTQTSGKWQGRSCIQGGRAQLRQSLYMPALIAIRFNPPLKATYLALRKAGKFAKVPTGRGWT

SEQ ID NO: 166837 - protein, 396 aa, unidentified
MEVMDQAGKVLAKRRLAEGVAGMTQLHELTGRFVPVGALDAEVVVGIETDRGPWVAALIAAGYTVFPVNPLQASRYRERHAVSGAKSDGGDAHMLADMVRTDSHQLRPAAGDSPEAGAIKVVARTHKTLIWERTRTVQRLRHQLREYFPGALEAFEDLDAPDVLELLARAPDPASAARLTRAQISAALKRARRRDITGKTDVILAALRGQQLGQPPALTAAYAVTVRSLIAVTVTLNQQVAILQEQVRAHFGQHPDAEIYLSQPGLGSVLGARVLAEFGDDPRRYADGKARRNYAATSPITRASGKKKVVAARFIHNDRLVDALNAQAFAALKNSPGARAYYDQLRSRGIEHNDALRRVASRLTGILHGCLKTRTLYDETTAWGHRENLPQPSVAA

SEQ ID NO: 166838 - protein, 373 aa, unidentified
MSRTDFAHPVATATRPEDSTVFVALELSRKSWLVATSSPGEERISKRVVTAGDGPGLLALLGKLRETAERRLGRAVRVVVIQEAGLDGFWVHRLLVDNGLESHVVDAASLAVDRRKRRRKTDVIDAEGLLRALMAWTRGERRVCSMVRPPSPEEEDRRRLCREREALVTERIRHTNRIKGLLAGQGIFDFDPLRPKHRERLDELRTGDGRPLPPCLLAEIRRQLGRLDAVVRDLATVEAERNGLVGLRAMDRPAQSPEEGAKPGGVAEAVTAPVAQGTDPAVAPEEVASSAASEAAPANATSRTAPAEPAALLMKLKGIGPEFAAVLWLEALFRSFGNRRQIAAYAGLAPVPWQSGGIDRDQGIAKAGNPRRR

SEQ ID NO: 166839 - protein, 331 aa, unidentified
MFPVGIDVSKNTLDLCMLYDGIKGRIKTRNIQNNRHSVENILRWLRLQHCGPEDVHVVMEATGVYHERLATELHDAGFRVSLANPHRSREFARGMGIMTKTDKVDAYMLACYAFLKKPHYWEPPAPEIRYLGALLRRRDVLLGDALREENRLEKYLSTDTPADIISSCRRMAQLLREEVSNIERQIKAHIKASPALRRDYTLLNSIKSVGPQLGMHMLVVLRSHNFASAEQAAAFLGVVPIEKRSGTSVRSRPRMSKIGPPQLRAKLYMSALCGKIYNKRMRNIYDEMCLRGKPKMVAIGALMRKLVHWCYGVLKTGTVFNDEGLKQVLST

SEQ ID NO: 166840 - protein, 354 aa, unidentified
MRTTEQAVRKVISAKEVYVGIDVHKESWHVTIRSDGEERFNGRIPGQYQSLKRVLERYRDVRIKVAYEAGPFGFWLLDRLVQDGIETIVVPPSLIPVESGNKVKTDKRDSRKLATLLEKNMLKRVYVLTREEREHRDLLRTRRQIVDHRNNVARQIKSKLMFYGISSPFTSTTRWSVQYVEWLKTITFETTYLKEAFDLLIELYEYLTLKIARINRTVVLLCRDKNYRQKIKLLCTAPGIGKLTAIELLVELQDITRFKSAEELASYIGLTPAEYSTGERTRQGRITRCGNKRVRTYLVESTWVLITKDPYLRAKYLRLKSRRGGKRAVIAIARKFLIRLRRMLLDNVPYRMAA

SEQ ID NO: 166841 - protein, 328 aa, unidentified
MKYLGIDVSKDKLDCCLLRDASDTKRKTKKVANSPAGLAILISSMEKEGVRPDELHVIMEGTGVYHQLAAETLCDAGMTVSIANPAQVKEFGRGMAVRTKNDTKDSFVLARFGALLKPVAWTPPPAAARQLQAYVAREDAIKKDIQREQNRKEKSVIGRAPSDVLVSIDDTIEFLNIQLKAIRKKIKAHIDRHPDLKDDMKLLTSIPGVGQETGHHMLSVMHTHRFRSAEQLAAYLGLVPVERQSGTSLHARPKLSKAGPKTIRAALYMPAVTALKWNPHIRALKERLTAKGKTPMAIVGAAMRKLVHLCFGVVKTRNRYSPDHVQPA

SEQ ID NO: 166842 - protein, 351 aa, unidentified
MILIGVDYHPSFQTIAFFVEETGEYDERELDHSEGEAERFYRDLQQRGIHVRVGMEATGFSRWFERLLAELGFELWIGDPAEIKAKRVRKQKYDRKDARLLLRLMRENNFPKIWVPSPENRDVRQLLWHRHRMVQARTRIMNQLQALAMNEGKRRKSKLWSTQGRAELEKLALAPWASWRRKELLELLDRLTPSIEELTAAAEREARKRPEVLRLMTHPGVGPLTALAYVLIIGTPERFQCGKQIGTYVGMIPTEDSSAGKQRLGHISKQGNSLLRFLLVEAAQAAARVNPHWRRRYVHLAMRRHKSIAKVAMGRRLGIRLYWMWRNGCEYSPSFEFGSYVGKLEIVHGVK

SEQ ID NO: 166843 - protein, 344 aa, unidentified
MEISTIGLDLAKSIFQVHAVGEDGKAVVRKSLRRSQVLPFFGKLRPCLVGMEACGTSHHWARELAVLGHEVRLMPPAYVKPYVKRGKTDANDAEAICEAVTRPTMRFVAVKSPEQQAALALHRTRDLLVKQRTQLVNMIRGILAEQGVETPRGLHHALALSARLVDGEVPQVPALVQRVVEGLARQIAALQTQLGAIEKEILAWHRSSDVSQRLATIPGIGIISATALAASVTDPRQFRSGRELAAWLGLTPLQSSSGGKERMGRISKMGDKYLRRLLVVGMTSLVRRARVSPTSVDPRIIDLLARKPVRLATVAMANRTARIVWAVMARGETYRRPWTMALAA

SEQ ID NO: 166844 - protein, 519 aa, unidentified
MHQTKYRGIITEAGSLTMPPWEPAFRLVKPPIKSVSPFGGDLCFGWLGSPRLYLYKPLGCVSAFWKWIPARKDKTMQYQKVLKMLESIPYLSVGLDVGADFTWMSIMLPNGTLTGKPFKIVHSDPQSRELAVAKIKEAQEAYSLKSRCFLESTGIYHIPLLCFLRDKGFDCSVINPIITKNSTNMNVRKLHNDKFDSKKAAKVGLDASLKTSIVPDDAVIDLRNLVRDYYYFKDLQSAVVLKLNAELKVSFPAYLNVFSKITTQTSLKLLEAYPLAADILAAPKDELVETIRTTARFGEKYAISKYDAICAAAKDAAVFGRALPSNALRIRLYIKTYREYQAHLDSILEELHKAVDNLQGDPVYDRICLLQSLRGVGFLSAVVLIAEMGSFDLFPSPKKLYAYFGMDPGVNDSGKFHGDRVHMSKRGSSLARRILHMIAINNLKVDKAAKAPVNPVIYDYYIRKCASKKKIVAVGAVMHKICNIIFAMLRDNKPFELITPEEHCERYAAEHPESVSIVA

SEQ ID NO: 166845 - protein, 317 aa, unidentified
MCKFIGIDISKQTFDVSFLENGKWHHQVLENKTIGFKKLAKILNSEVWVVMEASGSYYLPLAEYLAGIGIKVSVVNPLVIKRFSQTNLYRAKTDKKDAQTIAEYAEKYELKKWSPESENAKKLRQLYTRIEILRKQNHQNRRQLEAFSASGFLDNILKNEIKSSIKFLENKIKKLENEMNRISLEEYSETMENLQSIPGVGKQTAMMMCLITNNFEKFNHYKQLIAFVGFSPRIYQSGTSLKGRGHICKMGKSQIRKLLYLCSWSAKRWNKTCKEMYERLKEKGKPERVIKIAIANKLIKQIFAIGKSKEKYQPNFC

SEQ ID NO: 166846 - protein, 417 aa, unidentified
MPSSITLFVGTDVSQATNRTRFYDAAGVEIGRRYQSANDLPGARALAAEAILRADTVGADEIRWALEATNLFWWHLATHLTTSPELVARRLKLYSFNPRVVSKFRESYPDLGKDDWVDAMVIADRLRFGRLPAECYLDERYQPLQRLTRYRKHLVDTIVAEKQVALGYVWLKLSGYELEEEGLTNTFGATSQAILERYLTPDEIVAAPFEELVSLIAAESRGKADAEAVAQAVQQAARRSYRLPAGMVEPVNLVLSSSLVTIRTLTAQLKPLAKAIATELEAAPSQTIRTIPGLGPVFTAGIVAEVGDVTRFDNEEKLAKFAGLTWRRHQSGEFEGEDRSLTKTGNRYLRYYLVEGANSVRQHCPEFGSYYAIKYKEATRHKHKRGVVLTARKLVRVVDSMLRSGQIYRPPGARQAS

SEQ ID NO: 166847 - protein, 323 aa, unidentified
MAKRITICAGIDTGKDKLDVAVDGSSEQLQVDNTVEGHQALVEWLKRFKVKRVGIEASGGYEQAVVAELRRKRFVVVLFQPKQVRAYAAFHQLLAKNDKIDAALIAMCTAAVKTIHPAPDPRLQPFAEHLTMIDQITEDIARLKNRLESCRDTRIQGIWKAQIALLAKSKRAELKALLAAIRKHPDLAARLDLIHSVGGCGLPTAVAVLIRMPEVGNITRGPAAALGGLAPYDDDSGKRAGARHIEGGRERLRRALYNAALAASFRWNPQLKALYARLIAAGKCHKCALIACARKLLVTINAVVARGTPWVAEVPQLARLSDV

SEQ ID NO: 166848 - protein, 423 aa, unidentified
MDVVHERCCGLDVHKRTVVACLVTPRANGTPQKVIRTFDTMTADLLALADWLEAAACTHVALESTSAYWKPVWNVLEGSFALLLVNAQHVKQVPGRKTDVRDCEWLADLLRHGLLRASFVPEKPQRELRDVLRYRTEKVRDRSREVQRLEKTLEGANIKLAAVVTDLTGKSSRQILAGLVTGATSACETGATETTGPAQAAALADLAAGRLRAKLPALTKALEGRFGAHHRFLVAEHLTQIDGLEETIDRLSQEIAIRLQPVEAHLEQLDAIPGVGRRTAEVIVAEIGTDMARFPTAKHLASWAGLCPGNRESAGKRLSGRTRKGNTALRSALVEAAHAAGRTKGTYLAAQFRRLSARRGAKKAAVAVGHSILVIAYHLLRDGTVYQDLGDTYFDQRNRAQLERRLVQRLEALGNTVTVTPAA

SEQ ID NO: 166849 - protein, 402 aa, unidentified
MSSEKYIGLDVHQATISVAVLDSRGKLVMESIVETKAATILDFFAGLRGTLSVTFEEGTWAAWLYDLLKPHVDKLVVCNPRKNALLKDGNKSDRIDARKLAELLRLDNLKPVYHGETGVRMLRELARSYLTIVKDLSRVMNRLKALYRSWAIPCAGRDVYYTRHRAEWLGKIREAGVRRRAEQLYQQLDMLQHLRQQTRGELLAESRKHTITVRLRQIPSLGPIRSALAVALIQTPHRFRTKRQLWAYSGLALETRTTGEHRYVKGQLRRSKKQISIRGLNSWPEQGPQPRFERSVQSCRHPGECTARTISGFLPEIAGERHQADDGASHPGAQDCSHYADSMEEGRKLRRDETKIASRLSVSGQEPSISSDLSGGGRWFLRRSGSRVSIPIACRRTSAAGT

SEQ ID NO: 166850 - protein, 352 aa, unidentified
MPVMIGVDPHKASHTAAALDEHGQLLDHQRIPATLDGYQQLRRWAGRWRQRCWAVEGAHGVGRALAQRLVADGEPVVDVPAKLAARVRVLSTGHGRKSDPDDAVSVAVAARSAPALRQVGVEDQATVLHLLTKRRQDLVAARTQTINRLHRLLVDLVPGGARRNLTAKRAAALLAQVAPTGPPAVTRWQLATELVADVRQLEQRIAAIEARIKAAVAQSNTSLLQLFGVGPVLAARFLGEVGDIGRFPTKHHFAAHTGTAPLEASSGQVIRHRLSRAGDRKLNHALYMMAMVQVRRPSAGQAYYRRKLAEGKSPKEALRCLKRRLSDAVYRCLLADQQARPCQAVTIADQGG

SEQ ID NO: 166851 - protein, 344 aa, unidentified
MSIVILGVDLGKNSCSMVGVDAAGAVVVRRTMRRQTLIDYVTKLPACVVAMEACCGAHHLGRLFAEQGHEIRLMSPEYVRPYIKAQKNDDRDAEGIAEAASRPTMRFVELKSQEQLDIQTLHRVRSRLVAERTNLLNQLRAILLERGVIFPAGRRRFELDLDCMLSVGNETLSARIRQLIGGLRAEWKELDAKIGALNDEFVQLARNDAATRRLTSIPGIGVLNATALVAAVGNASSFAKARDLGSWLGLVPRQYSTGGKARLLGISKRGNTYLRTLLIHGARAALPSLSKSDTPMGRWLTAMIERGVHRNAVVVALANKLARIAWAALRKETRFERGYLVATA

SEQ ID NO: 166852 - protein, 374 aa, unidentified
MKNFSTFIGMDVHKETIAVAIGEKHGVPRYYGEIANTTEAIMKLVKKVVSKGVRAAFCYEAGPCGYGIYRQITDMGYRCDVVAPSLIPKKVGDRVKTDRRDAVTLTRLHRAGELTAVWVPDQEQEAVRDLTRIREDMKSMERRARQRLGGFMLRNKKVYTGGKWTQAHFRWLEKVSFESPIQQIVFQEYVDAVKHLQGRIASLEEELRKALAGWSLGTMVEALMSLRGVNLITAMTIVAEIGDMSRFESPRQFMAYLGLVPSEHSSGSRQKRGGLTKTGNGHVRRVLVESSWSYRLPARKTAHLQRKAEKTTDAVQAIAWKAQKRLCTRYWHLTFKGKLKVQACAAVARELAGFIWAIAREIMGKNNTAVVVAA

SEQ ID NO: 166853 - protein, 367 aa, unidentified
MKKVSTARWRQSRNISQQKLTIGLDLGDRNSWYCVLDEAGQIQLEQRVRTTAKAVHEVFGTMPRSRIALEIGTHSPWISRLLKQWGHEVIVANARKVRLIGESRKKDDRLDAQTLARLARIDPELLYPVKHRSAQAQADLAVIRARAGLVRARTGLVNTARGLAKSYGERLRGCNVRNMNPEKAEALSPELQSALEPLLSEIESLSERIAEYNDRIEALAEENYPQVKLLKQIKGVGTLIALTFLLTLEDPHRFGKSRDVGCYLGLQPGRRNSGQSEPQMHISKEGDPYLRTLLVQGAQHILGPFGIDCDLRRWGLKLAERGGRNAKKRAIVATARKLAVLLHHLWVSAEVYEPLHNSSRMTVATAA

SEQ ID NO: 166854 - protein, 383 aa, unidentified
MSATTRFPDPVLPDPPALYLALDLSSRTWKLAFSTGLGQNPRLRTIPARDLQALTREMSAARARFGLSESVPSIACYEAGRDGFWLHRFLNSTPSTVNLVVDSASIEVNRRKRRLKTDRIDALKLLGMLIRYHNGESRVWSVVYVPSPEAEDARHLHRELFTLKADRTRVTNRIKGLLAAQGLSAPALGRGFTHALEDLRLFDGAPLYPELRGRLEREWRHRSALSERVRLIERRQLELLHHSPDEPALALVRQLMILRGIGLQSAWLFTFEFFAWRNIQNRRQLAALAGFTPTPYQSGGEARDQGISKAGSSLVRAMTIQIAWGWLHFQPDSALTLWYERRFAHAGRRMRAVGIVAVARRLLIELWRFLDTGSLPEGAVTSS

SEQ ID NO: 166855 - protein, 360 aa, unidentified
MKIQRTSVGLDVHARSVVACALDGDTGEVFQRRLTPNHGEIVAWLGDLPGPVAVTYEAGPTGFGLARALTTAGICCEVAAPSKLIRPAGDRVKTDTRDAAHLARLLHLGQITEVTIPSASQEAARDLVRARDDCRGDLMTARHRVSKLLLRQGIVYSGGKAWTRKHELWLRAQRFDNPALQLSYEAAFDAMLACVDRRDRLDKAITTMAAASEFTPVVHRLGCIRGVATLTAFGLAVEIGDWHRLTGRSIGAYVGLVPCEYSSGESRTQGGVTKTGNGHVRRLLVEAAWHHRTQYRPGVELRRRWDLASPAARARGQAANRRLHLRWAGFDTRKKRPVIANVAIARELAGWCWSLAVMPD

SEQ ID NO: 166856 - protein, 326 aa, unidentified
MTEALEPVFIGIDVAKATLEVALSSEPRSSSWANDEAGLASLLAYVEGVGERVALVLLEATGGLEQPAAAALCAQGYAVIVVNPRQAHDFAKAMGHLAKTDRIDAYSLAQFARTLNASDRRDKLLLKPAEPEQQELLAIVMRRKQLVGMHVAETNRLASMHASQRKSIRAVLKALEQQITQLDKDAGRMLKDHFKDKLELLKGLKGVGPGTQAVLMGALPELGRLTRQEIAKLVGVAPLNRDSGNFKGRRTTWGGRANVRSALYMASLSAVRHEPTIRAFYERLVAAGKPKKVALVACMHKLLTIMNAVIKSGVPWQPGYPQHATA

SEQ ID NO: 166857 - protein, 352 aa, unidentified
MKKESVGCFSNKNLFVGIDVHKKRWVVTVRTYDLELKTYSMDPLAEELEKFLLDNYAGALLHIVYECCFSGFWIYDYFHQRGYSIIVTPTNRIYRDGSVVKTDKIDSRKLAFQHSRGLLKEVKVPEMKIREYRSLFRIYDKEKMRLGQILRQVRSILEAKNHPLKWERWNKEMVEKLSAVKFQEEIFNKKFTSLLKEYEYVQEQIKDTEERIKEISEDKELSRRIRRIEKINGIGIVSAVRLVVYLFDMKKRFESGEKLVHYLGLTPGEHSTGEQIIRSRTGLIGNKQLRSIIIQLAWVAVRKDGNLLNKFERVYKSSGCKQKAIVAVARKLMVKVHSITEKEEEYEVNIAA

SEQ ID NO: 166858 - protein, 494 aa, unidentified
MHVNRLPPITMLCRRGARAGRPILTSILPAGWMSRPHSTPVTHRIEGVPTIFANAAGIDSGADQLVVAVPPDRDAAPVRVFRTFPPDREALVAWLLACHIATLAMESTGVYGVPIYAVLEQQGIVPYLVNGRHVKTVPGRKRAWNDAQWLHRLHALGLLAAAFRPDAEIAALRTLVRYRVELIQHRAPHIVHLQKALQQLNVQRERVRSDIMGSTGQVIIRAIVAGERDPIVLAQHRNPACKSSTDTIATALTGTWKDELIFVLIQALVIYAVYTAQIAVCDGELEQSLQRMEARSGEPAAPLPDLRPAKPDSHSKTAPRFNARAHYARLLGVDLVAVMGLSSSSVPTIISAIGTDRSRFPTVKHFGAWLGLAPRNDISGGKVLRSRTRKVANRASQAFRQAAQAVARSDSAIGAYYRSMRARKGPEPAPVATAHKIARIVYHLLKYGEAYEAESAAAYEQQREERELRVLARRAAKLGYTRTAVQEPSPDPIP

SEQ ID NO: 166859 - protein, 408 aa, unidentified
MNAVGIDVSKGKSMVAALRPMGEVALLPQEFLHTEVGLEQMAYAIIALGEDTRVVMEATGRYHEPVAAALHEYGIYVCVLNPLYIKQSGGGSIRKVKTDKADAMKIAKYGLDNWVDLREYTPMGTVRQQLKLCSRQYNLYMKTVVSLQNNLISLTDKTFPGVNELFSSPERADGHQKWVDFVMTFWHCDCICRVSVKAFTERYQKWCKRKGYQFSTEKAMDIYAGSCGHFTTLPKNDNTKLLITAAAQQLLAGKMTLAALRAEMTRLAKQLPEYETVLAMYGVGETTAAQLMAEIGDVRRFPRRSSIVGFAGVDPGVDDSGKHSSNSVPTTKRGSPHLRKTLYQIVCTYLRKAPADEPVYQFLDKKRAEGKPYFVYMTAAQNKFLRIYYARVKECLEAFDAQRDITQS

SEQ ID NO: 166860 - protein, 342 aa, unidentified
MQITTIGLDIAKNVFQVHGIDAKEKVVVRKQLRRDKVMGFFKALSPCLIGMEACATAHYWARELTKLGHEVRLMPRKDVKAYLKRNKNDAADAAAICEAVRRPTMRFVRVKSEEQQGQLMQHRTRDLLMRQRTQLINALRGHLAEFGIVAAKGDAGLKELLAIVADDRDERLPSDARASVIVLAAQLEAAQTMLRSLDKRIMKQHRANEASRRLESIPGIGIIGASAIAATVSDPMVFRSGRDFAAWIGLVPRQDSTGGKQKLGPISKQGDRYLRRIIIIGAHAVLRRAKENPHKYPWLTQLLARRPFKVVAVALANKMARTAWALLAHGDTYRAPELVAAA

SEQ ID NO: 166861 - protein, 422 aa, unidentified
MTEQNNKPRERIFVAIDVAKAKNDVLIEYPDGKRKRMTVVNRMEDFIAFAEHLGTFKKEQCCIGVEPTSNYHRPISYFLKEKGFLLNFVPSIGVARTREAMHNSWDKNDPKDAQVILHMLKIGLVQTYYDPLLNGINDIQELSKTHFLISLRKTKTQHSILNHYLPLYFPEAQKYFSSSRAEWFFRMLHMFPSPHYIKAMGKEEFIKKAWKVSGRKVAKEVFLSDFFEAAKNSIGIPVLEDSESLVMFRLVLQEALALCEKRQQLEDRAHEFLKQDPQYKILRSIPGIGPIIALTIIAESGDMKRFSHHRKYLKFCGLDLSTHQSGQFRGQSRLSKRGNSRLRCAFWMAATIAVRMRSNTLRGKYERYIKRDPTSSDLKRKALTASAAKICRVAYSLVKAGKPYRPYFDEAIPSGGIRSVGP

SEQ ID NO: 166862 - protein, 445 aa, unidentified
MHNTLLHDKRRTIEGVTIVGIDPAKAKHQAVIVDSNGMQIGKTFSFDVTHEGYCETLWGKVRQIIPNCNQQNTAFAIETSCNLWLTLAFYLHGEGYTVLLVSPLTTYHSRPMVNHDFSRTDPKDAMLIAANARQGYYDRFVVHEPLHSTLHRLSITYDKLRKDCARNRARLRALIEQIFPEFLTIVEPDTQSAMYLLKRYLFPDEFLSLNIAKEVDAISAISRNQYGMNSLIQLQRAAHHTIGVVKTADERIAERISLDCWIAHIETISTNLERVFKELVRYAGQLPEYYILLSVKGISEKTAALFLAEVLDIHRFSHYKQIEKRAGMNLRLSQSGQFVGTRHISHLGNSRLRWLLYSMTEETARWIPEVRIKYLQRQMKVRRHRKNIVASCPQLLKLIMALVKERRTYELRQDSLARMTVLEQQYAEFKEKRKNKKRALAEQAA

SEQ ID NO: 166863 - protein, 336 aa, unidentified
MTIIIGCDYHPRFQMIAMLDKGTGEVKVMRLEHENGEAKKFYASLPPGTRVGIEATGATQWFERLMAECGHELWVGDPAEIRAQMVRKQKTDTRDALHLLDLLMTDRFPRIWVPSPEERDARQLLQHRQKLVRMRTSVKNQLHGLAMGQGLCRKQKLWSERGRKQLEALELGPWASRRRQELMKLLDELEPQITELDRAVEAEAEKRPEVRRLMVLRGVGPVTGLAYVLTLGPVERFPRSRQVVGYLGLDPEEDTTGGHQRFGHITKQGNTMMRWLLVEAGQTAARLDPELRRVYKRLKVRRGANVAKVAIARRLAVRMYWILREAPTAPAGSHVR

SEQ ID NO: 166864 - protein, 283 aa, unidentified
MRIIGCDYHPGFQQIAFVDTDTGELQERRLGHREEAETFYRELASQGVKVRVGMEASGHARWFERLLAELNIELWIGDAAEIRTRRVRKQKTDRQDAQLILRLMLKDDFPQIWVPSWENRDLRQLLWHRHRMVQARTRIMNQLQAVALNEGLRCKKRLWREAGREQLEAFPLGPWASRRRRDLLELLDRLSPTIAELTQTIEQEAEKCPEARRLRTHPGVGSLTALAFVLIIGRAERFQCGKQIATIWGWCRRRIPAGIGDGWDISASKATRCYVSCWWKRRK

SEQ ID NO: 166865 - protein, 320 aa, unidentified
MNEKTPTVYAGLDIAKATLQLHLQNVQHVLDNNPSGYAALLQKLRAVPGVQLVCEATGGYEKGVVAALHAAAQPVSVLNPALVRHFALAQGQRAKSDPLDAKVLTDYGQALRPEPTPVREPARAELRALVQWRDHLKEQLMRVRQTVEHGVPAYVARQQKKLVAHLEKQMAAVEKECQSALTRTPQLQEQVRQLEALDAVGTVTALSVLSHLPELGTLNRQAAAALAGLAPWTRQSGPWEGQRHIGGGRAAVRRALYMSAVGLAGRKETTLGKFYAHLRAAGKPAKVALTAVMRKLLLQMNRILKEHALQAQAKNKIQPA

SEQ ID NO: 166866 - protein, 416 aa, unidentified
MNQRTSVGLDGHARSVVACGLDGRTGELFERRLTPAHHDLLDWIHTLPGPVAVTYEAGPTGFGLARFLSLEGVECLIAAPSKLQRPPGDRVKTDTIDARHLARLLHLQQIVAVPVPSVEQEAARDLVRAREDCRCDLMASRHRISKLLLRQGIVYSCGHAWTQTHDAWLRAQHFDPPGLQLACESAYDAMLAIVDRRDRLDAAVEAMAADSDYTPVVTRLVCLRGVSTLTAFGLAVEIGDRQRLTGRSIGAYLGLVPTEHSSGSARSQGSITKTGNGHARRLLIEAAWHHRPRYLPGVTLRRRWDKASPAARARGQQANRRLHERWVRFDVRGKRPAVANTAIARELTGWCWSLAVLETGKTVPAAHPVGEYGPRPVGRQGRFSSLRCGDSTLPPLRGRRPTGHGPGPHGNLETSD

SEQ ID NO: 166867 - protein, 404 aa, unidentified
MNAVGVDVSKGKSMVAALRPMGEVTLAPREVAHTAVDLERLGKDIISLGGNTRVVMEATGRYHEPVATALHEMGIYVSILNPILIKQSGAGSVRKVKNDKKDALKIAKYGLDNWTQLREHTPMDAVRQQLKLFSRQYNLYMKTAVSLQNNLISLLDKTWPGANELFDSPPRTDGHQKWVDFVAAFWHCDCLTGISRKAFTERYQKWCKRKGYHFSESKAEHVYISSLGHFPTLPKDDNTKLLITSATSELFAVTKILMIVKAEVIRLAMLLPEYETVLAMYGVGEITAAQLIAELGDVRRFANRGSIVAFAGIDPEVNESGSYSSKTNPATKRGSPHLRKTLYQVVSTHLKRSPADEPVYQFLDKKRSEGKPYYVYMTAAANKFLRIYHARVKECLSALDSTDS

SEQ ID NO: 166868 - protein, 344 aa, unidentified
MTFVGCDLHTRMQQVAVLDTRTGEVSERQLAHDGSAIEEFYAALLGPVTIGIESTGYAVWFHTLMQRLGHTVLVGDAAKIRAMVVRKTKTDRRDALHLLDLLRHDRFPTVWVPDPATRDLRALLTHRMRLVRIRTMVKNGLHAIALNYRLVRGAKLLRQAGLAQLHALALPPHTAQRRDQSLELLAGLTTQIRELDDAITTAALAHPDGPRLITHPGVGALTALATIVVLGPVARFHDSKHVVSYVGLAPALNASADKYHLGHITKQGSTLLRFALGQAAAHAARMDADLKRTYFTLVHRRGRPKAKVAIARKLLVRLFIMLRDQIDYDEFQRRGRRTLAIASG

SEQ ID NO: 166869 - protein, 363 aa, unidentified
MKKISKKERAMAAESKPEQVVGLDMGDRYSYYCMLTSTGELMEEGRMQSTASALEKHFGNQGRMRIALEAGGHSPWTSRLLESFGHQVIVANPRKIPTLTGSESKNDRNDAEQLARMAAFDPRLLHPIEHRSQERQQDLNLIHTRSVLVRARTMLVNAVRGLVKSGGARLPACSSEAFPEKAPAAVPQELKMACAPLLRQIAQMNRTIAVMDKQIGALAKKYPEIAVLRTAPGVGPVVSACYVLTLDSPQRMASNRQAGAWLGLRPSQRQSGDSDPQCGISRTGNIYLRSLLVQSAHYILGRFGPDSELRRWGLKLAASGGKRGKMRAVVAVARKLSVMLLSMWRKGKKFEPFPQTTRLAKAV

SEQ ID NO: 166870 - protein, 342 aa, unidentified
MNLPIRIGMDTSKSIFQLHGVDESEAVVVRRQFRRAEMIRYFERLPPVLVAIESCGSSHHWARLLQSFGHEVKLIPPQYVKAYVKRGKNDAADAEALCEAVTRPSMRFVPVKSKERQAACMLMTVRERLVSVKSQLSNAFRSYAAEFGIVGPAGRQNVRQLIKRVTEDDSLPEMARDLFRLQAEEYAAVEARLAKIEAKLMKWHREDDVSRRIATIPGVGPIGSSMLSMKAPPPETFRSGRDFAAWLGLTPKDHSTGGRQRYGGITKAGDSMLRSTLIVGATALLRHIRKGRHKPTPWLASLLERKPPKLVAVALANKFARIAWRLMISGGVYNRPVAAMPI

SEQ ID NO: 166871 - protein, 352 aa, unidentified
MESKKLFIGMDLHKNSSTFCVKDYAGKMVASKKVSTNKSEVLGFVNKFKEHSLSLAVEPVSQWYFMADILQKAGIDVHLANPLKVKAIASARIKTDKIDADVLCDLLRGNLLPEAYFSSPEMRMWKELVRFRLSLVNLRTQTKNKIHAILGKNGYIPQFTNTFGKGGRAWLSELELPAHFRNSLDEYLATHDFLSAQIKQAEKRIEQTVEGNRQMKLLMSLPGVSYFSALTIMAEIGDINRFPSAKQLMGYAGVVPSTYASGDKVVHGRITKTGSRWLRWIMIEIAHKQQRCKRNPGLGWYYLKIKKRKGSKTAAVATARKLLAVIWRMLVDERPFISPLEVREAYRKSIVP

SEQ ID NO: 166872 - protein, 380 aa, unidentified
MTEIRRLVIGGVDAHTDCHHAAALDERGRLLGDAAFATSVEGYHDLLAWLESFGQVGRVGVESTGSYAAGLGRFLAARGVAVVEVNQPHAHTRRRRGKSDPLDAEAAARKVLAGEATAIPKHTGGIVESIRQLRVAREGAVKANTAALNQLYELVITAPDELRQQLAGRKTSRGKASLCLRLRPDRARLHEPLQAAKLALRTVAERVRELERQIGVLDRYLAQLVATAAPRTTSLLGVSSQHAGQLLVTAGQNIERLANDGSFARLCGASPIPASSGRTSRHRLNRGGDRKANRALHLIAVCRLRYCARTRAYANRRTAEGLTKPEIIRCLKRYIARELYHTLRADLADLGPPTMPPQRTVTINCGAGPIGTTRTRRTRT

SEQ ID NO: 166873 - protein, 340 aa, unidentified
MKLYGAIDLHSTNSVRVVIDEEDKIVYQKRLPNDLALILKELCVYQSRLEGIVVESTYNWYWLVDGLMEQGYKVHLANTAAIQQYEGLKYSNDDSDARWLAHVLRLGILPQGYIYPREERPVRDLLRKRSQLVRQRTMNLLSIQNLMTRNTGLSMTANQIKGLDKTQVDGLLPDADLSLAVKANWSVMCSADEQVERLEQRVTERVKLRAQFSFLKTVPGIGQILALTIMLETGDIRRFATVGNYASYCRCVGSQKLSNGKRKGSGNTKNGNKYLAWAFVEAANFAIRFNSKIKSFYQRKKAKTKAVVAIKAVAHKLCRACYHIMKDRVAFDVTKAFGQK

SEQ ID NO: 166874 - protein, 420 aa, unidentified
MKPVPDGEFSAFIGIDWADSKHDICLQAADSAHREFDRFAHRVDRIEQWACAMRQRFGGPIAVALELSKGPLVYALQKYDFFVLFPINPSMLAKYREAFKPSRAKDDPTDAQLALDLLLHHRDRLNPLQPQSAQMRMLLYLVEQRRRLVADKTRFTNRLGHALKQYFPQALDWFDQTDTPLFCDFLTRWPTLAQVKRARKASLEAFFQAHNVRFAKLVEERISAIKTATALTEDVAVITAYQLQALVLVDQLRVTLQAIARFDAQIGSIAPTLPDYALFRALPGAGPSLAPRLLVAFGEQRERFAGADELQKYSGVAPVTERSGNKRWVHWRWQCPTFLRQTFVEWAAQTINKSFWAGAYYRRQRDQGSSHQSALRALAFKWLRIVYRCWQTRTPYDESTYLNALKRRGSPLLKAIGATT

SEQ ID NO: 166875 - protein, 339 aa, unidentified
MRLYSGMDLHSNNTYCGIMNESGKRLVGHRLPNEPKVILGFLEPYRPDLEGIVIESTYNWYWLVDVLQENGYRVHLSHPSGNEQYRGLKHTDDRHDAFWLADLLRLGCLREGYIYPKQLRPLRDLLRKRAHLVRLRTSLLLSAQNSVQRNRSLRVSSEDLKKLTVDLLSVHVEGDEALWLAAKASKELIDAFTQRILGIETWILNHLRPQVGFGYLLTLPGVGEILGMTILFETGPIQRFPDVANYVSYSRLVASQRISNDKVKGKGNQNNGNKYLAWAFSEAAEHARRHYPRCRAFYNRKLQQKNATVAHCALAHKLARAAYYILRDQVVFEETKLFS

SEQ ID NO: 166876 - protein, 405 aa, unidentified
MDIIIERGAGIDVHKESLVACIMGTGIKKEIRTFSAMTNDLLRLKMWLKERGVTHVAMESTGVYWKPIFNILEDAFEVILVNARHVRNVPGRKTDVKDSEWLCKLLRNGLVRGSFIPPKEIRELRDLTRYKRKLIQAIASEKQRIQKILEDANIKLSSVASNIFGASGTRIIEELMKGDLTAEEMAELSKGRLRKRKDDLTEALVGHMEEHHTFMITASLEHMKAIEEILSTLERKIAETIELHYKEEYELLQTIPPVKDSASIIIAEMGVNMDLFPTEMNLSSWSGMSPGNNESAGKKKPGTTTHGNKCLKSILTELAWVASRMKGTYLYSKYHSLVGRRGKKKTLVAVGHKILIMCYHILKYKVPYKELGENYLDTRKKDRIVKSHIKRLTSLGYVVTLSEAA

SEQ ID NO: 166877 - protein, 405 aa, unidentified
MEVLYKRCCGIDIHKNMMVACIFTSVRKKEIRQFSTMTEDILQLVSWLKETDCEMAAMESTGSYWKPVYNIFEEEQIPIMVVNAQHIKGVPGRKTDVKDAEWIADLVRHGLVKASYIPNRDQRELREITRYRQEITEERARELNRIQAVLEGCNVKLSSVITDISGKSGMTILKAIVSGETDPVVLSELAEGRARDKIPEMQKSLQGRISEHQQKMLKHQLGHIESLTALIMDLDADIKKKTESINWAIEALDDMPGIGRKSAERILAETGVEMEHFQNESRFSSWAGLVPECKESAGKKMSTRIRKGNKYLKATLVECARAGIRNKQSYLYSRYQRIAARRGGKRALIAVAHTMLIAIYHILKEKVPYHDLGADYYSVINQEKIINRNIRTLEKLGVNVMIQPK

SEQ ID NO: 166878 - protein, 413 aa, unidentified
MDEIAVERIAGWIGLDVGKQDHHASVLSATGEVLFERSVGNDEQAIERLLDRCQEIGSCALVIDQPGSIGSLAVCLARRRGVPVAYVPGLVMRRASQLYPGEAKTDRRDSFVLADTARTHARRLHWLEVSDETLERLRVLGGYDDDLAHDVNRTANRLRDMLLAISPALERVLGPRLDHPAARALLSRYPTPTALRAAGPRRIGPLVKRHAPRMGPRLVADIQAALAAQTITIPAEQTTGRVISELATELDRLAQRRERLAQEIEETFTSHPQAPVLMSIPGIGARTSARILTEIADINRFPTAAHLAAYAGLAPVTRQSGTSIRGEHRSRRGNHRLKNAMWLSAFCSLHHHRSRDYYTRKRSEGKPHNAAIICLARRRCDVIHAMLRSGLTYGELPRPATPATPNPNTAIAA

SEQ ID NO: 166879 - protein, 344 aa, unidentified
MIIIGCDFHPSWQMISWLDTETGETGERKLMHATGEARQFYSGLAGAVRVGLESTGNSHWFVDLLTELGHEVWIGDAARIRASQIRKQKTDRRDAEHILHLLVKDSFPRIWTPSRQERDQRQLLIHRYKLVTLRARVKNELQHLALNQGMQKGRSLWSKTGQKQLLDLPLQFWAGTRRKNLLELLKQMDQQIVVLDQAVKKAAEENEKARLLMTQPGVGPITSLAYVLTLGDATRFRRGKQVASYLGLIPREYSSAGKQHLGGISKQGNRFMRMLLVEAAQIAVRFDPGFRNEYLHRCHHKPKGVAKVAAARKLAVRLFWMLRTNTPYPEVVRIESSSRVPLAG

SEQ ID NO: 166880 - protein, 343 aa, unidentified
MEHYAGIDVSLERSSLCVVDATGRIGREAKLASEPEALVAWFCGLGCESVRVGLEAGPLSQWLYAAMRDAGLAVELLETRHVRDAFKAMPVKTDRNDARGIARLMRLGWFRPVHGKSVPAQETRVLLSARKLLQTKHHDVEMSLRGVLRGFGLKVGPTTARSFAGRIRELVGGHPTLTAVAEALLAVRDVLGEPLRGLDKRLCKQAREDNRARLLMTVPGVGVIVALSFSAAVDDPWRFRSSKRVGAHFGLTPRKYQSGETDVTGRISKIGDASVRTALYEAANVILTRPVKGSELKSWAARLAKRAGMRKAKVALARKLAVVLHRMLKDGTPFAASRAAAGA

SEQ ID NO: 166881 - protein, 474 aa, unidentified
MGAGVTARVGRPLWAGMTLPPPAPLAWLVIDYRGLLRRAPVSDHSTPGRVPVRVLPAPHRKATNVSLVGALFFVGVDWAAKTHAVCVLDPAGRAVAAFPVAHTAAGFTGLIRRLAKLGTPGDVPVAIERPDGRLVDALLAAGHPVVPVKPNAIKTWREGEVISGAKSDPGDAHVIAEYLRLRAHRLRAATPLTEHTTALRIVSRTRSELVEARVAATNQLSALLDTHWPGAKEVFADVESPISLAFLTRYPAPAHAAALGEKRMAAFLTKHGYSGRRSTTELLTRLRTAPAGTTSTVIAEALRDAVLAMVAVLTTLNTAIKDLDRSAAAHLYEHPDGEIFTSLPRAGLVNAAQIRAELAEHSAYTGPEAIAALAGLVPVTRASGKHHAVSFRWACNKRLRVAITTFADNSRHASPWAAGIYQRARASGKDHPHAVRILARSWVRVIWRCWIDQQPYDPTRHGGAAQLLDHTTAA

SEQ ID NO: 166882 - protein, 354 aa, unidentified
MSRKRTDAALVFIKPERLQAPNTSAHAQAGDAKTMSESQVVVGIDVAKAHVDCAVLGADFGARQFANDIDGHSALAAALQPLSVALVVMEATGGYESALACALQAAGLAVAVVHPKRARDFAKGIGRLAKTDRIDAEALAELAATLARRRDLARFIRPLPDAQQQELAALVTRRRQLLTMLGAERLRLQLATVKVRPSIDALIEAIRAQLEDIDAQMQAHLQEHFAALDDLLRSARGIGPIASATLIATLPELGRLSRREISALVGVAPMANDSGTSHGRRRITGGRFQVRRVLYMATLTATIHNPTIKAHYQRLLAAGKLPKVALVACMRKLLTMLNAMVRTQRRWSDEFHRA

SEQ ID NO: 166883 - protein, 398 aa, unidentified
MFYIGIDIGKRHHEAGLINDKGVPVGKTIRFANSKTGSDKLLRFINQYNLTPDNAVVGVEATGHYWLSVFSFLHKLGFKTTVFNPLQTDALRHFYIRKTKTDVSDAYLIAQVIRIDSPDETPFIEEDLLQLRHLERLRYSFVDQSSDLKRKVISLLDQVFPEYEQIFSDVFGKSSTEILEHSPLPEDLLKIDTDKLAALLNRVSKGRYGESRALKKANQIRESALNTFGISVGTEAFKLQIHLLLEQISLIEKHLEKIETAMIEISNLQEHFLTTIIGVSDIIACVILGEIGSISRFDRPEQLVAFAGLDASVHQSGDFNSNRTRLSKRGSPYLRRAIWQAAFVASFHDPALSLHYQRLRKRGKAHGTAVGAIARKLTHIIFAILRDNKPYEPRPNNG

SEQ ID NO: 166884 - protein, 355 aa, unidentified
MNEAKYIGMDVHQATICAAVRDSSGNLVLEATLETKAETILEFVHGLRGSLRVSFEEGTCAAWLHDLLKPHVTEVLVCDSRKNALLRVGNKNDREDARKLSELLFLNKLHAVYHGETGIRTLKELARSYLTITRDLTRVMNRLKAIYRGWGIACAGQQVYAPRYRAEWLAKITEAGVRRRAQIYYQQFDVLAALRQEARRELLAEARKHPAQRLLRQIPAIGPIRAARLLALMQTPHRFRTKRQLWAYCGLALRTYDSGEYRFVGGQLKRSKKAVTIRGLNQNHNHDLKNIFKGAATRAAATVGPFQKFYEARLASGMKPPMARLTLARKIAAITLLVWKKGVRFDAKQLKQQAA

SEQ ID NO: 166885 - protein, 350 aa, unidentified
MNYAQINQRYLCGIDLHANSMYLKILDREGQVLYKRNMPNNFALFKQILTPFLPDIAVGVESTFNYYWLYDGCVESGIPFYLGHAAYMKAIAGNKQKNDPLDAETIAHLMRSNLFPQAYPYPAEMRAVRDLLRRRHRLVRHRSEAYTHVQLLLRQQGICDFRGRDVKSVSGKQQILKSISDPDVYYLVNSDMVLIDQLDRLLSEKEKHIKDRAYHHNGTDYSLLKSVTGIGDILALSILYETHDINRFPRAQNYSSYCRVIRVQRTSAGKNKYGRNQKMGNPYLKWAYGQIISHARQSSERINAYYQKLEAKRCGKLARGIISHKFAVAVYHMLKKKEAFNEDRFLKVAS

SEQ ID NO: 166886 - protein, 306 aa, unidentified
MKEIEFTQMVFVGCGIDVHQSLIVASIRKSNTEVETREFEAYTSSLTSLREWCKSEGVTHVAMESTGVYWKPVFNILEEYFEVILVNARHVKNVPGHKTDKKDSRWLSKLLLSGLLKGSFIPPRDIRELRDLVRYRKKVVGQIASEKNRIIKILEDANVKLSSVLSNVDGAVGTKIINDLINGETSVDKFMCHYHGKQKVSRAEFRKALEGRVTEHHKLMLTIHKNSIADKERQLQQLDEAIDKSTEAYRLEIDLLDSIPGVGRDSAISIISETGVDMSRFPDETHLSSWSGMSPGNSETGGKKKV

SEQ ID NO: 166887 - protein, 346 aa, unidentified
MEQYAGIDVSLEYSSICIVDARGKVLKEAQAASEPEALIAWFAAQEVAMARIGLEAGPLSQWLFAEMKAAGLAVELIETRHVRDAFKAMPVKTDRKDARGIAQLMRLGWFRPVHCKSLPAQEVRALLTTRKLLQAKRHDVEMSLRGVLRGFGLKVGPTTPKTFEGRVRDLVEHHATLRMIAEALLNARTALDQEFKAIQKRLYVIARGNPPTRRLMTTPGVGAIVALTFSSAIDDPARFRSSRMVGAHFGLTPRKYQSGETDVTGRISKIGDHGVRVALYEAANVILTRAVKGSDLKSWALRVAKRAGMKKAKVALARKLAVVLHRMLASGANFIAKAPPGAATAA

SEQ ID NO: 166888 - protein, 410 aa, unidentified
MSFVEVLIERACGLDVHKKTITACIVTPEGKEIKTFRTHTVFLIELIDWIKEHRCTHVAMESTGVFWKPIVNLLEAEDIEFLVVNAQHMKAVPGRKTDVKDAEWICNLLRHGLLKASFIPGRTQRELRELVRYRRSLVQERSREHNRVQKVLEGANIKLASVVSDIMGLSSRDMLAAMIEGENDPEKLAGFARRSLKRKKEELELALQGNMSAHQRLMLKTMLTHIDFINEQIVELDTEVAKRLDPFQEHLDRLDTIPGIARRTAEQILAEIGTDVGSRFPSAAHLCSWIGLVPGHNESAGKRKPSKTRKGNKYLRSALTEAAHSIRGSDNYLGAQYRRIAARKGKHRAAIAVAHSMMTIAYYLLTRGEDYRDLGAHYFETRQQEMIVKQSVRRLENLGFTVTISSTTAS

SEQ ID NO: 166889 - protein, 412 aa, unidentified
MLLFVGDDWSEEHHDVEIQDEAGRKLAARRLPEGAAGIARLHELIAAHLGQDGNPGRVAVAIETDRGLWVQALAAAGYQVYGLNPKQVARFKERYNLSGAKSDAADAHALADMVRAERHQLRAVAADTAGGQAIKVAARAHQTLIWERTRHTLRLRSALREFFPAALAAFAELGLTSADTLELLVRAPAPEAAAKLTAAQISAALKRARRRDVPARARAIKDALRAPQLAQPAAVTAAYAAAVQATAAVLTTFNEQIRRLESQVEAHFLQHPDAEIYLSQPGIGTVNGARALAEFGDAPGRYASARARKNYAGSSPITRASGRSKIVLARFIRNNRLTDALHSQAFAALTASPGARSYYDRQRARGLGHNAALRQLSNRLVGILHGCLKTRTRYDEATAWPNAAAHTETLAA

SEQ ID NO: 166890 - protein, 391 aa, unidentified
MQTPNDLSQSRIVLKQDSTLIAVIEMSLSSWLVAGMVPSVERQPLKKLAIDENALLKLLHRWREEAEKAGRKIERIAVAFEAGRDGFWLARWLRARGIEAHVIHASSVAVSREHRRAKTDRLDTELLKRAFLGWLRGERDHCKMVAIPTIEDEDAKRPNREREGLVGEQTRIINRMKAALSRLGIRGFNPKMKKAAQRLEDLRTPEDEPIPPNTLAELRRDMERRRLISEQIRQIENARLERIEHAPRHGPHAMVRVLARVIGVGIETADMLVQEVLSRNMRDRRAVARYAGLTGSPDESGTRRREKGLARSGNARVRRGMIQLAWRFLMFQKDSALARWFRARTENARGARKTMIVALARKLLIALWRLVREGVVPDGVVLRPGVMNGGR

SEQ ID NO: 166891 - protein, 445 aa, unidentified
MSFDRLKRTQSRKRLPGHKLKPSPATLFVQNSKPHLSMKQTYILAIDVAKHKVRAALSGADERLLFEKDLPVSAGGLRELLVRLREHVAEPEGLLVLIEATGMLHLNWSVALIRAGYAVVVINPLIARRLYTLGNSIRDNKSDPIDARQLCGIGRLHGEKLLSLYRFALKPEQLCLQRLQSVRKAVRKSLSNLKKSYGSLLDVSFPELGRLLEIDGVGIRQLLSQAPTPCAIARMRRSSLEKNWMLRPKAAQLKKLTAESMADPELAQASRPALLAMLQSIEAMETRLRELDRQIEALTSQSVDPQTKALVESIPGFGALNAAKLLAFLPGEILHAGSNRQAAARLQAYMGNDPRVRQSGQWQGQTKMSKRGVEMLRTALFQCAFSASQHDPELRSFYQRKRAQGKHHEVALSHLMRILTRRLVAVLRSGQPYQPNDNSELKNAA

SEQ ID NO: 166892 - protein, 471 aa, unidentified
MTNPEFKFSRDWAAARFSCGIDVHKRQLAVTIFTRDTAGLEFKKHNVFRNDQAGLEDLWRFAAKYHPTGFAMEATGVYHHALADFLAARQRDCGWVFEVVVANPADTRGVPGRQKYDRVDAETIARLHASGVLKSGTLVVPALEDLKAIFRVAARLEVDRTALKNRVKKTLDRAGIRPAGLNLNAEWARAFLYYLTDFPGTLGDALAKCLEDGGALPEHLAKLAKNAGAFGPYAGVALSPTQGALVRQDLVELEFKTSRKALLAVQVDIMLVTQPGLRQVAQHLASIPGISPFSAAWLLAELGPVARYPSARAFLSYCGCCPRLVKSDEKVFSAHVTRRSNKHVRTIFYLAAMVVCNLVKEESALKEYARRVVARKGPKHRKLALMTVAAKIARVVFGILQSPAPFSPDLARPRDTSQGAPVNRFTVADRKALRRAKNCLARAGEILTGKELAADMQRISVALDATLHRKD

SEQ ID NO: 166893 - protein, 370 aa, unidentified
MDQHSRAFVGIDTSKLRNAVAIAEEGRDGDVRYLGEIDTAEAATRKLVVKLAAKYRQLTFCYEAGPTGYGLHRLIGELGHDCIVAAPSLIPKKPGVRVKTNRRDAVGLAKLLRAGELTAVWVPDERHEAIRDLSRAREAARKDLRGKRQQVSSFMLRLGRHFPGKKTWGPAHMNWLMLQKLEHREQRIALEELLGAVRQESERVERLEQAIRDAVPEWSLAKVVTALQAMRGIDLVAAVTVLAEIGDLSRFQNPRELMGYLGLVPSESSTGDTVNRGSITKAGNGRVRRILIESAWSYRYPPRVSREKQMKVAAAPRAVREIAWKAQMRLCGRFRSLTRKGKQPNVIAAAIARELSAFIWAINREVMAGR

SEQ ID NO: 166894 - protein, 343 aa, unidentified
MQAMTTIGLDIAKSVFQVHGVDAEGKVLIRRQLKRRYVLAFFEKLPPCLVGIEACASSHHWSRQLKALGHTVRLMPPAYVKPYVKRQKNDAADAEAICEAVTRANMRFVETKTPEQQSCLMLHRTRQLFIRQQTSVINAIRAHLAEFGIVAPVGRKGVEQLLAVVADASDQRVPELARACVAALGAQLGRLKAQILEFDRRILAWHRSNETSRRLDAIPGIGPALATALVASVVDPKAFRSGRNFSAWIGLVPKQHSSGGKDRLGSISKQGDRYLRSLFTAGALAVIRYAKLHGTEHRPWLTALLARRPTKVAAIALANKIARMAWAMMAKGERYKEPVALAA

SEQ ID NO: 166895 - protein, 368 aa, unidentified
MTLYIGVDFHPHQQTLSWCDTETGETKTLDMLHDVKRVREFYSSLPEPAIIGIEASSRAVWFENMLFETGHKLLVGNPVLIRKRATSRHKNDRRDAELILDLLLRGEFPSLWRRPPESDRILEMLRLRSSLVRQRTQGYNRLQALAHSAGLPRGRMRTAAFQAVIKALDLDETDDLRRMHLFKLVENFNEQITQLDIWLKAKAEADPKVRLLETQKGVGFLTALTTVHTLGDVTRFARLSKQVVSFAGLDPLEDSSAGRIRFGHVSKAGSRLLRFQLGQAAQIAARSDMKLKSFYKRLAKKKPKAVAKTATARRLLVKLAIMLRDNINAQEFDRRGKHSWQCPSGTRSEMTAALIGPSQPFGDRGREI

SEQ ID NO: 166896 - protein, 470 aa, unidentified
MADWVHAHYARVRSPYAAQDKPFASGFTNPYRNGGDIMLKINYMSTLFVGIDVSSKSNSVYAMDFEENKYLSTSFGNNQPGADELVNRIAACMQKHKNLDTLLIVLESTSVYSVHISNFLASSEVLMPYKPYVFCVNPKATANYRKSYIGMEKTDPTDAYLIADFARVGRTKKLEPWRGGQFIALKRLTRHRMHLSECITREKTYMVSNLYLKFSELQLLEGVDKPFGNLYGATSSAILTEFLSPQEIIDMPEEDLLAFLAQRSRNRICDLSKTSELLRKAARDSYRLDKCMYEPLNISLASSFNCIQAYQKEIRLIEQAIEKCIKGMNPNALIILQSIPGIGPVWASGILSEIGDISAFHSSDALAKYAGLYWPKGDSGDFISEDNQMSKAGNPYLRHYFGEAANSIRKHIPEYADFYARKYAEVSKHQHKRALALTSRKFVRLVFGLLAKNQLYTGEKLDTEHNTESN

SEQ ID NO: 166897 - protein, 343 aa, unidentified
MEESQGLVVGVDTHKESHSAALVDELGAVLGSTDVEANQRGYVQLLQWARGRSSHRTWVVEGTGSYGAGLASFLVRCGEVVYEGDRPQRRKPGASGKSDQLDAIKVAREALAREHHALPRQRGNREAIRVLLSTREGAVSASRQALNQLYALVVTAPEPIHERLVRLKGEQLVAACVRLRCTSAVIETSVTTRALRQVARRIRTLQAEAADYEAQLERLVAQTVPALLAEPGVGTITAAQLLVSWSHAGRIRNENAFAAMAGVAPVPASSGRVVRHRLNRQGDRRLNRALHVVAICRSSFHAKTKDYIARRTAEGKSSREIRRCLKRYLARRFFRLLQGLDNT

SEQ ID NO: 166898 - protein, 322 aa, unidentified
MAMLSFAGIDVSKDRLDVMVLPEEQCSSVSNDPTGWAKLVEQLRSSSIAAIGLEASGGYERGVMRSLLAAGMSVRQVNPFKLRQFAKASGVLAKNDPLDARMIASFVAIMPTRPAQPRAPALERLVEMLAVRRQLSAEKVAAENASRLLENAMLQRLSRRRIARLAADIDMLDERLVEIVVADAALAHRYRLLTSMPGVGPVLACTLIALLPELGRMSRKQVAALVGVAPYAFESGKLKGKRCVWGGRAPIRHVLFMAAMSASNWNPLLKRFHDRLAATGKLPKVVIVAVMRKMITTLNAMVRDDVVWADRHRGRHTVPTTR

SEQ ID NO: 166899 - protein, 313 aa, unidentified
MMASPDVFVGIDVSKDRLDVHVRPLGQGFSVSNEATGYAALIARLRPLRAKRIALEATGGYERALWLALSEAGLVAAVVNPRQVRAFARAAGRLAKTDRLDAAVIAHFAETFVPRTGKPDPVADRLGEHVLYRRSVQDELIGLQHQLRRLETPALRQRAERRVAALRAEVKEIEREMRAIVDSDPAKKALFACLTALKGVGLILACTLIANMRELGSLSRHQAAALIGVAPLNHDSGAWRGDRVIAGGRRRVRNVLYVATLSAVRSNPSIREFYRRLSAGGKPAKVALVACMRKLLVMLNGRVRNHRAATAMA

SEQ ID NO: 166900 - protein, 350 aa, unidentified
MKKVVKQVLGVDVAQKELVVTLGRMHDDFSIELYAYNVFKNNDTGIIALVKWVQKLTISEVSVRFVMEATGVYHQKFAYYLEEHGFEVSIALPNKISSYIRTLEIKTITDKTCSEAIVRFGLERNLNLWKRPKEVYKQLQQLTRERDQLVAERVVAKNQLHAEESEAFPNKNSVKRVKARIRFLTQQEKDIKQDIDAIVICNQEVKNEIDNICTIPGVGRLTAVIVLAETNGFELIRNKRQLVSYAGLDVREKTSGTSVKGKPRISKKGNRNLRRAMHLPALGAIKHNETHKAIYARLVSKCGIKMKGVVAIQRKVLELIYVLHKNKTVYQVDYEETKREQLQLAAPFTN

SEQ ID NO: 166901 - protein, 362 aa, unidentified
MSAKDVGAVSAPTIRRSQTCKRSPQSVSTSPKSVFQVHGVDAAGRVVIRRQLKRRHVLAFFQKLRPCLIGIEACASSHHWSRALQELGHAVRLMPAAYVKPYVKRQKNDSADAEAICEAVTRANMRFVATKTPEQQSCLMLHRTRHLFIRQQTAMINSMRAQLAEFGIIAPVGRKGVTELLHVVADPNDKRVPGVARACLAALGTQLLSLKEQIMEFDRMILDWYRSNETSKRLHYIPEVGPVLATALVASVADPRTFRSGRKFSAWIGLVPKQHSSGGKDRLGSISKQGDRYLRSLFVAGALARHPLRQDPRHQASALAHGIACTAPTKVAAIALANKIARMAWAMMAKGERYKEPVALAA

SEQ ID NO: 166902 - protein, 483 aa, unidentified
MKHKPQEKNKRASNGTIQHHWHEMNRKQRRETMRQIQSEDLSLEVIHPDAAGIDIGNETHYVAVPPSRDSQPVRHFGCTTAELKAMAAWLKQCRIRTVAMQSTGVYWISVYDILEQAGIEVYLVNARDTKNLPGRKSDVQESQWLMKLHTYGLLRNSFRPVQEIRTMRTYWRQRNDLVQSAGRHIQRIQKVLTQMNLQLANVLSDLSGMTGQTIIKAILRGERDPHKLAEFRDPRVKASEEQIARSLEGNWQEDQLFVLQQEEDSYEFCQKQMAECDRQLDQYLQHSEDRSHGAPLPEEKRKERLKKRKNANKPQFDLREGLFRMTGTDLTRIDGIDVMTATTVISEAGWDMSKWETEGHFVSWLRLCPDNRISGEKIIGKGRLRTNNRATIALKMAATTLRLSNTYLGAQFRRLRTKLGAPIAIKAMAAKLARLVYRMLRYGMKYVDRGAEFYDTEHRQRQIKHLKWKAAKLGYQIVQAPAA

SEQ ID NO: 166903 - protein, 419 aa, unidentified
MTPTSHDTFAAFVGIDWADAKHDGCLQAADSAKRECFQLEHTPEAIDAWVTTLRTRFHGHPVAICLELNKGPLVFALRKYDFLVLFPINPLTVARYREAFTPSRAKDDPTDAALQLELLLTHRDKLQPLNPQSLTMRVLEQLVAHRRRVVGDKVRMTNRLTSTLKNYFPQVLQWFQDKDTLMFCDFLSRWPTLKAAQLARRTTLETFFHTHHVRSADVIAQRLHAIKAATPLTTDAGVIAPHALLVQTLVAQLRVTLQAIADFDTAIAQRAQSHPDFPLFQALPGAGPVFAPRLLVAFGEQRARYASAAELQKYAGIAPVTERSGKKSWGHWRLQCPKFLRQTFVEWAAESTRHAFWAQLYYQQQRAQGKAHQAAVRALAFKWIRILYRCWQDRTLYDESTYLQALTQRGSSLLPNLAK

SEQ ID NO: 166904 - protein, 340 aa, unidentified
MNQIIRIGMDTSKHIFQLHGVDAAEQAVLRKRLRRKEVLAFFAKLPPTVIGMEACGAAHYWGRELRKLGHEVKLMAPQHVKAYVKRDAEGLCEAMSRPTMQFVPVKTEEQQAALMLAGVRQQLIARRTQLSNAIRGYAAEFGVTAAKGLDKIEPLLARIAQDESLPALARELFAIEGREYAQVQAELKAIEAKLMAWHRANAASRRLAQIPGVGPIGATALVMKTPDPRAFSSGRHFAAWLGLTPKDHSTAGKTRLGKITRAGDEVLRSLLVAGATAVIQQVRRGRGHPSPWLVALLKRKPPKLAAVALANKIARIAWKLMTTGESYDGARMLGASALAA

SEQ ID NO: 166905 - protein, 363 aa, unidentified
MPTIADAGRLVTGGVDTHAEVHVAGVADQAGRVLGTGEFPATTAGYRAALAWMRGHGELVRVGVEGTGSYGAGLARYLAAEGIEVAEVIRPNRQARRRRGKSDAADAAAAALAALNGEAPGQPKSGDGAVESIRALQVARRGAVKARTQAGNQLGGLIVTAPEAMREKLAGLSTRKRVTLAARFRPGDLTSPAEAARAAMAAVARRHQALTAEIAQLDTALETLLAHAAPAGFLARKGVGTQVAATLLVTAGDNPRRLRTDASFAALCGASPVDASSGKQRRHRLNRGGDRQANSALWRIVFTRMATDPRTQAYLARCTTEGKTTREIMRCLKRYVAPEACKALTGPHPAARPAHHIKNFMIT

SEQ ID NO: 166906 - protein, 454 aa, unidentified
MEIMHERVAGLDVHKTMIVACVRIMSAGKIKRECRTFETSTASLEALLGWLMESGCTHVAMEATGVYWKPVWNILSDGAFELIVANAAHIKNVPGRKTDVNDATWIADLVACGLIRPSFVPDEAIQELRSLLRARKQLTREQTSHIQRIQKTLEEANIKLDSVISDILGVSGRRMIEAIIAGVRNPHKLAALADRRIKAAPKVLYDALHGRLTEHHRFMLELYLGQHDALSQAIAKIDDAVDAAAARMDEEVEAGQATFRSLISLLCTIPGVSVLSATTILAEIGLDMSRFPTAGHLVAWAGLCPGQNESAGKRKSSRLRKGAPWLKTMLVQCAWAASRKKDSYYKAQYFRLCGRRGPKKAICAVAASMLTASRDTLKNSFSEVSAKTTVAEPVPGTTPTGNAALPSLGKAHSCATEPAGISTGCSSFTVISLPCRLELTSTVGLPAASVSRPT

SEQ ID NO: 166907 - protein, 370 aa, unidentified
MSDHSEAFVAFDSSKLRNAVAIADGGRAGEVRFVGEIENTGTATAKLVRKLAAKHRRLTFCYEAGPTGYGLYRQITRLGQECSVVAPSLIPKKPGDRVKTNRRDAISLAKLLRAGELTAVWVPDERHEAMRDLSRAREAARKDHKGKRQQVSSFMLRLGRHYPGKKTWGPAHMNWLMLQKLEHREQRIALEELVGAVRQESERVERLEQAIRDAVPEWSLAEVVTALQAMRGIDLVAAVTVLAEIGDLSRFQNPRELMGYLGLVPSESSTGDTVNRGGITKAGNGRARRILVEAAWSYRHPPRVSREKQIKVAAAPRAVREIAWKAQMRLCGRFRSLTRKGKRPTVVATAIARELSAFIWAINREVMASR

SEQ ID NO: 166908 - protein, 408 aa, unidentified
MQVLYPRCAGLDVHKDTVVACVRCVSEPEHHETRSFATTTRELLALGEWLVEHGCSHVAMEATGIYWRPVWHVLEGQAELVLANAQHIKNVPGRKTDVNDAMWIADLLAHGLIRSSFVPPQPIQELRDLTRTRKQLVREISQHSLRIQKVLEDANIKLGSVLSEVLGVSGRAMLGAIIEGESDPHRLADLAQGTARRKHDELVEALHGRIRPHHRTLLRLHLNLIVALEHTVGEVDAAVGKSLEPIHQRARLLTTMPGISEVSAEVIVAEIGIDMTRFATPGHLISWAGLCPRNDESAGKRRSTRLRKGGTWLKTALVTAAWAAVRTKASYLRAQFQRIKARRGARKAIIAVAASMLTSAYFILRDGVPYRDLGPTHFDRQHRDKTVRRLLRRLHDLGYSLPHQLTPA

SEQ ID NO: 166909 - protein, 353 aa, unidentified
MRTYYVGMDVHQASIVIAVLNGAGKVVMESIIETGAESVRTFLKQFRGKVYVTFEEGTQATWLYDLIKSQVTEVVVCDPRQNQLLKQGNKNDRVDARKLAELLRNGSLRAVYHGDKSKQMLKELVRNYDCLVRDTTRVMNRLKAMYRGRALACGGHDIYRHDRRAEWLAKLTEPGARQRAGCLYEQLVTLQRLRHEAKRAMLQEARRQPAYPLLLSIPLLGPISVAQIIAVVQTPFRFHNKRQFWTYVGLAVVTHTSAEYVLVNGMVRRSSRPVATRGLNRNHNHLLKKVFKNAALSACLNGPFKAAYDERLAQGMAASLARLCIARKLAATTLSVWKRGEPFAPERMKPQVA

SEQ ID NO: 166910 - protein, 358 aa, unidentified
MRIIGVDLHARQQTIAMLDTETGELIEKTLGHDGDEVRNFYSALRSPVLVGIEATGSMQWFLRLMEELGIECRVGHPKKIRKAETRKQKYDRRDARLLLTLLAENRFPTIWMPSTEQRDLRTLLRHRHQWVRMRSRVQHTLQSMALANGLRRGHSLWSQAGQHELQVLPLAPHASQRRTALLSLYPRFQESIDDLDRQVSEEAHQRPQARRLMTHPGVGPVTALATEVFLGDPKRFADGKTVASYIGMIPSEHSSGRRQRLGAMSKEGNALVRYLWCEAAMHAVGRDPELKRFYRRKLIQKGMGKARVAAARKLGIRLWIMMRDEIDYQEFCRRGQLWQKSGGARAGMPDFNSGPAVQ

SEQ ID NO: 166911 - protein, 363 aa, unidentified
MKEEKRRYVGIDLGKREYTMAIIGKNGKMKIHQGKTSTQGRQALYRLLEKKDKVAVEAGNLAFIIAYEIQEQIGSEVRVLNSAKLPFIWDAPTKTDKEDAMKLAHLIEERRDEKLPIVPLPSKEEIARRKLIANYAREVKCRTRLLNQLHAMYVHQGHTTIVRKDLATSERRQEAVELLTGQEREEAEWILKHLDLYEKRIKELKDKMIKETKKNEDMINLQTIPGVGPVVVYAFTAHVGDGSRFSTGSQVSNYIGFVPRLDYSGDTQRQGHITKRGNAYLRGLLVQAAWSMVRSSKSGSLKDRYICLTTYGGKSKKKTIVSIARRLAELMYSVLRDKSKFEERIWSGRKEFLSHLKELRKCA

SEQ ID NO: 166912 - protein, 388 aa, unidentified
MPAAETPVAYLGIDVGKSSHSACALDAGGGVAFRAELANRPDDIDRLLERAGSGALVVVDQRRNIGALVLARAHAHGNPCAYLPGYAEKQARGMFPGIAKTDAIDAEVIARTALGVPGALRPAPEEPEGAASLRILSSQREFASSARTRAKNRLRATLLEADPALEGAVDPSSRWQVSVLAEFGGAAGCSAAGWRRFSGAARRAGAPAAGARRLWVALLASSRSGRPLPAGEDVAVRMLAREIASLDADIGELDSLVADSLAGDEVYECLLTVPGIGPKTAAALVTSIDISAFRGHDELASYCGVAPSDRRSGSSIRSTSPQRGGNRQLKNLLIFSCNSLIGTDNRFGRYYGECRARGMRHGKALKAVARKRLKVIYAIMRDAVPYAA

SEQ ID NO: 166913 - protein, 357 aa, unidentified
MIYVGIDMHAKNMTIAAIKDNGELLTSQKITCHEMALERFFDDLGKPIQAVVEATASWYWISDWCRRQGIHLILAHSKMLKAISYAKVKTDAVDARTLAELLRAGLIPKAWQVERYQRDLRELTRARLRLIERRTGIQNQIKATCKKYNADLQSASWYDLDRIHRVLMDQLPREAMLETAVNLEQIRLIQQHIEQLEEAVEKNIWFSEQVKRLREVPGIGRVAAWTIISEIGDPKRFPTDRQFASYCRLVPGSKDSGDNRRHKSGSKDGNRYLKLAFMHAAVSAIQKNGPVRKYYNKIKRRSGRKTARSVVAKQLSRIVWHMLVNDEPFKNFKGQTCKTWKYSGWPRPVNPHIYTGT

SEQ ID NO: 166914 - protein, 389 aa, unidentified
MDREGHLVGERWTEHSGASITELITWLRDSGGAVPSAFAIAIEVPRGAIVETLTEHGFAVFSINPKQLDRFRDRYSPAGAKDDRRDAFVLADSLRTDLHCFHAVRLDEPAVIRLRDLSRLEDDIRDELRRLSNQLREQWHRFFPQLLTLCQSTDEPWVWDLFEVAPLLAQAARLSEKKIMKILVRHRIRRIGVRDVRAVLTAPPLQLAPGTAEAASEHAMLLLPRLRLLRQQRAKIATRLRKLLDELASPETVEEETKEHRDAEVLLSLPGVGRIVAATMLSEASQAIADRDYHGLRCYAGTAPITRQSGKKTVVLMRHGCNERLRNVLYHWARVSIICDARSRSHYAQLRAKGHSHGRSLRGIADRWLRVLIAMLKHRTLYDPSLPSV

SEQ ID NO: 166915 - protein, 464 aa, unidentified
MVLSTFNHIQGSNGSHWNRLMRGENAEKICIVAIDAAKFVNAAMICNVYGDILVKPFEFNASSTGFHRLVKEIEEAKEGYAFEEVVVGIETTGHYYEDLVRLCEQKKFIVRIINAATTAKERETVLNYTKTDNVDLMAITQSLLHGRGQTSQEALPLLEQLKMLSRAHRALVNTHSQTINHIRLYMDHIFREFQGIVEEVDGEKVILKIFSTFDSKSSRFLMRHYPHPSDILKLGEAGLRQVSIEQNLKMRDQSIERLVRFARQSVSKPKMFLQAELLMLRLKLDELELKAAQAAQVKAEMEQVLLQTDGGILLSIPGVGVITASELTAEIGDFSLFTRPEQLIKMAGTNPIIRQSGGKKATSHRISKQGRADFRGAVYRAGKAMMGQNPTMKKKAEELKAKGKKIGQIYIALGNRLLRLAFAMMKKKQVYQTGPEGKSLQSVIASKLRNKEKQALFFNRYVLN

SEQ ID NO: 166916 - protein, 355 aa, unidentified
MDNLRYIGLDVHRDTISAAVLNREGQLIMQSVVPTRAPAILDLLDGIRGTLHVTFEEGIHSAWLYDLLQRRVARVLVCDPRKTSLLKSGNKGDLIDARKLAELLRNDALSPVYHGELSSLEVQRRTRSYTMLTEDTTRIMSRVKAVFRGLAIPYHGKSIYRPDRRESYLAQLPTEGLRQRVELLYQELDAVHRLRLRAKREMLAECRKHPAMKWLQSVPFLGKVRTAVLIGRVQTPHRFRTKRQFWSYCGLALETHDSSQYHVVHGQVERKPRFVQVRGLNWNHNHDLKDVFKSAATMAAVREGVFRDYYCGLLAKGIRPEMARLTLARKIAAITLKIWKEGETFNAEQVKPQAA

SEQ ID NO: 166917 - protein, 316 aa, unidentified
MTPDTCFVGLDISKQHIDVSVRPTHDRWRTAQTDADRAQLVTRLAGLTPTLVVVEATGGYETAIVTALALAHVPVVAVNPRQVRDFAKAMGQLAKTDAIDAAVLALFAERVRPEVRPLPDEAHQELVALLTRRRQLLEMLTAERNRAATARRSVRRSIQEHIRWLERRVHDTDADLTATMQGSPLWRAQEDLLRSVPGVGPVTARMLIALLPELGTLSRRAIASLVGVAPLNRDSGQQRGRRAIWGGRAAVRAPLYMATVVATRRNPVIRAFYQRLLAAGKRPLVALVAAMHKLLTILNAMVKHQTSWQPPAPVEN

SEQ ID NO: 166918 - protein, 347 aa, unidentified
MSICMIGLDTAKTVFQIHGVDEAGKAEIRRKLRRNDLIAFFEKQAACTVVMEACGAAHHWTRMLAGLGHSVKLIAPEAVKPFVKKGKKNDAVDAAAICEAASRPDVKFVPAKSVEQQGILALHAARSLLVKQQTMLANAMRGLATEFGLTVPKGIHKLDELMAVVDADEIIPKRAKQAIAGLHDCCNNLSDRVETFETEIVAHARRDETARRLATIPGIGPITASLIAATVGDISLFKTARQFAAWLGLVPRQSSTGGKTRLGRITKTGNREIRKLLVLGATSMVYRADGWNSAVGAWLRSVLERRPVRLVTVALANKMARIAWAVMTRKEVYRPKSGVAAVAQAAA

SEQ ID NO: 166919 - protein, 345 aa, unidentified
MDIGKRNCKACIMNSDGSIAEETKYNNTLHEAEIFAYSIVKKYGECVAVCESTANLWLKTYQAFEKYNIGVKLANPLKTKAIAEAKIKTDTLDARTLAHLLRSDLVAECYIASREIREDRLLLRLRTNLVQDRTRVMNRVHSLLDKYDVRCDCDNIFGVKGTRWLKSLKLSDNDQILLHEYVMQIEFLNTEIKNIESKITCEASKNESVKILMSMTGIDYFSAMLIASEIGDITRFSTPEKLVSWSGLCPSIHQSGNSLYMGRMKDGNKKVRWILIQAANTAARKDYRLRKFYLRIAKRHGHHVAITHVANKMITIIWHMLVNKKLYNERKQSLYETKLKRIQKT

SEQ ID NO: 166920 - protein, 409 aa, unidentified
MRVMNPRCAGLDVHQKTVVVCTLIGEPGEEPAVQKRTFQTITTQLLELGDWLREQGVTHVAMESTGTYWKPVWAVLEGEFDLTLCNAAHVKQVPGRKTDQKDAEWIADLLRHGLLKKSFVPPQPQQDLRELTRYRARVSADRSAVGNRIRKLLEGANIKLGSVASDVMGVSGRRMLEAIIGGETDPEKLADLALGQLQEKRAQLLEALNGRVRDHHRIMLRLELAQWNFLNRLVAELDIDIEKALVPFGEALRVVKSIPGFSDVSAAAVVAEIGARMEQFGHAARLASWAGLCPGNNESAGKRLSGKTRSGNIWLKRILCQTAWAASRTRKSYFAALFRRISAKRGAKRAALAVAHSLLVTIYTLLATGRKYQDLGTDYFDKLNADGLKRYCLRKLEAMGHKVILQPAA

SEQ ID NO: 166921 - protein, 359 aa, unidentified
MLYLAIDQHRKQLTTNTRDESGDVVLHRQVSTRWDKVRSFFEEFRQRAEGEGGFVAIVEVCGFNDWLLKMLKEYGCQEIVVIQPTDRSKRKTDRRDANRLAELLWLYRHRLLGDKRVQGIRRVRPASPLDAYARQLTTLRCRLVRQRTRTINRVQHLLLKQNLQQECPTKGIQTKRARQWLETLSLPKIDRFEMDGMLAQWKLLEEQLVPTEEKILQCLEHHPIARLLLSIPGAAAYSALAIACRIGDIALFPRPESLANFWGLTPSSNNSGDNDKRLGAITKEGSGLVRFLLGQLVMHVLRKDHGLRKWYRDVKRRRGSKIARVAVMRRLATIIWHMVKHSQYYSPLKSRRTVDVNQI

SEQ ID NO: 166922 - protein, 361 aa, unidentified
MPGTMTWVGLDVHARSTHAAAINSMTGELVRRKFGPGVDQPVGWLQGLPGPVRACYEAGPTGFGLYRAGIAAGVDIDVIAPGKTTRGPSDRVKTDRKDAELLARCLLAGSLTRVVVPLPDVEAARELTRAHDACRRDLGAARNRVSKMLLRHGVVYPDASTWTARHRAWLSRQQFEQTASELVFADLVAAVDGITARKMAIAHRLSELATNEQWWPTVARLRAFRGLDTLTAFTIHLELGGDWARFERPTALSAWLGLTPSLSQSGESSHQGAITKTGSMLARRLLVEAAWHYTRQPRLGVTLRNRQQGQPDHVLQISNRAQQRLYRVHKKMRARGKPGNVTVVACARELSCFLWAAATAD

SEQ ID NO: 166923 - protein, 413 aa, unidentified
MTEENFAWFAGIDWGSERHQACLVDAQGRIVGEREFPHGGKGLADLCDWLLSMCGAAETVAVGIEVPHGPVVDTLIDRGFVVHAINPKQLDRLRDRHSVAGAKDDRRDAYVVGDGVRTDRRLFRRVHVTDPRLVELRAWSRLAEELTEERVRLSNRVHHELWRYYPQMLKIADGDVAATWVLDLWDLAPTPAGAHRLRAAPVEKLLKQHHIRRIDGDTVLRNLQEPAIKVGKGVAEAASVHLRSLFTRLRVVNRELRQADAKLDALCAAIGETDADSGEGLQRQDVMILRSMPGIGRINLATLLCEGSGPLSRRDYPALRTLCGAAPVTKRSGKSHIVIMRYASHVRLRNVVYHWARVATQHDPKSRERYAALRRRGKSHGRALRGVADRLLGLACVLLQRQTPFDPNFAQAK

SEQ ID NO: 166924 - protein, 426 aa, unidentified
MIDAVIERCIGIDVGKKFLVACVMTGPANGEARSEIREFGTTVSELRKLREWIQQEACTHAIMESTGSYWKPIFNVLEDVVKVALANPYEVKARRGHKTDPQDAWWLAHLLRHAMITPSFIPPRWQRELRDLTRRRRKVIQAATSEKNRIEKTLEDANVKLSSVLADIFGVSGQLMLEALLKGQADPIQIAQFAKRAAKKKIPQIIAALAEHQMSDHHRLMIRCSLDHLRSLEDQIYQLDQEICKKIWEAGYEKHWELLQTVPAVGEPNAATILAEVGPDPRNFANEKHLSCWAGLCPGNHRSAGKNKGSRTTEGNRWLRGALTESAWGIAAKKDGHLRYKFWRIAAKSRPKAVVAIAHDLLVLAYFVLQRGTPYEEKRGTPMTEAQKQRLIRHHLRRLGKLGVPVRSGFSSRGPHTPAISPQAKT

SEQ ID NO: 166925 - protein, 502 aa, unidentified
MSNELAVPTAPEPEWAAFVAIDWADRKHYWKLVAAGSQKPEQGELDNTPEAVAVWAAGLNVRFGSRPIAVCLEQSRGSLVYMLLKFPQLVLFPVHPRMAASMREAFHPSGAKGDPSDTAVLLTILLCHRDQLRRLKPDTAETRLLQRLAEQRRLMVNEKTRHSNRLTACLKLYFPQILKWFDDPTSPLVGALLERWPSLEPLQRVHDGTLRKFFHQHNCRSEERIQERIDAIRQAVPATTDTAVLGAEAMAARGFLAVIATLRAHIAELDEQIAKAFAAHPEIALWDCLPGAGAALGPRLLVAFGTDRQRYAKAHELECYSGIAPVRSASGQSEWIHFRWACPKFLRQTFHEFAGHSIAKSEWARAYYDLQIGRGKSHHAAVRSLAFKWIRILYRCWKNRTPYDEQVFAVPAKAQLAPEGLAPWRRVERCRRVSETVGESLLTGPLREGWCGRPACHRRRVERRPHVFGKILRIPLDGITQMTPPTSEGRRKCDWRTGTYWT

SEQ ID NO: 166926 - protein, 400 aa, unidentified
MISVGIDVSKGKSTVCLLKPYGEIICKPFEVQHTEKDLEELANLLQKLDGEIKMVMEATGIYHLPILTFLLEEGFFISVINPFMMKRFARDNSLRGAKNDRLDSVMIASYGIEKWHKLKKYEVNDGIYPELRFLGRQYHRFMQTHVKHVQELTHLLDHTAPGLKAMFNSWNEHSNRDKLSDFVERFWHFDLITSLSREEFVEQYLLWAKEKKYHQSRSKAEKIYDLASNGIPTLSSRTPSTQMIIQEAINVLRIVNNSLYNILSRMKELAKSLPEYATVRSMGGVGDALAPQLIAEIGDVRRLHNGHALVALAGIDPPPYESGQFVGTHRKISKRGSPILRKIGFEVMRVLKSHKEPEDNAVYNYILKKEAEGKNKKLAKIAGLNKFLRIYYARVMEVYR

SEQ ID NO: 166927 - protein, 370 aa, unidentified
MSVRRILAKTIDTDLEYEAIGIDLAKNCVSAALLTTDGEVVCIDRLDYSELEKSAQALSPTTFAMEPCTEMNYLVQKLEAWGHRCLVIGGKNVQNYVENHYSGQKTDLNDAQALAFLAQDKQLRTIKAKDIEQQKYASLTTLREQYIKQYRQTIVSLKGICQAWGLNISKGISGKAQLKDLIENHAAFPEELRESLVDMVTHAQTTQKVLNKITKTLEVLAKNDKVCQLIQTIPGLGTICSCRLRATIGDIKRFKNPKDFPPYYGLVPRSIATGHNEKKGKITHRGDRTMRSLMVQGAGCVIRLATCGKLKSKQLTKWILKKQKEKMPWGKLVCAVAAKLLRIVRAILISSKPYNPKIAGVAKCSLSKGS

SEQ ID NO: 166928 - protein, 346 aa, unidentified
MEHYAGIDVSLELSSVCVVDAQGKIVRETKVAIEPEALVAFFASLGFAVKRIGLEAGPLSAWLHAGLKRAGFDTVLLETRHVKAALSAMMVKTDRKDARGLAQLIRMGWFRPVHAKSMGSQEVRALLVARKQLLGRLIDVELSIRGILRGFGLKVGVVTRKGFEGRIRELVTGHITLERIAGAMLSARATLKAEYEKLHKIVLTIVREDAVCRRLMTVPSVGPIVAITYKSAMDDPNRIAKSKAAGALFGLTPKKYQSGEKDVTGGITRTGDEMVRTALYEAANVLLARITRFSKLKRWGMDVAKRRGSKRAKVALARKIAVILHRMWVDGTTYRWTNAHPTAVQV

SEQ ID NO: 166929 - protein, 413 aa, unidentified
MLLFIGDDWAEDHHDLELEDETGRRLAKARLPEGLEGISRLHALVAEHAPPEWAELPSEEVAGRVFVGIETDRGPWVTALQAAGYQVFAINPLSSARYRERYSTSGAKSDAGDAHVLAEIVRLDRDHHRQIAGDTDLVDAVKLLARAHQTAIWERTRQVLRLRSTLREYFPAAVAAFEDLSAKDSLQLLARAPSPARVGKLTRSQVVSALRAARRHHVEAKADALLAVLRAPGLRQPATTEAAYAAVVIGQVGIITALNEQITQLQEVVAEHFGRHPDADIYLSQPGFGVVLAARALGEFGDDKKRFHDARARKNYSGQSPITRASGKKTVVLARYATNRRLGAALHAQAFSALAASPGARAYYDALRARKIGHHAALRQLANRLVGILHGCLKTGTKYDETTAWQHQISAAA

SEQ ID NO: 166930 - protein, 344 aa, unidentified
MKIAVLGIDLGKNVCSVVGLDVSGAVVLRRRVRRDTLIDLVAKLPACTVGMEACCGAHHLGRLFATQGHNVRLMSPEYVRPYVKAQKNDDRDAEGIAEAATRPTMRFVEMKTEAQLDMQTLHRSRERLVGERTALINQLRAVLLERGIVVPQGKRKFEQYLVAMMDEHDGEGLSARMRMLVADTRAQWRELDRRIAAFDAEFARWAKENEDARRLAAIPGVGVTISTALIAAIGKAETFEHARDLAAWLGLVPRQATTGGKPRLMGISKRGNKYLRTLLIHGARAALPHLAEKRTTLGRWAKNLLSRVHQNVAVVALANKLARICWAVLRSGRKFAAKEAPLAA

SEQ ID NO: 166931 - protein, 412 aa, unidentified
MEILYRCCAGLDVHKKTLVACVRRIDAAGKAHQAVRTFGTMTCHLLALSDWLAEQGVEQVAMESTGVYWKPVFNILEGRLAVMLVNAQHIKQVPGRKTDVKDCAWIAQLLQHGLLRASFVPPPPLRELRDLTRQRAQLVAEKATAANRIQKVLEDANIKLASVATDVLGVSGRDMLEAIIAGEDDAEKLADLARKRLRNKIPALQTALRGRVTKHHRFQLRLLLDHVMHLEELIGRLGGRIEEVMAPFAEAVERLTTIPGVEHRAAETVIAEIGTDMNQFPTAEHLASWAGMCPGNNESAGKRKSSKTTKGSRWLRQMLTQAAWAASHTKDTYLSAQYRRLAARRGKKRALVAVGHTLLVITYHLLKNHTTYKELGGDFLEHLEPDQLTRQLVKRLEKLGHNVILQPKEDTA

SEQ ID NO: 166932 - protein, 411 aa, unidentified
MQVIYERCCGLDVHKRTITACVLKWLGGDWKKEIRQFGTMTHDLLALSDWLVREGCTHVAMESTGVYWKPVYNILEGQFELLVVNAQHLKAVPGRKTDVRDAEWIAELLAHGLLRGSFVPPVRVRELRELTRYRTSLVCDCARTINRLQKVLEGANLKLASVVSDIRGVSARLMLEALVAGERDTTQLANLAKGRLKEKHAQLVEALSCRLQPHQSFLIAEHLAQIDYLEGAIERLSCQIEEKLRPFEQEMAWLDTIPGVNRRTAEVLWAETGGDMARFASARHLASWAGMCPGNNESAGKRRTGRTRKGSPWLRHCLIEAAHGAAHTKNKYLSSQYHRLAARRGKKKAQVAVGHSILVIAYHLLTRKQPYSDLGANYFDERDRQAVTKRCLNRLQKLGFKVTLENVQMAA

SEQ ID NO: 166933 - protein, 583 aa, unidentified
MLLHHAPVSQPQADAKMHRIGVGIDTSRYGHYAAFLRDDLQPAAGELQFVESAVGYAQLRSRLEQIVSKLGTVHFAVRLDVAGQYADNLLHFLHTLQRQLANATLVISCGDPQRNKNYRAALFGSQKSDPVEARAAARYALSERPAPVKMLSAQQRTLRHVASRLQAVVRQRTRLINQFHLLLTSTFPELALLANDIASGWVLTLCERYPTAKLLAAASAQDIGQIPYLPEKLIAPLLEHARTAIASLEGDTVAELVRDQVRQLRDVRARQLRLEKTLVDAYRQLPDANHLDSIPGIGDVTAAILTAFIRDIDRFQTPNQLVAYFGAMPIEESSGVDRDGKPRAAKRNIMSRRGNDLVRRYLWMAALSAVRYNPAVRALYARVVAKHPDQKAIAIGHGMRKLLHLVFAIWKTKKPFDKTHYPWDTPAHVAALDARDEQEAAATPEQEQAAGLTLTAEPAQKEVTAACESSLPHDAEPGQNAFVDFAHVKAQLPIARVLEHLNLTRKLQGAGAQKRSACPIHCPHSHGRTFSVNLDDNVFQCFSPRCQKKGDVIDLWAALHHQDLRQAVLDLVRTFALEPAPNK

SEQ ID NO: 166934 - protein, 351 aa, unidentified
MPRTTTVHAVTTIGMDMGKNTLHMIGLDSRGAIVMREKVSRGRITSRLANVPSCLIGIEAGMATHYVARELAALGHDVKQVPPMYAKPFRQGHKNDFRDAHAVAEAVQRPTTRFVPAKTDEQLDLQALHRVRSRLVGERTAVINQIRGFLLERGVIVRQGLRFLRQALPDILAKRTDVLSPRMVRIVADLASDWRQLDERIEAVTDEIETLAKSDDSCRRVMTVPGIGPIISSAMVAAIGSGGAFARGRDFSAWIGLVPKQMSTGDRTILGRITKRGNGYLRMLFMQAARVILLRPASWPKHGFGGWLARAAQRLHPNVLAAALANKLARIAWTVLAQQRSYETRVTKAAA

SEQ ID NO: 166935 - protein, 348 aa, unidentified
MEVTTLGIDLAKNVFCVHGCDANGKAVLRKQLARRQLLSFVANLPRCLVAMEACASAHYWAREIEKLGHRVRLIAPRLVRPYVKANKNDATDAEAICEAASRPSMRFVAVKSTAQQDVQAVHRVRQQLVKTRTGLVNQVHGLLAEYGIVIARGLAPLRRALPLILEDRDNRLSGVMRELLGEIGERLRFIDDRVRKYDLTILRLFRDDERCQRVAAVEGVGPVTATALVAAVGNATDFKSGRELAAYLGLVPRHRASGGRTVLLGISKRGNRYLRTLLVHGARSALYRIERHRGARASWAARLKLRRGANVAAVALANKNARVLWALLSRGQSYRPAPFPARVPQAGG

SEQ ID NO: 166936 - protein, 370 aa, unidentified
MDERIKFFVGLDAHKDSIAVAACEAGREPARFVGTMGPDVNGLLKLLARAGDPAQVSVVYEAGPTGYGLHRELCRRGYRSQIAASSLIPRRAGERIKNDRRDCLRLAELSRAGELKAIWVPDEAHEAMRNLWRAREDAVGMRLKTRQQLQAFLLRHGRRYPGKTNWTRSHERWIAEQRFEHDGDRIALAEYQLAAQAAEQRVHRLTTALTEAAKGWRFEPVVAALRALRGIDTVCAIGLVTEIGDISRFGTARQLMAYLGLVPSEHSSGNSIRRGSITKTGNAHARRLLTEAAWSYRFPARMSQQLRQRSSDLPEPVRNHAWKAQQRLCGRFARLSSRGVQVNKVCVAVARELAGFVWSIAHQASRTQAH

SEQ ID NO: 166937 - protein, 341 aa, unidentified
MEKVSIIGLDLAKNMFQAHGACADGSVGFRKKLSRNKVLTFFAAQSRCVVAMEACASSHFWAREIGKIGHEVKMIPPIYVKPFVKRQKNDAADAEAIAEAASRPTMRFVAVKSKEKQALGMAFRVRDLFVRQRTQAINALRGHLAEYGVIAPQGIAHLDRLVRVVVDPDNGMPEPVVVLASMMLDQIKGLQERISILEKEIRTRSKRDDVASRLMTVPGIGPICATAMEAFAPPAATFSRGRDFAAWVGLTPRQHSSGGKERLGKTSKMGQRDLRRLLITGAMAVVRWAVRKGAPEGSWLARMLLRKPRMLVAVALANKMARIAWALMAKGGIYRNPAAVV

SEQ ID NO: 166938 - protein, 466 aa, unidentified
MKPFYMGIDVSKGYADFMILNSKKQPVAQSFQLDDTFDGHQSLYKILGRFLTDHPESALFAAVESTGGYENNWYNSLIEFQGSLNIQTARLNPLGVMHNSKADLKKNTTDKISAQNIAEYLIAHPEKVVYQQHDQLAGLRKQWSFIKMLTKQSTQFLNQLNALLYTANPELLSYCQDGVPGWMLTLLVQYPSAVRLKNAHAKTVATIPYVSRMRAQQLIANAKRSVASATDTTTEHLIVATTRQILHLKKTIAEQMKRMINECSISEIELLKTFPGISDASAIGLIIEIQTIKRFAGVKNLVSFFGVHPVYKISGDGVGGIKMSKQGRKEPRQILYMVALSAIQYNPLIKETYEKHQQQGKHNMAAIGICMHKILRILYGMLKHNKPFDPQIDIRNRQRGVRTKSDTPAKDPNRRFQDYDRKAPVTRRQRKKRLERERSHSVTNTKSGITTPVPLADIIASILPQL

SEQ ID NO: 166939 - protein, 373 aa, unidentified
MEQVSTYVGLDVHQKEVVVSMLVGSSSEAIEFRAVQDGRGVRRLVRKLEEKAVGRIECAYEAGPCGYTLQRQLRGAGIKCQVVAPSLIPIKPGERIKTDRRDARKLAEHLRAGLLTEVHPPSEGDEAVRDLCRCREDAKEDLMRVRHRLGKMLLRRGRVYRAGRNWTKRHREWLGHQRFEHRADQAVFEDYLLAIEQLEERVMGLDERLSEIAASDSYRERVGWLRCFRGIDTVAAMTILAELHDFARFQSPRHLMAYLGLVPSEHSSGQSTHRGAITKSGNRHVRRMLVQVAWHYRHRPAVGAVLRKRRGGQPAAIIAIADRAQQRLNRRYCRLLLGHHKPHQKVVIAVARELVGFLWAALYRYPSQKAQAS

SEQ ID NO: 166940 - protein, 350 aa, unidentified
MKKITVGIDFAKEKFDMTAINVCNGASIHAQFKNAPSGARDMVRTVKKFAKGTNSSEWLFCGEDTGYYSQTVTRYLAEKGFFMWQQNAYSIKRSEGRIRRGKDDKADSRTIAEYAKRFQDMAVEYKLPPKEQEELKMLLSQRDLYVSAKTKLQNSTSEIPDRKTQGEAVRLIKAANKRLCRQIGQEIKRIEKKMDEIIGSVQEIKQNYDILTSFTGVARINAITFIVYTDNFAKFELNARKIATYWGVAPFHKESGSTLHTAPHVSGFCNKQLKALISNAATVAIKFNPVIKAYYSRLLEKGKCPMIAKNNVKNKIIHILTAMIKNKQKFNPDKIFTQIQSVKTVNLLVS

SEQ ID NO: 166941 - protein, 335 aa, unidentified
MKHVIAFDVSMGKSYMVIYNAQKQCIFEKEIQHLKHDFKELQEKIDALTKKTGEFPEIVFEATGVYSRQLERFMKDNQYTYFLLNPLEAKLQCDSLRIHKTDRSDAHRLALTHFTATRRVSHGTNHIFHQLKSLSRFYIELDGELSVIRSRMHKVIQLTFPELEKMFTSKSELFLNFVQLFPHPDSVLSLSKTIIKNRIRANTNKKISNIMAEKKAIQVLEIAKNSYPAVSQNDVLCDQLKVYAKRYQELLQQKECCINKMVLIAEQRAEYSIILSLPGIGPNTAVRLMAEIGDINRFANNKQLNAYAGIDIRRFQSGKTFYKDKMVLLQSLKKA

SEQ ID NO: 166942 - protein, 411 aa, unidentified
MRLFVGDDWAEDHHDVELMDQAGRVLARRRLPEGAAGMGRLHELVGQQLGEDDRDAEVVIGTETDRGPWVAALVAAGYTVYAVNPLQASRYRERHGVSGAKSDGADAHMLTDMVRTDSHQLRAVAGDSADAEGIKVLARTHKTLIWERTRHVQRLRHQLREYFPAALEAFEDLDAADTLELLGKAPDPARAARLTRAQVSAALKRARRRGIPDKVTAILAALRGEQLGRPPTVTAAYAVTVRSLIAVITTLNEQVKELQGQVEQHFGRHPDAEIYRSQPGMGAVLGARVLGEFGDDPHRYADGKARKNYAATSPITRASGKKKVVAARFIHNDRLVDALNAQAFAALNASPGARALYDDLRDRGIEHNDALRRLANRLVGILHGCLKTRTLYDEAIAWSHRENLPQSSVAA

SEQ ID NO: 166943 - protein, 413 aa, unidentified
MNYEPITAVGIDVSKGKSTVAVRRPGGEVVLTPFQVNHDAAGLSCLIKTLRDVGGDIRIVMEHTGMYWRPIALTLKAAGFFVSVVNAMLIHDFSDNSLRKVKTDKADSMKIANYALSFWAELRDYSPEDETRQMLKMQNRLYLRTKKSSVVLRNGLISLLDQTFPGINTLFDSQPKRSNGHFKWVDFVKRFWHKDCVAGISLAAFSDAYRKWCARSGYRFSQSDAEKFHTAARNAVATFPKSDSVKLLIAQAVDSLNAVYDALHILRGEMLRLASLLPEFDVVMEMQGAGDVTGPQLMAEIGDVRRFTHKGALVAFAGMDAPPFQSGTFDSKSRRISKRGSPHLRKNLFMVASTILQHSDPANPIFQFMDKKRAEGKHFYVYIVAGAAKFLRVYYARVKAHLTMLDSGANTAA

SEQ ID NO: 166944 - protein, 343 aa, unidentified
MNATSYGLDIAQTVFQMYWVDGQTGEISNRKFRREQLIRFLSTREPGRVVLEACGGAHWWARKIRDLGHEVVLLHAKYVRPFVKTNKTDSADAEAIWTASRQPGMRTVAIKSEEQQAILSLHRIRSGLVATRTRETNQIRGLLAEYGLHFRYGRKALMNELNVRMAEIESSVPALVWRGILRQLEQLRHIEQGIDEAERENLLWMKSNPQAKALEAIPGVGPLTATAAVAVMGSPHAFRSGRAFAASLGLVPRQRGTGGKVKLGGISKRGDPYLRQLFIHGARIVVTHSKQCPQWIDELLKRRPINVVVVALANKMARTAWALLAHHRAYDRKFMSERLSMAT

SEQ ID NO: 166945 - protein, 351 aa, unidentified
MAGKVTETAVVGGVDTHKDLHVAAVVDQNNKVLGTQFFSTTRQGYRQMLAWMTSFGALKRIGVECTGTYGSGLLRYLQNAGLDVLEVTAPDRMERRKRGKSDTIDAECAAHAAFSGIRTVTPKTRNGMIESLRVLKTCRKTAISARRVALQIIHSNIISAPDELREQLRNMTRMQLIRTLGSWRPDASEYRNVTNVYRISLKSLARRYLELHDEIADLDVMIAAIVDELAPELIKRNAIGYESASQLLITAGDNPQRLRSESGFAALCGVSPVPVSSGKTNRYRLNRGGDRAANSALHIIAIGRCQRQDYWPFFAIFNVRYWSLMLSAFRHFIITDWRGVFCQHSRFAFFL

SEQ ID NO: 166946 - protein, 363 aa, unidentified
MMSAPVGGIDPHQDTYTIGIVDPNGVELAHESFPTSAAGYLDGIELLSTHGVKQVGIEGSAGWGAHAAVALVAAGFDCREVPAQRSAAQRRARRLDKTDIVDAVAAARAVLAEPTLGPVQTLEVYDPLVAKIEAVLEHRRMLVTARTLVLHHVQDQISKLPVEIRDQLTTSGKIEARLRRLAYVDTSVVSTLAGQYRLSWLIPMIEHDRTMGRQIRQLEAHLDALLDEHGTTLRDEPGVGPIAAATLVVEVGDPFRFARESKFARWCGTGAIAVSSGEGDGLPVRHRLDFRGNRRINSVLYIASVTQHRDLDDARLYIDRKLAEGKTRREARRAHKRHLANRVIRRMWKDESRRRRQPITAAP

SEQ ID NO: 166947 - protein, 342 aa, unidentified
MKVARCGLDIAKQVFQVHCVDDRGHILLRKTLSRSKVRGFFATLAPCMIGMEACASAHYWGRELRKFGHNVQLMAAHFVGAYRKSGKNDANDAEAICEAVGRPSMRFVPLKTEEQQAILMVHRARELVVANRTAQVNQIRGLLAEFGLVVPLGIARLRRQLPQILEDAENGLPSLARQTLAGLLEQFHFFDNRVDHYDLQILDLSRQSESAQRLMTIEGVGPVTATAIVASVGDARVFSGSRQFAAWLGLTPRQHSTDGRSRLGQMTKRGDCYLRTLLVHGARSLMRHVDRRTDSKSIWAKELKARRHANVAAVALAAKQARTIWALLAKGTEYRPAVTLTH

SEQ ID NO: 166948 - protein, 430 aa, unidentified
MASTERKNEQPIAAFVGIDWADQKHDLVLQAATASAELEYSRIVSEPDALAEWVLKVRERFAAGGRILVCLEQSRGALIHFLMGYECFELYPINPKQLASYRQTFRPSGAKDDPLDAELLCQLVSLHHQRLRPWHPDDELTRKLALLCQKRRQAVDARTALSNQLKSELKQYYPLALAILDNDLTTALAADFLLQWPNFESLKKAAAHKLRKFFYGHQSRNEPKLQERLQRIQAAQALTRDSAIIEAGTLTVQMLAQQLKALGPYITRYEKEIAQLFDRHPDSALFNNLPGAGPTLGPRLLVAFGTDRERFQSALEAVTFFGVAPVTEESGKSRWIHFRWACPKFLRQTFHEFAGQSVRFCDWAAVYYQGQRNRGKGHHTAVRALSYKWIRILFCCWKTRRPYDPQFYLSALLQRGSPYGPSVKNSTQAS

SEQ ID NO: 166949 - protein, 387 aa, unidentified
MIFIGIDIAKSTHFASGVNSDGEVLINPFKFTNDNQGFNLFINTFKDFDLSNCLVGLESTGIYGDNLTTFLFEKGFKIGRINPIQTDSLRSSNIRKTKNDKIDTFLIAQCLMLGHYTLITEKDIQLIKLKTICRFKFDVKKSQSKSKVQLVTCLDIAFPELANFFNNNLHIKSSYALLSKYPTARIIANTRIDALTNLLYSASKGHFKQDKAIALKELAKNSIAMDNPAIGIQIKMLIEQIQMLEKQIDLLDIEITNIMESLNSPISSIPGIGNWLGSIIISEIGDITRFSTSTKLLAFAGLDPSVRQSGNFNATNTKISKRGSKYLRYAINRAAQLIIWNDDTFYQYYTTKLAQGKSYLNVIGHVSHKLTRVIFKLLTTNTTFKNS

SEQ ID NO: 166950 - protein, 489 aa, unidentified
MVPFDPVVIRYDISGAPSRCRVKFYDLVVGFGVFRRNEPGQAVVCGDLRGRVVTWPPQRLTRLRCERESVSVVFRPVSSSNRTERRVAVRSIGMDVHRSFAQIAVLEGGVCRDDGRIGVKPEDLRAWAATLEPDDEVALEATTNSDAIAMLLRPLVGKVVVSNPRKTRAIAEAKVKTDKVDARILAQLLAADFLPGTWVPDDRTRMLRRLVVRRMHLVKQRTRVKNQVHAILARNLVPTCPHADLFSGVGRRWLAAQDLPGDEWRSVDALIRQLDFHGDELAEVDRDIAIEAIDDPVVARLMTVPGIDVTVAIAVVAAVGDFSRFESPDRLVSYLGLHPKVRQSGNSKATHGRITKAGPAQARGMLVEAAFAASRTPGPLRAFYRRIKDRRGFQVATVAVARKMTVLCWHLVTKDEDYAFGRPSLTAHKRRKLELAAGAESCRGPVAGTSRDYHIKRLRDEEKALVEHAERAYEVSVAHWQPQGPRRQG

SEQ ID NO: 166951 - protein, 382 aa, unidentified
MQTIDTVNPTILLAIELSASTWLVAARVPGWEKPHLHRIDGGDTAALLALISSLQARAARGLDATIGVVCCFEAGRDGFWLHRLLTAHGVVCHVLEPTSILVNRRARRAKTDRLDAEGMLRVLAAYLRGDHQACSMVRVPTPEEEDAKRTHREREKLVQERLRIENRIEALLFTQGIRKRPSLRSWERDLAVLRTGDGREIPRHLRAELDRLRRRLVMTLELIREVEAERDQAAKTKPQDRACHKIAALSRIWGIGGNFAAVLTREVFYRSFDNRRQIASYVGITPMPYQSGGMDRDRRISRAGNPRARTTMIQLAWLWLRYQPGSELAEWFRERVGTLAGRTRRIAIVAMARKLLIALWRYAETGVIPAGAEIRAEITVAA

SEQ ID NO: 166952 - protein, 391 aa, unidentified
MIYVGIDVAKDKHDCHIFDSDGVVHHDHFSFPNSKDGFEWFLSLITELAKKQRDKLKIGLEDTGHYSSNLLEFLQANKLNVVRFNPLSVSRTRAAGTLRKTKNDKGDARYIAMLLAATTTKSSNKPAQMILVLKSLTRARYRLIKEMQPLKNRFRRLLHLLFPEFQGFFTSHYANTALNLFAVLPGAQPVAACSIRKLTNLMKSFSHGKHGRAKAERLKELAKNSIAFHNAGSACELALVAERILFLEKQCDKLEAEITAIMKELNSPITTIPGIGIVLGATILSEIGDIHAFATPAKLLAFAGAEPSTYQSGKFTATKTPMVKRGSRYLRNALYLATSTCFLHNAVIRDYVNKKRAEGKHHYVAMSHGMKKIARIVFAILTKNIPYANAI

SEQ ID NO: 166953 - protein, 349 aa, unidentified
MTDQRISYCGRIVYVGIDVHKETYTVTCVCNKQIVKTATVQADPAALAASLPRWFPGATLYSVYEAGFSAFVLHRVLTKAGISNIVVNPASIAVAANDKVKTDRRDSKKLAIDLADGRLRGIYVPTEAEELARLLPRTRTQIVKHRATIARQIKAKLHQFGLIAPSSRRLISSRYLREIAAWSLPPELSVSLTLLAEQWRFATRQLIEMRRLLRDQAKAQEAIEKVYRSVPGIGEVVARTLATELGDMTRFANERALFSYTGLTPSEYSSGASVRRGHISRQGSSRVRHLLVETAWRALPRDGVLKEMFDRIAATRGKKRAIVAIARRLTGRIRACFRQGTTYAVGTYA

SEQ ID NO: 166954 - protein, 313 aa, unidentified
MSRLNIIGIDLAKTNFYLFSLSPEGKPGGRIKLSSEKLIGWFTTQSRMIVAMEACGASHHWAREIQKTGHDVVMLPAQHVRAYQRRQKNDYNDAQAIAEACWHGTIRPVPVKTLSQQDEQTFLKMRRLVSEERTQLINHIRGLMAEYGIVLRKGATELRRKLPELLEDAENGFTPQMRELLQRQYQRLAALDDELIWYDNRQRKNAAGDSVCQRLLSIPGFGPLVSLAVKSWMGDGKQFKRGRDASAALGLVPRQFSTGGQQVLLGITKCGNSYVRSMLIHGARAVLFRSAGKTDQLSSWVNLVREGSRRPGK

SEQ ID NO: 166955 - protein, 366 aa, unidentified
MGWTPPRRPWCARVVAVVTTEQEASVSEVSTIGLDLAKHVFQAHGADASGEVVFRKRLRREKVLEFFAGQPACLVAMEACSSAHHWARELARLGHVVRLIPPTYVKPFVKRQKNDTADAEAICEAAQRPTMRFVAVKSETAQANAVVFRARDLLVRQRTQAINALRGHLGEYGLVVAKGPGHVSKLVEHVENPCSGVPDAARLVLRTLVEALRFLSERIDLLDREIARRAREDDEVRRLTSIPGVGPITATALAALAPPADAFRKGRDFAAWVGLTPLQHSTGGKQKLGTTSKMGERTLRRLLIIGASSVVSKALRQGVAAESWLGRMLARKPRMLVIVARANKMARIAWAVQAKGGVYRAPTVVA

SEQ ID NO: 166956 - protein, 316 aa, unidentified
MSKQNGEVLGIDVSKEWVDAFLFPSEQSWHVDRTWDALHTWVKTLPAGISLAVMEGSGGLERIPGAVLAGVGIPVSVVNPRRVRNYIEAHGQKAKTDKIDARYIAQFGHHVRPNPQPVSSTEQKRFEELITRRCQIVKMRTAEKNRRGSACDQMVYESIQSHLKWIDDELKTIDNELDTLIANNSVLETAECVITSIPGVGTITSRVVQAVLPEIGTIDRKAISSLAGVAPFTHQSGKWMGKSFIIGGRSDVRCVLYMAAVSASRCNPIIRELYNRLRAKGKPFKVVITACMRKLLTIINAMVRDNKKWDPSLIPS

SEQ ID NO: 166957 - protein, 346 aa, unidentified
MRIIGCDLHARQQTISMVDVETGEVTEKTLLHEGEEVREFYAALPKPVLVGLEATGSMFWFLRLLEELGIEYRVGHPAAIRKAETRKQKHDRRDAELIRRLLEEKRFPQIWLPTAEQRDLRTLLQHRHQLVRMRVMTQNGLQGLALSQGLRRGSKLWSQAGQQELKGLRLTGFAATRREQLQELRQELDQRLRHLDQAVSEQAEQRAGTRLLLSHPGVGPITALATEVFLGDARRFPNAKAVASYVGMIPSEHSSGGKQRNGSLSKQGNPLLRLLWVEAARAAARKDARLKQFYRKKLVQKGLGKAVVATARKLGIRLWIMMRDQIDYTEFCRRAERRCPHAGMPE

SEQ ID NO: 166958 - protein, 355 aa, unidentified
MEGELQNKKVLVRGKEVFIGVDVHKESWHVTVRAEGEEVFNGGIPSQYYALQRLFDHFKDCKVKVAYEAGPCGFWLYDKLTEDGIEAIVVPPSLIPVESGNKVKTDKRDSRKLARLLENNMLKRVYVLSEDDRADRELLRTRRQMVEHRNDVARQIKSKLLFYGIRSPFSSRHGWGRSYLQWLRGVEVPREGLRVCFESLIELYEYLTDQLMKMNQRVKELSQSLKYRQRLKLLCSVPGIGTLIGMEILVELQDMERFKRAEELASYIGLTPSEFSTGQYVRQGRITRCGNKRVRTCLVESSWVLITKDPLMRLKYNKLKAKKGAKRAIIAIARKLIIRIRRILLNNEPYVVGGC

SEQ ID NO: 166959 - protein, 344 aa, unidentified
MKLFVGLDVSLEKTAICVVSEHGKIVREAQAASEPEALTRWMGDLDGTIAAIGLEAGPLSQWLHRGLTEAGLGVVLMETRQVKGALKAMPIKTDRRDAEGIARLLHLGWFRPVHCKSVSAQEVRAVLGARKAVQQGFITLEMSLRGLLRNFGLKVGSISRGRFEQRIRELTTGNPMLEAATEPMLRARQSLRQELAGLERRVRQLAQEDPACRRMMSMPGVSAVVALTYRSAVDDPGRFTSSKKVGPWVGLTPSRNQSGERDVSGGITRAGDVNLRRALCQAATVMTHRGRSTWLRTWAAQVARRRGSRRAMVALARRIGVILHRMWVEDADLGSDAGGGRILR

SEQ ID NO: 166960 - protein, 343 aa, unidentified
MDEYDGRQFVGIDLHRQRSVIVRQSESGEQLSAVRIVNDPVALALQLEQAGSDPEVVLEATYGWYWAVDVLQACGARVHLAHPLGVKGFRYRRVKNDVRDAADLTDLLRMGRLPEAWIAPPQTRELRELVRYRAKLVSIRSGLKAQIHAVLAKAGVLIAVSDLFGVTGRQRLAKVPLRPAYAQRIRSLLELIDILDSHEARFAALIAERLDTHTGYQAIQQVPGIGPTLAAVFVAEIGDVHRFTDPAHLCSWAGLTPTHRESDTVVHRGHITKQGSKAVRWAAIEAVQRHPTTAKIAADKHRIEARRGKNIAKVAAARKLLTLVYYGLRDGHIRALAHRQVAA

SEQ ID NO: 166961 - protein, 402 aa, unidentified
MNAVGIDVSKGKSMVAVLRPFGEIVASPFEVAHTGRELSELAGKLRKLKGETKIIMECTGNYHLPIAHTLQDAGLMVCTVHALLIHDFGNNTIRKVKTDKADAIKIANYGLTNWLELKEHTSENEIRHVLKAYNRQYNKYSKLKTMLKNNLISLLDQIFPCVNRLFTSSPRSDGSEKWIDFVSTFWHSECVCSLSEKVFTGRYQKWCRKNGYYFSEEKALDIYSSASSHIGIIPKKETVKLLVEQAVSGLRATSSALAALQQEMQSLAASLPEYDVVMQMYGVGPSLGPQLMAEIGDVRRFHSKKALVAFAGIDAPPYQSGQLNIQSRKISKRGSSSLRRTLFLVMSIFLKNSPVHEPIYQFMDKKRSEGKPYKVYMMASSNKFLRIYYAKVKAFLDSLETP

SEQ ID NO: 166962 - protein, 424 aa, unidentified
MNLTQNDRLKQVTSDTLIVGVDVGSQTHFCRAFDWRGFELSRRVFKFSNTGMGFLTFLRWTEEIMNKTEMKKVIVGCEPTGCYWLTFHKFLQDHHVQLVTVNPFTVNRSMELDDNSPEKSDLKDPKTIALLVKDGRFSTSYLPSGVYAEIREASVCRDQIMKQHVRLSNQIQGWLQKFFPEYFECYADWDSTSGLMLLREAPLPQDILKIGAGGINQIWRDAKVRAAGIKRAQTLVEAAQNSVGLEAGEAARLEIWVLVNDYILKAEQLKRLDEYLEEKVKEVPNVEKLLAIKGVGMSTVIGFIAEVGDIGRFTDPKQIQKLAGLEIVKKSSGKKKGQPRISKRGRRKLRRTMYESAKALMTWNPAFQDVFLYYRNRTKNPLGGMQAKIAVACKAIRVFYVVLQTGCDFDEEKFRKDIIRPEAA

SEQ ID NO: 166963 - protein, 432 aa, unidentified
MRGAPVKRTPERMDCVSELTFDVCCDVGMSDLHLTAGSAGASRFPRVFSIANRTEPIRSTLGEIRTLANAAGLTRVRVVVEPTGVYHKLLLRLSREAGFEPCLVNAEHVVKMRQVLFGDDGKTDRRDPQAIAAVAAQDRLIVERQLPETYELLRGWGGLYQDAEDAIIEVKNRIHSIVKSLFPDFDFGVDFLYGPSGSAIVRVFGLNPHRIAELSPSRLQQRLRVHCRILAGSVRRLSQQARTSATSTPAGARNALAEQTLRLAFEELDLHQRRRELVRGQLESLYATACAEDPRLPKPTKGVVSATMLARLVAETGPLGDFASWRQLLRLAGLNLRERQSGKYRGLTKIARKGRPQLRRILNIMALPLVCSGKLYGLWYEKKTDIQKMPGKKAMTAVSRKLVKMIWGWYRSEAAFDPLRVFHCQSEYQKAA

SEQ ID NO: 166964 - protein, 250 aa, unidentified
MKNYEEVVGIDVSKKTLDAYCHQAQVHKVFVNDVIGYKSLLKWVLKVTKDSKVFYCFENTGYYSLKLALYLDSQSVVYVEESPLKIKRCSGIVKEKTDRIDAILIARYAWLYREELKPSTVKSMSHLELGRLLALRDQLVRNNAGLKGTLKEMKVLLSSSSTDVGCLSLKRSIDYLEKQVKSIETRIKDILASDASMNKNYELLTSLKGVGLVVACQLIYHTGNFTRFASWRAFSSYCGTAPFKHESGTN

SEQ ID NO: 166965 - protein, 348 aa, unidentified
MDKITRIGVDLAKNLIVVHGVDSMEHVAVRKAISRQKFLEWFANLEPCLVAMEACSAAHYWGRKLRALGHEVRLIAPQFAAAYRKGGKHVKNDRLDAEAICEAASRPHMRFVALKTADQQNVLVLHRMRSGFVEERTALVNRLRAELFEFGVFLPQGIEAFRDHFVEALQDGTTELDGLARTALLAGWHHIHALDEQIAWCDSQIAARVKHDTNAQRLMAIVGIGPLTASAAVATVGDARVFRNGRQFSAWLGSVPKQASSGGKTRLGHITKQGNTYLRTLLFQGARSALTSAHRRTDRLSRWIVQLHARVGWYRTLVAIVNKHARILWAILAKGERFDPSYTPIRPS

SEQ ID NO: 166966 - protein, 388 aa, unidentified
MRPISQTTTQKLSHRQRDDATLYASLELSQATWLVTSLSPGSEKMSKYSTPGGDGATLLGLLRRLQVRAEQITGGPVDIVVIQEAGLDGFWVHRLLNANGIESHVVDPASIAVPRRRRRAKTDAIDGETLLRTLLAWQRGEPRVCAMVVPPTPEQEDRRRTSRERAVLLQERVRHVNRIKGLLAGQGITDYEPLHKDRRAHLAALKTGDGQPLPLRLKAELLREIELIELLIRQIAEVEVERDTAVELDAEGNQSPVALLARLKAIGPQIAAVLYLEGLYRSFANRREVAAYAGLVPTPWRSGTIDREQGISKAGNRRLRHIMIELAWLWVRHQPDSALSRWFRARVGTERGRIRRVAIVALARKLLIALWHYVTHGEVPEGAVLKAA

SEQ ID NO: 166967 - protein, 356 aa, unidentified
MSRDVKYIGMDVHKEAIVIAVVNDGGKLTMESIIETQASSLLQFIHGLRGELHVTWEEGTWAAWLYDLLKPHVHQMVVCDPRRNALLKEGNKSDKVDARKLADLLRTGMLRPVYHGEHGLRTLRELGRSYQTISQDLNRVMNRVKALYRGWSIPCAGTQVYAPRYREEWLGKIEHVGVRRRAELLYQQLDGLQALRRTLRPELLAESRKHRAAKLLRQIPCIGPIRAARLIALMQTPHRFRSKRQLWTYSGLGIETHDSAQYRFVGGQLQRAKKPQQVRGLNQNHNHEMKEIFKGAATRASCGVGPLRDFYVGLLDKGMKPEMARLTLARKIAAIALTLWKTEARFHAKELKPQDA

SEQ ID NO: 166968 - protein, 370 aa, unidentified
MKKKVLYVGLDVHKKTTDVAIAPGRSNGKVRSYGKIDSTLDALNKLIKKLEDGDKELRFVYEAGPCGYQIYRHLDAKGIECSVVAPSLIPRRSGDRIKTDRRDAVNLARLFRAGELTSIYVPTVEDEAMRDLVRCRDDMKRFERKARQRLLSFLLRHGYQYSGKRNWTKGFYNWLATVKFTHSAQQVTLQEYIEAANECSERIKRITEQIQVHVEEWSRARFVKAYQALRGVSLIVSTTVAAEIGDMRRFPTPKQLMAYLGLIPSEHSSGKTVRRGPITKTGNSHVRRALIEAAWTYKMQARVSTILVKRQQGLPKSVCDISWKAQTRLCARYRRLMARGKTKQTVITAIARELSAFIWAIDKEMQVAHE

SEQ ID NO: 166969 - protein, 366 aa, unidentified
MGMLAERADHVIGVDTHRDSHAAAAIAARSGAVNATTTIAADAFGYKRLLRFARKHAAGRRVWAIESSGSFGSGLTSFLLAHGEWVVEVDRPKRPARRNGAKSDELDAIRAAHEALQREHLAQPRARGEREAIRVLLITRRGAIRARTKAINHLKALVVTAREELRHQLRNTPTDELVFRCARLRTLPSHSPEHRATVLALRHTARRILALEAEANDLETEIEQLVKDTVPQLLDEVGIGAITGAQIYCSWSHRGRLRSDGAFAMLGGAAPIPASSGQTVRYRLNRAGDRDLNCALHTIVLTRLQHDPATRAYAARRTAEGKTPREIKRCLKRYVARSLYRLLESTGPHPVTARRPARSRTLGHCS

SEQ ID NO: 166970 - protein, 312 aa, unidentified
MNKTLCGIDISKDWLDAHIEPAGTASRFANDAAGIADLAAWCQANDVELVVMEASGGYERLAFLLLWEMGQPCGMANARSVRYFAEAMGHLEKTDRIDAAVIARYGQVKRLQPTPPPSVAQQRLKALVARLSQVTGDLTIQKQRRSAARDAETIISLDEVIALLKRQSRRLEGEIASLIDDDPLWACLDQAFRSLKGVASRTVARLMAELPEIGILSNKAIAKLAGLAPIANDSGKRSGRRSVRGGREGPRSILFLVARTVARYDPHLGAFHLRLQKAGKEKMVIRIALARKLLVILNAKARDARIDFANAT

SEQ ID NO: 166971 - protein, 340 aa, unidentified
MRQLYVASDLHGNNNLLGIIDGEGKRIFKKKLPNDPLLINDILKPFKEEIVGIVVESTYNWYWLVDALMEEGYKVHLANPAAIQQYSGLKHTDDKHDAFWLAEMLRLGILPEGYIYPKEERPVRDLLRKRGHLVKLRTSLILSLENIISRNFGRKLPVNDVKGLRKDHVTPLFEGKEDLALAGKVSKETIDFLTHQIRQIEGVVEKRVTLKEQYRNLLTLHGVGKILGLTIMLETGPIGRFETVGDYTSYCRKVPSQWISNGKRKGSGNRKNGNKYLSWAYAEASDFARRFHPESRAYYNRKMQQSNPAVAHSALSHKLARAAYYIMRDQVTFRPEKLFG

SEQ ID NO: 166972 - protein, 339 aa, unidentified
MKVSTLGIDLAKNVFQLHGVGCNGQTVLKKKLTRDKFLPFLMQLEPCLIGMEACASSHHFARVLRQYGHEVKLIPPQYVKPYVKTNKTDAADAEAICEAVARPNMRFVQIKTAEQQAILVLHTERNILIRERTACANSMRAILAEFGIIMPRTLSQLYKKIPEILEEYDNELSPFVRCSVARQLEHLQGVEDQITLIEQELSRWAKTQPACQRVMKVPGVGLMTATYLVASVGNGQQFHSAKQFAAWLGLVPREFSSGGKQRLGRISKRGDRYFRYLLVHGARAVAAVIERHKDNMPWLYRLLNKKAYNVAVVAQANKTARILWSMLVHHTEYRTLSVV

SEQ ID NO: 166973 - protein, 389 aa, unidentified
MLCVGIDVAKRKHDCCIIDSDALKTVESFTFPNSREGFDMLLSKISELGIPKDKIRVGLEATGHYSSNLAHFISEHDLPLNIFNPLLTNRYKQGFSLRKTKTDKVDACAIAQMIVSGKASQTYSPLLYHNEELKSLSRYRSQTIQKCSKLKISVSRLVTILFPELEGLTSSIHLASIYALLKAYPGHEQIAHCSMKQLTRLLSDASQGRFDKSKALEIHQAACRSIGTVSLSASMELVHAITDIEVLKQHVAEIDEKIKEMVDQEESSIIDIPGIGYTLCASILGEIGDFKRFPDVDKLLAYAGMSPSKYESGGFHSNHNKMEKRGSPYLRKTLFVAARLVAQNVPKFKEYLEKKLSEHKPYKVALSHVAKKLIRLIYRLGVSRCPYLA

SEQ ID NO: 166974 - protein, 370 aa, unidentified
MSSITYIGLDVHTTNYTICSFNGYDGNYFGEVTVKPEYQQIEKYVKRLRKQYEPGHRFLCGYEAGYLGYSLFHELESVGIECVILAPSTMCDTKTNRQIKTDPRDAKNIANCLAYGLYSAVHVPTEQDDAVKEYMRMRDSAGAEFKAIKQQILAFCVRHGKRFDGRSTWTKQHEDWLNKQDFGNPILQNAFWEYLRRYYHAQEMQEIYDTQIAEYAQMEEYRQKVNELRCLIGIETHTALALITEVSDFRRFGKADQFAAYLGLIPGEHSSAEKTKRLGITKTGNKHLRRLLVEAAQHYGRGAVGRKSVSLKKKQAGNRREVIAYADRCNTRLRRKFYRIASHSPRNVAKTAAARELACFVWGIMTEHIA

SEQ ID NO: 166975 - protein, 388 aa, unidentified
MSRIWAGIDSGKSHHHGLAVDADGKTLLSRRVANDEPELLKLIGDVLDLADGRRVTWAIDMTGGEPALLLALLLNHGQEVRYIPGRLVNRASDGYRGEGKTDARDAYVIADQARMRRDLRPVRPGDEAAIELKLLTGRRADLVEDRTRAVNRLRGTLLSMFPALERALDMTNTGPLRLLTGYQTPAAIRRTGVTRLTKWLANRKVRGARSLAETAVDAAERQHTAVPGEKTIARLLHTLAEEVMALNEQIAEIDKLIEGRFHDHELADIVESVPGIGPILGAEFLASISGSLDDFASPDALAAFAGLAPAPKDSGKVSGNLHRPVAYHRRLQRVFYTSALVSIRCDPNSRKFYVQAVLALAHRRVNVLWALIRDRRCYQVTPPVTTPA

SEQ ID NO: 166976 - protein, 471 aa, unidentified
MPAGQQVEVDEHEQIVERVAAIDVAKASGMVCTRVPHPDVAGKRVTTVWQVGAATNQILELAEQLAGQGIERVVVESTSDYWRPFVYLLEARGLVVWLVNAHQVKHLPGRPKTDKLDAVWLAKLNERGMLRPSFVPPAEIRQLRDYTRLRADLTHERSRHKQRLEKLLEDALIKLSSVATDIFGVSGRAMLEALIQGERDPEALAGLARGRLRVKHAALVAALTGRFDEHHAFVARMLLDQIDALGGQIERLTTRIEQTIAAIPAASPPAPDPGGGHGAAAGDAIGPARSVPGPIEQVDPQTGEVLAAALPVVDRLDEVAGIGRLAAQVIIAEVGLDMAQFPTPGQLVSWARLSPRTIQSGATRRAGATGHGNPYLKAALGEAATAAAKTDTFLGERYRRLVKRIGKLKALVAIARSILVIVWHLLADPTARFHDLGADYYANRIDTTRKTRNLVRQLEALGHKVTLQPAA

SEQ ID NO: 166977 - protein, 408 aa, unidentified
MARYYLGVDWADQSHQLYVSDESGRKIRELEVQQTADGLAELGRWLEESRGQGIELWAAIEKPEGRVVDFLLDHGVVVYPVNPKALDRARDRFRMSPSKSDGLDAYVLAEFLRTDHAHLRALEPNSAEGQELKMLTRDHQRLGRQKTRLLNQIGITLKEYYPVPLEVFESLDTKIALDFLKAYPTPQPLSKLTRRGWKRFAKRDHHLSEARCSELWDKLNKPQLAVPTHVVRAKAKLLAALVMQLEASVKAVDSYSQEVQSFFAAMPAAEIAKTLPGGKSGTTVASIWAELGDAPKRWNSFRHLQAEGGAVPVTKASGKSRMVQFRFACNKHLRQAMYWFSFNSLQRSEWAKKYYRNQRAKGHSKHESLRALGAKWLKIIFVMWRDHKPYDENYHLANIARQMMRQAA

SEQ ID NO: 166978 - protein, 339 aa, unidentified
MRTLYAGIDLHSNNNVVVVTDEEDAVVYRKRLRNELGDVLNVLSPFEQNLAGVVVESTYNWYWLVDGLMAEGYGVHLANTGAIQQYSGLKYGDDESDARWLATLLHLGILPEGYIYPKEERPVRDLLRKRAYLVRQRTSNLLSIKNLFARNTGRHLSANGVKRLTEAEVDEMLPDADLALAVKSSVAVMHCIDVQIKTLEKVVLNRVHLREDFQRLLTVPGIGSILGLTIMLETGDISRFPTVGDFASYARCVGSAHISNGKKKGKGNTKNGNKYLGWAFIEAATFAARYDETIQRYYQRKKVKAHLMVAKKAVAHKLARACYCMLRDQTDFDVHKAFT

SEQ ID NO: 166979 - protein, 371 aa, unidentified
MEANTYVGLDIHRKSIVAIALDARGETLAEAKIGPSTTELTDFLRALPGDKRVVMEPCTIWEPLYEALEKEGVETILTNPLRTRLIADATIKTDRVDARALATLLRLEAIPRVHVPDAEGRALRHLVRERYFYRRKAASMMNHTYAQLLRRGISYPDRVLRTISGRTRMRTLGFPDVTRAIDTIEYLREKTKELDREVHAAYLRMPEAQWLKTIPGVGELAAVTLAAFLCPIERFPTIDRLSSYVGLAPSTHQSGEFCYQGKLKWDSNELLQWLLIELSWTHRQKAPRGTVAKLGTRVSRRRGKGKGTVAAAHKLLKIIYAILKEKRAYRPHALERPAAMQVVRDPSGSPQWQCVRGTALGSIAADRLVAR

SEQ ID NO: 166980 - protein, 338 aa, unidentified
MVFKRISVDTSKAVFTVHGIDEADRAVLRGDYSRGRFERWIASVAPTEFALEACGGSHYWGRVLKAHGHHVRLIPPQYVKPFVKRGKNDRADAAAISEAAGRPGMSFVPVKSAERQAQAMVLRIRERLVQQRTQLANALRGHATEFGVVVARGTSRLPELVTQVRSRSLAPALAVRELERLLRCVEMLDVEIAEVDAELKKVAAEHEVAKRLMGVPGIGPIGAMTLALDVDATQFETGRHLSAWLGLVPQERSSGGKQRLGKISKAGNERIRQLLVLGATAVIRHAKPGSRLASAWLNQLLQRKPRKLAAVALANKMARMVWALMTHGTVYRPNTAMA

SEQ ID NO: 166981 - protein, 355 aa, unidentified
MSQEKYIGMDVHAATISAAVKNAEGKLLMECVLETKAATILEFIQGLRGTLALTFEEGTMAAWLHDLLKPHVSRLVVCDPRKNALMRDGNQNDRVDARNLAELLRTNQVKAVYHGKHGIRTLKELGRSYLTLTKDCTRVMNRIKSVYRSWAIPCAGTSVYSRRHRAEWLAKLMEPGVRIRAEHLYQQLDSLEPVRQAARRELLRESRKHAPVKLLRQIPSIGPIRSALLVALLQTPHRFRTKRQLWAYSGFAVQTYDSGEYRFVRGKLQRNRERITVRGLNHNHNHDLKNLLKGAAVSAIERPGPLQDFYAALVEKGMRPSMARLTLARKIASITLTMWKKGVSFDPKQLQRQAV

SEQ ID NO: 166982 - protein, 368 aa, unidentified
MRHCTYIGLDVHKDSIHVAIAETSPTYEVRHYGTIGGDLVSLDRVVRRLRSKSSELKFVYEAGPCGYGIWRHLHQQGFECIVVAPSKTPKKPGERVKTDRRDAITLARLHRAGELEGIYVPLPEDEAIRDLTRAREDAKIAEKKAKQRLNAFLLRHGMSYSGSSKWTLAHRRWLSDQSFPHPAQQIAFQEYIDSFEQCEARVKRLTEQIETLSPEWRLYPVVEAFQAMRGVSLINAVTLVAELGDIRRFDHPRELMGYLGLVPSEHSSGQSTRRGGITKTGNGHARRALIQGAWTYRHPARVGRQLRDRRERLPKAISEIGWNAQLRLCQRYRRMRARGKPAQVVITAIAREMAGFLWDIARQVPVTA

SEQ ID NO: 166983 - protein, 338 aa, unidentified
MELYTGIDLHSSNSFVGIVDETGKRAYKKKVPNDSGVILDTLAPFKNDIVGIVVESTYNWLVDLLMAEGYTLHLANPTAIQKYSGLKYSDDQHDAFWLADMLRLGILPEGYIYPKEDRPVRDLLRKRSHLVKLRTSLVVSLQNIINRNNGFKLKGNKIKTLTIDHVAPFLEANEDLALAGKVSKDSIDFLTRQIRAIEANVEGKVELREPYTQLLTIQGVGKILGLTIMLETGPIGRFDKVGNYVSYCRKVSSKWISNDKGKGKGNKKNGNKYLAWAFSEAAELARRFHPEARAYYNRKMKKTNFMIAHAALAHKLARAAYYIMRDQISFMPEKLFES

SEQ ID NO: 166984 - protein, 390 aa, unidentified
MIYVGIDVAKDKHDCCILGPDTEELFPVFTIRNNSDGYGELFHKIESVSKDKSQIKIGLEATGHYSYNILGSLLDHGYHTFVINPLHTNLYRKGQSLRKTKTDKVDARSIAEMLVTDKTLKPYTGTSYHSEELKSLTRYRFELVKERAKMKTSVSRLVNILFPELESLVPTLHMNSVYRLLQELPGAYFIASSNLTHLKALLADASKGHYGREKAIEIRETAKSSIGSLMPAKSMELRQTIRRIDTLTSDIKEVEQSIQKIMDECGSPITTIPGIKYRMGAMILAEIGDFTRFSNADQVLAYAGLSPSTYQSGQLISSYARMEKRGSKYLRYALFNAAIYASVWDERFRLYLSKKRAEGKHYYVAISHVVKKLVRTIFRMEITHTSYQPL

SEQ ID NO: 166985 - protein, 352 aa, unidentified
MQQFIGCDAHKKYSVFRAINEEGRLGPAVRISHDREQFRSYLAQLPPAASIAVESSGHWYWLIEEMERAGHQPRLTNASEAKRRMGKTKKTDKLDAGGLAILLRNGTLPEVWIPPADLRDQRELLRLRMFLSALRTQVKNRIHGTLGRYNLQIEVADLFGVEGRLRLGQRLDELPEETRRSVERELATQDFLELQMEEIEKSLHHVMQAIPEANLLRTLPAVGPILSAVMALEIGDVSRFPAAENLASYAGLVPRVHSSGGRTRMGQVGGDVNRTLKWAFVEAANLIVMQQRRLADTHVLRLYRRIRARKNHQKAAVAVARHLAEAAYWVLRKREAYREPPARKPAVASTHG

SEQ ID NO: 166986 - protein, 351 aa, unidentified
MSRNLSNTITVVGIDIGKNTFHVVGQADRGAIVLRQKWSRGQVEARFANMPSCLIGMEACVGAHHLSRKLKALGHDARLMPAKYVRPYSKGHKNDFRDAEAIAEAVQRPTMKFVATKTADQLDLQALHRVRERLVSQRTGIINQIRAFLLERGIAVRQGSALLRSQLPRILASPPEVLSPRMANIIAGLAEDWRRLDARIECLSDEIAALAREDIGCQRLMSIPGVGPIISSAMVAAIGTGEAFSKGRDFAAWLGLVPRQISTGDRTVLGKISKRGNRYLRTLFVQAAWVALLKVKPNRWEGHGLKHWIEAAKKRLHHNVLAVAMANKLARIAWSVLARGRTFEASKIQVA

SEQ ID NO: 166987 - protein, 483 aa, unidentified
MKSKPRDKTNKTTNHPTQRHWHEMNRKQRREMTRQIQSEDLSLEVVHPDAAGIDIGNELHYVAVPLSRDTQPVRRFGCTTAELKAMADWLKQCRIRTVAMQSTGVYWIAVFDILEEAGLEVYLVNARDTKNLPGRKSDVQESQWLMKLHTYGLLRNSFRPSQEIRTMRTYWRQRNDLVQSAGWHIQRMQKAMTQMNIQLANVLSDVSGVTGQAIIKAILAGERDPHKLAEFRDPRVKASEEQVAQSLEGNWQQDLLFVLKQEQDGYEFCQKQMAECDRQLNQYLEHREDRSHGASLPEEKRKGRLKKKRPNKPRFDLREGLFRMTGTDLTRIDSIDVMTATTVLSETGYDMSKWETENHFVSWLRLCPDNRISGDKLIGKGRLPTNNRATIALKMAASTLRQSDTYLGAQFRRFRTKLGAPCAIKAMAAKLARLVYRMLRYDMKYVDQGAAFYELRHRQLQIKHLRAKAEKLGYRVTPIPAAA

SEQ ID NO: 166988 - protein, 408 aa, unidentified
MQVVYPICSGIDVHAKMLVACLRDNGQRETRTFSTMTDDLLRLRYWLVKSQCTHAAIESTGVYWKPVFNILEGSLEVVLVNPLHVKAISGHKTDVRDAERLADLLAHDLVRPSFIPPPEIRQLRELTRYREGLVREQASVNNRVIKVLESGNIKLAQVASDALGASGRAMIAALVRGETNTAKLAELACGKLKRKNTELRRALDGLLTDAQRFVLKEQLRRIEELEAALAQINEQIDQTCQSHPKFAHCRALLQTIPGIGQRVAEIIIAEIGVEVEANFPTDKHLASWCGLCPGNNASGGKRKSGRTRDGNTYLRSALVQAAWAAQRAKNTYLSAQYRRLAKRINKKKAAIAVAHSLIVIVYYVLVRDRSYQDLGGDYFDRQHVEQQRAYLLRRLEALGCRVIVEQNA

SEQ ID NO: 166989 - protein, 391 aa, unidentified
MICVGIDIAKDKHDCCILDSDGTVRADCFTIPNNMDGFKQLLQTIRNCTKKSGKIKVGLEATGHYSYNILGFLLDNGLPTYVINPLHTNLYRKSLSLRKTKTDRVDARTIATMLLSDVDLKSYTDIAYHNEELKSLTRYRFEKVRERAKLKQSVSRLVTILFPELEKLVPSLHGASVYALLSEYPGAKQISEVHLTKLTNLLVTASKGHYGKEKATLIRETARASIGSVMPAKSLELKHTIKLIQELTSEINEIEDSIQKIIDELNPPILSIPGMGVNSAAVILAEIGDFSNFSSPDKILAYAGCSPSTYQSGKLTNCYAHMEKRGSRYLRHALYNATKYVCYWNPVFAEYLAKKRAEGKHYNVALSHAMKKLVRLIYALQKSGKAYLAAA

SEQ ID NO: 166990 - protein, 352 aa, unidentified
MKISILGIDIAKTVFVLVGLDENGHEVLKKKLSRSQLKQTLMNLPPCKVAMESCGSSHYWGRQIEAMGHAVVLVPPQYVKPFVRTNKNDTNDARAICEAALRPSTPTVPVKTEKAQDIQSLHRARQLLIGCRTATINHLRGILLEYGILLGKSPKKVKEEASRLVEDPETGLSPSLRNTLRTMVSELSSLEEKLADFDSWIEALAKMHPVCKRLMSVPGVGPLTATVLLAFVGDATRFRNGRHFAAYLGLVPKQHSSGGKNVLLGISKRGDTYLRTLLIHGGRTMVRSAMKTAASKQEPKGRNAWILSLLERRGYNRTAVAVANKNARILWVLLTHEDAVYSTIGSKTRAAS

SEQ ID NO: 166991 - protein, 349 aa, unidentified
MAMTIVETTRSITGGVDTHLDVHVAAAVDANGGVLGVESFATTPAGYRELCSWLETFGNPGRVGVEGTGAYGAGLARHLRRRGLVVIEVDRPNRQERRRNGKSDELDAIEAARAALSGRASGIAKSADGDVEAIRALLVARRSGRNVRVKYLNQIRHLSFTAPDELRERLRDVPVDHLAATAAALRPRVDGDSVTYATKLAIAILGRRVLALDDDGKRLDQALDTLVRRRAPSLLEVYGVGTHTAAILLVTAGDNPHRLKNEAAFAHLCGVAPLPASSGKTQARFRLNPGGDRQANHALWRIVFTRMSGDERTRKYVARRLAEGRSKPEIIRILKRYVAREVYQHLGRD

SEQ ID NO: 166992 - protein, 339 aa, unidentified
MVHVGVDLHKRSSQLAVLMPDGEVTQQRLENDPTQLERFFAQVPRGARVAIEASGTWWWFVDRVERLGHHAILSNPKQTKAIAAARLKNDRVDAERLALLLRGDLLPTVWIPPAELREARELVRHRVSLVWVRTEIKNRLLALLSRRNLQPTSSKRWLTVRGRRELEGLPLGAMPSTVREDCLALLRVLDEQIRHLDHELVQRWGDDPRVQRLRTIPGVGPFTAILLILELGEIQRFPSAKHLASYVGLTPRVRASANRVRMGHISKEGNRLLRWALVVAATQAARRPGPLRAWFRAVQQRKGMKIARVALARRLAEIVYQIWKQDMDFVMLVRGGVRR

SEQ ID NO: 166993 - protein, 356 aa, unidentified
METSEAIQSVIGIDLGDRYSYLHELDLQTGETLSKTRLPTSPETFGNHFKSISSARIALEVGAHSPWSSRLLQNLGHQVIVANPHTLALIHSSNRKRDELDAEKLARLARLDPQLLSPIRHRSLQAHADRTRLKVREALVRSRTSLIIHTRNMLKAFGIQLLKCATTCFHKRVLEHLPEQLKPAVTPLLESLKVLSRQIYEMEKDIEKLSKARYPETVRLRQVVGVGPLLSLAFVLTLDDPSQFTKSRDVGAYLGLVPKQRQSGERDPALGISKQGDKLLRTLLVQAVQYQLARHGPDCDLKRFGLKLIEKGGPKSRNRAVIAVARKLAVLLHRLWTTGEVYDPFYNSNHHLTHAA

SEQ ID NO: 166994 - protein, 424 aa, unidentified
MENKIIVGIDVAKEFSYYSIITPNGKQYGKPFKAHNTLEGLEKVSKKLKEVEKELNVPCVLVMESTGHYSSILFHFFHNSNFEVCIVNPIQTNSIKNIKVRKVKNDKVDAYRIAILYKLGEIKPTKPPKKEIHQLNILCRQYIKLVDDCTMYKNNLISLIDQVYPEYNTAFSNITSKASLYILENYPSAEKLLNADKDTLITILATLSRKSLKWAKTKYNALIDVAKSALKIGCAPKSSEIVIKSAITILKTLIKQKSMIEKEIKAIAKNIEEIKLLTTIPGIGIISAAIFISEIRDFNNFKNARKLVAFCGIDPAVVESGKFKGNKVKMSKRGSGYLRRVLFMIALASIRKNRNSQYVNPILYNYYSIKIKSKPKKVALVAIMHKIVNYIFAVLRDKKPFRIITPEEHNKSYRQSKLKLTLVS

SEQ ID NO: 166995 - protein, 307 aa, unidentified
MATSVGIDVSKHTLDWCPGPSGKIQQTKNEPRCIASLVRRVAAIEPQRIIVESTGGYERKLVLKLAEANLPVIVVNPRRVRSFGEGMGMLAKTDAIDAKLLALYGEKVQPPIRPVLQGRDRLLADLVARRRQLIAAVVSEKNRRETAPRPVQRSIASVLRVLDREIKRIDQEIDQIIEADADRSELSELLQTVPGVGPGVTRTLVVDLPELGHLGRREIAALVGIAPFAKDSGQYRGRRSIRGGRASVRTALYLAAMTAARFNPSMKVLYQRLRESGKPPKLAFIAVARKLLVALNAIARERRAWQP

SEQ ID NO: 166996 - protein, 351 aa, unidentified
MQIVGALDVHRRQITFKTLALASGESSRGRISPAAREPLRQWLERFDGLEGEFVLEGTTGWRFVVEEIERAGHVARLADPAETASRRGRKRRAKTDDVDCDLQLRLLLAGELPEAWIPPVQILELRTRVRLRKTLIDQRTAWLQRLQAQLFHQGVPPGLKPGTAAGRDALASVELSPAGREAVELCLRMLDQLDCELVPIDRALRAFARRQPGCRALIGQLYGVGAATATAILAELGDARRFRSSDDAVRHCGLDITVWQSDRKRAAGHLSHQGPSLLRWALFEAAQCAARRTSPDHAYYLDVAKRIDHNRACLSVARKLCRRAHHILRELGDDALAPSEPPRAKLVDAAA

SEQ ID NO: 166997 - protein, 412 aa, unidentified
MHYKQKHVYVGLDLHKAHHTAVIIDCWNTKLDEIQIENKPSSFDDLMKAVKKHCKKGMTPVYGLEDTGGNGRALAVHLVEKKQIVKEVNSALSYNERKSYATTQKSDSWDAYCIAKVLLSRLDELPDANPQDIYWTIGQLVARRNALVKHASSLKNQLHQQLSYHYPSYKKFFCDIDGKAALAFWEKYPAPHHLEAVGADELATYLRKASHNTCSTRKAEEILELVKKDGETKRKFQTSRDFIIVNMVQDMKRSRELIKQTEEQLRQVLSETDYKLESMDGISTVTAAELIAEIGDIRRFSNADKLARFAGIAPVRFSSGGKGKDQASGQGNRVLNAIFHNLAVQQIQVAKGDNKKQRNPLFYDYYHRKLAEGKTKKQALICVMRRLVNIIYSMMKNKTEYRAANLIERQAS

SEQ ID NO: 166998 - protein, 363 aa, unidentified
MTSMSVMTPGVTGGIDTHGQTHHAAVLDHVGRQLGDREFPTTPAGYRQLLAWLRGHGPLERVGVEGTGTYGAALARHLGSHSVPVVEVDRPDRKARRAKGKSDPLDAYSAARAALSGTAAGAPKAQDGPVEAIRALRVVRCGAIKARTQAMNQLKALLVTAPAELREQLRPLTTTALIATCARLRPTSELTDPEQATKTALRRLAQRHQHLSEEIVEADTELRTLVSAAAPRLLALPGVGIEVAGQILTTAGDNPHRLRSEAAFAHLCGVAPIPASSGRTHRHRLNRGGDRAANNALYIVVLGRLRYDLRTRRYADRRTTEGLSKPEIIRCLKRYVAREIYNQLATHTADDRPTTPPSMSRAA

SEQ ID NO: 166999 - protein, 342 aa, unidentified
MSERYEGRQYVGMDLHRRRSVLVRMSETGERLGMVRIVNDRDRLAAVMAQAGEAPEVVLEATYGWYWAADTLAELGAIVHLAHPLGVKAFSYRRVKNDERDAADLADLLRMGRLPEAWIASPAVRELRELVRHRAKLVHLRSGVRCQVHAVLANYGVPVPFSDLFGVEGAKLLERATLPPAARARLDSLLRVIDVFDVEVDAAAKASAAQLVGHSGYRAVQSLPGVGPILGGVFVAEIGDITRFPGPMQLSSWAGLTPKHHESDTTVHRGRITKQGSRLVRWAAVEAVQRVGKHTRIGAYRDRVADRRGRNIGVVAAARELVECVYYALRDGTVRRTLTAAA

SEQ ID NO: 167000 - protein, 317 aa, unidentified
MAQKSRLVGIDVAKGKIDAAIRSGAEAAFANSVEGHRELLAWLQEHGVGKAVMEASGGYERKWMGLLRQAGIEVVIVEPKRVRHFAKSAGRQAKNDAIDARMIAWFGEVFDDLESQAGDVEREELDHLVTTRLAVMQLRDQVDNWTEHERPKAVQKIHQALLKTIQAQLDTLQQLIAGRIARTERFARRAEIIRSMPGVGEASTAGVIAFLPELGRVDRQVAAALLGVAPFDDDSGTRRGERHIQGGRRKLRTLLFMPILAAATRHNPVLKAYYQRLIARGKKAKVALTACMRKMIGILNTMLARGEKWDPTKHAIA

SEQ ID NO: 167001 - protein, 464 aa, unidentified
MKKNGQKKQVKARKKRSKKVNLDSLPLIHFNAAGIDIGSEEHWVAVPKDRDEEPVRKFGCFTSDIHAMAEWLKKCDIDTVVMESTGVYWIPLFQILETQGFDVKLVNARHVKNVPGRKTDVLDCQWLQQLHTFGLLSGSFRPEDSICVLRSYWRHRDNLIRYAAAHIQHMQKALIEMNLHLHKVISNLTGVTGMRIIQAIIAGERDHLRLAQMRDPRTKNSTETIAKSLEGDYRQEHLFALKQAFELYCTYQQQIEACDREIEAYLSQLDSKCDPDPAKRYKSSKSKNDPSFDLGAHLYRISGVDFTKIDGLDVLTVHTILTEAGLNPEAFGTEKRFASWLGLCSENRITGGRIISNKTRKVVNRASKAFRMAANSLKNSQSALGGYFRRMRARKGSPKAITATAHKLSRIFFHLWKTGDTYQDLGADYYEKKYKERVIENMKKRAKKLGFEITLQPLTGLQVS

SEQ ID NO: 167002 - protein, 422 aa, unidentified
MSYCPVAGIDVSKQFSDMCILSPDNKIFAQEKIYHDETSINRANALLQKAERLFFSKPVIVMESTSHYHLILFQFFSEHGYDVIVVNPLQSNSMKDFSIRKRKTDRVDAFKLAMMYRTKTLRPSQIPQTATRALRQLCRHRAELLNDVSSYKNRLTALLDQTFPGYDKVFSDVGGVTSRAVLVRFPTPTILLVEEESELVDVIAAASKFGYSFAKKKAGLLISAAQKAQAWGIHSCADETLIVCTIQMLRTLSESVLQIETAIDNLLAQIKEMRNNISLLQSIPGIGSHSAALLPGEIGDISLFKKPKQLAAYFGLDPTERQSGSFRGTKNKLSKRGSPYARAALHMGVVNSICKRGKDSAANPVLLSYYEKKCKNKPAKVAQAASMHKLVFIVFAVLRDQKPFELKTPEQHAVEQGFVKAA

SEQ ID NO: 167003 - protein, 322 aa, unidentified
MDTQARVTQVIYAGIDVSKASLDVDTYPVSATKQFPNDDAGRTAVCAYLKSLSVCLIVVEATGGLESPLVALAASKGLAIAVVNPRQARDFAKAIGVLAKTDKVDALVLARFAEAVKPPVRALKPEEVLKLDAILTRRRQLIEMITAEGNRQASAAPKIAKQIDQHIGWLAKRLKEADDDLDNSIRSSPLWQHKAEIMQSIPGVGRVTTTSLLADVPEIGTLNRREISALIGVCPYSRDSGKSRGRRSIWGGRANVRAVLYMASLVAMRHNPVIRAFYLKLVAAGKPKKVAIVACMRKLLVTINAMIKADTPWNPKTVAVSA

SEQ ID NO: 167004 - protein, 391 aa, unidentified
MSMYFVGIDISKYKHDCCIISAADQQIVSKFTVKNDKDGFEHLLTTLNSLSNPEDIKIGFESTAHYALNLELFLENAHHSLMEVNPVLIKEYKKSTTLRRTKTDSVDCESIARWLMTVEYKPHSKGFYHSYSLKSLTRLRDRLIRQRSFYLVKITNVLDHTFPEFKPFFNERLSKTAIYLLENYGSAEKMAHMNSASYDKLRCASRGKFSIQQFLRLKELAANTVGVNNSIFDIELNSLLTLYNSLCKEIKTLEAEITKLIEEVHPHYMSIPGIGPISAAVIYAEYGDISNFSNPGQMLAFAGIEPGINDSGTESHGGRMVKHGSSQLRYVLLNACLPLIRFDITFATYYAKKRAEGKKHRVAITHVAKKLIRVIYALERQDVDFNVKKLR

SEQ ID NO: 167005 - protein, 308 aa, unidentified
MTTIHAGLDIAKLNLQLHLAGRLHDLPNTATGHRRLLKLLATQPGVHVVCEATGGYERDVAAALHEAGVPVSVLNPARVRHFARATGQRAKTDDIDAAVLSAYGQALQPNPTAPRTELEQQLAELVRRRVQVLEILVAQRPQAERLTLPALRRQAQSLVRRLERDIAQIENQLQKLRTQATTLDERVQKLEAITGVGTITALGVLAELPELGTLNRRQAAALAGLAPHPRESGQWHGRRSIGGGRAPVRRALYMAALVAARSNRQLKEFYQRLRAAGKPAKVARTAVMRKLIVLMNHLLKNPNFALQN

SEQ ID NO: 167006 - protein, 351 aa, unidentified
MPHKLNSGIAVIGIDIGKNSFHVVGHDKRGAILLRQKWSRGQVEARLANLPPCLIGMEACVGAHHLSRKLQMLGHDARLMSAKYVRPYSKGQKNDFRDAEAITEAVQRPTMKFVATKTTEQLDLQALHRVRERLVSQRTGIINQIRAFLLERGVAVRQGLRFLRAELPRILAAPCDALSPRILRVIEDLAGDWRRLDERIEGLSNEIEALARQDKGCERLMTVPGIGPIISSAMVAAIGTGDAFSKGRDFGAWLGLVPKQISTGDRTILGSISKRGNRYLRALFVQAAWVVLVKVGPKHWERYGLKSWIEAAMKRLHHNVLAVALANKLARIAWSVLAHGRTFETSKIQAA

SEQ ID NO: 167007 - protein, 415 aa, unidentified
MRTGEKARKIERYIALDIHKEYVLAGGMNAAQEWTLPPRRIAMGKFREWSTANLREGDAVVLETTTNVWDIYDIVAPLASRTVVAHAGAVRQIAEARVKTDKEDVKRLIRLLIADIVPEVWVPPTHVRELRGMISYRNRLVKTGTMVRNRLHSLLHRHNLSLPEEGLANQEWWDRQALSALEKIQIHQEIALLQQINQHKAEVDAELGRQCLGEVWGKSAMRLLQLSGFGVIITMTILSAIGDIFRFESSNKLVGYSGLGAGVHDSGKEHIEKRITKSGRKELRWAMVEAAWCAIRISPYWKEQYEKYLRRMRKPNQAIVVIARKLLVAVWHVLTKEETDAHASEEDLAYKMLVLAWDLDEDVRMGLTYKQFAKYALLKLGVENDITRFVRKDVPRRLAPREEVLARMAELGIPA

SEQ ID NO: 167008 - protein, 428 aa, unidentified
MKPHTGQSQPNQIANAENMVAIGIDWADRENAFHAFDAEGNEWADAFEQTPEAIDDWVASLRERWPGVTFHVCIEQSKGALISALLMHDCFRIFPINPTQLANYRKAMNHGGSKNDPNDARLLAQFLLHYGDQLRPLQPADQTTRKLAILVEDRRRIVDQRTAVALELKAILKQYFPLVLQLVRSNVYAQFICRLLLKWPTLEKLQAARPATLRNFFYGQNLRGDHVEEKLERIAQAKPLTTDRAILETYARRVQRLVRLLLVDAGAIAGYDREIKTLLEKHIDFQIVASLPGAAVQMRSRIIAALGTDRQRFASAKSLQSFSGIAPVTSQSGNTRIVSHRWAAPKFVKQTFHEYASLSITKSAWAKAYYQLMLSRNKKPQMAKRALAFKWQRIIFRCWQDGVPYDESRYIARLRMKNSPLLAFMDTK

SEQ ID NO: 167009 - protein, 410 aa, unidentified
MELLHRRCCGLDVHKETVVGCLRLVSDAKVTTEVRTFQTTTADLLRLSEWLAANECTHVVMEATGVYWKPVWHILDDGEFALVLANAAHVKNVPGRKTDVNDAMWLAELLAHGLIRASFVPDTQTQEMRNLLRTRKQLVREQTSHVLRVQKTLEDANIKLDSVLTDLMGKTGRAMLEALIAGETNPAKLASLADRRVKASPEEFREALRGRVRKHHRFLLRLHLNQIDALDAAMATLDTQVDANLGPFRTAIEQIISIPGIKNLGAQVIVSEIGIDMSRFASAAHLLSWTCICPRNDESAGKRRSNRMRKGGTWLKTTLVQCAWAAVRKKDSYLQAQFYRIKARRGPKKAIMAVVASILTAIYHMLKDGTMYKDLGSNHFDRRSTDQQKKRLVKRLADLGYAVEIKPLAA

SEQ ID NO: 167010 - protein, 334 aa, unidentified
MNIVSTVGIDLAKNVFSVHGVDAGGVVMIRRTVSRPKLAQLIAQLPPCLIGMEACSGAHEWARRFAVFGHSVKLMAPKFVAPYRKGGKNDGNDAEAICEAVARPNMRFVPIKSIEQQAELTLHRVRQGFVEERTAMLNRIRGLLAEFGHVLPLRATEVRRRVPKLLETLPTRVAGCVRDLLEHAVRLETKALEYEREIRAHVRTNALAQRAQTRLGIGPITASALVATVGNAHDFKNGRQFAAWLGLVPRQYSTGGKRRLGHITKRGDPYLRTLLVMGARAVLHGALRLNDPLSRWALALQQRRGYHRACIAIAAKNARIAWALLAKDTVIVAA

SEQ ID NO: 167011 - protein, 319 aa, unidentified
MSNKNYGGIDVAKQNVVIGIFGYPKTKTEANNPNGHTNTVEYLKKHNFNLVVLESTGGLEVPLANALYAAGMRVVIANPQRTHKYAESFSLGKTDHLDAKMLADYAQALDARKKVDDILYVPPSAEIQELEALVKRRSQLVEMRKMEKNRLEQTHASQKASVAALIAHLGELIVALDKDIDRYNKRGFNGKGTILSEMKGVGNTTCATLLSMMPELGKVAHKRAAALAGVVPLSHQSGDKEKKTGCIGGRKIVRNALYMAALTATRFEPKIKEFYERLMNRGKPFKVAINACMHKLLRILNARMRDYLASLEQTEESGP

SEQ ID NO: 167012 - protein, 386 aa, unidentified
MIVIGADTHKGSHALAAVDDGTGKVRGSRQIKAEEPGHLAAVRWARELDEERVWAIEDCRSCSRRLEQALLAAGERVVRVPPNRMGASRKGEREPGKSDEIDALAVARAVVKDGVERFPVAYLNEQAMEIRLLVEHRNDLVAERTRTVNRLRWHLLELSPELEASLKRKALNQPRTLDRVERQLRKLPAGARVRIAREQISHLRGLNRDIERLAAELAELVTAHRPRLLAEQGCGALTAAILIGHTAGNERFRSEAAFALQTGTAPIPCSSGKRTQHRLNRGGDRQLNHALHIIAVTRAQHDPATKEYLARKEAEGKTKKGALHSLKRHLARRFHQLLSEPPADQQPTPEPAPIIEPKLPSIPDRPKPRREVEQIAAAPSPMVCIS

SEQ ID NO: 167013 - protein, 349 aa, unidentified
MSPKLNAGIAVIGIDIGKNWFHVVGLDRRGAIVLRQKWSRGQVATRLATMPPCLIGMEACVGAHHLSRKLTSLGHDARLMPAKYVRPYSRGQKNDFRDAEAIAEAVQRPTMKFVATKTAEQLDLQALHRVRERLVSQRTGIINQIRAFLLERGVAVRQGLRFLRAELPRILAASCDGLSPRMVRVLEDLACDWRRLDERIERLSSEIEVLARQDAGCERLMSVPGIGPIVSSAMVAAIGSGDAFTKGRDFAAWLGLVPKQISTGDRTILGKISKRGNRYLRVLFVQAAWVVLIRPQSWDRHGLKPWLEAAKKRLHHNVLAIALANKLARIAWSVLARGRAFEASKIQVA

SEQ ID NO: 167014 - protein, 399 aa, unidentified
MTESSDYESVQVFIGVDVGKDTHHAVAVNRSGNRLFDKALPNDENKLRSLISDLKQHGQILLVVDQPATIGALPVAVARSEGILVGYLPGLAMRRIADLHAGEAKTDARDAAIIAEAARTLPHALRTLKLADEQIAELSMLCGFDDDLAAQTTQASNRIRGLLTQIHPALERVLGPRLDHPAVLDLLQQYPSPEKLASLGEKKLATQLCKLAPRLGKRLAADITQALTEQTVVVPGTNAAAVVLPRLALQLITLRKQRDEVALEVEQRVLAHPLYPVLTSMPGVGVRTAARLLTEVACRAFASAAHLAAYAGLAPVTRRSGSSIRGEHPSRRGNKTLKRALFLSAFAALRDPISRAYYTRKMSQGKRHNQALIALARRRCDVLFAMMRDGTFYTPTASE

SEQ ID NO: 167015 - protein, 367 aa, unidentified
MKKVSTTARKQIRNFSEQKLTIGLDLGDRWSYYCVLDEAGRIVVEEKVATTPKALQARSGAVPRSRIALGTGMHSPWVSRTLSELGHEVIVAHARNVRLIGESRKKDDRLDAQTLARLARIDPELLCPVKHRSAKAQADLSVIRARAGLVRARTALVNTARGLAKSYGERLRGCNVRNMNPDKAEGLSPELQAALGPLLTAIESVSEQIREYNQRIEALAQQSYPQVALLKQVKGVGTLIALTFLLTLEDPQRFRKSRDVGCDLGLQPGRRNSGQSEPQMHSSKEGDPYLRTLLVQGAQHILGPFGPDCDLRRWGLKLAERGGKSGKKRAIIATARKLAVLLHHLGVSGEVYEPLHNSGGVAMPAAA

SEQ ID NO: 167016 - protein, 343 aa, unidentified
MQAITTIGLDIAKSVFQVHGVDAGGQVVLRRQLKRRYVLAFFGKLAPCLVGIEACASSHYWARRLQALGHNVRLMPPAYVKPYVKRQKNDSTDAEAICEAVSRANMRFVPTKTPEQQSGLVLHRTRHLFIRQQTSVINAIRAHCAEFGIVAPVGRRGVEELLNVIANAKDEQVPAIARACVVALGAQLHRVKQQILEFDRMITAWHRCCDTSRRLDEIPGVGPALATALVASVANPRAFRSGRDFSAWIGLVPKQNSSGGKPKLGSISKQGDRYLRGLFTAGALAVIRYAKIHGTRHRPWLTALLARRPIKVAAIALANKIARMAWAMMTRGEHYREPIALAA

SEQ ID NO: 167017 - protein, 306 aa, unidentified
MILGVDVAKDNLVTSDPYGKVRTIVNNENAVAELLSALDPVATIAMEATGQYHKLLADTAFSQGFRVIVFNPKDVLYYAKSTSPRAKTDRVDAKIIANYALARPDYLPYRPTSEIAKRLLSLGRTRASVVKKRTSLENELRECPEISEYLKPAIDGLRASIAKLDKELSALAAKLPEHALMAGTPGVGTLVGAYTLGMLLSGTFTRSDSFVGFIGLDIRIRQSGKKIGKSCISKRGDPEARRLLFLAARAAARKPGPFQDLYERYQSNGLSKTAATVAVARKIARTLWAIYTKKQPYRPERVLAQG

SEQ ID NO: 167018 - protein, 427 aa, unidentified
MYRIAGIDVHKKKLAVVVSDVEVHGEYQFERCWFGANPEQLRFLSQWLAEHQVEEVVMESTALYWKPVWGALERYWQPICQKREGAGATSGILHLAQAQSNRGPRGRKKDFRDAERLVKRLVADELKLSFVPDWEQRLWRTLTRRRYQLTRARVQLQNQLEALLEEAHLKLSSLVSDLLGVSARRMLQAIADGETTPEALAGLADRRLRATPAQLSDALGACTELHAVYRRLIKMMLGELKVIEEHTAELNQELATLLRPHQDAVERLAEVPGLGVDSAQQILAEVGTNAAVFASDKNLCSWVGVCPGDEESAGESSSHRSPQGNRQMRRLLNQAANAAVKSKGSIFEIVYRRLVPRLGHNQTIGAVAHRLCRLIWLILRKGVRYEERGPAVSQRSRQNRTSKMIRELRTLGYRVEFLNAVPSNPMP

SEQ ID NO: 167019 - protein, 382 aa, unidentified
MSSSQSTTTAVRSIIYLGMDVHKESITIAVLPATAKVPTRVERLPNDLAKLKRFVDRLAKDGELRICYEASGAGYVLHRALTEWGYSCDVIAPSLIPKRPGVQRKHDKRDAKDLARLYRAGELTPVHIPSEAEERVRDVVRCRETFQREILKSRHYILKFLARRGFVFREGTNWCTPHLKWLQQLTTEHSPLAAADRLVFREYHALLQYKLQRRDDLDREIERLAALPTLAPMVQRLQCFRGIALQGAMVLATEIVDWRRFARPTQLAAYLGLVSREDSSGDRERKGSITKAGNSHCRHVLIQAAWSYHYRPALSADLKRRQTGQPPGVIAHSWKAQRRLHERYNHLAYRKQPQIAVVAVARELVGFLWATMQDLEPSTISA

SEQ ID NO: 167020 - protein, 315 aa, unidentified
MTVCLAQNVGVDISKDFLDIAFFPPAESWRFSNDHKGFRALLKRLGTRVIERIVYEPTGAYHRLFERTLAEAHMPLVKVNPRQARRFAQASGKLAKTDPCDAAMLARMGAALQLEPHCVVSNAVDALEELQIARDALVKDRVAALNRKKTARSELIKTQLGERLRQIDAQIKEIEREQKKLRNADPALRQNFDILDSVPSLGAVTANALLAEMPELGHLGEEQASALVGLAPIAEESGKHKGKRTIGGGRARVRQALYMPALNAIKPNGIFHKKFMAMIDAGKPAKVAITAIMRKMLILANALIRDQRKWTPTPP

SEQ ID NO: 167021 - protein, 401 aa, unidentified
MPESITAGIDWGGTVHRVAVVDASGRQVANFAVSHDVAGLAELDKRLASYGEDLPVAIERAEGLLVEHLQALGLQVYPVSPRIAARIRERYRVAPIKDDAFDAFTLADALRHEQPRWRPLAEPSPLLAELRALTRDRERIVAEHVRVQNQLHAILESYHPAAARLFSSLDRRVTLTFVRDYPTPVEAARVGERRMARFLARNGYTGRVAPAVLAERLHANLLAAAPGTVAGKSFAACHHADLLEQLTRTREAYDERIARLLAEHPDGELFRSFPGVGPVLAATLLAEIGEDRGRFPEAAMLLAEAGLAPVTRQSGKTRRVRFRRAASHRLRQAFTWWAFNSLTESPWARQVYEENRARGQRYYRALRGLSARWGRVLYRCWQDGACYEVARHPGALKLIEA

SEQ ID NO: 167022 - protein, 429 aa, unidentified
MTATHSTLTTVLVAIDISKHRHEVLIGIPGKKRRRRMTITNTLEDFQRLSAALTSYDLPVRIGFEATGNYHRALAHHLGQAGFDLKLVSSVGLARTREALHNSWDKNDPKDAQVILHMLEIGAVQFFHDPLVTGTADIQELSKTHEIVSRSKTELWHRILTHYLPLYFPEAERFHRSSRTDWFLAFLEKYPSPHMIKAMDREAFVADAWQVVGRKVSKERMLSDIYDTAVESVGLPVHPDSDAVRMFRLVLAEGRSLIRQRDEIEARAVELLSDLPDYQLLTTIPGIGPINAMTILAEAGDLRRFRHHRQFLKFCGMDLATTQSGMFRGQSRISKYGNARLRRTLWMAGQTAVLKRTNSFRDKFERYISKDRHNAHLRRKAYTAIAAKMARTVHAVVNHGAPYRPFFEGVSPGGRTSLCSSRGGSSLTS

SEQ ID NO: 167023 - protein, 308 aa, unidentified
MAKFVEKITLGIDVAKDKHDIYNWQTGELTVLVNERSEIKAWLRSFHGPVQIAIESTSHYHLIMVEEAHALGYEVYLVNPHHLAHYRQAVNVRNKTDPLDAWLLARYLEHEGAQLRPFKPQGPKAQRLWQLILRRASVVKSRQQLRQSLANIRLPIKALLTEFQQLLLRIDRQVIVLIKQLNWWPDYLYCLSIPGIGPGNATALVAAYHRGDFVSSDAFISYLGLDIRIRESGYFKGKRKLTKRGEPELRRLLFCASHPARQYHRFDEYYQKQLDKGLSKIAARVILSRKLARIAFTLMRNEEMFMKH

SEQ ID NO: 167024 - protein, 412 aa, unidentified
MEVLYACCCGIDVHAKMLVACAIKGGKKEVRTFSTMTAELLCLLDWLTQAGCTHVAIESTGVYWRPVFNILEGAMEVILTNARDAKGYKARKTDVIDAEWLADLLRHGLLKPSFIPPLPIRELRDLTRYRESLVRERTALANRIQKLIESANIKLGQVASDALGVSGKLMLRALAAGETDAEQMSHLAQRTLKRKQPQLQQALEGRFTPAQRWILGQLLDQYEHVETALQSAEERIGQEIENSADPFVAEAVPLLDTIPGVGETVAQIIVAEIGVDMDRLPTANHLASWAGMCPGNNESAGKRKSGKTTKGSRDLRAALVQAAWAASHQKETYRAAQYKRLVKRMGKKKALVAVGHSILVIAYHVLQTRRPYQELGGEYFERRNVDKQRKRLLRQLESLGVKVTIEEVQEAA

SEQ ID NO: 167025 - protein, 329 aa, unidentified
MGNMVWVGVDVGKAEFSAAVAPSDESVRAVRTLPVNTFAFTTAGLSEFVSWVKRQRGDGAVAGVCIESTGRLGWRWMKALKQTSWPVAMVNPSYTKAFGESLGVRDKTDELDARVLAVYGAVMSPEPTTMRSPRMVDLRESNRLFSSLSRDKQSYDKRLLDGPDSAFVRRELRQTIRGLERRMQSVQKHMDELIAQDAKLKNDAECITSIIGVGPRTVCVLFAELGDLRTYRRNELVSFVGLYPRKHESGSSVHRKPRLVKRGGAPVRKALYLCAMSARTHNPQMRRLYERHVKNGVSPMAALGILMRKLLLLARTLLIQQTKYDPQYA

SEQ ID NO: 167026 - protein, 344 aa, unidentified
MDHFAGLDVSVKETSICIVDDAGKIVREVKVASEPEALLAVLKNLAYHFKRIGLEAGPLSQWLFSALAEAGLPVICVETRHMQAVLKAQINKTDRNDARGIAQMMRAGLYRPVHVKTIRSQKLRMLLTHRKLLQSKAIAIENDLRGTLRNFGLKVGVVGKVKFEARIKELVENLPDLAVLVEPMLIVRRTLREQIVILHRRLLAIVRDDEVCRRLMTTPGVGPVVALTYRATVDVPARFRKSKAVGAVFGLTCAKYQSGEVDRNGRISRCGDEMMRVMLYEAAQSMLRSKKWSWLKAWAMQIARRRGMKKAIVALARRLAVIMHRIWVDGTEFRWTREQATAAA

SEQ ID NO: 167027 - protein, 343 aa, unidentified
MRKITTVGLDLAKSVFQVHGADSDGRPVVRKKLRRGQVLGFFAGLSPCLLGLEACASAHYWARELHALGHDVRLIPPQYVKPFVKTNKNDASDAEAICEALVRPTMRFAAVKSAEQQSVLMLHRARELLVRQRTMLINALRGHCGEFGIVIAQGASKVTALIEMIEDPEDNRLPALACAALGSLVGQLRMVQAQIVGLEKKLMTWHRANEASRRLATIPGVGVITATALVATIGDASQFHSGRQLAVWLGLVPRQYSSGGKERLGRISKRGDGYIRRLLVLGARADLRWSRHRKERRSLWQESLLARRPTNVVLVAMANKTARVVWAMLRRGETFRTEAPAAT

SEQ ID NO: 167028 - protein, 408 aa, unidentified
MEVIHERCCGLDVHKKKVVACVMTPEGKEVRTFGTMTQDLLGLAGWINDWRVTHVAMESTGVYWKPVYNLLEGDFSLVLGNANHIKNVPGRKTDVKDAEWIADLLRHGLIRGSFVPERWQRELRELLRYRTSLTQEATREANRVQKVLEGANIKLGDVASDVLGASGRAMIEAIAQGVDDPKALADLAKGRLRDKLPALEKALQGLIGPHQRMIIHCQLRHLTFLDEEIARLDREVAERMIPFDESIQQIDDVPGIGTRTAQAILGEIGMDMSRFPTASHLASWAGVSPGNNVSAGKRKRGRTTRGNRWLRSALVQAARAAVRTSGTYLNAQYHRLAARRGDKRAIIAVAHSILTIIYNMLHNKTRYEDLGVQYFDKRTSQSLIRRTVQRLERMGYTVTIAEKEPVFS

SEQ ID NO: 167029 - protein, 347 aa, unidentified
MRLYTTQHPFYCGIDLHARTMYVCILDQAGETLLHRNMTATPEALLKAIAPYHDQIVLAAECMFTWYWLADFCAEHGIPFVLGHALYMKAIHGGKAKNDKIDAHKIAVLLRGGMLPQAYVYPAEMRATRDLLRRRMHLARKRGELLAHVQNTNSQYNLPAIGKKIAYKANRDGVAERFADPAVQKSIEVDLALITYYDALLRDVELTIVKTAKHHDANTLYLLQTVPGIGKILSLVLLYEIHDIARFPRVQDFASYCRLVKCARESAGKRSGTSGAKIGNAHLKWAFSEAAVLFLRDNPAGQQLLTRLEKKHSKGKALTILAHKLARAVYYMLKRQTAFDLETFLQA

SEQ ID NO: 167030 - protein, 415 aa, unidentified
MLCVGDDWAGDHHDVELVDAAGHRLARVRLPEGLEGITRLHELIAAHLPDEWADLAPAEAAARVRVGIETERGPWVQALVAAGYQVFPINPVQVARYRQRHSTCGAKSDAGDAHVLAEIVRLDHAHHRRLAGDSTDAEAVKLVARTHQSLIWDRSRHLLRLRSALREFFPAALHAFDDLHAPDALELLGRAPDPDRAAALTRAQITAALQRANRRDIDAKAARIQQLLRDDALRQPAPIQAAYAAIVTVQVPLIATLNAQIDQLGQVVATHFGRHGDAERYLSLPGIGVVLGARILGEFGDDPNRYRDAKARKNYAGTSPITRASGNRRVVIARYARNRRLGDAVHQWAFCSLRGSPGAHAYYKTLRERGIGHQAALRQLGNRLVGILHGCLKTATTYDETTAWAHHQEDLEATT

SEQ ID NO: 167031 - protein, 345 aa, unidentified
MKKGITIGMDLGDKKHQVCILDKTGKIIAEEEVTGTRAAVTQFFKQYREAVVAMETGTHSRWVSQIAEAEGLNVLVGNARKLRMIWQSRQKSDTRDAVMLARIARMDPALLYPIRHRGEQVQMDLEIIRARDLLVRERTRMVTHVRSVVKSMGERLSPSSAASFGHKAKIPEALNETMKPMLEMIRELTKKIRGYDLMIKEAATEKYPATERLSQVGGVGPLTALAYVLTLEEPQRFAKSRMVGAYLGLVPRLDQSGQTDKQLRITKHGDGYLRRLLVGSANYILGPFGPDCDLRTFGLKLMQRGGKNAKKRAVVALARKLAVLLHALWRSGQQYEPKRKQPLAA

SEQ ID NO: 167032 - protein, 334 aa, unidentified
MKYIGLDIHKKDTQASVLDEKGKFVHGERIRTDVKDIGHFFEKIERMNDDDLSVVIEATGFYFWIYDVIVERGHQAKVVHPTRVKPLMRARTKNDRNDALMLAELLRMGCLEGIYVPDREVREMRELTRHRESLVRKKGDLKREIISALDQRGVKVPEEHRTNFSQKYNDWLRSLNDMIVSDKLDILELVIGKIKGIEQVIEERYGEDEDVKLMMTVPGVGLVTAAVIKAEIGDIARFSSPEKLAAYVGVSPTTYQSGEKEWGGPTRRGNNRAKHVLIEATLFHYHFCRDSKISSYYERKRDSIGRKKAVVASSRKLLEAMYFMVTRKESFHAH

SEQ ID NO: 167033 - protein, 347 aa, unidentified
MKHYAGIDVSLNSSSVCVVDESGKIVREVKVASEPVALIHCIKSLGVRVERIGLEAGPLSQWLYGALRESGLPVELLETRHVKAALSAMPVKTDRNDARGLAQLMRLGWFRPVHCKSMAAQEVRALLTARKLVQSKLYDIEMSLRGILRGFGLKVGPTTSRSFAARINHLAAGHPSLEMVAEALLSTHAAALCAFKNLEKNVRQISRADARVRLLMSTPGVGPVVALTYVSAIDDPKRFTSSKPVGAHFGLTPKKYQSGETDISGRISKIGDSSVRAVLYEAAHIILTRPIHGGALKSWAMRLAKRAGMKKAKVALARKLAVVLHRMWVSASTFDFEKANGCTRAAA

SEQ ID NO: 167034 - protein, 432 aa, unidentified
MAEPPQQEMLMEQAFEWFVGIDWGSDAHQVCVLDHAGRTRWERQVTHRADEVHALVAWLVKETACDPSRIAIAIETPRGALVDTLIERGFPVFAINPKQLDRFRDRFTVAGAKDDRRDALVAATSLRTDPQAFHRVLVDDPLIVQLRELSRLTEDLGRDQRRLANQLREQVYRIHPALLTLCAGADEPWFWTLIEQAATPAERARLTATGITRILRTNRIRRLTADLVLTAVRTPSFYTAPGVVEAARLLIHSLVERLRVTTAQQRRCAVEIEARLEQLRTREDSTGQPAEHRDIEILESLPGVGRFVTATMLTGASRPLADRDYHTLRTTMGIAPVTERSGKRRPFVKMRYACNRRLRQAAYHWGRVSIQKDKASRTYYDQLRARGHSHARALRSVVDRWLRILMAMLTHRTLYDSTRSGHAVSPDVVPAS

SEQ ID NO: 167035 - protein, 414 aa, unidentified
MNDLKRNFAVCVGLDWADKKHDVCVQIKDVEKREYHVIQHSPEAIEQWLFDLHKRVKGNIAVVLETNKGPIVYALQKYSFVTVFPIHGLTLARYREAMYPSGAKDDPSDAHLALDMMLNYPNKVKPLRPSSPDTRKLNHLVEQRRMLVEDKRRCTNRLIAALKQYYPQPLEWFSHRNTEMFCDFLIKWPSLQQIKRTRVSTIEKFFKSYGGKSVSNVAKRIEGINNALALTEDEAVIMPHKLLVVALCKQIITQVENIRVFDNAIHELFHQMPDAELFTSLPGTGPCLAPRLLGALGEDRTRFNSALEIQNYAGLSPVTERSGQSEWVHWRWQCSTFIRQSFIEWAEKSVHQSYWAGLYYANQKAKGKSHNQAVRALAYKWARIVFKCWKTKTPYDESKYLKALKERNSPLLAA

SEQ ID NO: 167036 - protein, 374 aa, unidentified
MEQAITYVGLDVHKDTIAVAIAETGRRGEVREHGKIANTPTALKGLVSRLTRSGAALQFCYEAGPCGYRIQRQLTAAGHGCVVVAPSLIPRKPGDRIKTDRRDATNLAKLHRAGELTPVWVPDPAHEAVRDLLRARLAAVRGLRQARQQLSGFLLRHGHHYNRPAWTLIHRRWLAGLKFEQAVHHIVLEDCIAAVEAATARRDRLEAYIKAALPEWSLAPVVQALQALRGMALVAAATLVAELGDITRFANPRQLMAYLGLVPSEHSSGGTRRQGRITKAGNGAARRMLIEAAWSYRFPARISRELLLRQEGLARSIRDTAWKAQERLCRRYRKLARAGKPPKVVTTAIARELTGFVWAIAYQVESSGALIRRS

SEQ ID NO: 167037 - protein, 345 aa, unidentified
MSYYAGIDVSLEQSSVCVLDSEGKIIREAKVASEPEALIAWFGSLGLAMTRIGLEAGPLSQWLFAAMKQAGLPVELLETRHVRNAFKTMPVKTDRKDARGIAELMRMGWFRPVHCKSISAQETRAILTTRTLIEAKLRDVEMSLRGVLRGFGLKVGKTTPTNFAERIKQLVSEHSNLQVIADALLAVREVLLREFRSFEKRVRTMARHDERARLLMTTTGVGAVISLTYAAAIDDPARFKNSKQVGAHYGITPKRYQSGEIDYTGRISKIGDKSVRTALYQAAHIILTRPVKASALKSWAMQLAKRIGMAKAKVALARKLAVILHRMLVEGKPFDHKLPNQVAAA

SEQ ID NO: 167038 - protein, 430 aa, unidentified
MKSNTQNAKIEAITEKTLVLGIDVGSEMHYARAFDYRGIEYSKKPFKFSNTEAGFVTFKEWILDLKERHEKDKVIPGMEPTGHYWFNLGKFLQDNEMKPVLVNPHHVKKSKELDDNNPTKNDRKDPKVIAGLVREGRYMIPYLPDGVYADLRTASNIRFQLQAELTRIQNRISRWFNIYFPEYKTVYGKPDAKSGMLILKAAPLPEDILTLGIDGVNQIWRDAKLRAVGKARAKTLIEAAEHSVGSKEGAVSARMEIRMLLEDYESRNTRLQEVMVLIEELVRKIPMAEKLLEIKGVGIRTVSGFLAEVGDISRFNNPKELQKLAGLALVENSSGKHKGETTISRRGRKRLRYLLFEVAMSLVSKNQEFRELHNYYTTRRLNPLKKMQSLMAIAAKLIRVFYAMLTKGVDYDPKKMVSDIKRPAVYLQAA

SEQ ID NO: 167039 - protein, 326 aa, unidentified
MQGKVSSERTAMATVYVGIDVCKEWLDIHLHPLGRSFRVTNDTAGLRRLKRELDALDQMPRSALHIVMEATGKWHRAVQRSLHADGFYVSVVDPAQVRAYAHAIGRRAKTDPIDAAVIAAFVLATKPEIRPLRDAETQALSELVARRRQIVQMVVAEENRLRMALAKQAQKSIKRLLKALRRELESFDADLDSHIRKSPVWRVREALLTSVPGVGATTARTLLAELPELGSLDRRQIASLAGLAPWTRQSGKWKGKSFIGGGRGKVRAVLFMAALVASRYNPDLKAFRDRLVAAGKPKIVATVATMRKLLTILNAIIRDGRPWQNA

SEQ ID NO: 167040 - protein, 333 aa, unidentified
MNEHAVGIDVSKKKLDICVASGDKIKTKVLRNTPAGHAELDDWLKQRGLPLTTPIVLEGTGPYSEAVAIVLADANWAVSVVNPARITGFAQSELSRNKTDKVDAKLIARFAQRAKLELWEPPSIAVRELRALVDRLQALMDMRQQELNRLEALGQGTPSSVQNMVKEHVDWLNVQIKRLQSDIDDHIDGNPELKHDADLMQSIPGIGRRASAQFLAYIGDVRRFKSAKALAAFVGVTPRQKQSGTSVKGRTVISRAGHRAARKSLYMPGLVAKRYNPVIVAMSKRLEQKGMRPKAIVGASMRRLVHMIYGVIKSGTPFQADIPLAGLEVQEGI

SEQ ID NO: 167041 - protein, 416 aa, unidentified
MDIVHRQCAGLDVHKKTVVATTLIEEELGVLYKETRTFETMTADLLALSDWLMSKGVTHVAMESTGEFWKPIFNILENNFEVLLVNARHIKQVPGRKTDVKDSEWIAELLRHGLLKASFIPPLGQRELRELTRHRTNFVRERATLINRIQKTLESGNIKLASVATNVMGVSGRAMLAAIVEGKANPSEMAELAKGRLREKREQLEKALEGHVKAHHRFVLTELLCQIDSLDESIARFDLEIEKYCRPFEEAVKLLDTIPGVAQRTAEVIVSEIGTDMSRFPTADHLAAWAGVAPGNNESAGKRHSGTTRHGNKALNTILVQAAHAASHTRNTYLSAQYHRLAGRRGKKRAIVAVAHSILVIAYNMIQRHEPYHELGGDYFDKRRPEASAKRLMKRLEQLGYDMSNVQPLTALPTAA

SEQ ID NO: 167042 - protein, 385 aa, unidentified
MANQNDLSRSLVAFEQDNTIIAVIEMSLNSWLVAGIVPGIERHPLKKLSCDEQMLLQLLYRWRDEAVKAGRMITRMVVAFEAGRDGFWLARWLRARGIEAYVIHPTSVAVSREHRRAKTDRLDTELLKRAFLGWLRGEPDHCSMAAIPSLQEEDAKRPTRERENLVGERTRIINRMKACLVRFGIRNFNPTLRRATERLNALCTPEGVSLPPNTLAELRRDMARLRFVMNQINEIEAARLQRLEQAPAEEPHAKVRLLARVIGVGLETADMLVHEILSRKLRDRRAVARYAGLTGAPDESGSKRREKGLAKAGNARVRRGMIQLAWRFLLFQKNSALSQWYRTRAESAGKKRKTMIVALARKLLIALWRLVTTGEVPAGVVLRAG

SEQ ID NO: 167043 - protein, 360 aa, unidentified
MVIMVAIDMHAKSLVCELGCGRDEPRRGTYSNNSVGHQRLIDDVTAMKQDLGSDAEVVVAYEASGLGYVLYDRIREAGYRCAVLAPTEMLRSKSGYKKKTDRKDCSYIYEAIRAHVLAGNRLPEIWVPNEQLREDREMVRARFDAGQKVTRVKVQIHTLLKKFGIQKHEDLNNWTKAFRAWLVQVGESKGAGFRIGMETLLRQLAFLEAEQKQLERAILALSREERYRDQSTELQKVPGVGLITAMTFLTEIGNMMRFENRKQVGSYLGLVPSTFESGKADDRKGRITRDGPYRVRSVLNQALWAHLRCNGQEKAVYDRIAEKNPKRKKKAVVACMRRLGIRLWHIAKDVEFSKGLRLAA

SEQ ID NO: 167044 - protein, 355 aa, unidentified
MTIVAHSYAFVVGVDTHARTHTHAILDARTGEILGCEQFPSTAGGITRALAWVLRRTGGETVLWVIEGIGTYGARLAHAVAKSGYDVAEAPRIDGRTRNGIGKSDPLDAKAIAAAALSVEDSRLRRPRQDDGTRAALRVLLAAREQLASERTMNVNALTALLRVHDLGMDARKPLTKHQIKQVARWRGRFESLISATAREEATRLAARILDVDAALKGNHARMTQLIQESPAAPLLDMTGIGAATAAVVITAWSHPGRLRSEAAFASLAGVNPIPASSGNTVRHRLNRGGDRRLNRALHVAAITRMTHHPETRAYVERRLAEGRTKREIRRCIKRYLARHLYRTLNALHAPSPAT

SEQ ID NO: 167045 - protein, 353 aa, unidentified
MKNLKYVGMDVHKAITVIAVLNEQGQLESLTKIKTKADNFRDYFRGLSGTILLVLEEGCWSAWLYQLLKPLVNLVAVCETRHNKLIGAGNKSDEQDAEILARLLRLGELKTVYKGDGQQQELRALFRAYDNLVEDATRLQNRLKSIYRGQGIDCSGHHLLRQDQRQDWLAKLPSAALRFRAESLLKELDLVQELRKEAKTRFLAECKPAADYALLLSLPGIGPVRAASLMAIVLRPERFRTKRQFWPYCGFAVVTHSSADYLEIGGRIVKQQKKAATRGLNRNHHPGLKAIFKGAALSALREQAWRAYYDGLVAHGTKPELARISVARKLAAITLAVWQRGEQYDPKKVFAPA

SEQ ID NO: 167046 - protein, 394 aa, unidentified
MKLIGIDVGKNSHHFCIMDKETGELNVTPTPFPNNKEGFDFLINSLKPYSKKSVLFGMEDTGHYHIALLKFLLNNGYTVALINPKTTDLTRKMEGGITKNDKLDTITICDVLDTPERKKQYRITKVNSFDLYEQKQLTRHHHNLKEELNVYCNRLQKSIDLVFPEFNTLFRSKYGVVYMNLLKTFGSAEVIASTDIRTIRKCFEIRGKGNRISLTPEELKECAKNSVGISSEVETIQIKHLVSQIMLIKEQIAEIDKKIEEFSIKNNSPILTIPGISHFSGTSILAELGDIGNYSKPSKIIKYAGVAPYHYESSQFNAQHTSITKKGSKYLRKTLYQIILPVINNNPVFKRYYQLKISQGKGHRCAQGHCIRKLLRIIYHLLDTGQAFEPALLR

SEQ ID NO: 167047 - protein, 435 aa, unidentified
MSKQNTAAPAASAPQSPDYAAFVGLDWGDEEHALSLCAVGTVQIERNKLEQTPEALAEWANGLRTRFGQGKIAVALEQARGALLAALCQYEHLVLFPVNPKASARFREALYPSRSKNDVADADLLLELLCKHRQHLRSWQPDTVATRQLALLTEQRRQFVDQRTALTNQLLAHIKCIFPQALEFTGEKLGARMATDFLTRWPTLQALQKVTPAKLRQFFYGHNSRSQELMTQRLELLKKAVPLTSDPALLGAHGLAIQTLAAQLAALRPFIERYDQDIAKLFADHPDAPIFESLPGAGANLGPRLLACLGTDRARFPQAVALSSYTGIAPVTEQSGKGQNWVHVRWSCPKFLRQSWHEFANASTKFSTWAGALYHEFRKRMSHHEAVRKLAYKWQRIVWRMWQQRQPYDEARYLAALEKKAAKLAPVQNAQPKTV

SEQ ID NO: 167048 - protein, 345 aa, unidentified
MVEITTIGVDIAKTVFQVHGIEASGQVAVRRQLRRAEVAKFFAGVPPCRVGMEACGTSHYWARQIGALGHKVCLLPPAHVKPYVKRGKKNDAADAAAVCEAATRPHMQFVPVKTAESQAVLMLHRTRDLLVRQRTMLICALRGHLAEFGVVAGQGKGNFAKLVACLDTGEATPLPEVARTALRLIAVQIDAANEKIAALEKEIVARHRGDAVSRRLASIPGIGPIIASVITAAVPDPSVFKSGRQFAAWLGLVPRQNSTGGKQRLGGITKAGDRSIRRLLIIGATGLIRYRRKNVPGGLDWVTGLLARKPVRLVTVALANKMARIAWAILCRGEIYREVGTVPAA

SEQ ID NO: 167049 - protein, 453 aa, unidentified
MKYNQQHKRTGKKERRASISLLERIQPDAAGIDCGEKHHFVAVPPDRDPQPVREFRTFTRELYRLADWLAQCGVNTVAMESTGVYWIPVYEILEQRGFEVVLVNARDVHNVRGRKSDVSDCEWLQQLHSVGLLRASFRPAAAIVPLRAYMRERATLVEEVSARIQRMQKALTQMNVMLHTVVSDLTGATGLKIVRSILAGERDPEILAAHRDSRCHASREEIVAALTGNYRAEHLFSLRQNFAAYQFHLQQITECDNAIEALLDTLAAAQPLPTAVLPPARRRNYPKSHEPRFDIRTPLHRLTGGADLSQIDAIGPQAALQLVAEIGTDMSRWPTAAHFTSWLTLAPNNKVSGGRLLSSRTPPSANRARGHPASLRDESRSHLKRTRRLLPAPSRACRQAESHHRHRAQACRRRLPRPVRRSHLSRPRRHRLPPAQSQPRTQIPSQTRQAAGP

SEQ ID NO: 167050 - protein, 391 aa, unidentified
MGSLASSIRWHVGSAGKWLSSPALMKNTIVHHEGVASLEVAVNKIKLSGSVIKIGLDVHARLYVAVAQYDQLLPKPARRLAPSEFVPWVKQLLRGGHTVHVVYEACGFGFNLYRELQRAGAHCYVIAPRKLDEQCTGVKTDPRDATALCQRLSRYVEGNTRELAVIRVPTEEEEQARHVSRQREQLVRHRQKLEAQGRSLLINHSLPAPAHWWKNQTWSRLSKLLPAWICLRLEAHRPALLALEQQIGMLSAELEAAAPADIPAGLGKLTTVVLTREICSWERFSNRRAISCYTGLCPGEYSSGSKRVFGSVTKRGNPRVRAALVECAWRMVRFQPNYPPVKKRLSILAKGARATGAQRKKAIVAVARHLAVDLWRVHTGRCSAQQLGLKC

SEQ ID NO: 167051 - protein, 424 aa, unidentified
MNAATTLCVGADVHLDEIVLRAVDQADGHEVVKRFRVTNNRPGAQSAAATIAQTAAQGGYAHVEIGWEATGLLWVPFHRLLSTSPVLKPFQPELVCFNPKLVANFKDGLVLRRPKNDDRDAWDIAARLRFGELPISYVPADFWQGLRRLTRYRFRLAQMLSREELRFQSYAFLKASDWKRVKPFSNILGATSVALLTEFTVAELSAMSHEALADVISRRGRKHFDDPDATARLVQEALHTSYPIDPQLDELVTLTLATLWDHIRFIKRLMKRLDCQIAQYIQPVPNPLISVKGLGAVITAGILAEVVDVKRFPTHKQVAQYVGLTWEKRSTGQSVSQTTRLTKVGNVYLRYYLVLGADKLRQFNLEYKTYYWRKYQEVPKYQHKRALVLTARKLVRLVFALLTKNTTYVRPKTLAQVQEEPLLQ

SEQ ID NO: 167052 - protein, 344 aa, unidentified
MNTIRVVGIDIAKSVFQVCVWMVDGSIAYNKKISRSKLLDCVRHFEPGTLIAMEACSTSHFWGRTFRTMGYNVRLIPAQHVKAFVRSQKNDANDALAICETALRPGIHFVPVKTAEQQDIKALRNTRQLMVEQRTALANQLRSLLAEYGLIIPVGIQCLQQHLPELMEDASNELTFTVRRLLSTLREDMQALNERVTGLDKEIAALSSQQAAYRQLLTILGVGPLIAAAFISEVDAGQFSNGRELSAWCGLVPRQHSSGGKQRLSSVTKNGNRSLRTLIIHGARSVMRCMKKRDDSLGLWLQRLEARRGFLKTTVALANKLTRIIWRVLTDGVDFNMQKAVAMN

SEQ ID NO: 167053 - protein, 387 aa, unidentified
MYYIGIDISKFKHDCAVIDDAGEVVTPSWSFANDHEGFLQFKALLDSLGAETRIGLESTGHYGTNLKLFLESCDTTFMEFNPLLINRFVKSKSLRKTKTDAIDCEMIARYLMTVEYKPYPPSFYHIEKLKSLTRFRDNLVRQRSRHLVELTNILDKVFPEFKPFFKGKFSTTALYILANYSSPEKISNMNSKSYESLRKLSRGRFSTTDFARLKLLAKNTVGHSDDFLLQEMQIVIELFSQLDSKVDETETLINECVLELNPPMLTVPGIGVESAAVILAEFGDFSKFDNPSQLLSFAGMEPGYFQSGTAESTGKMVKHGSSYLRYALMNCTQTVINYEPTFAEYYAKKRAEGKSYRVALSHTAKKLVRVIFTLQTKNLVYDPDAIR

SEQ ID NO: 167054 - protein, 336 aa, unidentified
MNKRVLVVGVDISKDDFHVCIKEKIIDSNVKIKGTRSFSNNSKGFIELMEWVSKRTLPNSSVLYIMEATGTYFENLAYYLHEKGCLVSVVLANKIMHYAKSLNLKTKTDKVDAAMIAGIGIERDFPKWKPMSKNFKELRDLCREMLSLKKERSRAKCQLHAMEYSHEKTVSVLKIKKNQIEFYENSIKEIEFEIKRIVDADSDLKARIDKIATVKGLGLITIVIVLCETNGFELFNNIRQVVSYSGLDIQMKESGNFKGKTRISKKGNVRIRQCLFMPALTATMHNEKIKSLYERINERNPDIKKKGVVAGMRKLLILIFVLWKKNEEYDPQYQWS

SEQ ID NO: 167055 - protein, 347 aa, unidentified
MDTIGLDLHKRESQLCIIAEDGSIKELRIVTSRERFTAVLGNGIPARILLEASTESEWVAQHLESLGHEVIVADPNYAMMYASRAHRVKTDRRDARALAEALRLGVFRVVHRVSAERRHVRAELAVREALVRTRTRYVSLAKSLVRRDGLRVAGSQSHLVAKRIAALDLSDALASELMPLFQVLAPINEQIDAADRRIGSLVASDPDVALLTTVPAIGPVTAAAIVATADDITRFNSAHQFEAFLGLVPGERSSGEKRRVGHITKRGNSRVRYLMVEAAWRILRSKGEETAALRSWALLIAARRGKRIAVVALARRLAGIVYAMWRDGSPYHGTKVRRPRPLLSKAG

SEQ ID NO: 167056 - protein, 390 aa, unidentified
MFYLGIDIGKFHHATALLTHEGKVVATLSSFPNTHDGFQELLTLITCHLPAGEELRIGMEATGPYWIPLAEWLKTKGWPPVVLNPIKTSSLRNYGVRGSKTDNIDSVLIANALRFEGSQPQKVSPKHSEELRHLTRLRADMVKDRTRLVLRVTSQLDRLFPELLCSFSKTTSPSCLALLAEVPTPDRVLALGEEKLTALLRKASGGKLGVARAKEILGKAASSIGVSSPALEEVLVLLLEQINLIDRQLKALDRRIADLYDQAGLFFTTIGGVGILTAATILGEFGSVDRFTKATQMVAFAGVDPKLRNSGQHQGQVHISKRGSPYLRRALYLACQGAVRTDGYFKSIFQRHRDNGKSYKEAIVAVMNRFIHVLYAVWRDNRPYSPLTPA

SEQ ID NO: 167057 - protein, 322 aa, unidentified
MNKVSKIFGIDISKDTFDVMDSDGNHYQFSNNFKHFLKFLKLLDSDSHCVMEATGYYHYQLAYFLSEHNIRVSVENPLSIKRFIQMKLSKIKTDKSDAKMICLYGQQMDMKLWKGPSANQLECLQMLSALDIYTKQGTALQNKIQSHQVLSNPSKTVVNSLKRTLKSLQKEMVLIEEQLTDLVKSDHRQTLTKLQSIPGLGRKTAIMLLVVTDGFNRFENASQLCSYTGLTPVIRQSGTSVYAKPRISKIGHAKLRSLLFMCSLTACKHNKACREIFERITNKGKSKKLALMAVCNKLLKQAFAIAKSGLEYDATYRSVLKN

SEQ ID NO: 167058 - protein, 352 aa, unidentified
MTEFIGCDMHKKYSVFVSMNEAGQAQPAVRVEHADRQAFRQYLGTLTKGSAVAVETTGTWYWLVDELEAVGLRPQLTNARTAKLLMGCRYKTDKLDAKGLATLLRNGTLPTVWIATAEVRDLRELTRTRMALSGMRTKVKNRILADFAKYGIALEGYSDVFGLGGRRLLGRSLEALPEHTRQAVEDQLMVLDAVCQRIKAIEPRIEEVIQETPMLALLRSLPGIGKILATVIGLEIGTIERFATAERLCSYSGVVPCVRSSGGRTRFAHTASDVNRYLKWAFVEAANLVVANRERWHHPSLRQLYERICRRKNHPVATMAVARQLAETAFWVLKKEQPYREPFPVRGSSSPR

SEQ ID NO: 167059 - protein, 406 aa, unidentified
MRNAGIHANSLLEVRRMYNAVGIDVSKGKSTIAVLQPGGTVIRKPFDVSHTSQNLNELADYLSSLDGTTKIVMECTGRYHEPMVKALSEAGLFVSIVNPHLIKNFGNNSLRKVKSDPADARKIARYTLDNWTELRQYSGMDNTRTQLKTLNSQFGFFMKQKVAAKANLIALLDNTYPGVNKLFDSPTREDGSEKWVDYAYSFWHADCVRKIGLKAFTERYKSFCKKHHYIFQQDKPEKLFNASKELVAVFPKEKTYKLLIQQSIQQLNLASEHVERLRREMNELASTLPEYSTVMGIYGVGKTYGPQLIAEIGDVSRFTHREALTAFAGVDPGVDESGQHKSKSNRASKVGSVRLRKTLFQIMTTLLQNAPEADPVYRFLDKKRSQGKPYYVYMTAGGPMSRFSTS

SEQ ID NO: 167060 - protein, 385 aa, unidentified
MANQNDLSRSLVALEQNNTIIAVIEMSLNYWLIAGIVPGVDRHPLKKLNVDEKALLQLLRQWRDEAAKAGHVITRMAVAFEAGRDGFWLARWLRARGVDAHVIHPTSVAVPREHRRAKTDRLDTELLKRAFLGWLRGEPEHCRMAAIPSLQEEDAKRPTRERENLVGERTRIINRTKACLVRFGIRNFKPTLRKAPERLNQLCTPEGDPLPPNTLAELRRDMARLRFIIDQINEIEAARLLRLEQARVEGPTAMVRLLARVIGVGIETADMLVHEILSRDLRDRRAVARYAGLTGAPDESGSKRREKGLAKAGNARVRRGMIQLAWRFLLHQKDSALTQWYRARTASAGRKRKTMIVALARKLLIALWRLATTGEVPTRVVLRAA

SEQ ID NO: 167061 - protein, 338 aa, unidentified
MNYYGAADVHSNNTCLGIIDETGKKVFRKKVLNYPKLIVNELEPFKPELKGMVVESTFNWYWIVDTMMEAGYKVHLANPAAVKQYEGLKHTNDFDDAYHLANLFRLGILPEGYIYPKEQRAVRDLLRKRLMLVRHRTAHTLSFQSLYCRQTGFQLRGSDVQRFRDHELEEISSLEHVQLAGQANILTMRFLASLINDIEKRILRLMTPQPQFMKLKTITGIGDILGLTIALETGDITRFPKVGNYASYCRMVSSQHLSNDKKKGQGNRKNGNKYLCWAFIEAANFATRFCPHAKRFHQRKLVKTKNVVATKALAHKLARAAYFVMRDQVDYDPIKLFG

SEQ ID NO: 167062 - protein, 425 aa, unidentified
MNEDVYYERCAGIDVHKKFLVVCLRIGRKTEVRNFGTLTHEIREMVAWLKANGCQMAAMESSGSYWKPIYNIFEQEDLPVMVCNAYHIKNVPGRKTDVNDAQWIAKCLSQGLLNPSFVPDREQRELRDMTRFRKSQIEERARNINRLQKFLEGANIKVGSWLSDVEGKSATLLLELVIGKPDFTIDDVTTCMHKNMKSTPEELFRSLEGYMTPTQREFFAHIMTVIRQQTAQIERTDAMIQRSLNDNYKAAVEALDAIPGIGKTSAEQIVAETGTDMSHFTNQHSLSKWAGVCPGNNESAGKRKSGKTPPGNKTLKTTLVQCAKSAKKNKNSFFNAQYNRLVTHRGKNRATMAVAHSLLIAIYFVLCGNQFKDLGADYYTQFNREKKINSHFKQLSKLGVTIPDDIWQDALRHPPDPPEQLGRSA

SEQ ID NO: 167063 - protein, 397 aa, unidentified
MMGVNVKSPNVANATNSRTGRLFVGVDVHKDNHAAMALDCFGDVLENWEIGNEYGDFVSLVDEIEKVAGKKDLVPVFGLEDTYGAGDFLAKYLFGKGHEIKTVNPVLVKRERDFETHPEKSDLADAKGVAKVLIQRIDTLPHYNVTKTIEISRDMGNLVKDRETIVFEQTILKNQLHRILHQSWGSAYRSVFKDVFSKQALIFWSDFPSAIECKKSHKRVVKPDWIRKTDYEELPQTSGITQNQVRRKTKRILAIREELKEIETELKQLLEQTGQKLETLPGCGTTLASVVISEIKDVRRFKTPAQLAKYAGLAPRSYESGKKKRHIKSKSGNRRLNRAIYQIALTQISNQGIEKAKEYFQKKIGESKSKKHALTCLKRQIIDIIWSMLKEKRGYYP

SEQ ID NO: 167064 - protein, 514 aa, unidentified
MSEGTAQPPFSRLCPRLLRKHSAWLIRHIPLTQKFHPQPLAPARMADWVHAHYARVRSPYAAQDKPFASDFTNPYRNGGDIMVKINYMSTLFVGIDVSSKTNSVYAMDFEENKYLSTSFGNNQPGADELVNRIAACMQKHKNLDTLLIVLESTSVYSVHISNFLASSEVLMPYKPYVFCVNPKTTANYRKSYIGMEKTDPTDAYLIADFGRVGRTKKLEPWRGGQFIALKRLTRHRMHLSECITREKTYMVSNLYLKFSELQLLEGDDKPFGNLYGATSSAVLTEFLSPQEIIDMPEEDLLAFLAQKSRNRISDLSKTSELLRKAARDSYRLDKCMYEPLNISLASSFNCIQAYQKEIRLIEQAIDKCIKGMNTNALIILQSIPGIGPVWASGILSEIGDITAFHSSDALAKYAGLYWPKGDSGDFISEDNQMSKAGNPYLRYYLGEAANSVRKHIPEYADFYARKYAEVTKHQHKRALALTSRKFVRLVFGLLAKNQLYTGEKLDAEYNIEPN

SEQ ID NO: 167065 - protein, 405 aa, unidentified
MSYTIAGIDVHKKLLVVVIVDAAEPDVPLQSRRFGTGSGELHHLSAWLGHYDVKEAVMESTAQYWKPVWMELEPHMKLHLAQAQSNKARKGRKSDLVDTKRLLRRFAAGELMLSFIPEPEQRAWRMVTRGRLQLVRERVQLQNQIESLLEEGRIKLSSVITDLLGVSGRRILRAMAAGEASPEALAALGDQHLKCGLPVLVDALTGAMGAIHCKLLTQHLDRIDLIDQQIGELNKLAAAQMRTYQDAVTRLIEVPGIGAEAAQEIIAEIGPEAAAFPSAEQLASWIGVCPGSNESAGRNHSGRSAKGNRFMRRLLCQAAQAAARTNGSHLQVVFKRLVVRLGYVKAVWAIAHRLCKIVWNILHKNARFVEFSEARSPKAVKRAITHHLKALRRLGYQIPVSPAQA

SEQ ID NO: 167066 - protein, 369 aa, unidentified
MTHPTASTPTIPTLTTVQLPTTLGLDLSDRVSHFHVQRGDGHTLDKGKVATTRADLSALFERWKGCRLVIEAGGHSPWISRLGVACGMQVIVANPRRVELISKSNRKTDRGDAEVLTELGRTNPHLLAPITHRSEQAQTDLCVLRARDELVRTRTGMINHVRGVLKSNGHRAATCSADSFGKKAMTMIPRELQAGLQPMVELITIVTDKIAGLDAQIERLCDERYPITKVLRPIGGVGPIVALTFVLTLDDPQRFRRSRDVGAYLGVVPRKKSSGASDPQMRITKAGDRSMRRLLVIAANYILGRFGPDCDLRRFGLKIAGEGNDKTAKKRARVAVARKLAVLMHHLWRTGEVYDPLHTAKRRGELATR

SEQ ID NO: 167067 - protein, 554 aa, unidentified
MDENYTHLEWLWKRDGLRDEDVIANGAGCADISFGVIHGRAKRPRAARRSEVVNNCAVGENNAGGRPASARSRSGMRDPKRVSGRLPGEPEALAETSNRTTPQEGHNISAMDGRAKGRQQQRPKSAPMNNSDQSSGWLEQRGFGGLDWASQKHSVVVVDPQGKVIEDFEIEHSALGWKKFRERIKPYGSIPFAIETSQGAAVEQLLEAGMQVYPLNPKSAQAYRERKAPSGVKDDRLDAWSFADACRVDGQGWKPLRPEDPLVKELRLLCRDEVGLIEQRTAFINQLRHALAEYYPTALEAFEDWGSVSAWMFVQRFPTPQALKEAGKRHWEKFLHSRHLWRTESGPRRLELFAHATDFCGSAPAANAKSQLALSLVSILFAVEKQLGVYRQRIEELFGRHPDHDLFGSLPGAGPKLAPRLLSEIGDDRDRFGGEPQALQCLAGTAPVTRRTGKARTHPPRWPCHQRWACDKHLRHAMYLFAEHTLTRCAWAEIYYRHHREKGHSHADTLRRLGQRWLKIIHRMWMDRKLYDPMLHNQNQLQHGSWVLQLKTVN

SEQ ID NO: 167068 - protein, 358 aa, unidentified
MNHVKSSRLDFTGQPIYIGLDVHKKSWSVSIFSNCGEYKTFSQPPEVDKLLHYLRHHFPGGDYRSVYEAGYCGFWIHDQLREKGIQCLVVNPADIPTKNKERRTKRDRIDCRKLGRTLRNGEITGIYVPSRSKLEDRTLIRTRQGMVRKQTRCKNQIKGMLLFYGVVIPEEREMGHWSQRFIQWIEGIRMERASGDIALRAHLEELNHLRQLIASLNRAILRLARTEEYRPLVRLLKTVPGISTLTAMILLTELGEITRFPSLDEMSCYVGLIPDTHESGEKEYVGSITQRRHSQLRWLLIEASWVAIRKDPALLMAFQEYCRRMRKTKAIVKVARKLLNRIRYVLKNQAEYVPCVIQ

SEQ ID NO: 167069 - protein, 483 aa, unidentified
MKPKPQQKSKKAGGQAAPSKWQEMNRRQRREMMRKIQSEDLTLEVMHPDAAGIDIGNESHYVAVPPTRDCQPVCRFGCTTSELKAMADWLKQCQIRTVAMQSTGVYWIAVYDILEEAGFEVYLVNARETKNLPGRKSDVQESQWLMKLHTYGLLRNSFRPSPEIRTMRTYWRQRNDLVRAAGRHIQRMQKALTQMNIQLANVLSDVSGMTGQAIIKAILAGERDPHQLSGLRDWRVKASEEEIARSLEGNWQEDLLFVLKQEQDGYEFCQQQMAECDRQLEQYLQQREDRTQGTSLPEEKRKERLRKKKKGNAPQFDLRAELFRMTGTDLTQIDSIDGTTAMTILSEAGWDMSKWKTEDHFVSWLRLCPDNKISGDKIIGKGRLPTNNRATLALKMAASTLRRSNTYLGAQFRRLRSKLGAPIAIKAMAAKLARLLYRMLRYGMSFIDRGEAFYENQHRKLQINYLKRKAANLGFQIIEAPAA

SEQ ID NO: 167070 - protein, 371 aa, unidentified
MYIVGIDIGKNHHEASIVSPEGKQIGRSLRFATTHKGADSLMSFIFKNIGNSPCVFGMEATGHYWYPIYSFLKVKGYTIYVINPIQSDSLRKMYIRQTKNDSIDSFLIAEVIRFGQFGTTSMADENILAMRQLCRYRDSVISSRTEIKLRIGTIMEQIFPEYEKQFSSLWVSTSMGILEKYLTPENIENAPIDELFEIIKDKSHNRLTRAKAISIKEAAADTFGIKIAQDAFSFQLKQLIDRMNFFDKQIEALDCQILEYYEKFDCYLHTIPGIGMIAAATILAEIGDINRFKSSSALVAFAGIDPTVRQSGEFSSTHNHMSKRGSPYLRHAIFLAATTCSFHNSPLNAYYKKKRDQGKHHLTATGAVARL

SEQ ID NO: 167071 - protein, 453 aa, unidentified
MAKKQRKKSKKMKPLHVIQPNAAGIDIGATEIYVAVPDDRAAESVRCFATFTEDLTNAAKWMKSCGIETIAMESTGVYWIPVFQILEAYGFEVALVNARHVKNVPGHKTDVQDCQWLQYLHSVGLLRGSYRPAQDVCAVRSLLRHRDNMVKIAASHVQHIQKALTQMNLQIHHTISDITGVTGLAILDSILKGERNPKKLAALRDKRIKADEKTIIKALKGDYRSEHIFTLKQALQSYRYYRKMISDCDVEIEKHLREFESRIEPDEKPMSASSNRKPKGNEPDFDLRTHMYRILGTDLTKIDGISTLTTHVFFAEVGPDISKFSTVKHFCSWLGLSPNNKISGGKILSSKTRPGSNRVAQALRLAAQTLWNSQSYLGHYFRKMRARHGSPKAITATAHKLARIIYYLLKTGKQFDETVFAKQEELHKKRLELNLRKQAKYLGFQLVPVESTL

SEQ ID NO: 167072 - protein, 370 aa, unidentified
MAKRSMFVGMDVHKESIDISLAEEGRDGEVRHYGGIAGDLEALAKVVKVLRAPTRRLRFVYEAGPCGFGIHRYLTAQGEDCVVVNPSSMPKRSGDRIKTDRRDGDALARLHRAGELTAIYIPTSDDEALRDLVRAREDAVGLSTQAKHRLKAFLLRQGRRYPGRAGWTRPYRRWLADLSFPLAPQHVALQEYRDTIDETERRVERLTDQLRQLTPAWRWAPVVAALQALRGVSFVTAVGLVAEVGDIRRFDHPRELMAFLGLVPSEYSSGPSVRRGGITKAGNPHARRLLAEAAWAYQGVPRIGRQMLYRQEALPKTVCDIAWKAQLRLTSRFRKLVARGKAKPKVATAIARELTGFIWAIAREVPPPSA

SEQ ID NO: 167073 - protein, 466 aa, unidentified
MAIEVRALEGLKQMNLFAAGVDIGSAENYVCVPAHTVKEGEPTVRRFGVFSENHDALVEWFLACKITTVAMEATGIYWMSLYDKLERAGIRVVLVDPHSVKAMPGRKSDVLDCQWLQQLHTYGLLRGAFRPDGPTRRLRTLTRQRVELVQSAAQHVSQMQKALLEMNVQLNLVVSDIDGETGLRIIEAILAGQHDPEELVKLRDYRIKKSTVAEMKAALRGDYSEDLLLVLRQNLEAWRFYGKQLEACDQQIVKALENFPLAQAKAVSPVPPKPAATAKTYVLKRKGKSKNAPHVDMVNLMGLLKRICGVDLMAVTGLNIISVLMLLGEIGVDMSRWRSAKAFCSWLGLCPGTKISGGKVLSRRTRHVVNRAAILLRVAAMAVGRSDSWLGRFYRRKKAHLGAPKAITATARKMACIIYHMLKYQDAYVQIDENAYETKAREQRLRALRRHAQELGMEVVEREAAA

SEQ ID NO: 167074 - protein, 377 aa, unidentified
MSMTRPILYVGLDVHADSISIATADASRDGEVRHYGTIPATLRALDSVLTKLGHPGTELRVCYEAGPTGFVIARHLTKKGIACLVAAPSLIPSPKGNKIKTDCRDSIKLTRLHRAGELTAVNVPDATDESIRDICRARTDAVDDKRRAMCQLKAFLLRHGHGIADKTPWSEARMRTLRSIALQLPAMNIVLEEYIQAIETAHQRIARLEHQMENVLETWEQAPVVRALMGLRGIRLVSAMILVSELGDIHRFAHPRLLMAYLGLVPSEASSGGKRRVGGLTKTGNAHVRWLINESAQHYRLPPRVSPDLSKRQEGIAREHRAEVQKISWKCQQRLYDKGRQMAGRLKIRQKVQIALARELCGFVWAIMKAVQPVTAR

SEQ ID NO: 167075 - protein, 415 aa, unidentified
MSLGGYIMQVTFGIDVSKSTSTVCELIGESKNELTITNNRPGFIQLLHELTAFSKHPQIIFEATGVYSRRLQAFLEDYGYEYVVLNPLKAKKEMNMGLRYNKTDKTDAYHLALIQRLYRHPVNQSESQTYKQLNALSRFYDQLTSDLVIAKNRLHQALQSTFPEIENLFSIARGKNYWQIVARYPHCDLVRKDDKKQIINWLMKLKGIAFNHAQRTTDKLIELARLAYPVVSCSDIEVQQAQYYARRLLNLSNQRQRIITKMVKLAKTLPNHDLENLESIPGFAQTTAVRVLAELGDLRRFSNPNKINAFIGIDPGRYQSGEMDSNLSITKHGNAVARKLLYRAIGQIDNAAKTNPCHIADYYESKKLSSQTKGFKKIAIASIHKLIRTIYALIINDQPYDYNVATHNQKDFSRN

SEQ ID NO: 167076 - protein, 482 aa, unidentified
MKKRNIYQNQSQELLHLFEEAGGGTKVMCVPMDYAKNDHLVMFCNGHGDILRKPFSVKNTPDGIAYIDDQVTRFCRRRGIDKRHVFFGGEDANSFAKNFVSALRCKGFVVANVNAHDAKRQRVNTQASTDRIDLMGIATMLLNCRANCCPAQSGIYRNLRTLVRHRRRLVQMLTEVKNRVHGIVDELFPGFLNEKNSGIVPFTQSSLYLMQDRFSPKQIRRRRREKLIEILKRLGTSKPEKTAAKLQQYAAKVLHAPVEYVDTLQLSLAQHVKHISCLKQSVAQMENEIALNLAQTQGAFLTSVRGIGLVLAAGVTAEIGEVNQQKPLNNLASYAGIVPRVKQTGGCDGKTYTGPVGKRCNRILKDYVVKSAYHLGLHGPQDLMADYKRRDASGQHADFGIGRRYLRMAINLMRTSQVYLPPNLRKNDYSLEQRAGYYLMSWPYLREKWQKVGALEAAFANNRPLGIWRQIVQDIYDIKLKL

SEQ ID NO: 167077 - protein, 428 aa, unidentified
MKGKETTVVGIDWSSNSHTCYALEDEKLFKISDDVAGYKKLINRYEKAVFVIEEANNRIGQYLLKNNKKVYVLSPSRSKQARQYHFSSGAKTDNLDAKAIALTFKEHPGYCFEARYSEDAVTITEMVNAYNVVCNSHAQNCNRLHTALGKYFPEFLRVMKDAYKSVAALIILSEYPTIDELRETTNDELKKLINSKEARFNSSLKKKLDTIRKEADSWNASSYGSRLIKTLVQTLYALRMEKEHLLAEMDRFLKASPYKVVLTVPGIGAVAGAYIVKAFLTHDFKNYQEFQRYVGTIPMIVQSGKKSFMIMRRKCDRDTRDKLYFAALASRSQSSWTKAYYLKKRNEGKTNGHALRALGNILLKISFAVLSKFEEYDEAFFLNAKGIKTHLNHTTNSQSNSNPGDSQDVNPSLAATKDVIDVLTVTGR

SEQ ID NO: 167078 - protein, 340 aa, unidentified
MSRITRVGVDTSKSVFQLPGVDETEQVTLRRKLRRRDVLPFFAKLERTTIGMEACGGAHYWARELQKLGHTAVLVPPQYVKAYVQRGKNDAADAEAICEAMSRPRVQRRFVPVKTAEQTAAQMLVGTREALIRRRTQLTNTIRGYAAEFGLIAAKGLARIEPLLARIAADDGLPALAKEIFAALGQELAELGPRLAMVETRLMAWHRGHELSRRLAEVPSIGPIGACLLPIKIPDPRAFRSGRMCAAWIGLTAKDHSTAGKQRLGGITRAGDETLRSVLVVGATAHIQQVRRGRTKPSPWLAALLQRKPPKLAAVALANKTARIAWKLMVSGERYNQARV

SEQ ID NO: 167079 - protein, 343 aa, unidentified
MVHYVGLDVSLKQTSICVVSDTGSVVREGVVDSDPAAIAAFVRSKAPDTVRVGLESGPTSTWLWIELKRLGLPVICIDARHAKAVLKMQINKSDRNDAVGIARIMQTGWFKEVRVKDADCHAVKALLTSRALLVKIKRDLENQIRGLLKNLGRVIGRAKFNGFTTRAVELIEGRPELVAVVAPLLKVRAVIEKQIDDLDRKVLKLARHDAQIRRFMTVPGVGPITALCFKATIDDPARFKRSRSVGAYIGLTTRRHASGEMDWSGRISKCGDAMLRSYLFEAAGVLLTRVPKWSVLKAWGMRLAKRNGLRKAKVAVARKLAVILHRMWIDGTEFTWSNKEADA

SEQ ID NO: 167080 - protein, 349 aa, unidentified
MVTLGIDAHKRTHTAAAVDDVGRELGTKTTTSATTDDHLALLRWAERFGPDRCWAVEDCRHLSRRLESDLLAAGERIVRVPPKLMAHARDSARTYGKSDPIDALAVARAALRHPGLPTAQLDGPARELRLLVDHREDLVAERTRCINRLRWHLHELDPSWDPRLRSLTHLKNLDAVAARLSSLEGMVARVASEIAMHARDLTVRERALAREITTRVQAMTPALLELAGVGALTAAKIVAEVADIRRFKSKDAFARHNGTAPLPVWSGNRERHRLSRTGNRQLNAAIHRIAVTQMRCHTDAKAYLERRMTNGNTKTEAIRALKRRLSDVVFRTLLDDTRSTAATCLAQAA

SEQ ID NO: 167081 - protein, 400 aa, unidentified
MLSIGIDVSKGKSTVCGMKPGGEIVYAPFEVQHTREGMSELVSLLRSSGEEVRAVLESTGSYHCPVVAALLENGIFISVVNSLRMKRFCSQSIRKVKTDRIDAMQIALYGLAYWQELQPTRLPEDTYRELQLLARQYYQMTSMLIKAKVDFNALCDQVLPGMQELMNDHAGRHKLSDFVLRYHHTTHILEMGETRFRKDYCKWAEKKGYRNCERMAALIFATAQNGIPVLPNAPSTQIVITEAIRVLHTVEASRDAILTQMQALAKTLPEYSLVREMPCIGDTLAPRLIAEIGDVRRFHSKRALIAYAGIDAPPYQSGKFCANNRHISKRGNRYLRKTGYEVMQSYVMHKPANDPIFTFIEKKRGEGKSGKLAMVAGLNKFLRVYYGKVTELYRSLPAIE

SEQ ID NO: 167082 - protein, 466 aa, unidentified
MGLKNKNYINNIQGRKGSQFSSQLRGLNLEKVLIVAIDAAKYFQKALICNYFGDVIEKPFFFGINEVGIKDICSRIKRAEKELQAEKLLIGVEVTGHYYEDIVKELSKFGYHVTLINAATTHEERASALNWSKTDDLDLYAIAHALMQNKGMENKLPEGNFRKLMTLTRARRTEVQKRSKTRVKIRTLMDHIWREFQGYIEVKGNVPRKKLIFSDFWGKSSLIFMEHYPHPSDVLSLGLNGIREISRLQKLRMREDTMNTLLSVAENSIVKPKEDLSAELLLLQLALRDLRQLNETIIILEKEIERVLLQTEGRLLLTVPGIGVITAAEFFSELGEVSHYENAGQLIKKAGTNPIIIQSGGTQGFYGKISKQGNKHLRFIVYTVGKSLAQHNKDLRPFFDRLRERGKHARKAYIALGNKFIKIAFSMLQHKKPYQSKQPQYSYLSEIKKKLNYTKTEEFLKIVLAA

SEQ ID NO: 167083 - protein, 372 aa, unidentified
MTQSNILFIGMDVHKESIVISLADDDRSEVRRYGTIGGTSDDFKKTLRKLVATGKELFFCYEAGPTGYELYRFIVSQGHQCIVVAPSLIPKKPGDKIKTDKRDADNLTRLLRSGDLTAVYVPSAEDEAMRDLSRAREDAVAVLKQAKQRLKSFLLRYNIRFDGSANWSEKHLHWLAESVNMPYPEQKIVYQEYLNSVTEANARVKRFDKEILFHTKQWRLYPIVESLMALRGVRMVVAVTIIAELGDLTRFTNPKQLMCFLGLTPSEHSSGDKKKKGAITKTGNQHARRVLVEAGWAYRFHAKVSKEIQKRQDGTPLKVRDIAWKAQLRLTKRFRMMANNGKPRNVIVVAMAREVVAFMWAIAQEIPIAPRK

SEQ ID NO: 167084 - protein, 342 aa, unidentified
MDEYDGRQFVGIDLHRRRSVIVRQSESGEQLSAVRIVNDPVALGLQLEQAGSDPEVVLEATYGWYWAVDVLQACGAHVHLAHPLGVKGFRYRRVKNDVRDASDLADLLRMGRLPEAWIAPPQTRELRELVRYRAKLVAIRSGLKAQIHAVLAKAGVVIAASDLFGVTGRHRLANVPLGSAYAQRIGSLLQLIDIFDSHEARFAAMIAEQLDTHTGYHAIQQVPGIGPVLAAVFVAEIGDVDRFTDPAHLCSWAGLTPTHRESDTVVHRGHITKQGSKAVRWAAIEAVQRHPTTAKIAADKHRIEARRGKNIAKVAAARKLLTLVYYGLRDGHIRALDRTRAA

SEQ ID NO: 167085 - protein, 394 aa, unidentified
MKLVGIDVGKNSHHFCIMDKETGEFNFAPSSFSNNKEGFDFLINSLKPYSKKSILLGMEDTGHYHVALLKFLLSNGYTVALINPKTTDLTRKMEGGITKNDKLDTITICDVLDTPERKKQYRITKVDRFDLYEQRQLTRHHHNLKEELNVYCNRLQKSIDLVFPEFNTLFSSKYSIVYMNLLKTFGSAEAIASTDIRTIRKCFEIKGRGNRISLTPEKLKECAKNSIGISSEVETIQIKHLVSQITLIKEQIAEIDKKIEEFSITNNSPILSIPGISHFSGTSILAELGDIGNYSKPSQIIKFAGVAPYHYESSQYNAQHTGITKKGSKYLRKTLYQIILTVINNNPVFKKYYLLKISQGKGHRCAQGHCIRKLLRIIYHLLETGQSFDPALLR

SEQ ID NO: 167086 - protein, 408 aa, unidentified
MNPLFVGIDVSSKNNVAYLMKPDGSKHSSFSVQNNLGGAKLLSERIVSALGSMQLEDVVIGLEATSIYGNNLVYALREDGSLSRFQRKIHVLNPKQVKKFKEAYPDLPKNDFVDAFVIADHLRFGRINREVYMDDYRYKALQTLTRARFDVIQNLTREKQRFANYLFLKCSGMAQDKDIQNTSATTIALMEHFETVDDLANADLEELTAFITETGRGKFADPDATAKAVRAAAKGSYRLPKTVNDTVNQAMAVSIASMRALKGQVKVLDKAIEQQFEIIPNTLTSIPGIGKVYSAGIIAEIGDIHRFDSQASVAKYAGLVWNRSQSGDFEAEHSRMIKSGNRYLRYYLLEAANSVRRCDSEFRRYYDLKFKEVNKYQHKRALALTARKLVRLVFRLLKDNRLYIPSEG

SEQ ID NO: 167087 - protein, 349 aa, unidentified
MRFYTGSHRYWCGIDLHARTMYVCILDAEGQVLVHENLRCSPEEFLATVEPYREGLVVAVECIFTWYWLADLCAREGIAFVLGHALFMKAIHGGKAKNDRIDARKIATLLRGGLLPQAYAYPAGMRATRDLLRRRLHLVRKRGQLLAHIQMTSHQYNLDPLGKRIAYPANREGIKEHFRDPAVRKSIAVDLALLERYDELLTDLELDLVRRAKQHDPQAFQRLRSIPGVGKVLALTILYEIQDVRRFDRVQEFASYARLVKCARESGGKKLGTSGAKMGNVHLKWAFSEAAVLFVRHSAEGKKLLARLEKRFGKGKALSILAHKLGRAAYFMLARGTAFDVKRFAATMS

SEQ ID NO: 167088 - protein, 341 aa, unidentified
MEHYAGIDVSLECSSVCVVDASGKIIREGKVASEPEALVAWFGSLGFSLMRIGLEAGPQSQWLFAAFRTAGLAVELLETRHVRKAFETMPVKSDRNDARGIAQLMRLGWFRPVHCKSLPAQEVRVLLTARKLVQSKLYDIEMSLRGMMRGFGLKVGPTTPKRFAGRVRELVAGHPTLEFVAERLMAAHEVLLRELNGFEKQVRAMARSDARVQLLRSIPGVGAIVALTYVSAVDDPKRFKSSKTVGAHFGMTPKKYQSGETDITGRISKIGDRSVRTALYESAQVILTRPVKGSGLKSWAARLARRVGMKKAKVALARKLAVIMHRMLVDGTPFNPAAAAA

SEQ ID NO: 167089 - protein, 401 aa, unidentified
MTTMRDNAIRVKRFRELKATLRTNRERLLVGLDIAQAEHVAHLRHAHTRIVVPALTIPNTTRGFAQLWTRIQQAQRVTGCGEVVCGLEPTGTHHEAVATFLETQGVDVVLISSSVAYWNRRTQDGTWDKHDRKDAANCAELLEQGKVLFYSRPDGPLGELRRLVRCLRRARTELAACKARWRTTLRPSLAPAGDPLPKRLRAELPAALQDWERAAPGRPAVAKGRLALGLATACADLGAQVQAVRARIAALEAALTPLADRLPAYPLLRTIPGVGPTVAAILLAEIGDVAWFTRFSQLRKLAGLDIVRVQSGQFAGQARISKCGRGLLRWALYQAAVGLARTIPGRARLAALKAKRHGDRFAGLKAIVELAAKVLRIVWGVWRSGTPYDPLRAGGLRRQPH

SEQ ID NO: 167090 - protein, 343 aa, unidentified
MNISRVGVDLAKNVFQIHGADAHGKVIWKRKLSRERWIEAICTKVPEGCQIGMEACAGAHHWARRLSEHGFQVKLIPPQFVTPYVKSNKNDANDAEAICEAMSRPNMRFVKVKTVEQQDIQAIHRVRSELMTQRTAKMNQIRGLVAEYGLVAPTRVYSLRKALPLWLEDAENGLTDRFRRLLDGLWRDLLYLEERIAGLDTEVREVANADPMAVRLQQLRGVGPLIATALIASVGDGSQFAKGRQMAASIGLTPKQFSSGGKDRLLGISKRGDAYLRTILIHGARSTIAHAKHREDRLSIWVTGLAKRSHTNVAAVALANKTVRMAWAMMRNNTDYDPERAAA

SEQ ID NO: 167091 - protein, 403 aa, unidentified
MNSVGIDISKGRSTVAVMRPFGEVVISPFEVRHTDSELSKLAKQLKSLDGETRVVMEATGNYHAPVAKLLHDAGLYVSVVNAKLVHDYGNNELRRVKTDRKDAVKLANYGLDRWLTLPRYIPEEDTRLLLKNCYRQYRQYSKVQTVLKNNLISLLDTVFPNANRLFSSPIRGDGSEKWVDFVAEFWHCRCVSEKSERAFTSKYLRWCRKHGYNFREAKAHTIYAEASGHIGVMPKSETTKLLVEQAVAQLRATSTALAALKHEMQSLASQLPEYPVVMDLFGVGPTLGPQLIAEIGDVRRFYSKKALVAYAGLDAPPNDSGDVTGRHKSMSKIGASSLRRTLFLVMSVYLQTAPLDEPVYQFMDRKRAEGKPYRVYMMASANKFLRIYYATVKAYLESLEHTA

SEQ ID NO: 167092 - protein, 347 aa, unidentified
MSTTTVGLDIAKRVFQAHGTDTRGNSTITRRLKRAEVLRFFANLQPCLIGIEACASAHHWARKLCELGHTVKLIAPQFVKPYVKTNKNDARDAEAICEAVSRPNMRFVPIKTVEQQATLALHRARQGFVSARTAQSNQLRGLLSEFGIVMPKGISNLKRQMPEILEDADNGLPHTSRELFARLYAHFKELDCQVHELERQIKACHRADPSSRRLEAIPGVGPISASALAASIGDAKAFRNGRQLAAWLGLTPRQHSSGGKEQLLGISKRGDTYLRTLLIHGARSVLLTLKRPGGQSDGWLARLATRRNANIAAVALANKNARIIWALLAHDRDYQAACAAPLARGAA

SEQ ID NO: 167093 - protein, 397 aa, unidentified
MIAVGIDISKAKSTVAVIDSDGTVLASPFTMAHTQPEMEAFVTYLKGLGKPTTILMEYTGHYHYPVLKKLQDEGFPVCIVNPYQMKKYGDVEIHKAKTDKKDALRIAAYALEKSYKLVPYSSMEQKYEDLKFLSRQYNQRISYVAKLKVQLIALLDQTMPGITRILPLNSRNPEKCALLLFIKRFKSFDEIQRIGKARFLASYDVLAKKASERSASSKGLSIYELAVDSITTRGEDPYIWLSQNQCVDLLSATQNAADEIISQMRNIAETIPEYKVLRAMHGVGDRLGPIILAEIGDIRRFHSGKALNSYAGNDAPPYQSGQFESRNRHISKRGSSALRKACYEVMQALKLTKPQDDPVYLFMLKKEQEGKPFNVAKMAGVNKFLRIYYARAMELYK

SEQ ID NO: 167094 - protein, 355 aa, unidentified
MTSTKYIGMDVHKESISIAVMNAAGKIVMECVIETKANMILDFVHGLRGELHVTFEEGTSAAWLYDLLKPHVTKLVVCDPRKNASMREGQQSDKIDARRLAELLRLNHLHPVYHGEHGLRSLKELVRSYLTITKDLGRVMSRVKAIYRSWAIPCTGKQVYAPRHRAEWLGKIGEPGVRRRAEFYYQQLDALRTVRQQVRRELLAESQKHQAWKRLCQIPSIGPIRAAVLLGILQTPHRFRAKRQLWTYSGVGIETSSSADHHVVKGQLERKKQQVEIRGLNRNYNHDLKNLFKGAAIVAASKPGPFAAFYAELLAKGMRPEMARLTLARKIATIVLIVWKRGVRFDAQYLKPQTA

SEQ ID NO: 167095 - protein, 344 aa, unidentified
MNTIDYIGFDIHKKAISFCAKAPEGTILEEGTIPALRNKLLAWAKARPRPWIGAMEATLFTGWIYDLLKPLAQELKVAHPPMLKAIAAAKKKNDKVDARMIADLLRCHLLPECYMAPTAIRELRRMLRYRNLVVHQATRMKNRIAGLLMETGTPYNKERLHGKAYFSELLGSLQDVPHSVVELLKLSRGQVEFFVTIQKRLLKGLRDHPELSERVKRLQSIRGVGEILALSWALEVGEVERFACIAQAISYCGLTSAQHNSAGQEQRGPISKQRNKNLQTILIEAAKLAPRYNPPLAEVHERELKRGNRNRATLAVARKLVAYLMAVDKSGKPFAMRVSGQEAA

SEQ ID NO: 167096 - protein, 376 aa, unidentified
MEYDSTLYVGLDVHKDSIAVAYAIGMSEVETLGNITTTQKAVDQLCKRLQSKAQHVCVAYEAGPCGYGLYRQLVEKGFDCMVCAPSLIPRKPGERVKTDRRDAMKLVRSLRAGDLSPVYVPTVEDEAFRDLARAWAATKEDLKQARSRLKSFLLSHDVHYTGRADWGAAHRRWISTFKFDSAWQQLAFEEHRRTIEDRLAQCDRLEAALHDAVASWRFYPAVLALQAMRGIQFTSAIGLLSELGDLSRFQHPRQLMAWLGVTPSEHSSGGKRRQGSITKTGNSYARKLLVESAWSYRHPARVSLDIQRRHEGIPKAIVDRAWDAQLRLCRRYSRLIAKGKSAQLSVVAVARELAGFIWDIGRLGMALASPCPSLPQ

SEQ ID NO: 167097 - protein, 353 aa, unidentified
MKQVTTIGLDIAKSVFLVHGVDAAGEAVLRQKLSRSRVLEFFAKLPRCLVGIEACASSHYWARELMALGHEVKLMPAQYVKPYVKRGKNDAADAEAICEAVARPTMRFVGVKTPEQQSIMMLHRVRLILTRQRTQLSNALRSHLAEFGIVSPIGREGLDRLLTIVADTDDGRVPAEARASLEMLAVQLEGVKAQILANDRRIIASARATEVGRRLLEVPGIGPVLASAFVASVADPAIFKSGRDLAAWIGLVPRQNSSGGKERLGGITKAGNGYLRQMLMVGAIAVIRYPQRNSARRPWLVQLMGRRPTKVAAIALANKTARTVWALMSSGERYRDPQAIQAAVLANGIETPH

SEQ ID NO: 167098 - protein, 375 aa, unidentified
MSQYTTLFVGLDVHKDSIAVAYAPDDRDSAIVPLGQIGTRHCDIDKALRHLQSKSSKLLFAYEAGPCGYWLQRYLSRKGQSCLVVAPSLIPRKPGDRVKTDKRDSVTLARLLRSGDLTPVYIPEIEDEAMRDLARAREDALSDLKAAKLRLKSFLLRHDIGYEGKANWGPAHLRWLADDVAMPTAAQRIVFQEYVRAISQHSERLQRIEEQLREQVKGWRMAPLVEAYQALRGVQFHVAATATAELGDLRRFDKPRQLMAYVGLHPIQHSSGSTRRQGVIAETGNTDARRVLIEAAWAYRFMPKVSRRIQVRQEPLPEAIRDIAWKAQVRLCTRFRRLIAHGKNPNVVVTAIARELVAYMWAIAQQVQLPTPQKA

SEQ ID NO: 167099 - protein, 457 aa, unidentified
MSQTKRPRKSRGLSPVHSAAAAIDIGATMHVAAVGPDRDKEPVRTFRTFTGDLERLADWFARCGLKTIVMESTGVYWIPVFEILEQRGFEVMVVNARDAKHVPGRKTDVSDAQWLQRLHEYGLLRASFRPQAEIAGLRAYLRQRERLLDYAAAHIQHMQKALMQMNLQLHHILTDITGVTGLSIIRAIVAGERDPTVLASHRDRRCHASVEMVCQALAGNYRAEHIFALTQALELYDVYQTKVLACDKQIEAILKRLKQSATPPTTKLSPARQRTRQPNAPAFDARAALHAILGVDLTQIVGLGPYLALKLVGECGTRLEAWPTAKHFTSWLALAPHNKISGGKVLSSKTRRTSNRAASLLRLAAGTVGRTDTALGAFYRRLSARVGKAKAITATARKIAVLFYNMLRHGMSYVDPGASYYEDRYKQRVLNNLQRRAKSLGFVLQPSAPDVAQADVS

SEQ ID NO: 167100 - protein, 360 aa, unidentified
MAVKKNNIMKTQTTALIPKIYIGIDVHKKSWMFHYQTDLFDGKTITQPANPNTLVDWVQKNYPTHEVTCAYEAGFSGYSAARLFQKQNWNVLVLNAADIPRPQKQNVVKTDKIDCRNICKQLKNEALKSITIPEEQRESFRSLFRERNNFVMGLRHIKLQIKSYLMYCGITIPEEFDNASWSKNFMEWIRQQNQTYETGTLKINYLLKRYDFMYQETLSISNQLRAYAKKHYKKDYDLLRSVPGIGGITASAILAELGDLRKYNRFDDLASIVGFVPGIYSSGDTTIVKGITPRAKKLLRSYIIEASWQAVRFDPVLQEYYRSHYGKQPNKIIVKVARKLLSRIHAVIKTETPYQIGVIK

SEQ ID NO: 167101 - protein, 417 aa, unidentified
MKTMTMQPYAAFVGIDWADTKHDVCIQSADSLRREFAVIPHQAEEIDAWAQSLHRRFSGPIAIALELSKGPLVYALQKYDYFVIFPINPSTLAKYREAFQPSRAKDDPTDAELALDLILRHPERFEPLQPQSVKIRKLAALVEQRRRLVSDRVRLTNRLRNTLKQYYPQSLEWFDQINTKLFCDFIQRWPTLMQVKRARTTTLVTFFRAGHTRNPALLETRLASIRSSQHLTLDEAVIGPNKLHALMLVDMLQVILDAIKTYDETIAELAPKHDDYDLFSSLPGAGPSLAPRLLVAFGEQRNRFKNAAELQKYSGIAPVTERSGTKHWVHWRWRCPNFVRQTFVEWAAQTINKSYWAGEYYRQQREKGSGHQSALRALAFKWIRILYRCWQTRTPYDEATYLKALLRRGSPLMAKAA

SEQ ID NO: 167102 - protein, 349 aa, unidentified
MQSNKLPTVSKYVGLDVHKKSVYGVIKDKEGNILSEQNFRVEPNELDLFMLNVKKDDSFVAIESCSCWQFIYDYLNDANYKVLLAHPMGVKALKKLRKHTDKDDAALLSDLLRTNMLPLSYAAPHDIRVKRQITRHRHSLVDIQNQVMNIAHSILLRHGIIHLPYADAFCKKGLQYLQSLDLPGCDRFELDDCIEIIKMFEDKKDKTTEAIEKIAIDDPAVRLVMTMPGMGHYCATTFVAEAGDIQRFGDAEKLTSFAGLVPKVHQSGETLKLGHITKQGNRNLRHVMVQAANIAVQHDTTLGKVYNKLVAKKGHQKAIVAVARKMVTYLYVMLKNNIEYNALQIHKAT

SEQ ID NO: 167103 - protein, 322 aa, unidentified
MNNTNSLKAIVGVDVSKDKLDIFENQTGQWSTIQNGEKSIRSFLKNLKKNNDNLLVVMENTGGLEKSLLYVSQEQGIPTHLAHASRVHYFAKQKGYFAKTDKKDAQIIAKYAQQEQIEANVENIEEQNELRELNNRRAQIVDDLHDEKCRLSRPLSTVVKRSIKRKITFLENEKKTIESAIDKRIKECPEKAEISKRLQTFKGVGPAIASGLVCLIPELGKMSRSHIASILGVAPKNNDSGKKMGKRRIVGGRFNARRLLYMGALVAIRYNHKLKETYQRLVNKGKPAKVAIVAVMRKIIITLNAMVRDKKNWNSDFTPSSL

SEQ ID NO: 167104 - protein, 391 aa, unidentified
MIYIGIDVAKDKHDCFITNSDSEVLFKAFTIANNLDGFNDLYQKIESVMDDVTKVKVGLEATGHYSYNLLGYLIDKGLPTYVINPLHTNLYRKSLSLRQTKTDKVDARTIASMLMSDVNLKSYSDTFYHNEELKSLTRYRFDKVKERAKLKTSVSRLVCILFPELEKLVPTLHIASVYALLSEFPSAKHVATAHLTRLTNLLSESSKGRYGKDTAITFRDAARASIGSNMPAKSLELKHTIKLIQELDSEIDEIENEIKIIMDEINSPILSIPGINYRMGAMIIAEIGDFNRFDSPDKILAYAGFSPSTYQSGQLDGAYAHMEKRGSKYLRYALYNATKYVCHWDPTFAAYLAKKRAEGKHYNVAISHAVKKLVRVIYHLEKTKQQYIKVA

SEQ ID NO: 167105 - protein, 343 aa, unidentified
MQAITTIGLDIAKSVFQVHGVDADGNVVIRRQLKRRYVLAFFQKLPPCLVGIEACASSHHWSRELQALGHTVRLMPPAYVKPYVKRQKNDAVDAEAICEAVTRPNMRFVATKTPEQQSCLTLHRTRHLFIRQQTSVINAIRAHLAEFGIVAPVGRQGVEQLLGVAADTNDKRLPEVARACVAALGAQLRMLKAQILQFDRMIRAWHRSNEESRRLDDIPGVGPALATALVASVADPKAFRSGRDFSAWIGLVPKQNSSGGKDKLGNISKRGDRYLRSLFTTGALAVIRYAKIHGTKHRPWLTALLTRRPTKVAAIALANKIARIAWAMMAKSERYKEPAALAA

SEQ ID NO: 167106 - protein, 410 aa, unidentified
MEVLYPRCCGLDVHKETVVACLRLVIDGKVVKEVRTFSTTTASLMGLSDWLSENQCTHIAMEATGVYWKPVWHLLSHDDFELVLANAAHVKNVPGRKTDVKDADWVSDLLAHGLIRASFVPDSPTQEMRTLLRTRKQLSREKSSHILRIQKTLEDANIKLDSVITDVMGLSGRKMIEALIAGQKDPAKLARLADHRVRASQETLREALRGHVTKHHRFLLRLHLNQIDALDAAISKIDREVEAGIAPFRTAVEQVTSIPGVKDLSARAIISEIGIDMSRFATDAHLISWACLCPRSDESAGKRRSNRIRKGSPWLKTTLVQCAWAAARTKGSYLQAQFHRIRSRRGVKKAIVAVAASILIAIYHMLKNGTMYQDLGPNHFDRRTKERQKNRLVQRLAELGYAVQLAPLPN

SEQ ID NO: 167107 - protein, 321 aa, unidentified
MNKNATVPKYVGVDVAKATLQVHLQGHQIEFENTASGHIQLCNKLRALTEPHVVCEATGGYEAAMAQAFHDANITVSVVNPAHVRAAAKAQGKRAKTDPLDAASLTDYGQRFQPAPTPEVAALQRQIRHLVLWLKQLIDAMAVAKAQAEHQLDAFVKQQHAQLLTHYHQQIKLTEQKVKTLLAQDHALQQRVDCLMEIEGVGLRTALMVLAYMPELGTINRGQAAALAGLAPWTRDSGTMKGKRCIGGGRAEIRPVLYMSSLSSIRYNSILKAFYKGLRERNKPGKVALTAVMRKLLVYMNYKLKHLQSPLAEQKLQTPKL

SEQ ID NO: 167108 - protein, 410 aa, unidentified
MEVLHPRCCGLDVHKETVVACLRLVIDGKAVKETRTFQTTTASLIELSDWLAENACTHIAMEATGVYWKPVWHILSDGDFELVLANAAHIKNVPGRKTDVKDGDWISDLLAHGLIRPSFVPDTQTQEMRTFLRTRKQLVREKSSHILRIQKTLEDANIKLDSVITDIMGLSGRKMIEALIAGEKEPTKLARLADHRVKASQETLREALRGRVTKSHRFLLRLHLGQIDALDAAIAELDQEVEAGIAPFRTAVEQVTSIPGVKNLGARTIISEIGIDMSRFATDANLISWACICPRSDESAGKRRSTRIRKGSPWLKSTLVQCAWAAARTQGSYLQAQFHRIKARRGPKKAILAVAASILTAIYHMLKDGTLYHDLGPNHFDARSKERQKNRLVRRLAELGYTVELAPITH

SEQ ID NO: 167109 - protein, 331 aa, unidentified
MDEVKRFVGIDVAKAALDVFIGSAAAAFSVANDEVGIQELFRQLKPADFVILEATGGLEMPVASALAAAGIAVAIVNPRQVRDFARATGRLAKTDRLDAEALARFGQAVRPEARPLANEQAQALEALVTRRRQLVEMLTAEKNRRARAPKILHRSIDEHIRWLEKRLAGFDDELAEMIRDTPLWRERDELLRSVPGVGKVLSSTLLAHLPELGALNRKQIAALAGLAPFNRDSGSLHGSRCIWGGRAQVRRVLYMAVVAAVRSNPVIKNFYTQLRARGKYPKSALTACMRKLLVILNAMLHNKTHWQKPAPASSTSALSPFLGAVPEHGCC

SEQ ID NO: 167110 - protein, 408 aa, unidentified
MRIIGLDIHRAFAEAVAWKDGKLSRLGRVIMRRERLEEFAKQLSNSDIVVIEATGNAASVAAVIGPHVGRVVIANPKQVRLIAHAKIKTDKIDAGVLAQLYASGFLPEVWIADEPTQALRRQVTRRNQIVRQRSRLKNIIQSILHAHLIPSCPHQNLCGPKGRAWLSEQILPGDERLAVERHLREFDRLTDDLKAIERDLAQSALADERVKRLMTIPGIDMVVALALIAAIGNIERFARPEQLVGYLGLNPSVRQSGPGPAYHGRITKQGRGHARGMLVEAGWAAARSPGPLRSFFLRVQSRRGQHVAAVATARKLAILIWHLLTRNENYLWARPALHARKLRDLELKAGYKPARGQKGTAHAYNLQSQRDQERRWVEQAETAYTRFVAGWNARGPKARTGAAKEERR

SEQ ID NO: 167111 - protein, 322 aa, unidentified
MMAEPAEIQCVLGLDVSRDTVTLCDGRRHTVTVANEADALRAALQPYQGTTTLAVCGATGGYEDILLGVLLELAIPAHRADPAKVKAYIKSFGKRAKNDPIDARWLSRYGRDRAATLPRWQPVDLTQQKLELLVARRLDLVAMRVQEQNRLKAPRSRLIADNIRDHLAELERHIEALNAEIDTLVGESRDLALRAEQLRSVPGIGPVLVPLLLAVMPELGTLNRRQVASLAGVAPHPKDSGKASWHRSTTGGRRQIRPALFIAALAACRGDNPLAVAYKALLKAAKPKRVALTAIMRKIITIANARVRDAVRHQNEIGQINA

SEQ ID NO: 167112 - protein, 351 aa, unidentified
MIVIGADPHKQTHTFAAVDAATGEQLGCETVKAASAGHERALAWGRELGGERVWAVEDCRHVSGRLERFLVGRGERVVRVAPKLMAGARQSARERGKSDPIDALAVARAALRERPERLPGAYLDERALEIRLLVDHHDHLVGDRSDEQRRLRWHLHDLYGSELEIPAGALDRSKWLEKLARRLARGEQPARVRIARELVRSIRERTRRIRELEREIAGLVSDYAPQLLDEPGCGPLTAAKLIGELAGAERFKTDAQLARSAGVAPVPVSSGRRDRHRLDRGGNRQLNLAFHRIAVTKGRICPQTAAYLTRKQGEGKTRMEALRCLKRHLARRIHHLMTDHANTPAQPLALT

SEQ ID NO: 167113 - protein, 326 aa, unidentified
MLEGVNGKEDWIVEESVFVGIDVSKGTLDIVMRPGGSRESIPNQEAQIGELVRRLSTLRVTLLVVEATGGVERRVVRALAAAELPVIVVNPRQVRDFAKATGRLAKTDKIDAEVLAHFGEAVRPALRTLPAPASEELRAQIARRRQVTEMLTAETNRLAHSAKAVRKRIEAHIRWLEAELDRVDNELDQSIQQSPIWREQEDLLKSVPGIGAVISRTLLAELPELGKLNRKQIAALVGVAPLNWDSGMMRGRRAIWGGRATVRAALYMAALVASRCNPNIREFHRRLRAGGKAPKVALVACMRKLLTILNAMIKHRTRWSVIVEAQ

SEQ ID NO: 167114 - protein, 346 aa, unidentified
MKVLIGVDPHKASLAVAVVDEATVELVERAAFPQDRAGLRALERWAKRFPERRWAVENAGGLGRHLAVRLAGSGEWVVDVPPKLSARVRVLSSGNARKNDELDALATALAASRNERLAAVDPEAASEALRLLSERRGDLVAERTRALNRLHGLLRDLLPGGVAGKLSADRAARILRGIRPKGTSARLRRRLASEVLRDVRTLDRKIADLGGRIEAEVEASGTTLTQIFGIGPILAAKIIGAVGNVTRFPTKGHFASYSGTAPVEASSGETVRHRLSLAGNRHLNYALHMVAVCQARSDARGGAYYRKKIAEGKSRKEALRCLKRRVSDAVFRSLVVDSQAPSRSAA

SEQ ID NO: 167115 - protein, 316 aa, unidentified
MQNIVPKVSVGVDVSKDHLDICLLPMGTEMHVENSISGLTGLLEELAKHDVNYVVCEPSGGYEQLLRTTLETAGYNVWLVDAIRIHAFIRSEGIRVKTDKYDAKMIALFASQKVRKHQSRSITPAAQKLRAFVKRKLELTKMAAAEKTRLKQPLKSHIKQSLERSLQFLSEEMKVIEAEIAAMIEQDDDWSKRVEIVESVPGIGKSSAIALVTEVPELGDLENKQAASLIGVAPITRRSGKYVGVSSIQGGRPHPRQVLYMCALSASRCNPLLKAFYDRLIATGKKAKVALIAVMRKLVTMINTMLKNNESWRVAS

SEQ ID NO: 167116 - protein, 326 aa, unidentified
MNIIGIDVSKIKLDCLWLKDSTTGKAKSKVFPNTEKGHQALIVWIEKQTRQPIDASHIVMEATGIYHEALAYALFKAGTQVSVINPAQIKSYAKSLGNRSKTDKKDSMVIARFGATQQPRLWQPEPDEIRILKALMARLEALEQDIGREENRLEKVQIACASNEVITSIETVLVQLKKEKQRLENLIDQHIDQNPGLKKDRQLLESIPGVGPVISRTMMMVIRSRDFISAPQCAAYLGLVPIAHESGSSINGRARLSKAGNTKVRAKLYMAAVVSIQYNPDIKIQYERLLKNGKVKMSALCAAMRKLVHICFGVLKHQQPYQTQTL

SEQ ID NO: 167117 - protein, 415 aa, unidentified
MIRPVYQRVAGLDVHKKVVVAAIIVEQADGNWHQERRSFGTMTIDLLGLSDWLMSHEVTHVAMESTAEYWKPIFNILENNFEVILVNAQHLSRVPGRKTDQSDAEWIAELMQHGLLKASFIPPVGQRELRELTRFRSTFVRERATLINRVQKVLESANIKLASVASNVMGVSGRSMLDALIDGQASPEEMAELAKGRLREKHTELTKALEGRVKPHHRFILAELLCQIDNLDETIARFDQEIADYCRPFEEAVALIDTIPGVARVTAEAIVAEIGTDMSRFPTADHLASWAGVAPGNNESAGKRRSGRTRQGNKPLGSALCQAAHAAAHTKNTYLAAQYHRLVARRGRKKAIVAVMHTILVMAYHIIQRKEPYRELGGNYFDQQRPELTAQRLVKRLERLGFDVTIHQLSPAAAA

SEQ ID NO: 167118 - protein, 420 aa, unidentified
MAPLSNQQFKAFVGLDWADTKHDICLQQAGDDRREFDCIPHQVTRIDEWAKALHQRFGGPIAVALELATGPIVSVLQKHAFVTLFPINPAMLAKYREAFKPSRAKDDPTDAELALDLLLRHPERFSPLRPQSAGMRSLLSLIEQRRELVGDKTRFTNRLTNALKQYYPQTLEWFEDIDTVLFCDFLTRWPTLPAVRRASRKTLETFFHAHNCRRAKLIEGRLESIRCAVSLTDDPGIVAPHRLLVLMLVAQLRTALAAIDVFDREIASVARALPDFDLFDSLPGAGTHLTPRLLAAFGEQRDRFRGADELQKYSGIAPVTERSGKKCWVHWRWQCPTFLRQTFVEWAAQTINKSFWAGAYYRQQRAKGSSYQAAVRALAFKWIRIIYRCWQTGTRYDESIYLNALRKRGSPLLGNLGLPG

SEQ ID NO: 167119 - protein, 365 aa, unidentified
MKQHSKKPSRTANRKPERIAGLDLGDRYSHYCVLTSDGELVEEGRLQSTEAGLRRQFGGDPRMRIALEAGTHSPWVSRLLEGCGHEVLVANPRKIRAITASESKNDRNDAEKLARFAACDPKLLSPIRHRSPQRQQDLNLIHARSSLVRARTGLVNALRGLVKSAGGRLGVCSTRSFPDKTRASIPPQLQPACAPLVEQIAQLNLAIAGMDRQVEALGNKYPEIPLLRTVPGVGPIVAACYVLTLDRPDIIQDNRQAGAFLGLRPRQSQSGDKNPQHGISKTGNTCLRSLLVQAAHYILGRFGPDSALRRWGLGLAVRGGNRGKKRAVVAVARKLAVMMHSMWRNRRPFEPFPATAAPVQAAVAA

SEQ ID NO: 167120 - protein, 407 aa, unidentified
MPLFVGIDVSSKNLEACLMDAAGETLVTRTVTNNFPGASELKDVILQHAKPGDTIQIAMEATSVYSWHPAMFFHEDPELKQRQTKVFTLNPKLVKNFKKAYAEMDKTDPKDAWVIADRLRFGRLPKSVIQSEQYLALQRLTRMRYHLVHSLTREQQVFLNHLFFKFSAFNLEVDTSAFGHAITELLLEAYSLDEIAQMPLEDLAKYLQTKGRGRFSDPEDVASSIQKAARDSYRLSKCVEDSIDLILGSSIEIIRHLKRQIKDLDKAIARVLDGLPNTLETIPGLGPVSCAGILAEIGDIERFENQAAIAKFAGLFWPRHQSGDYEADDKMLARTGNRYLRYYLVEAANLVRRHEPEYRAFYQKKYREVQKHAHKRALVLTARKLVRLIDALLRNGQIYAPKKKVTR

SEQ ID NO: 167121 - protein, 430 aa, unidentified
MKSNTQNAKIEAITEKTLVLGIDVGSETHYARAFDYRGIEYSKKPFKFSNTEAGFVTFKEWILDLKERHEKDKVVPGMEPTGHYWFNLGKFLQDNEMKPVLVNPHHVKKSKELDDNNPTKNDRKDPKVIAGLVREGRYMIPYLPDGVYADLRTASNIRFQLQAELTRIQNRISRWFNIYFPEYRTVYGKPDAKSGMLLLKAAPLPEDILTLGIDGVNQIWRDAKLRAVGKARAKTLIEAAEHSVGSKEGAVSARMEIRMLLEDYESRNTRLQEVMILIEELVRKIPMAEKLLEIKGVGIRTVSGFLAEVGDISRFNNPKELQKLAGLALVENSSGKHKGETTISRRGRKRLRYLLFEVAMSLVSKNQEFRELHNYYTTRRLNPLKKMQSLMAIAAKLIRVFYAMLTKGVDYDPKKMVSDIKRPAVYLQAA

SEQ ID NO: 167122 - protein, 414 aa, unidentified
MEDTVEVLHQRCAGLDVHKKTVVAAVRLVEGNKVITEVRTFATTTAGLLALADWLTQNGCTHVAMEATGVYWKPVWHVLSDGEIELILANAAHVKNVPGRKTDVSDAVWLAELLAHGLIRASFVPDGQTQELRALLRTRKQLVRERSRHIQRIHKVLEDANIKIDAELSDMLGKSGRAMLNAMVAGETDPVRLAALAHPNVKSPQAKLAEALRGRVTRHHRFLLQLHLQQIDGLDVSLGMMDSEIEANLAPFRTAVDIVSTHPGIGKLSAHAVVSEIGTDMSRFATAGHLLSWAGMCPRNDESAGRRRSNRLRKGAQWLKTTLVQCAQAAKNKKGSYYQAQYLRLRSRRGPQKAICAVAASILTAIYHMLKNGTVYQDLGADHFNRRSKTTQTQRLVKRLEHLGYAVEIQPLAA

SEQ ID NO: 167123 - protein, 355 aa, unidentified
MSQEKYIGMDVHQATISVAVMDASGKLIMECLLETKAATILELIQGLHGTLSLTFEEGTSAAWLHDLLKPHVSRLVVCDPRKAALLKEGNKSDRIDARKLAEMLRTNQLKPVYHGEHGIRTLKELGRSYLTITKDVTRSMNRIKALYRSWAIPCAGTSVYAPRHRAEWLAKIVEPGVRIRAERLYQQLDGLQPVRLQARRELLRESHKHAAVKLLRQIPAIGPIRSALLVALLQTPHRFRSKRQLWAYSGFAVETHDSGEYRSVRGKLQRNRERITVRGLNDNHNKDLKNLFKSAAISASTRPGPVQDFYVALLAKGIRPTMARLTLARKIAAIALTMWKKGVSFDPQQLHRQAA

SEQ ID NO: 167124 - protein, 387 aa, unidentified
MLLDHPSDGPTAIRTQFGAIFVSLELSRSSWLITSLSPGAGEKMSRHSVKASDTAGLLKLFAEVKRKAMARTGQTYPIITIQEAGLEGFWLHRVLRQEGTESHVVDPASIATPRRRRRAKTDRLDGETLLRALLAYKRGEPRVCAMVVAPSPEEEDRRRLSRERRTLIAERIEHVNRIKGLLFAQGISDYVPLRQNRRKRLEALRTGDGRELPPHLKAQISRELDRLELLLTQIKAVEAEQDALLAAAAKPVTGTTEPVAMLSALKAMGPNFAIILWSEALYRQFSNRRQVAAYAGLAATPWRSGGIEREQGVSKAGNPRLRTTMIQLAWLWVRHQPQSALTLWFKANSQRGSKRMIVALARKLLVALWKYVTHGVVIEGAVMKGAA

SEQ ID NO: 167125 - protein, 427 aa, unidentified
MAYRIAGIDVHKKVLAVVVADVECDREYEFERRRFGSNPEQLKLLSEWLIEQQVEEVVMESTAQYWQPVWGALERYWRPTCQKQEGAGTMSGKLHLAQAQSNRGRRGRKKDFPDAERLVKRLVAAELVLSFVPDPEQRLWRAVTRRKLQMTRLHVRIQNQLESLLEEAHIKLSGFVTDLLGVSARRMLQALADGETNPAALAALADKRLRATPAQLCDALGACTELNPVYRRLIKMTLEELQFLEQQMGQLDQEIANLLRPHEDAVKRLAEVPGLGVDSAQQIIAEVGPMAASFASHKQLCSWVGVCPGDNESAGVNHSHRSPKGNRQLRRVLNQAANAAARTKGSIFEIVYRRQVPRMGHNQAIGVIAHRLCQLIWILLHRKARYEERGPAVTETSKRKRTARMIRQLRALGYRVEALNLQTAASM

SEQ ID NO: 167126 - protein, 428 aa, unidentified
MNNTREKRLRQMNDETLIIGVDIAKEIHVARAFDYRGIELEDSIEFANDYLGFSRFKEWIKRIKKVESKIKLIIGMEPTGPYWLNLARDLKRNDISIVTVNPKHVKDSKELDDNSQTKTDYKDAGVIAGLVKDARYSKPNLLEGSYEELRNSKKLLEMIDKDVSRTKNQVINWLDRFFPEYKYAYKDWESKSFIKFLKEYTFPSIISKKTVEELYTFLPSKQRRGVGRRKISHLIAVAKKSVGILEGLEVAKFEIEYLLKKYETFEKLKEKLMKKIEEISKDLPEVKKLVKIKGFGLKTASIIIAELGDLNNYDDAKQVIKMAGLSLVEHSSGKHKGKVKISKRGRSTLRKTLYLVMVGMVGSNKVFKKLHQYYTGRRKNQLEKKASIIALCRKLIRIIYTIITKDLEYDEEKILKDIQWPEEFLISA

SEQ ID NO: 167127 - protein, 352 aa, unidentified
MKKNTKMTAWQQEPGLVIGVDLGDKYSQLCVLGADHEIRQEVRVRMTTPALQAWFAAVTQPAMVVMEAGSHSPWVSRLLEGIGHQVVVADPRRMRLISQSDKKNDAEDARTLARVAAAMPELLKVVKHRSAEAQRDLTVIRARARMVEVRTKLWCSLRGLAKSLGRRLPRRVTAETLQDLTILEPLWKALEDVNQRIGESDRQIAALEKKYPEVARLQQIAGVGPLISLTFVLTLDDHLRFRKSRAIGSYLGLRPKQRDSGESQPQLRITKAGDGYLRSLLIQGAQYILGRFGPDTDLKRWGLKLAARGGKNAKKRAVVAVARKLAVLLHRLWRDGSVYEPLRHSMVAVAAQ

SEQ ID NO: 167128 - protein, 341 aa, unidentified
MANHTLVAVDLAKSVFEVAISHHPGQVAKQRRYTRKQFPLALAQLPPSTIVMEACGSAHFWARRSQSLGHQPVLLPPHAVRPYVRRNKTDRTDTKGMLEAYRNEEIRPVPVKSVAQQTLASLHRLRSGWLAERTARINTLRGLLREFGIVIPLGAQRVVPTAWGYIEDAESELPDPLRPALAEICQEIRDLEHRIKMIEHQLAALAAQTPAVAQLMTIPGVGLLIATALVAFVGDIGRFPSCRHFASYLGLTPRESSSGLRRRLGAISKRGDVYLRTLLIHGARSVLLAATRRAPDRLRTWALERKQARGHNKAAIAVANKLARIVWAVWKHDRPFQPHPA

SEQ ID NO: 167129 - protein, 343 aa, unidentified
MKLTRIGVDVAKQVFQVHGVDRHEQPVWRRRLPRERWLKAVLEMAEPGCEVGMEACGGAHHWARELQSRGYRVKLIAPQFVKPYVKSNKNDANDAEAICEAMSRPSMRFVSVKSVAQQDLQAMHRVRASLVEQRTAKGNQIRGLVAEYGLVAPREMASLRRAIPCWLEDADNGLTSSFRVLLDGLWRDLHMFDERVAELDGQINDAAKADPDARRLQQLRGVGPVVATALVACVGDATQFANGRQMAASLGLTPRQHSSGGKDRLLGISKRGDAYVRSLLVHGARAMLRTAPRHNDPLSRWVIRLSSRSHPNVACVAMANKTARMAWAMLRHGTNYQPERAAA

SEQ ID NO: 167130 - protein, 342 aa, unidentified
MGEITTIGVDLAKNVFQVHGVDAVGTVVIRRQLRRRQVLSFFEKQSRCLVGLEACATSHHWAREIAALGHEVRLMPPRYVKPYVKRNKNDAADAAAICEAVTRPSMRFVAVKTKEQQSILVLHRTRELLVRQRTMLVNALRAHLAEFGVVARVGLPQVKELLTVIADEADERIPSPARICLAGLARQLQTLESEIIASEQRIHAWHRANEVSRRLETTPGIGPITASALTASIGDPSLFKNGRAMAAWIGLVPKQSSTGGKERLGRISKQGDHYLRWLLVAGAMTVVRHAKRRGTADPWLAAIIANKPTKVAAVALANKNARIAWALLSHGGSYRRLATAAA

SEQ ID NO: 167131 - protein, 407 aa, unidentified
MLLVGIDWAEEEHCACLLDEQGRVVQRLRVAHTAAGLKRLHGAIAAAEPDAAAVLAALERPDGLLVGSLLAAGYAVYALNPKSVERYRDRARTSGGKSDPADAELIARVLLTDRARHRPLLPSSALAQEVRSLARDDERAARDQRRLLNRLRLDLRDVFPQALEAFPALEAPTALAFLARWPAVDDATAATEAELAAFFRAQHHGWPDRAAAQVRGALDAEALAAPAHLARAKASTVRLLAEQLLLLHRQRAAWEARLRELLGPEGHPDGEVLLSLPGLDARLAARVLGEVGDRRERFPTPASLQCYAGTAPVTRASGKARVVSSRLACNRVLRQACMQWAFCSLGRSAWARELYDRHRAAGKTHFKALRVLANRWLEVLHRLLLTGQRYDAAVHQANRTKMPRLAA

SEQ ID NO: 167132 - protein, 310 aa, unidentified
MEPLFVGIDVAKDRLDVHVQPSGEAFSVRRDDAGLTDLVRRLHPLAPTLVALEATGGYEVVVAATLAAAGLPVAVINPRQIRDFARATGRLAKTDALDAQAIAGFAAAVRPAARAVTDADARLLGELVTRRRQLVDMLNTEHNRRRLIEQPALQRRLDAHIRWLERALRELEGDIDTTVRASSIWRATEDLLRSVPGIGPVTAYTLIADLPELGRLDRRKIAALVGVAPINRDSGTLRGRRMIAGGRASVRHVLYMATLTAIRHNPIIAAFYQRLVTAGRPGKLALTAAMRKLLVILNAILRDQRPWRPA

SEQ ID NO: 167133 - protein, 337 aa, unidentified
MADTYMLAIDLAKRSFQICATDRAGSVLYNKAVSRAKLEQVLESQAPCIVAMEACATSHFWGRFAQALGHEARLIPPIYVKPFVKRQKNDAADAAAIAEAAVRPNMHYVAVKSPEHQARAVAYRTHQCFVGQRTQMINALRSHLAEFGHVFAQGAAHVKDIRIAIGNEALELPDGVREVARLYLEQIDTLSEKIDFLSSKLREATQVNAEMRRLCTVPGVGPVTAGAIMAFAPDLQSFASGRNFAAWLGLVPRQRSTGGKARLGGMSKMGQSEIRKLLIVGAMSRIRWIVRKGVLPDNWLGKLLARKPRMVAAVALANKMARIVWAMMTREEAYRLA

SEQ ID NO: 167134 - protein, 424 aa, unidentified
MGKFTKTLCISERKEYHIMEGPIITVDVSKGSCHYQPFIENGHPMRKPKQLSATIDGFQKLGQTIKDLEAKTEREDIPVIFEATGVYHRPLQKYLEDHKIRYYIISPLLSATYRKTDLHSNKTDALDCAHIAKAYYCEKGLRQYQAQPQEYKRLYQLSRLYESELVHLRKRKVSLRSMLDIIYPRIDKTFKGNQNLYDPIPMEILKRYPHPSLLLSHREDTIVKTVGHRTGHLKGYTERIVHKIYEKAKECYSGCEINDIEILKLPSLIENVQEQKKKCDSLLKEMIEIARTCPYFASIVSIVGIGENLAARIIAELGDVNRFDNRAAIVAYAGLNPKIQQSGDIDGLHLKISKKGNKHLRCLLYLGAQCNYRLRKEDPLYEFTKKKRQQTQCPLSSKAAYTASAHKLLVIIYSLCKNGTLYHS

SEQ ID NO: 167135 - protein, 387 aa, unidentified
MYFVGIDISKFKHDCAIVDELGDVITPSWSFQNDREGFSLLKELLDALDGEKKIGLEATGHYGQNLKLFLENNDFSFMEFNPLLINRFVHSKSLRKTKTDSIDALMIAQYLMTVEYKPYPPSFYTFEKLKSLTRFRDSLIRQRSRQLVELTNILDKVFPEFKPFFKGKFSATALYILSHYASPEKISNMNSKSYEPLRRLSRGRFSMVDFVELKTLARNTVGSTSDYLLQEMEITIDIYNQLQSKVEEIELQINDCVLGLAPPILTIPGIGVASAAVILSEFGDLSKFNNPSKLLSFAGMEPGYFQSGTSESTGKMVKHGSSHLRYAMMNCAQTVINNEPTFAAYYAKKRAEGKEHRVALTHVAKKLLRVIYTLQTKELSYNPDLVR

SEQ ID NO: 167136 - protein, 445 aa, unidentified
MSTKVKEFIGKTGQPAFFAAITLPPTIYVAIDVAKFYCKAIIFDLNKRILEKPFDFNITKNGLELLAGKIDFFAQKFDTRSVVIGLEPTAHYHEPLVEHLKNKNYQVYLINPYATFKARSLNIDYVKTDNIDLKAISEAMLLHKGRKVEDEPEIYGNLRRLTRFRRAKNLERTTLKNQMLRDLDRLWPSLIKYSKSSQGLFSDLWGSKTARALFKLNLLPQQIVQLTSTEVVKTAKAKGVAGLGLGWAKKIIQHASQTLTCKDEIAGIHQQVFQNNLKLLEGLDQLIEELEKQIALMIHHTPAIHLLSIRGISSVTAGEFIAEIGNPAKYSHPGEIVRLAGLNPSSHQSGTIDRKTNHITKVGNKFLRCTAVTIARNISRWEPLFINYRNKFLAKGRPIGVAYGAVANKFIRVAYKMLLKRADFDREYEKRILRDTERGRDLTQS

SEQ ID NO: 167137 - protein, 362 aa, unidentified
MKRNTTITSYIDQDIFVGIDVHKKTYYVVARVNQEIVKKWTTPASPQKLGEQLIKYFGEGRIHTAYEAGFSGFALHRKLVSLGIDNIVVHAAGIEVAVNNRVKTDKRDATKLATMLEAKRLKGIHIPSEQEENQRLLTRTREQLVKDRTSVKNKIRMKFHQLGLIDYDENHVMTHKFVKEILILDVSREVIVVIQAYWRIWKSLDQEIRNIEKELKKQAETDPNEPTYRSVPGVGNISARILSNELGNMSQFRNERQLFSYTGLTPCEFSSGEAIRRGHISKQGNSRLRAILVEAAWRAIKKDPALEEFFNRLYPRTGKTRAIIAVARKLIGRIRAAFNKKELYQMGYSNNNANSTAILQLG

SEQ ID NO: 167138 - protein, 401 aa, unidentified
MSATHNTNSTASSAPVLYLALDLGASNWKLAFSVGLGQKPRIKTITARSTLGLVFEIRAAKKRFGLPEDAPVVCCYEAGRDGFWLHRFLLAEGIQNQVVDSSSIEVNRRRRRAKSDRLDAVKLVEMLIRWYNGERKVWSTVHVPTVEQEDQRQLHREMLKLKAERTAQGNSIKGLLAGLGLCVIVDETLPTQMQNLRQWDGAKLPPLLHQRLLREFQRWQLIDCQIRELEAERMATIRDDKTPHVEKVRRLLNLKGIGDNGAWLLVYEFFAWRMIKNRRELASLAGLTPTPYASGESQREQGISKSGNRRVRFMITELAWGWLRYQPESELSQWYMRRFGQGNKRLRKVGIIALARKLLIALWKYVEGGEAPAGAEELGWDNKPRFRAVKSRRKQEVLQTG

SEQ ID NO: 167139 - protein, 412 aa, unidentified
MKDLLEISCGLDVHKEKIVACILTGPLGKPTRSEIREFSTLIPDMIALRHWIVSKNCHHVAMESTGIYWMPIYEILEDAFYGDITLLVVNARHMKNVPGKKTDMRDSEWISTLLRAGLLNGSFIPEKRIREFRDLNRYRKSVIRDITSQKNRIEKFLQSSGFRLSSFISDIFGASGRNIILHLIEHGQIDKTALDSCLKTKTRNRIDEILMSVNGTLSEHQKAFLRILMTHYDSLKKHLAEIETSLEEDMAPFTLQVEQLNSIYGISTTASCAIIAEIGIDMKPFKTAEHICSWAGLCPGNNESAGKRKSTSVTKGNPYIKSMLCEIAWVIAGKRNTYLSAWYWRIKQKKGAKKAIVALARKLLVIIYTMLKQGTLFDESCFETRRKHCEQKQLSRYIRELEKHGYHVEAQS

SEQ ID NO: 167140 - protein, 343 aa, unidentified
MQAITTIGFDIAKSVFQVHGVDAAGQVIVRRQLKRRQVIAFFQKLPPCLVGIEACASSHYWSRELHALGHRVRLMPPAYVKPYVKRQKNDMADAEAICEAVTRANMRFVPTKTPEQQSGLVLHRTRHLFIRQQTSVINAIRAHLAEFGVIAPVGRKGVEELLCVVADPNDKRVPEVVRACVAALGSQLLSLKKQILDFDRMIMAWHRSNQTSKRLNCIPGVGPLLATALVASVADPKTFRSGRNFSAWIGLVPKQHSSGGRDRLGSISKQGDRYLRSLFVAGALAVIRYAKIHGSKHRPWLTALLARRPTKLAAIALANKLERMAWAMMATGARYNYPASLRV

SEQ ID NO: 167141 - protein, 346 aa, unidentified
MEHYAGIDVSLECSSVCVVDGNGKIVREGKVASEPAALIGWFSSLGLGLTRIGLEAGPLSQWLYAALKQAELAVELLETRHVHDAFKAMPVKSDRNDARGIAQLMRLGWFRPVHCKSINAQEVRAVLTARKLVQNKLLDVENSLRGILRGFGLKVGKTTGTDFAGRINELVKGHPNLEVIAEALLRVRSALLSEFKAFEKRAGKMSRMDAKARLLMSTPAVGPIISLTYAAAIDDPARLTSTKKAGPHFGLTPKKHQSGETDRSGRISKVGDASVREALYQAAHIMLTKPVKGCSQLKSWAMRIAKRAGMSKAKVALARKLAVIMHRMLKDGVPFNPLAKANAATA

SEQ ID NO: 167142 - protein, 382 aa, unidentified
MARTREGARRVTRSGARGAEDVADDVVLGVDTHLDFHVAVALDRLGRRLGEIKVPTTAEGYERVLRWAEGFGPVRCAGIERTGSYGAGLARHLKAAGIAVVEVERPKRRHLRRRGKSDPIDAEAAARTVLAGQAAGEPKNGDGRAEMIRTLRSARQSAVKARSQAANQLQSFMVTAPEELRHRLRGLSTKELLAAAARFRPGNEPEDVKAATRFAMRSVARRYHSLSEEIAELDAHLHRLVAEAAPGLTSLPAIGTHHAATLLVLAGDNPERLNSEASFASLCGVSPVEASSGKVVRHRLNRGGNRDANRALHMICVVRMGSDERTRRYVARRSAEGKSKWEIMRCLKRYIAREVYRVLLSSAAAEPPPSGITKPVLGADIA

SEQ ID NO: 167143 - protein, 354 aa, unidentified
MPQKLSSAIAVIGIDIGKNSFHIVGHDQRGAIVLRQKWSRGQVEARLANLPPCLIGMEACVGAHHLSRKLQMLGHDARLMPAKYVRPYSKGQKNDFRDAEAIAEAVQRPTMKFVATKTADQLDLQALHRVRERLVGQRTGVINQIRAFLLERGIAVRQGLRSLRSELPGILATRTDVLAPRMLRIIEELAGDWRRLDARIEDLSNEIEALARQDKGCERLMTVPGIGPLISSAMVAAIGTGDVFSKGRDFGAWLGLVPKQISTGDRTILGKISRRGNRYLRVLFVQAAWVVLVKVKCWERYGLKSWIEAAKKRLHHNVLAIALANKLARIAWAVLNKGRAFECVKTDEMASRPA

SEQ ID NO: 167144 - protein, 410 aa, unidentified
MAERFVGIDVALHEHRVAVLDRDGEAVGPSFTIAASTDGVATLLRTLAARAATAAETLIGLEASGHLWENLEAALVGAGYRVIVLNPLQTRRYRDVVRRKAKTDDIDAHVIAGLLRSGAAQASYVPDEPIQSLRELARLRARLMADRQDYLRRLVAQLDVVLPEHHAVLGDLLTARARGILAQFPTAQHLATATPRAIRRAAADAGARGFALDDATGVRDSARRSLYRGKAAAARAHVVRTLVGQLERLTTAIDEVDRAATTLLPPSEPGTGPSDAELLQTIPGIGPQTAATLLGELGALTRFTDARALVAYVGFYPVISESGDRAATPRLSRVGSRIARHSLYLAAVNAVRRSGEWRTIYLRKKAQGKTGKQALVVVAVKLLHALYAMLKHRQPYNPSRLLVAPATIGT

SEQ ID NO: 167145 - protein, 362 aa, unidentified
MSKSITIIAFDQHAATTVAAVLLPGQRTSALHSLTSDVPTILRLVQRVRRSGAVQCCYEAGPCGFDLQRALVAHDVPCDVIAPSLIPRRPGDRVKTDRRDASQLAVLYRAGALTAIHIPTEQEEAARDLLRCREDIRADLLRARHRLSHFLLRHGRRFTGTKRAWTKRHADWLQAQRWPLAALEQTHRAYVRAVDEAVGRLHAVDTELRDLLTLEPLRARVERLRCFRGIDDLTALTIAAELGDARRFPTAPSLMAFTGFIPSEHSSGAKQARGPITKTGNAHLRRVLVEAAWQYRHHAFLGPSLQQRQRGAPPAALDIAWRAQHRLHRRYRSLTARGKPKQHIVTAVARELTGFLWAALTQ

SEQ ID NO: 167146 - protein, 460 aa, unidentified
MNKKKSGRPKGSVRKKVDWKGLEIVHPDAAGIDVGGSEHWVAISPDRDAEPVRRFGTFTADLNEMARWLVEKGVRSVAMQSTGVYWMPVLEILEQHGLEVYLVNAQHTKNVPGRKSDVEECQWLLKLHAFGLLNNSYQPTDEIRIARTLWRQRGNLVAEAASAIQRMQKVLIEMNIQLSNVLSDLSGVSGMTIIGAILQGERDPWILASLVQPEVQATPLEVAKSLEGNWREELLFVLSQQVELYRIYQSKIVDCDFQLRKHLETLGSKVDLQTQPIGPKPKGKKGSRNAPQFDLRTELYRITGIDWAQINGMDVLTAQTVIAEAGVDLSAFPTEKQFTSWLGLCPTNEQSGGKILKRRTRKVVNRASGAFRTAATTLLRSQSYLGAQYRRLRTRLGAPKAITAMARKLACLFYRLIKHGQQYVDKGTAYYEAKYREQQIRSLATRAQKLGLQLVIPETA

SEQ ID NO: 167147 - protein, 390 aa, unidentified
MMGLSGAGLGPTPGNMNSVYHTELSSHEGTRGQFNGSRCAIKFAEGRIRPVCGLGIDVHQEFYVVVEQVEGSNPKPPQRFQKEAFLFWAARLKQKSGAEVHAVYEACGFGFALQRQLSALSIHCYVVCPQKLDEQNRRVKTDGLDAKALCLKLDRFVQGNHDALALVRVPSEKEEQLRALHRQREQLVKVRKQLEAQGRSLMVNHGFEPVKSWWKRRTFAALDVPEWMKELLQNSQPILLGLQEKIAVLTLQLQSAADPSQPRGLGKMTSVIIDREIGDWKRFNNRRQIASYTGLCPGEYCSGNTRLQSCVTKHGNPRLRAALVELAWRLVRFQPNYKPIVKWRATLAKGALATGAARKKAIVAVARQLAVDLWRIRTGRLNAATLGLIS

SEQ ID NO: 167148 - protein, 338 aa, unidentified
MNHHRKADPTTCWAGFDLAKLSLVVAAWGHLELDDRTVRSFNRTRKAIKLLLDWLRSTAPEGKHIAIVMEATGSYAEEVAGWLLDLDPSLRIAIVNPGQTSAFIRSLGFRNKTDDLDAKALAQYGQERQPMLWERPSPEMKALKDLVRTRIDLVQARTAMKLRLEDHERAAKLASTAMATVIKSLTAQIAVLDDAIERHVAAHEGLSHQVRRLMSIKGVAIVTATTIIVELGDLRRFSSSRQLSAFAGLSPKQRQSGTSLNGKAHMCKMGSGRARAALYMAAGSAARFNPDLKETYVALQAKGKTKRSALGAVMRKLLVLMRAVLVADHDWVPMRSAA

SEQ ID NO: 167149 - protein, 317 aa, unidentified
MTQTSMTIAGIDTSKRKLDVAVHGQSERWQVANSTAGWRKLAARLAEVGVGRVGIEATGGYERGVVDHLREAGFSVLVLQPAQVKAFGRVHLRRAKNDALDAALIAGCLAAVKEPRIPPDKRLIELADILTFVEQIEEDIARFKTRLEHISEPRLRRIALDEIARFKARRLAELRLLARQLRAQPDLALRFELVLSVPGIGERTALALVIRMPELGRISREEATALAGLAPFDNDSGQHKGQRHITGGRGRLRRSLFAAALPAAFRWNDAIITLYQRLVAAGKPHKVALIACARKLLVYANTVVARGTPWTNSHVAS

SEQ ID NO: 167150 - protein, 351 aa, unidentified
MMETMTWVGLDVHARSTHAAALTLPTAELQRARFGAESEAIVAWLQRLPQPVHACYEAGPTGFVLYRTVRAAGIAIDVVAPTKTPRATGDRVKTDRKDAELLARLLPTGSLRPIAVPPPEVEGARDLARAREQLRVDLCRARHRVSKMLLRHGRVYPGKSTWTQAHHRWLAGQCFDNANSELAYLDYLAAVDGLVARRRALDERLSRLAVEGDWWPTVQRLRSFRGLDTLSALVPALEVGDFARFRSPRQLASWLGLVPSLSQSGESSTQGAITKTGSRYARRLLVEAAWHYGRPPRIGVTLRQRQDGQPAHVLQIAWRCQHRLYRLHQLLSQRHKPGNIVTVALARSRTL

SEQ ID NO: 167151 - protein, 338 aa, unidentified
MAIVMGLGQHRAQITAEWIDTDTGELGRARISPALRGDVRRFVKRFAGQPLEVALEATTGWRFVVEELHAVGAEVHLAEPAETAARRGNKKRAKTDRADARHLRELLMIGRLPESWIPPEHLLDLRARVRLRHTLVDQRGEWQQRIPAVLYHHGFPQRNGLVTGENRAWLEALALSPSAREQVRIALQIINSLDAQSAPITRELRPYARRQLGCRALMKHYGIGELTAVTILAELGDARRFSSSRHAVRYAGLDITVHQSDQRRAAGHLSRQGPPALRWALFEAAQAARRPGSPDRGYYDQAAERLGGNRACPALARKLLKRSFHTLRELGDEGLMPA

SEQ ID NO: 167152 - protein, 353 aa, unidentified
MWIIGCDFHPRYQQIAALNLDTDELVERRLSHEGKEAAAFYEALPRGALIGMEATCTAQWFERLLERCGHTLRVGDAAQIRASVVRKQKTDTRDALHVLDLLLTDRFPSVWIPTPAERDARQLLLHRHTLVRWRTAVQNQLHALARNQGLLPHTSFWTRTGRQQLESLALDPWAHRRRQDLLCQLDHLNSQIDELTQQVQQQARQRTDTAELMQQPGVGPIVSLAFVLTLGTAKRFPRGKQVASYLGLNPAEHSSGGKQRLGHISKQGNRMMRWLLVEAAYVAVRKDPELKRIYQRLAFRRGRKIAAVAVARKLAVKLYWRLREVQEQRTAPPAPMQGCPGSGLVKAVSSPSV

SEQ ID NO: 167153 - protein, 400 aa, unidentified
MLSIGIDVSKGKSTVCGMKPGGEIVYTPFEVQQTREGMLELVSLLRSSGEEVRAVLESTGSYHCPVVAALLENGIFVSVVNSLRMKRFCSQSIRKVKTDRIDAMQIALYGLAYWQELQPTRLPEDTYRELQLLARQYYQMTSMLIKAKVDFNAICDQVLPGMQELMSDHAGRHKLSDFVLRYCHTTHILEMGETRFRKDYCKWAEKKGYRNCERMAALIFATAQNGIPVLPNAPSTQIVITEAIRVLHTVEASRDAILTQMQALAKTLPEYSLVREMPCIGDTLAPRLIAEIGDVRRFHSKRALIAYAGIDAPPYQSGKFCANNRHISKRGNRYLRKTGYEVMQSYVMHKPANDPIFTFIEKKRGEGKSGKLAMVAGLNKFLRVYYGKVTELYRSLPAIE

SEQ ID NO: 167154 - protein, 448 aa, unidentified
MPEQTWYAALGLAACVGLDWAMDKHAVTVKDLDSGQRERCQLGNTPEAVELWAGGLAVRFGGRPVAVALEQSRGAVISMLSKYAHLLLFPVHPKALADYRKALHPSGAKDDPTDGDLLEEFLELHGRGLRMWQPDTEATRSLQWLTEERRKFVGDQTRFAQRLRGQLQRYYPQVLQWFDQIDTPLVLAFLRRWPTLEEVKKAKPATLRRFFQQHNCRQQSKIEERIQAIASAVAATLDAAVILSGRLAVATLVDQLEAIHTGIAAYDRQIAEITLAHPDNELMDSFPGAGPAMRPRLIAALGTRRDRYLNAAEIQRCSGIAPLIERSGRQYWVHWRWACSKFLRQTFHEWASHSLAFSAWAREYYQAQRDQNKGHHAAVRSLAFKWIRILFRCWKDRTPYDEAKYLQALIARKPKQSRDLQSKLDRGKQPEFIWTSRNGFNKLVGFNY

SEQ ID NO: 167155 - protein, 339 aa, unidentified
MKYTPVGVDIAKHLIQVHFINEHTGEVVDKQLRSRDFLTFFSNREPCLIGMEACGGSQHWARELTKLGHKVRLLQARFVKAFVMGNKNDVMDARAIWMAVQQPGKEIAVKTEEQLSVLVLHRTRRQLVKFRTAQINSLHGTLLEFGESIHKGRAAMEREFPEALERMKERLPPYLITVLEDQYNRLSELDSLIDDIEKQLTSVARQNETCKRLLDIPGIGPLIATAAVATMGEASAFKSGREFAAYVGLVPKQTGSGGKIRLLGISKRGDTYLRTLFIHGARAAALLTREPSPWITELKKRRPASVAIVAMANKLARTVWAIAAYGRKYDKNHVSIRPY

SEQ ID NO: 167156 - protein, 421 aa, unidentified
MQQEAHEEFAAFIGLDWADSKHDVCLQAAGSAKRECFILTHTPEAIDAWVSTLRTRFNGHPIAICLELNKGPIVSALRKYDFLVLFPINPLTLARYREAFTPSRAKDDPTDAALQLELLLTHRDKLQPLKPQSPAMRALEQLVEHRRRVVNDRVRITNRLTSTLKNYFPHVLQWFQDKDTSVFCDFLSRWPTLKAAQLARRSTLETFFRDHHVRSADIIEKRIQAIKTATPLTSDEGVIAPNVLFVQALVSQLRVTLDAIETFDHAIAQRAQSHPDFPLFQALPGAGPVFAPRLLVAFGEQRARYASAAELQQYAGIAPVTERSGKKSWVHWRLQCPQFVRQTFVEWAAESIRHSFWAQLYYQQQRDKGKAHQAAVRALAFKWLRILYRCWQDRTPYDEATYLQALTRRGSALLQNLAKVS

SEQ ID NO: 167157 - protein, 414 aa, unidentified
MLKIVYPICCGMDVHKSFIVACIASTNKQGVTTYKSKRFSTFTGDLRQCADWLSENNCKDVCMESTGKYWIPVYNILESTCNIVLAHPKYMKAIRGKKTDKRDAKRIADIFKHDLVAGSFIPPADIRQLRDLVRYRWKLTNFTTGEKNRVQNCLTVPNFKLDDVFSNVFGKAASAITARILENPTEKITDVSGFRTKSMKATNEQVLAAVDGEMCAQQAEKLRIIRSHMDSLQLCKINLESLILATAEKYLPQLNLVMTAPGIQSFAAIGIISEIGVDMSVFPTSKHLCSWAGLTPQNNESAGKKKTTRISRAGAYIKPLLVQCALCAVRAKQFPEVRNRYMALKKRRGHKKAIIAIARMLLTVIYNMLKKNEPYNPELYRKGDRPPAHREVSVDEAIFILQRQGYLVTAPPAS

SEQ ID NO: 167158 - protein, 342 aa, unidentified
MREIIRIGMDTSKHIFVLHGVDAAEQPVLRKKLSRKQVLEFFAKLPPTVIGMEACGAAHYWGRELGKLGHEVKLIAPQLVKPYVLRNKNDGRDADGVCEAMGRPRMRFVPVKSAEQQAALMLAGVRDGLIGRRTQLSNAIRGYAAEFGLIAPKGLDKIEPLLARITQDESVPAMARELFAMQGRDYAQLQGELKAVEARLLAWHRANATSRRLAQIPSVGPIIATSLVMKTPDPHAFRSGRLFAAWLGLTPKDHSTAGKTRLGKITRAGDETLRRLLVAGATAVIRQARLGRGQPSRWLVALLRRKPPKLAAVALANKVARIAWKLMATGESYDAARMNAVT

SEQ ID NO: 167159 - protein, 465 aa, unidentified
MKPHRRPHRKQPASGPSLLERLNPNAAGIDCGSAMHYVAVAPDRDATPVRAFTTFTTDLHRLADWLTACGVTTVAMESTGVYWIPLYEILEARGLDVVLVNARHVKNVPGRKTDVVDCQWLQELHSVGLLRGSFRPTAAIAALRAYLRHRETLVQGAATHVQRMQKALVQMNLQLSIVISDITGVTGLRIVRDIIAGQTDPHALAQHRDRRCQASAAEITGALTGHYRPEHVFVLQQNLELFDAYQRQMAACDAAIEAHVHALAAQAPAPARPVPAPRTKKKPRDNEPRFEIRSPLHQLTGVDLTQIDALGPYSALRLLGEIGTDMSRWPTEKHFTSWMTLAPHNKISGGRLLSSKTQPSANRAAAIFRMAAMNLGRTETALGAFYRRLAYRVGKAKAITATARKLAILVYRTLKDGLHYQDPGAAAYDAQHRTRVLHRLRQRAANLGFSLLNRETGELLEDAVS

SEQ ID NO: 167160 - protein, 327 aa, unidentified
MNDRQVVYVGIDVSKDSLSVDAGALFKGDVPNTPAGIRSLVRKIRKRVGDGCVPHFCFESTGPYSESLFIECCGAGAAASVLNPVKVRRYAEAMSESAKTDPIDARVIRLFAEAKKPEPTPPPSASEISLRKLVLARDALTKCVVQLSGTMEGASGGDAGSVLKSTVVQLRGKIKKLDRLIAEALKGDARLAGLADALTGIAGVGVLSAAKIVALVPELGTLGRRRSAAIAGLAPFTRDSGRYKGKTFISGGRAEVRRALFMPATVAIKHNPVLKAAYQNLRKSGKAYKVAITAIMRRLFAHMDAVAAKWLRETAAAASSAALTALP

SEQ ID NO: 167161 - protein, 417 aa, unidentified
MEVIHPRCGAIDVHKKTIVVNVRISVSGSKPKSETRTFGTFTQDILSASDWLQECGVTHVVMESTGCYWRPVYNVLEGNFELLVANAHHVKNVSGRKTDVKDAEWLADLLAHGLLKPSFVPDPALRALRDLTRGRSTLVAQRSTLANRIQKLLEEANIKLGSVASEVLGVSGRDMLAQMAIGQDDPVVLAEFARGKLRNKIGDLQKALEGRMQAHQRILLRELLKQVESLDASIRTLEKEIDVHLRSQTTAPFDATVSLLQTTPGIGKTSAVIVVSEIGTDMARFGSADRLCAWGGAAPGNNQSGGKRLPGGKRHGNKNLLTCLVECAASAIQMKDTYFHSQYRRIAARRGKKRALIAVAHSMLRSFYYMISSQTPYQDLGADHFEKPNKNRIVNRLVKRLMDFGYEVNPPQEVVAT

SEQ ID NO: 167162 - protein, 390 aa, unidentified
MEARTVNNLPPAASHDDDAVRCVLAIELSKKSWIVAVNTPLSDKINRLTLKPCEGKELLDLCERIRTRVARETKQRVEIVSCYEAGYDGFWLHRLLEAHGIRNYVIDPASLQVDRRARRAKTDRVDAERLLRSLMAYLRGEPKVWSVVRVPSVAEEDDRRLHRERGRLINERIQHVNRIKGLLAIHGIYDYQPLRRDRMQPLDRLRTADSRTLPPRLKAEILRELQRLELVIGMIKAIEAERDAIASAKAQTEHTSAKKIQGLAKIKCIGPEFASTLVGEVFYRSFDNRKQLASYVGLTPAHFQSGATCHDQGISKAGNAKARRVMIELAWLWLRHQPDSPLSVWFRGRVGKLKGRIRRITIVAVARKLLIALWRYLETGLVPDGAALKL

SEQ ID NO: 167163 - protein, 337 aa, unidentified
MKRYLGVDLHRTQFVVCTRWENGEQEIRQWRIGELPKFVEQLRSEDQIAVEAMGTTTRFYDAIVGRVARVVVVNPHQFKVISESVKKTDRKDAQALALYLEKDLLPEVRMKPKQNRELMHLAETRDLLVKQRSALKGKINNLLAMQGIELKREALSSKIALARVLALPVSGMVQLELRILVEQIRALSESIAELDERLEEEGQQLPGYENLTSIKGIGSLSATVLLTVIGKISDFADENKLASYLGLVPKIANSNESERSGRITKQGNKLARTALVQCGLSAKRYSPYLQGFYERIKQRRGGGKAKIALARKLVKIVYDTLKNQWVFEDFPSFTLAA

SEQ ID NO: 167164 - protein, 431 aa, unidentified
MEQKRHPYLSVGIDIGADFSLMAIALPTQEIIGKPYKILHSSNRSVEGAVERIQSIGQAYELPVRIYMESTGIYHLPLYHRLKNAGLNAYVLNPLVTHANQNINIRNIHNDKLDARRIALLGLRPDLKTSIVPADDVAAVKALLREYHAMKKETSMYICRLKNQLRQIFPQYLPLFSKVNGKASLEVLSHYPSPSAVLSAGADALAKLIQEASGKGRTMAEKKAEAILSAARESLSFGHGNSGITFLIGHYVEMIRILDEKTAAILKQIKRSVQEQPDSLLARQTRLLESIPGAGFLTAVTIVCEIGDFRAFRRPKQLYSYFGLDPVVRQSGNSAGANLRISKRGSPYARRCFYILALQSVSLRKNGEPKNPVLRAYYLEKCKSKAKMTALGAIMHKLCNIVFAVLRDERPFVLISPQEHRQNYLSLPKAA

SEQ ID NO: 167165 - protein, 344 aa, unidentified
MNKFTTATATVFCGIDVSASSLSVALIEPDHAVTQREFANSASGHKALHVWLGKHNAPVRVSLEATGIYSLDLALALDAAASIEVAVLNPKLVNLFAQTLRRSKTDAADALVLAEYSQRMPFTAWQRPGVNALRLRTICRYIESLVVDLAEVKNRLHATESTSTTPRAVLVDLKQAQAAFLRRLAKMRREAMKLIQDDELLRQRFALLVSIPGIAEVSALQILSELALLPPGMTVRQWVAYSGLDPVHHESGTSVHKPTRISRAGNRHLRHALYMPTLSAVRFDPHLRAFYQALRARHKTGLQALMAVERKLLHAIYGIFKSGKPYDGNLLFPQIQLAVESITG

SEQ ID NO: 167166 - protein, 322 aa, unidentified
MSGSPVTIGIDVASAHVDVAATGAELPAALGRVDNDTEGHSTLADGLARLKPTLVLMEATGGYEAALACALQAAGLRVAVVNARMARDFARAMQRLAKTDRIDAATLAEFASVLTRRSDCERFIRPLSDSEQQDLAALVTRRRQLVSMQLSERQRLRLARPVTRPSIEAVLEAIARQLDDVEATMARRVEQHHAQMTKLLQNVAGIGRVAAATLIAELPELGRLNRRQICALVGVAPYANDSGASRGRRHIVGGRFEVRRVLYMATLTATRHNAAIRAFYERLVAAGKHKKVALIACMRKLITHLNAIVREHLNAQNRPSIT

SEQ ID NO: 167167 - protein, 349 aa, unidentified
MSDKLNSAIAVIGIDIGKNSFHVVGHDKRGAIMLRQKWSRGQVEARLANLPPCLIGMEACVGAHHLSRKLRTLGHDARLMPAKYVRPYSKGQKNDFRDAEAIAEAVQRPTMKFVATKTAEQLDLQALHRVRERLVSQRTGIINQIRAFLLERGVTVRQGLRFLRAELPRVLATPCDALSPRMLRVIEDLAGDWRRLDERIEGLSSEIEVLARRDAGCERLMSVPGIGPIISSAMVAAIGGGDAFSKGRDFAAWLGLVPKQISTGDRTILGKISKRGNRYLRVLFVQAAWAVLIKPRSWDRHGLKPWLEAAKKRLHHNVLAIALANKLARIAWSVLAHGRTFEASKIRAA

SEQ ID NO: 167168 - protein, 419 aa, unidentified
MKPLSDEFTAFIGIDWADKKHDICLQGAHGERREFARIEHKVDAIDQWAISMRQRFGGPIAVALELTKGPLVYALQKYDFFVLFPINPATLAKYREAFKPSRAKDDPTDAEHALDLLMHHRERLTALNPQSVPMRTLLHLVEQRRRVVDDKTRFTNRLGYALKQYFPQALDWFEHTDTIVFCDFLTRWPTLLQVKRARATSVRAFFRSHNVRYVNVIDERIQAIKAARPLTQDVAVITAYRLQALVLVDQLRVTLKAIDRFDAQIAEIAPSLPDYALFKSLPGAGTHLTPRLLVAFGEQRERFATAAEIQKYSGVAPVTERSGNKCWIHWRWQCPTFLRQTFVEWAAQTINKSFWAGAFYRQQRDKGSSHQAAVRALAFKWLRILYRCWQTRTPYDESTYLNALKTRGSPLLNQLGTQT

SEQ ID NO: 167169 - protein, 332 aa, unidentified
MNLVSTLGIDLAKSTFSLHGVNSNGEVVLRRTLSRGKLSELVAQLPPCLIGMEACSGAHEWARRFVASGHTVKLMAAKFVMPYRKSGKNDGNDAEAICEAVGRPNMRFVPVKSLEQQSDLSLHRVRQGFVEERTATLNRLRGLLAEFGHVLPLRAVEVHRRVPQLLGKLPTRVASCARDLLEHAARLQAKTLEYEHEIRTHVRSNALARRTQARMGIGPITASALVATVGNGRDFKNGRQFAAWLGLVPRQYSTGGKTRLGHITKRGDPYLRTLLVMGARAVLQRALSLTDPFSRWALPVRERRGYHRACIAIAAKNARVAWALLAKEPVTA

SEQ ID NO: 167170 - protein, 351 aa, unidentified
MIIIGVDYHPSFQTVAFFMEETGECGEQELNHSDGQAEKFYRDLKQRGICVRVGMEATGYSRWFERLLAELRFEVWMGDPAEIKAKRVKKQKFDREDARLLLRLMRENNFPQIWVPDPENRDLRQLLWHRHRLVQMRTRIMNQLQALAMNEGYRWKKKLFSEQGRAQLEKLALGPWASRRRQELLELLDRMNPTIEELTAAVEREARKRPEALRLMTHPGVGPLTALAYVLIIGTPTRFQRGKQIGTYVGMIPCEDSSAGKQRLGHISKQGSSLLRFLLVEAAQAAARIHPGWRRRYMHLAMRRHKSIAKVAMGRKLAVRLYWMWRNGCEYSPSLEFGSYAGQLEIGHGVK

SEQ ID NO: 167171 - protein, 347 aa, unidentified
MSINMIGLDTAKTVFQLHCVNEAGKAELKRKLRRNDLIAFFEQQAACTVVMEACGAAHHWARMLSGLGHTVKLIAPEAVKPFVKKGRKNDAADAAAICEAASRPDVKFVPTKSVEQQGVLALHAARSLLVKQQTMLANSMRGLATEFGVTVPKGIRNLDELMVLVDADESIPKQAKQAITGLHDYGKDLSEGVETFAAEIVAHARRDETACRLATIPGIGPITASLIAATVGDITLFKTARQFAAWLGLVPRQNSTGGKTRLGRITKTGNREIRKLLVLGATSMVYRADGWNSAVGAWLRSVLERRPVRLVTVALANKMARIAWSVMTRKEVYRSKGGVAAVARAAA

SEQ ID NO: 167172 - protein, 454 aa, unidentified
MSRKKTRLESVTEAPQIRRDACGIDISPEVIYVAVGPQQDTPAVRAFGTFTAELYRIANWLRGCGVRTVAMESTGVYWIPLFQVLEERGFEVLLVNARHYRNVPGRKTDVCDAAWLQYLHAVGLLQGSFRPPQTVCSFRTILRHRAGLVQAASQHIQHMQKALDQMNVQIHRVLSDITGVTGLAIVDAILHGQRDGKQLAGLRHGGVKASEQEIIAALDGDYRVEHLFTLRQSLESYRHYQKLMGECDQQLRQALDEFDSKQDGPPAAPAAQKKLRTKQDEELRQQYYRILGVDLTTVPSISVGTVQTFVAEVGPDLSRFRSAGALASWLGLCPDNQISGGKILSSRTRKVDNRLAAALRMAAESLCRDKSYLGQYYRRMRARLGGPQAITAAAHKLVRIIYRLVTTGEGYNEGHFARMETRNAERFRLRLAQQARKLGYTLVPATTTVATGVS

SEQ ID NO: 167173 - protein, 353 aa, unidentified
MHTHQKSSDAVATIGIDIGKNTFHLVGLDKRGAIVLRIKLSRSQLERRLANVPCCLVGMEAGCGSHHIARQIRALGHDVRLIPAQYVKPFLKGHKNDYRDAEAIAEAVQRPTMNFVAIKTPEQSDLLSLHRVRSRLVGQRTAVINQIRGFLIERGITVRQGPAPLRKALSEILSSPTEVLSARLVRLIADLAEDWRRLDERIAAVSVEIETLAENDGGCQRLMTVPGVGPIISSAVVAAIGNGGGFRQGRDFGAWLGLVPKQESTGDRTKLGKISKRGNKYLRTLFVQAAHVVLQRRPAAAIRGLWPWIERAAKRLAHRNLLAIALANKLARIAWAVLARGRDYEPRITINAA

SEQ ID NO: 167174 - protein, 348 aa, unidentified
MAHFVGLDVSVKETSVCVVDDAGKVILEQKVLTEPDAIIALLSSLGATYRRIGIEAGPLSQWLVNALTAAELPVICVETRHMKALLTAQQINKTDRNDARGIAQMMRVGLFKPVHVKTLVAQEQRMLLTSRKLLQRKLLDVESDLRGTLRNFGLKVGVVGGSRYEARVRELVEGFPRLAAIVEPLLSVRRVMRQQFAVLHKMLLDTVRDDPVCRRLMTAPGVGAVVALTYRATVDQPQRFAHSRAVGAHVGLTPKRYQSGEIDYDGGVSKCGDALLRTMLYEAAHSLLIQSRKWSWLKAWGVRVAQRRGMRRAIVAVARRLAVVLHRMWVDGSEFRWSKDSTAVPGVA

SEQ ID NO: 167175 - protein, 346 aa, unidentified
MEHYVGLDVSLKLTAICIVDRTGKIVREGAVTSNPEVIAAFVKSHAPQVARIGLEAGATSTWLWTELNKLGMPVICIDARHAKAALKMQINKSDRNDAVGIARIMQCGWYKEVRVKDLDSHAIKALLVSRALLVKIKRDIENQIRGLLKNLGLVIGRAKMNVFAVRAAELIEDRPELAAAVEPLLKAREAIEQQIADFDRKVLRLARNDAQVRRFMTTPGVGAITALCFLATIDDPTRFKRSRSVGAYVGLTTRRYASGEIDWKGRISKCGDAMLRSYLYEAANVLLTRVAKWSALKAWGIRLAKRSGLRKAKVAVARKLAVILHRMWVDSTEFNWSSKEIAAQRA

SEQ ID NO: 167176 - protein, 417 aa, unidentified
MSTNLNVGIDISLRKGAVSFLNQEGKHLGKVFEISNSPSGFDQLNEKISQAVNQYNFQRIFLGLEATSNYGFHLMDYFTRTTLPCEVKVYQINAKYIKRFKKAFPEREKTDLVDAQFIAEYLRFGKLPVDYKPEALRLPLKRLVRYRYHLVKSIEREKKVFIANLFLLFPGWVQEKPIKTLGATSMAVLNDLSLDDIVNTPLEEMATFVAKAGKNRSPDPEAIAEKIKQAARESYRIRPELANSCQFILASITKTIAALKKALAELDSAIACEGKGFINPLLSIKGIGPVYATGIIASIGDIKRFSSDDQLARFAGLVWKRNQTGETELQEKRLVKECDKYLRYYLVEAANSLRTHNEEYQAYYLKKYQEVSTHQHKRALVLTARKLVRLVFALLANNQLYDPQRRFQSPVAPCENL

SEQ ID NO: 167177 - protein, 338 aa, unidentified
MKLFGAIDLHSNNNVTVLIDEQDQVVYRKRLPNDLRLIIEQLSPYQCTLEGIVVESTYNWYWLVDGLMEKEHRVHLANTAAIQQYEGLKYTDDDSDARWLAHLLRLGVLPQGYIYPKEERAVRDLLRKRSQLVHHKTAHLLSVHNLYTRNTGQSLSANRIKKLTSEQVDGLFTLGDVALAVKANLSVMRCLEAEIKSLEQVVKERVKLKPAFRYLLTVSGIGQTLALTIMLETGDIGRFSRVGNFASYCRCVGSEKISNGKRKGKGNTKNGNMYLSWAFVEAANFAIRYEPLIARFYQRKKAKTQAVVAIKAVAHKLSRACYYVMRDEVPFDVGRAFA

SEQ ID NO: 167178 - protein, 338 aa, unidentified
MEITTIGIGLDSAKHVFQVHGVDVVGTVVEKRRLRRGQVLSYFANLPPCRVGLEACATAHFWARELCRLGHDVRLIPPQYVKAYLKRGKNDAADAAAICEAVTRPFMRFVPIKSEEQQAVLVMHRSRDLLVRQRTQLINALRGHLAEFGLIEAQGPSHIRRLLESMRADRTVPDLAREILDLMAATLDAVDAQIGSIEVRITAWHKANPTSQRLATIPGIGPLIASAITATVADPASFRSGREFAAWLGLTPRQKSTGGKQRLGRITRKGDQYLRRLLIIGAQTVLLRSKAAKANPWIQALLARCARLKVAVALANKTARIVWAVMMRGDRYRQVAVA

SEQ ID NO: 167179 - protein, 403 aa, unidentified
MIFVGDDWAESHHDVYVMDGTGKRLAARRLPEGLSGIRQLHELLAEHAEEPEQVVIGIETDRGLWVGALTAVGYQVYAVNPLAVARYRDRHHVSGAKSDASDAKLLADLVRTDRHNHRPIAGDSAEAEAIKVLARAHQSLIWARNRHTNALRNALLEYYPAALTAFEDLAHGDALGVLGRAPTPELGAHLDLAAIQSALKRGGRKRNIAARARQIRAALRSEQLAAPAPVAAAFAATTRAAVAIITELNRQIAELETSLGEHFETHPDADIYRSLPGLGVVLGARVLGEFGDDPNRYTDAKSRRNYAGTSPLTIASGRKRAVLARHVRNRRLYDAIDQWAFTALTKSPGARAFYDQRRATGDLHHQALRALGNRLVGILHGCLRHRTLYDEHTAWAHRSSVAA

SEQ ID NO: 167180 - protein, 430 aa, unidentified
MGLIVPTVMHSEQDDQPQPYEWFVGIDWGSQQHQVCVLDRDRRRVGERVVDHDGASLARLADWLWTVSAGHPQRVAVAIEVPRGAIVEGLLERGFHVFAINPKQLDRFRDRHSVAGAKDDRRDAFVLADSVRTDQPSFRRLQLDGPQLLRLRELSRAEETLLEEFRRSANRLRDQLHRFYPQMLELCSAADEPWLWDLIDLAPTPAHAALLSEEQVQRVLKAHRIRRVTAKEALTCLQAVALPVAPGAAEAAQAHCAFLLPCLRVLAEQLKACSQQVSALLSTLAEEPGEGKGPSDVAIVLSLPGVGRKITAWLFAEAAQPLAERDYQVLRTHGGVAPVTKQSGKRRVVVMRRGCNPRLRNALYHMARVAMQRDAHFSSVYAALRAKGQRHGQALRNIGDRLLRILMAMLRHRTCYDASRIRREPVVQMG

SEQ ID NO: 167181 - protein, 410 aa, unidentified
MEPILISCAGMDVHEKKVDVCIAHGPFDKPSKFEIRTFSTMTSDLEELMTWLQKYKVTTIGMESTGIYWKPIFNVMEGQFEIVLANAQRLKAIPRKKTDIMDCKRIANLLRYGLLPNSFIPPREIRELRDLNRTRRKLVGMMTSEKNRLVKVLEAANIKLSSVVTRIYGVSSLAMIRSLLEKDKLSREDISKMAKGKLKKKVDLLEKALNGKLTDHHRFLLEMHLQNIDYLARQIDKLDAEIEKKMVPFQKESKLIQTIPGISEVSASAILAEIGADMSQFPDEAHLSSWAGVCPGNNESAGKKKSGKTQKGNSFLKGALTEAAWAASKTKNSSYNAFYHHFVRRKGKKRSLVALAHRMLVDIYFVLKTGEPYQDIGAEAVHERTSKRREQSMIRSLEMSGYSVIKAAKA

SEQ ID NO: 167182 - protein, 362 aa, unidentified
MRIIGCDLHARQQTLAMLDTATGEVVNETLTHEGESVREFCSRLPSPVRVGIEATGSMKWFLNLMEELGIDCQVGHPATIRAAEPRRQKHDRRDAELLLKLLVENRFPSIWQPSKELLDLRALLLHRHQWVRLRTRIQNALQGIALANGLRRGSSLWSESGQEAMASLPLAKHTAHRRSELQAMYVRFEAEIEQLNERVLERAGERATAGLLMTHPGVGPITALATDVFLGDPKRFRDGKAVASYIGIIPRENSSGGRQRLGGLTKQGNPLLRFLWCEAAAHAVRRDPELRQFYRRKLVQKGLGKARVAAARKLGIRLWIMLRDQIDYQEFCRRGQMQQKSGDACAGMPGPRYGAKSHRPID

SEQ ID NO: 167183 - protein, 406 aa, unidentified
MTTYIGIDWSEEKHDVVFLNEKGAILGQLTMSHSPEGLRNLEKTREYLGLRREECLVAIETAHNLIIDFLWDQGYPQVYVIPPSVIKSCRGRYGNSGARDDQGDGRLIADTLRTDRLRLQPWQPDSLLTRQMKAKVSLIHALTRQKVRQSNRLRAIVLRYYPAALQVFSGLEAQISLHFLQAYPTPQAAAGLSWHQFEVFALEHGYPRPKQLPGCFAKLQHPQPEASPETVQVYQEEVPLLAQMLGQTLQAKAQSLRELRALFEQHPDHFIFASLPGAGEFLAPALLTKFGDDRERFPSAAGLQALAGTCPVTDKSGKRKVVKFRVACDRQFRHFVRQWAYFSLAKSVWANAYWQQVRPHCHSDNHAYRCLGNRWLAIAWHLWHTRQAYDETYHLQQRALRSKPQA

SEQ ID NO: 167184 - protein, 342 aa, unidentified
MDEYDGRQFVGIDLHRQRSVIVRQSESGEQLSAVRIHNDPLALQLELERAGTDPEVVLEATYGWYWAVDVLQAGGAHVHLAHPLGVKGFRYRRVKNDVRDAGDLADLLRMGRLPEAWIAPPQTRELRELVRYRAKLVAIRSGLKAQIHAVLAKAGVLIAVSDLFGVGGRQRLAKVALGGAYAERVRSVLELIDVLDGHEAQFAEMIAKRLDAHRGYQAIQQVPGIGPVLAAVFVAEIGDVNRFGDPAHLCSWAGLTPRHRESDTVVHRGHITKQGSKLVRWAAIEAVQRHQTTAKIVADKDRIEARRGKNIAKVAAARKLLTLVYYGLRDGHIRALDRARAA

SEQ ID NO: 167185 - protein, 405 aa, unidentified
MLFVGVDWAERHHDVCVMGPEGLVYAKRRVPDSVAGIGELHALVAGHADEDDESVIVGIEIDRGLLVGSLVEAGYEVFAINPLAVARYRDRHATSGAKSDAGDAKVLADLVRTDRHNHRPVAGDSDLVEGVKLLARAHQSAIWNRQRQVNALRSSLREYYLAALVAFGTDLGNSDALAILALAPTPELGRGLSRSKIAAALRRGGRQRNVEARAEEIQAALRGEQLEAPALIAQAHGTIVRSAVKVIDTYNGEIVELETALSEHFEQHPDAKVVRSLPGLGTVLGARVLGEFGDDRTRFSGTKSRKNYAGTSPVTKASGQSRIVLARFARNRRLADACEQWAFCALNASPGARRYYDQLRTRGKTHRQALRQVANRLVGILHICLERQHFYDEAVAWPDQSELAA

SEQ ID NO: 167186 - protein, 438 aa, unidentified
MSNKVIFNLDELFISVGIDVGADFSWMSIALPNQQFVGKPYKILHNSIDSLTTAVSKIKEAEELYSLESRIFLESTGIYHYPLFCYLRDKGFNCSVINPIITKNSTNINIRKVHNDRFDSKKAALVGLKPDLKVSLMPSDLALNCRNLCREYYDLMDNRSAYVNKLQGELRMAFPQYLGIFSKVTVNTSLTLLETYTSPSAFLEADKQEIIDIIKSTDRFGLTYAQNKYNAIIQAATDANQFGYIIDSNIKRIRLYISFIRKYDEEINSILESLHELVDANEDTDFVKQIHLIKTFKGAGFLSAVSIMGEIGDFSAFSKPKQLFAYFGLDPAVKQSGKFEGTKVQMSKRGSAIARRVIHTLTLQSISISRNGEAKNPVLREYYLKKCDSKPKLVSMGAVSHKVCNMIFAILRDNKPFKIIAPQEHIKQYNAAKCDMTA

SEQ ID NO: 167187 - protein, 399 aa, unidentified
MIKEHELIDVFIGVDVGKSDHHAVALNRAGKKLLDKALPQDEAKLKEIIRSLTRYGRVLFVVDQPATIGALPVAVAQAAGIPVGYLPGLAMRRIADLHPGEAKTDARDAYIIAEAARTMAHTLRSVEVADEQVAELTMLCGFDDDLAKQATATSNRIRGLLTQIHPALERVIGTHLDHQAMSELLAKYPTPAALRKAGHARVETLLRKHAPRAGKRWAAEVFAALEEQTVVVSGTGAAGIVLPQLARMLTQTRAARAEVLEQVEAIVEAHPLHALLTSLPAVGVRTEARILTEVTGKEFKTAGHLGSYAGLAPVTWRSGTSIRGDHSSRKGNKILKRTLFLSAFAALKDPASRAYYDRKRSEGKKHNQAVIALARRRCNVLFAMLRDGTIYQAPETSTA

SEQ ID NO: 167188 - protein, 413 aa, unidentified
MAEETLTWFVGVDWGSEGHQVCIVDAEGSIVGEREFPHSGAGLAELGDWLLSIAGSSGTVAMAIEVPHGPVVDSLIDRGFVVHAINPKQLDRLRDRFSVAGAKDDRRDAYVLADGVRTDRRLFRRLHVADPRLIELRAWSRLAEELQEERRRLSNRVHQQLWRYYPQMQKLTDDLAAPWFLELWSIAPTPAKARQLRQSTIEQLLKQHRIRRVAAETVLRILREPAIVVAEGVAEAASVHMRSLVARLRVTNRELREAEGKLDKLCMAIGGTPAASGECLQRQDVMILKSMPGIGRINLATLLCEGSGPLSSRDYQALRTLCGAAPVTKRSGKSHIVIMRYAAHARLRNTVYHWARVATQHDPKSRSRYAALRQRGHSHGRALRGVADRLLGLACLLLQRQTPFDPQLGQPAT

SEQ ID NO: 167189 - protein, 346 aa, unidentified
MEYIAMDVHKKYTWARVENTQGDRLYESRLTHSHGTIKNFVSRWTAGSPVAVETVGNWYWVVDEIEAGGGKPQLVNARLAKLMMGMVNKSDKLDAKGMNRLQRTGTLPTVWIPPSSVRDARELPRTRMVLSRQRTQLKNRVHATLGKYGFVVEGATDAFGKRGRKIVEELLTKLPPHTEQALRRILDQLDHVCENLKWIEAKMMEVYAPCPQTTWLKTLPGVGDILAVVIWTEIGTIERFARAEQLASYCGLVARENSSGGKIRFGAVRRDVNVYLKWAFVEAANSAVLNAERCGYDHIGRLYQRIKTRRGHGKAKVAVARHLSEASFWMLKKGESYREPMSSTQR

SEQ ID NO: 167190 - protein, 355 aa, unidentified
MTSTKYIGMDVHKESISIAVMSAAGKIGMECVIETKASAILQFIDGLRGDLQVTFEEGTSAAWLYDLLKPHVTKLVVCDPRKNASMREGNQSDKIDARRLAELLRLNHLSPVYHGEHGLRSLKELVRSYLTISKDLVRVMTRVKAIYRSWAIPCTGKQVYAARHRAAWLGKITEPGVRRRAEFYYQQLDALRTVRQQVRRELFAESQKHQAWTRLCQIPSIGPIRAAVLLGILQTPHRFRTKRQLWTYSGFGIETQSSADHRRVNGRLERAKKQSSIRGLNRNCNHDLKNVFKGAAIVASSKPGPFQEFYTALLTKGLRPEMARLTLARKIATIVLIVWKRGASFDAQHLKPQTA

SEQ ID NO: 167191 - protein, 418 aa, unidentified
MNSHLNNTNYKAFVGIDWANDKHDLCIQDPLTGKREFSVIKHDVSEIDKWIKGLCKRFGSPIAIAVELKKGPIVYALQRYDFVVIIPINPTTLAKYRTAFKPSKAKDDPTDAELALELMLRYPNHFPPLNQQSVNMRKLMFLVEHRRKVVDDKQRVVNQMINAIKQYYPQANEWFCKKDTHIFCDFIARWPSIQQAKKSHKSTLVKFFNDHGIHNDTIVKHRVSLIKKAKPLTNDKAVIDSHTMLVIFYVERIVNSMKCIKEYNKLILKLMDKLPDAPIFTSLPGAGAALSSRLLAAFGEQRDRFKSAQEVQQYAGIAPVTERSGQKSWVHWRWQCSTFLRQTFIEWATHSRLKSYWANLYYLQQREKGSSHQAAIRALAFKWIRIVYKCWQDGKPYNETQYLRALKDRASPLLSVKV

SEQ ID NO: 167192 - protein, 383 aa, unidentified
MKSVCGLDVHKDSVYLCILSEFGELIEKVFGVLTYQLEEMRDLMLHHHVVEVSMESTSVYWIPIWRVLSPHFKLNLANPYFIKQLPGRKSDVKDAQWIAECTMKELIRGSFVPPEIIQQLRQYDRRIFDLNEEIVRKLSKLDAVLQRCNIRLSNYVSNVDSKSYKTVVRAISKGISAPEELVKLIHGRIINHHGIDVITASLKGVVSLAEIDMISQLRDELDMAEAHKEKCQARMLEICERVFPEELKRLQTIPGIKERAATSLIAEIGTDMNKFETANHLASWSGLKPRNDESNKKIKSRSITHGNVYLRKTIIECAWAASRTKDCFFSRFSYHQTQVRKKNKMKVLVAVARKMLIAVWHVLHDNTNYIDFTTDRKTSRTKG

SEQ ID NO: 167193 - protein, 373 aa, unidentified
MPKYSTAFGMDVHLRSTTVCALDADTGEAVTRRFPGNPWGEIAGWMDGFPGPSLAAYESGYLGFAPQRELAGLGVECVVAAVSKIPRSAADSASKNDRNDAARMAKAILAHDISPVWVPSPEVEGIRDLAGAYGGATARLATAKQRLLAFLARRGFVYGGTTPAGNPRKYWTYDFLRWLDKVRPEDDGGVRALAALRNEVEAAAEARADLLSEYRAAVDASPIAAEVAALQSIKGCAFALAAAFSAEVGDFTRFRSGRQVTAYFGLAPSQRSSGDSVRLGGISGAGNALVRKLAVEGSWCYAAARHQPKLMPRDTGVPLEIRMHGRKGSERLLRRREEMLARGVPAAKANAATAAELVRWLWALGMMCREGAE

SEQ ID NO: 167194 - protein, 317 aa, unidentified
MSNHNTVCAGIDTGKHKLDIAFDGSAERLQVDNSSQGHRTLSAWLRQREVERIGIEASGGYEQAAVSSLRADGFVVVVFQPAQVRAYAKFVLQHAKNDAIDAALIARCTAAATDIREPPDARLALLAQHLTMIEQLTEDVGQLKTRREACQEERIREFWKREINRLKVLLSSELKQLVVAIREHRDLSDRLDLIASVDGVGLRTAVAILVRMPEIGRVTREQAAAIVGLAPYDNDSGLRHGSRHIKGGRQRLRQSLYAAALPAVFYWNPQLQAFYKRLLAAGKSHTLALVACARKLIIFVNTVVARGTPWTSSAAAA

SEQ ID NO: 167195 - protein, 412 aa, unidentified
MQRVIGMDIHRTFGEVVFWEDGKLRHGGRVDMTRTALEGLGKSLLATDEVVIEATGNCMAVARVLSPFVKRVLIANPLQVKAIAHAHVKTDKIDAGTLASLCAAGYLPEIWTPDAATERMRRLVARRYQVVRHRTRIKNEVHAILHAHLISKCPHADLFNGRGRAWLMRQPVPNDERAGIERHVRELDRLAEDLAILDREIAESTMDDPAIRRLLTITGVNLTVAAGLMAAIGKVTRFKSPQKLVSYFGLNPRVRQSGLGAAHHGRISKVGRSHARAMLVEAAWAAAKTPGPLHAFFVRVRARRGHQVAAVALARKLAVLVWHMLTKEKDYLWARPSLVAHKVRGMELQAGKPQRKGNSRGSTYAYNVKELRNQETHIARKAQESYENFVEAWRQRSPKEKARGRLNPARLE

SEQ ID NO: 167196 - protein, 388 aa, unidentified
MIYVGIDIAKLNHYASAIDSDGVVLIEPFEFLNDNAGFYTLLSKLNSFELDDIIIGLESTAHYGNNLVSFLVTKGLHVCVINPIQTATLRKNNIRKTKTDKVDTLVIAKAVALMDHPRFVTLYDIALMQLKNLGRFRMNLVKQRSRTKIQLTAYLDQVFPELQYFFKSGIHQKAVYAILKEAPSATRIASMHLTHLKNLLVSNSHGHFKKETALELRVLAQKSVGTADRSLSIQITQSIAQIELLDSQLDAVESEMKDIVTSLDSVIMTIPGIGPINGGMILGEIGDINRFSKPRKLLAFAGLDPSVYQSGNFIAKKTKMSKRGSSALRYALMNAAHNIVKYNQTFKEYYDSKRAEGRGHYNALGHCAGKLVRIIYKMLKDDVEFNLD

SEQ ID NO: 167197 - protein, 359 aa, unidentified
MDSSKQQLLMTAGLDIGDRYSYLCLIDTQSGEVMEEGRLRSTPEALRRRFASEPSLCIAIETGTHSPWVSRVLQECGHEVLVANARKLRLIYANKRKTDEVDAENLGRLARLDPKLLYPVRHRGEGSQTHMALIRWRQALVGCRTQLVNHVRGTVKSFGARLPKCPARSFHNRAPEHIPQALQPALEPILEQIGSLTQRIRDYERQLEKVSEEHYPETGLLRQVEGVGPLTALTFVLSLEDPYRFEKSRSVGAYLGLVPASDRSGESNPQKRISKEGEEMLRKLLVSGAHYILGPFGSDSDLRRHGQKIASRGGKNAKKRAAVAVARKLAVLLHSLWVSGEVYDPLRNIHRRERREEAA

SEQ ID NO: 167198 - protein, 367 aa, unidentified
MLKQSHYKIGCDAHKHYSLFAVLDHRGKCIERTRVNHEAGAIRAFLSRFPGGTAVALETVGNWYWIVDEIEQAGCVPLLAHAQMAKKMMGHVHKTDKLDAQGLAILQHLGSLPTVWIAPAETRDERELPRTRMALSKMRTALKNRMHSTLAKYALCLDTQSDIYAPKWRSQLLDLLQRLPPETERCVRQELELLDQVQEQIRRLEARILERVQITPTIQLIQSVPGPAKILSIVIDREVGSIDRFPSPHHFASYSGLVPKVLASGGKTHYGKMIKAANNYLKWAFIEAANVIVRQQHHPNWRQKYVVALFERTRQRKGHAVAVGAVARYLAEATYWVLKKGEPYREPVPWHPVGRSAISLKQGQVRT

SEQ ID NO: 167199 - protein, 368 aa, unidentified
MYYVGLDVHAKRSSLSILDANGKLVKHLEVKGSWQKLLEVVDAQLPRPFAICYEASCGYGYLYDQLGRRAERVSVAHPGQLRLIFRSKKKNDRVDGEKLAKLLYLNEVPQVYVPGLDVQSWRGLINYRRKLVGRRAAVKTQIRAHLRGLGQLAPATGGLWTKKGIKWLREQAMSATDGLRRDIMADDLDGLEEKIRKVEKELNKIAKSHPGVMLLMTIPGVGVRTAEAFVAHVDDVTRFARINQVGSYFGLVPCQDASADRNRLGHITKDGPAPVRWLVAEAAWQGRRRSARIRGFFDRVMRNDPSRKKIALVATAHYLTRVMAAMLRTGEAWREEESPPPAAEAGPRPQKMQETKETKNKTKGAKKE

SEQ ID NO: 167200 - protein, 382 aa, unidentified
MQPINTVNPTIYLAIELSASTWLIAARLPGSEKPHLHRIEGGDTAALFALISSLRARVARRLDAAIGVVCCFEAGRDGFWLHRLLTAHGIANYVLEPTSILINRRARRAKTDRLDAIGMLRVLAAYLRGDRQSCSMVRVPTPEDEDAKRIHRERENLVQEKLRIENRIEALLFTQGIRKRPSLRSWERDLAVLRTGDGREMPRHLRAELDRLRRRLVTILELIREVEAERDEVVTTNPEHQTSRKIVALCRIRGLGENFAGVLTREVFYRSFDNRRQIASYVGITPMPYQSGSMDRDRRISRAGNPRARTTMIQLAWLWLRYQPGSELAEWFRKRVGTLAGRTRRIAIVAMARKLLIALWRYVETGILPAGAEIRPESVAAA

SEQ ID NO: 167201 - protein, 342 aa, unidentified
MYYIGLDVHKKTISYCVKDVSGQVHREGQIGATRRELDGWMKTLPPPWMVAMEATIFTGWIYDHLLPHAQRVKVAHPLMLRAIAAAKKKNDRIDAGKIADCLRCDFLPECHMASTAIRDRRRTLRYRHLLVRQMVQMKNRISGLLMETGVSYNKQRLHKVRYFRELLSSNEEVNESIRPLLRLSRDSIVRLQKTEYALVSSLQRDPLLAERIRRLRTVPGVGPITALTWALEMGDVSRFPSIREAISYCGLCGDEKSSADKVTRTPLSKQRNKHIQRVLVEAAKLAPRQDHDLALVYETAKQKGNSNRATLAVARKMVAYLLAVDRGQRDFVPAEAYRNAAA

SEQ ID NO: 167202 - protein, 392 aa, unidentified
MVPRYIGLDLHARYIHGCEWNPEADDGQKERHFRFPNTPDGWAQLLPQLDRTCWVALEVTGSAFEVHDVLSVHVDRVLLANPIDLKRFGSGRHTDRVDAARLAKMLAVGTIPTVWVPPQPMREIRRLVSYRARLASNRRRAINQAKNVLRRHGQVLPRETDVQRWLTHERVAALPASDRVILLSACRQISALEAEIDGLEGEIARGVADVPAVQVLLTITGVGLIGAAATWAILGDPHRFTRSKQVTRYAGLDSSIVQSGEQHRQGRISKTGSPLLRTLMVEAAHSLAQWDSGPLSQFYARKAQEIGPRKAIIALARKLLIVAWRMLLTGEIYRAARATTVARKHRELQNKIQIQMPSTGPVLDSARVTRRPRTRTVGSEGAMSRRRTLVST

SEQ ID NO: 167203 - protein, 351 aa, unidentified
MMLIGVDYHPSFQTIAFFVEETGEYDEQELNNSDGQAEKFYRDLKRRGICVRVGMEATGYSRWFERLLAELGFELWIGDPAEIKAKRVKKQKFDREDARLLLRLLRENNFPQIWVPGPENRDLRQLLWHRHRLVQMRTRIMNQLHALAMNEGYCWKKKLFSELGRAQLEKLALAPWASRRRRELLELLDRLNPTIEELTAAVEREARKRPEAMRLMTHPGVGSLTALAYVLIIGTPTRFQRGKQIGTYVGMIPCEESSARKQRLGHISKQGNSLLRFLLVEAAQAAARVHPDWRRRYMHLAMRRHKSIAKVAMGRRLAVRLYWMWRNGCEYSSSLEFGSHAGQLGTGDGVK

SEQ ID NO: 167204 - protein, 369 aa, unidentified
MVEHTLFLGLDVHKKTISVATVEDRAGAEVRFYGTIENTPDALRKLSKKLSQAGQHLHACYEAGPCGYNVQRHLTRLGHRCDVVAPSLIPRKSGERVKTDRRDAMMLAQTLRAGQLTEVWVPDQAHEAMRDLVRLRSQAMRDLRKTRQHLLSFLLRHERISPYRHWTKMHRRWLGELKFAHPAQHLALEEMLHRVQRAEELCDRLKQAIGELVPQWSLAPVVQALQALRGISLITAAVLVAEVGNFQRFDSPRQLMAYLGLNPSEHSSGTTVRRGAITKTGNGLARTSLVEAAWTYRFPARITQIIRDRMKELPEPIRAVAWKAQVRLSARYRSLIARGKSPPIAIVAVARELVGFIWAIARMVEPKFT

SEQ ID NO: 167205 - protein, 252 aa, unidentified
MHVGVDVAKQHLDWAEGPDATVQRVSNDAEGIRILLRRLQKLAPERVILEATGGYERSLLYALVEAGLAAVVVNPWRVRRFAQGLGTIGKTDAIDARVLARFGALTNPAPTIVPSPAQRAAADLIARRRQLIAMVVSEKQRVQRAPAYLRREIAGLVAILERRIARLDRQLDAALDQDPERNQTLQILRSAPSVGPGLARTLLIDLPELGALSRRQIASLVGVAPFPRVTAERRSGNAGSASAALRFVRCSI

SEQ ID NO: 167206 - protein, 391 aa, unidentified
MVCVGIDVAKDKHDCCILDSDGTIRADCITIPNNMDGFKQLLQTIRDCTKKSDKIKVGLEATGHYSYNILGFLLDNDLAVYVMNPLHTNLYRKSLSLRKTKTDRVDARTIATMLLSDVDLKSYTDTAYHNEELKSLTRYRFDKVRERAKLKQSVSRLVTILFPELEKLVPSLHIASVYALLSEYPGAKQISEIHLTKLTNLLATASKGRYGKDKAIQIRDAARTSIGSVMPAKFLELKHTIKLIKELTSEIDEIEDSIQQIMDELHPPILSIPGVGIQSAAMILAEIGDFSNFESPDKILAYAGCSPSTYQSGKLTNCYAHMEKRGSRYLRYALYNATKYVCHWNPVFAKYLAKKRAEGKHYNVALSHATKKLVRLIYALQKSGKAYLTAA

SEQ ID NO: 167207 - protein, 414 aa, unidentified
MSKARNRMRVKSHQLTVGIDIGKYHHVAVGLAGDGRLTKPMKLPNTREGYEQLLLRIMAWKKEYGADEVLVGMESTGHYWEVPARWLTAHSIPVVQVNALHTKRAKEIEDNTPGKTDPKDARIIAQLVAWGKYLDCHLPDGAVAELRQFVRQRSTLTNELTGKRNYLRYLLDCVFPELFTVFKKSSGKTLLHLLALCPSPHELIGADQADVARTLRQHCPTGAAKRLDRVYALARITVGIAPARHAYAVAIRRTATRILALHEEKAEVEQQMTKLLIELPEAGSLLSVKGIGPVSAAIIVGETGGLHRFGHAEEVIKLAGLNLFEVSSGTHKGTVRISKRGRPLLRQTLFVLATIQAKKGMPFHACYEELLNKKMPRVKALIAVARRMVRVLFALVRDGRCYQDEKPAALKKAA

SEQ ID NO: 167208 - protein, 352 aa, unidentified
MLIIGCDYHPSMQQIAYVDTETGEGGERRLMHRDGEAERFYRALKQRQIEVRVGMEATGYARWFERLLAELGFELWIGDPARIRARRVRKQKTDRKDAQLLLRLLLEGDGFPRIWVPSPENRDLRQLLWHRHRLVQMRTRIMNQLQAVAMNEGLRRKRALWSKSGRKQLESFLLAPWATRRRQDLLELLDRLNPTIQELTAAVEKEAQNKPEVQWLMSHPGVGPLTALAFVLIIGTPERFQCGKQMGSYLGLIPCEDSSADQQRLGHISKQGSSLLRFLLVEAAQVTVRVNPEWRRRFLHLAMRRGRKIAKVAMARRVAVGLYWMWRKQWDYQQAVKFGSHVGQLELRHGVQ

SEQ ID NO: 167209 - protein, 346 aa, unidentified
MLYAGLDLSRKRLDFHLLDSEGATVEVGAAPPDADGLLGLTRRLDRHREPIRAAIESMNGARFVHDRLELVGWQVEIADAQKVKGLAPLACKTDRIDAWVLAELSRRDLVPAIWLPDPLVRAERERARWRLHLVRHRSSLKQRVHAVLLTHGKPCPVSDLFGVRGRQLLARLGLPEPWQSTIEASLRLIDELDREIGDCERELHRLGADHRYVRRLLTVPGIGWVLAYTIAAEIGDISRFASPRKLAGYTGLCPRVYQSGERDLRGPLAKQGPKYLRWALVEAATHACTAAVYRDRYQQTKARIGKQRGAKVAQIDLARRLAEAIWHMLSRDQPFAPKGATDPLAA

SEQ ID NO: 167210 - protein, 351 aa, unidentified
MKEYIAFDSHKHYTLMEREDRQTARTVQLRVAHQPGAIRACLRNCESGTDVAVEATGNWYWIVSEIEQAGLKPQLVHPRKAKLMMGLINKTDKLDVHGLNRLQRNGTLPTVWIPPAELRDQRELTRTRLVLVAQRTRLKNRLQSTLAKYGLAVRDCSDAFGTGARSQWPELLARLPEQTQWVSQQLLKQLDVLEEQIGQCEKRLSHLLKITPQIERLKSLPGVGLILGASIAFEIGEVSRFPSAEHLASYAGTTPRVHSSGDKLRFGRLRPDINRYLRWAFVEAANVVALHHERRPERHVSYLYWRLKQRKGHAKAIGAVARHLAEATFHILSRQEDYVDPALRKGRSKPV

SEQ ID NO: 167211 - protein, 366 aa, unidentified
MSEITRALIARVGVDLAKRVIQVHAVDAAGRRMVARALKREQFLAWCAQLNSGCVVAMEACSSAHHWARTLRALGLDARLIPAHFVSPYRMEGRSGKNDATDAAAICEAASRPSMRFVPVKTCEQQGVMSLHRVREGLKEERTACINRIRGLLAEFGLVFAQSPKALRAELADVIEDAGNELSPLARLVLQRAFDHWRELDEHLHWCNTQVGQHVRSSSAAQRAARITGIGELGASALTAGVGDFRQFSSGHQFGAWLGLVPSQNSSGGKTSLGRITKRGDDYLRTLMIQGAKAAVMTAGKRTDPTSLWLAQLTARVGWQKACVAMANKNARILWAVMTRGQGFDPQHVSAKPRAKKPADLSATTA

SEQ ID NO: 167212 - protein, 456 aa, unidentified
MAQRAKSIKNAKRRELVIVNPDAAGVDVSSTNHQVCVPEDRDENHNQSFGCFTEDLHKIARWLLQCKISTVAMEATGIYWVQLYMVLEEYGLEVILVNARHIKNIAGKKTDVVDAGWIQLLHSYGLLTASFQPENMIRQIRQLTRQRESLIKSSSREVLHMQKALEQMNIKLHKVISDLLGKSGMAILKAIIVQGIRTAPELAQYADHRIKASQQEIIKSLEGNWTEDQMFILNQSYELYNFYQQKIKECDEKIDQFMEVYVQHKASADTDYHPSGKRKKQKNDLRFDGERYLVRAFGVNIMRIPGICQLSGIKLLAELGGDFVQKFPSFKQFTSWANVVPNNKKSGGRLLSSYVPKKKNKVGSVLRTVASALKQNRSPLGEYFRRVQARHGYAQAVVATANKIARILYTMVKEKNEYDPAKHARSSASLSKQIRSLEMRLQMLKMHQTEYQQTTG

SEQ ID NO: 167213 - protein, 342 aa, unidentified
MNKVAIAAIDLGKHSFHLHAQDDQGHELYRKKFTRAALAQHLANLDPCTVVMEACGGAHFMAQEVAKLGHTPKLIAPHLVRPYVKSNKNDFADAEAICEAATRPTMRFVHPKTQAQQALAMLNSVRESFIKDRTATVNRIHAALLEVGISLAPGFKSIKELPALLEMSSFSGSIKKILMGLHEHFNYLDGKVKALDKEVECQAAEDDLAARLMTMPCVGPITSSVLAAELGDGKQFKCGRGYAASIGLVPKQHGTGDKIVLLGISKRGDRNQRRLLIQCARVYLIQLERQKGALADWVRQLLATRHHSNLVVCALANKLARIAWAIAAHHSEFDAGPAAMNA

SEQ ID NO: 167214 - protein, 318 aa, unidentified
MLIHYIDIAKRNFVIAVSSLSKTKTETNNPKGIAHTIEYLKKHKVALVVTESTGGLEIPAAKAIRRAGIAVIIANPRQTHQFAQSQPLTKTDAKDAKMPAFFAQMTAQKEDSQTMPYQPPTEAEEVLEALVNRRNQPADMRTAEKNRLHQVHETQVGSVKQLIAHFDRLIDELDKQIDNHTHTHFDGKAQVAEQIKGIGSITTATLMAMLPELGRLSHKRIAGLAGIAPHPREGGETKFKSRCFGGRSAVRKALYMATVAATRFEPLIRDFHQRPLSEGKPYKVAVTACMRKLLTISNARMRDYFAENDTAENGIRTA

SEQ ID NO: 167215 - protein, 351 aa, unidentified
MLIIGCDFHTRFQKIAMMDTTTGELVTRRLEHGTGEAERFYAALAAPVRVGIEATLATQWFEKMLRHYGHELWIGDAAEIRAAMVRKQKTDDRDALHILDLLMQNRFPRIWVPSPAERDVRQLVRHRHKLVRFRTSVMNQLHALAMGQGLCLRKKLWTTVGRQKLESLTLDPWASRRRRELLELLDQLDPSIGELDRAVISEAESRPTAVCLMQQVGVGPVTALAFVLTVGPVSRFPNSKKLVSYLGLNPSEESTGGRQRLGAISKQGNTMLRCLLVEAAQTSARLDPELRRNYQRLKLRRGNSGVAKVAIARKLAVRLYWKLREADRPNTAARMQGSPVSPVVGESLSAN

SEQ ID NO: 167216 - protein, 386 aa, unidentified
MHHPTTFPVSEQTCSREDCATLFVSLELSRSTWVATSLALGSRKMSKHTLVGGDARKLLDLLARLKSRAEQRIAAPVKVVAIQEVGLDGFWIHRLLEANGVESHVVDPASIAVPRRHRRAKTDAIDGETLLRTLMAWQRGEPRVCAMTVPPTPSEEDRRRVSRERATLLRERIRHTNRIRGLLFGQGITNYNPLHKNRRKGLEELRTGDGNPVPVHLKAEILREIDRLELVLRHINEVEAERDEMLRPGQASSPVALLMRLKGIGPEFAAVLYVEGLFRQFENRRQLAAYAGLAPSPWKSGSVDHEQGISKAGNPRLRTTMVELAWMWVRYQPASALSCWFRQRVGSERGRIRRISIVALARKLLIALSRYINHGEIPAGAVVKPV

SEQ ID NO: 167217 - protein, 454 aa, unidentified
MSKQNRKVSQRGVSPVPVLEPNAAGVDIGATEIYIAVPADRDAQPVRRFATFTEDLVAAADWLKRCGIETVAMESTGVYWIPLLQMLEARGFRVSLVNPRHAKNVPGRKSDVCDCQWLQYLHAVGLLRASFRPQQQVCAVRSLMRYRESLVEMAAVHLQHMQKALDQMNLQLHHVISDLSGTTGMAILDAILAGERDPRRLARLRDPRIKADEATIRKSLVGDYRREHLFTLGQSVVAYRHYQQLLAACDVEIEQMLDEFTDGAGPDAPPLPEPKDRRKPRRNELRFDLRGHLYRIFGVDLTAVPGIQAQTAHTLLSEVGRDLSAFPNASAFASWMGLCPDNRVSGGKVLSARTRKVKNRLAKALRLAAQSLFRSQSWLGQFYRRMRAKLGTPKAITAAAHKLARILFHLLATRQPYDESVFAQQEIQNKQRMQHRLQQQAKKYGCQLVEITAQ

SEQ ID NO: 167218 - protein, 314 aa, unidentified
MSDALFVGIDVSKAHLDLAARPVGLAERLPNDEAGIGQVVARLQPLAPALVVLEATGGLEVPLAAALAVAGLAVAVVNPRQVRDFARAVGQLAKTDALDAQLLARFAEVVRPEPRPLPDAEAQNLSALLARRQQVITMLVAEQQRLPTTSPALRPRVEAHIAWLRQERDALDRELRRQIRASPAWREDDDLLQSVPGIGPVLATTLIAELPELGRLNRKQIAALVGVAPLNCESGIFRGRRIIWGGRARVRAALWMGTLVAVQRNPAIRAFYQRLVAAGRPKKVALTAAMHKLLLVLNALLRQRTPWHDSAQPA

SEQ ID NO: 167219 - protein, 427 aa, unidentified
MNYNQNHKLSQITPETLIVGIDIAKDKHVARAQDDRGFEFGKRLIFDNRIHGFEQLLNWISRLQEEHGKSELIIGAEPTGHFWLSLAYYLRAKEINFVLVNPMHVKKSKELDDNSPTKNDTKDARVVAQLVKDGRYSVPNLLDGIYAELREGIKLRDQLVKQLIVIDGRIQNHIQRYFPEFNDVFKDWEGKTALYTLREFPFPADLRDMTPEEVLAQWKTVIKRGVGIKRATQLVEKARKSVGIEVGLRFARKEIHCLLDQYELYQSQLTELDQEITEVMKDIPGAKEMMNIKGLGPITVATFFSEVGDLAKYNHPQQLVNMAGLSLREHSSGKFKGQTRITKRGRKKLRKALYLAVRPLVATSPTFKALHSYYTTRPDNPLKKQQSLIALCGKLLRVLFVIGRKQCEFDGNKLLKGLPQIEDLQAA

SEQ ID NO: 167220 - protein, 319 aa, unidentified
MTITYPIAGIDIGKDTLDISLLHANGSFEAFSFANEKASRKKLARRLKAKGVGLVVLEATGGYELPVMAALAEEGIAFARVNPARVRAFAKSMGQLAKTDRLDARCLALYGERVRPKPTPMLSENESRLNALTLRRRQLVGMRQKERNRAHRTGEPDIAHSIERAIAFLSEEIDAIDAAIETLIASAPEMAERRDLIDSVPGIAANTANVLLAGLPEIGRMGTRKLRKLVGVAPLNDDSAERRGERHIAGGRAHLRQALYMAAQTGYRHNPALKALYERIRAKGKSHKVAIIACIGKLLSILNAIIRSKKPFDPKFATP

SEQ ID NO: 167221 - protein, 361 aa, unidentified
MKKPSKHLIAEVPRSVAKARMTIGIDLGDVWSHYCTLNEDGEVVDRGRFRTTPSGVEKWFKDVPRARVAMETGTHSIWVSEQLLEMGHEVIVANVRELRAISHSDRKSDTVDAEKIARYARVDPEILRPVSHRTVAQQEALTLIRARNLIVRLRTAAVNSVRGLAKPCGYRLPASSTLCFAKRCMAVLPPGLAQALGPVLEQIAAMTVKIQQYDRTIKQLTETEYSETQALLQVYGVGQLTALTYVLTLGSKERFKRSRDVGCYLGLRPRRSQSGDRDPQLGITKAGNIYLRSLLVECANHVLGPRGRDSTLRQWGLHLASRGGRQSHNRAIVAVARKLAVLLHRIWITQELYIPFYAVAA

SEQ ID NO: 167222 - protein, 348 aa, unidentified
MLADELDYVLGVDTHRDEHVIAVVTAPAGAVVAGTAAATNGRGYRELLRVAERHAAGRRAWAIEGTGSYGAGLARFLAARGETVLELSRTPRAERRLRGKDDELDAVRTARAALASQTLALPRAGEQREALRLLLVARRSAVDVRREALTQLRAVIVTASEPLRDELRGLSEGKLLARCSRLRRSRAAVDEAASRLVLRSLARRVQAATIEAAELEQEIVAHVRALAPTLLDEPGVGPIVAAQLLVAWSHRGRLRSEAAFARLAGVAPVPASSGQTVRHRLSRGGDRQLNRALHTIVLHRRQHDPATRDYIAKRIAEGKSRRDATRLLKRYLARHLYRLLQNQEPLMA

SEQ ID NO: 167223 - protein, 419 aa, unidentified
MNEDENTRGTTRRYVALDIHKHYCVVAGVDREGGVLLQPVRVEHADLESWLKKHLCSTDQVVIESTTNAWHVYDLLEPLVERVVVANPIRVKQIAQARVKTDIRDTLILARLLAANLVPDVWVPPAHVRGMRQLLSQRRQFVETHTQIVNRMHSVAHRHHLSHARGKRFNEKTTGWQKDRTLSSLEQFQLGLEMENLAYIEKQIERISKEVRKMCHQKPWAESMTYLMQLSGFGVITAMTVLAAIGDIRRFESPKHLASYSGLTPGLEQSGTKNRGKGITKEGRKELRWALVEAAQMAVKSDPVWKTRFQEMLKRMHRNQAIVAVAHRLLELVWYVLTRRQPYRHFSQERIAYKYLTWAWQMDDAARDGLTRQQFARYYLMRLGIGHDLTRIALDPKHPRRISSEAELLALRPELNHIE

SEQ ID NO: 167224 - protein, 349 aa, unidentified
MNRTTYGLDIAKNVMQLHWVDNETGEIGRKKLGRAKLSDFFARLQPARVVMEACGSAHHWARVLGALGHQVELLPARQVRPFVRSNKDDAADARAIWLAAQQSDIRRVPQKSVDQQAALALHRTRQHWVSVRTATINALRGALYEFGVTLPGGKRVGLKALATHRAEIDAKVPATIQRLIDGQLATLRDIGCRIDKLEAEIGMQLEQLDNAATLREVPGIGLLGATAFAATLGDGKAWKSGREFSASLGLVPAHRGTGGKARVGHLSKRGDPYLRTLLIHGARSVIAHAKNKPKWLEQLLARRPMNVAVVALANKMARTAWALVAHGRDYEREWKSTPPKACTAQASAA

SEQ ID NO: 167225 - protein, 394 aa, unidentified
MYSLWVGADVSKNFFSASGLGTEGEERFSGTYEMNSQGFSVFLKTLSSQGERLDQILVAMESTGCYHINLFSFLSFQGIRTVVVNPLLISNFAKLSLRKTKTDKKDALTIARFLLNHHEEISRFSLSQDHQDLRDLSRERESLCHLMSATKVEIKRVLRTTFPELESMGNLYTRVMLRFLREYPSARLVRAAKPKAIVKALKLPFVGNKLTLTAEDIIKAAKNSVATVSPAKEIIVQGKISTLMHLQERLEELNKLLTDLCKATRVEDLNLLRSIKGVGPNTAIPFLAEVEVKNFASSKKLIAFTGLDPSIHQSGKFVGFSKLSKRGNRHLRRVMYLMATSVVSQNAFFKAYFVRRKQEGLPSQKALFAVAHKLLRVIFAMLSHRTPFEAKTAI

SEQ ID NO: 167226 - protein, 429 aa, unidentified
MNYTQNEKIEQVTDTTMVVGVDIGSQTHYARAFDNRGRELTKRVFSFQNDIEGFNSFHLWTEKLKNENKKTAVLIGCEPTGHYWFAFAKYVQDHQKTLVMVNPFSVKKIKELDDNSPKKTDAKDPKTIAKLVVDGRYSIPYMPEGIYAEIRDLVYSRDRIMKQHNISANRIQRWLAIHFPEYLGLYTRFDATSGLAVLEQAPLPKDVIALGVEGIRKIWHDKKMCGRGVTEDRAKTLVEAAHNSVGLDGGIGTKSELYMLLEEHLLRTSQLEAVNKVLEESIRKVQHVEKLLAIKGVGSVTIAGFIAEVGDIRRFKSPKQIQKYAGLELVENSSGKHKGRSRISKRGRRKLRKSLYQVMVPLLARNKEFRTIYDYYVTRVKNPLKRRQAMIAVSCKLIRVFYAVLTKGVDYDRFKMMSDIHHESGLIAA

SEQ ID NO: 167227 - protein, 340 aa, unidentified
MINILKQIFGIDISMNTFEVRFGTTDFHQDQKISNSFTFNNTTSGFKKFIQWTQKNIISKEIPLFFVMEATGVYYENLAYFLFLNNFNVSVVLPNKIRNYARSLESKSKTDPIDAASITSFGLQRKLNPWTPPNNLVKSIKSLCREYHSIKTMITEVKNQLHAKNHSHLPDKQTIKRKTLLLRMLNKQTKQIEKEIRDIIQTDKELYEKVERLDKIKGLGFISVVTVIAETNCFELVANQKQLASYAGLDVVFNDSGIKKGKTSISKRGNKFLRTVVFMPALSACKHNHKMKELYIRLLSKGKNKKLALIAIARKLLLLIYTIWKNNTDYIPNYNPIISK

SEQ ID NO: 167228 - protein, 314 aa, unidentified
MEKITVGIDVSKDRLDVAVRPSGEDFAVPRTGAGLDDLVARLKVLKPNLIVLEATGGLETVVAAALAGAGLPVAIANPGQIRAFAKAIGQRAKTDPIDAAVIAHFGEATGVLPRPLPDQATQQLADLVARRRQIIEMIGAERQRENRANPRIKKSIGRLVKALERELSSVDKDIDDAVRGSPAWREKEDLLSSVPSVGPAISRTLIAELPELGTLDRKQIAALVGLAPFARQSGQWRGKSFIGGGRASVRRALFMGAMVAARYNPVLKGFYERLLAAGKPKKVALIAVARKLLTILNAIVRDGSPWKGTVGAVS

SEQ ID NO: 167229 - protein, 347 aa, unidentified
MRFYTQQHKYYCGVDLHARSIYVCILNQEGAVLVHKNLRAKPDVFLAVIAPYREDLVVAVECMFTWYWIADLCAREGLTFVLGHALYMKAIHGGKAKNDRIDSHKIAVLLRGGNVPFSYVYPEAMRATRDLLRRRNFLMRKRAELLAHIQNTNSQYNLPDIDGALRYPANREDLSERFTDDSVKKSIETDLALIDVYDKHLKEVELYLTRHAKVDDPNSYHILKTVPGVGQILGLVLLYEIHDIARFPSVQDFVSYCRLIRCSKESAGKKLGTGGRKIGNAHLKWAFSEATCLFLRGNGAAQKYLARLESKHGKGKALGILSRKLGTAVYYMLKRQEAFDMNKFFEK

SEQ ID NO: 167230 - protein, 375 aa, unidentified
MTFKEWILDLKERHEKDKVVPGMEPTGHYWFNLGKFLQDNEMKPVLVNPHHVKKSKELDDNNPTKNDRKDPKVIAGLVREGRYMIPYLPDGVYADLRTASNIRFQLQAELTRIQNRISRWFNIYFPEYKTVYGKPDAKSGILILKAAPLPEDILTLGIDGVNQIWRDAKLRAVGKARAKTLIEAAEHSVGSKEGAVSARMEIRMLLEDYESRNIRLQEVMTLIEGLVKQIPMAEKLLEIKGVGIRTVSGFLAEVGDISRFNNPKELQKLAGLALVENSSGKHKGETTISRRGRKRLRYLLFEVAMSLVAKNSEFRELHNYYTTRRLNPLKKMQSLMAIAAKLIRVFYAMLTKGVDYDPKKMVSDIKRPAVYLQAA

SEQ ID NO: 167231 - protein, 345 aa, unidentified
MDYFAGLDVSVKETSVCIVDDTGRLVREVKVASEPEALLSVVSNPVWRFKRIGLEAGPLSQWLFSALAEAGLPVICVETRHMRAVLQAQINKTDRNDARGIAQMMRAGLYRPVHVKTLRSQKLRMLLTHRKLLQSKAIAIDNDLRGTLRNFGLKVGVVGALKFEARIRELVEDLPDLAELVEPMLVVRRTLREQIGILHGRLLAIVRTDDVCRRLMRVPGVGPVVALTYRATVDVPARFRNSKAVGAVFGLTPSRYQSGETNRTGAISRCGDEMMRAMLYEAAHIMLVRLAKWCWLKAWAMKIARQRGIKKAIVALARRLAVIMHRIWVDGTEFRWTREQVAAAA

SEQ ID NO: 167232 - protein, 367 aa, unidentified
MKKVSTVAVNQSGHFAQLKLTIGLDLGDRSSWYCVLDERGEVQWEGKVSTTAKALGEVFGKMPRSRVALETGTHSPWVSRVLSEVGHKVIVAHARNVRLIGESRRKDDRLDARTLARLARIDPQLLSPVKHRSAPAQADLTLIRARAGLVRARTALVNTVRSLAKSYGERLRSCNVRNLDPEKAEGLSPELQAAVEPLLRTVESLSEGIREYNQRIEALAKQSYPQVALLKQVKGVGTLIALTFLLTLEDPHRFRKSRDVGCYLGLQPGRRNSGQSEPQMHISKEGDPYLRTLLVQGAQHILGPFGPDCDLRRWGLKLAERGGKSGKKRAIIATARKLAVLLHRLWVSGEVYEPLHNSSPRLLPAVA

SEQ ID NO: 167233 - protein, 407 aa, unidentified
MNTAVGIDVSKGKSVVAAMRPFGEVALPPREFLHTSADLSALTESLRLIDGNTRVILEATGRYHEPIVVALRDAGIFVSIVNPKLIKDFGNNSLRKVKTDKADAVKIARYGLEYWEEMREYTETDTVRQQLKLFSRQYNLHMKTVVALQNNLISLLDSVFPEVNELFKSPVRDDGHHKWVDFVCTFYHRDCVSGVSVSAFSERYHKWCKRKGYNFSTAKAAELHAASREMVVTMPKNALTKALITSAAGQLIAATTALATLKSEFIRLAATLPEYEIVNSMYGVGYITGAQLMAEIGDVRRFANRGALIAFAGVDPGVNESGKHSAQSVRTTKRGSPHLRKTLFQIVSTHLKNSPEEEPVYQFIDRKRAEGKPYLVYMTAAANKFLRIYHAKVKEYLNGLDSVERNT

SEQ ID NO: 167234 - protein, 408 aa, unidentified
MYNAVGIDASKRKSTITIIQPAGVVIRKPFDVLHTSDELNTLVTYLKSLEGETRAVIECTGRYHEPVVKSLSEAGIFISAVNPKLIKGQKQNTLRKVKSDPADARKIAKYALDNWAELREYSSMDTTREQLKTLNSQFTFFMKQKVAAKTNLISLLDNTYPGVNKLFDSPTRDDGSEKWVDYAYSFWHVDCVRKIGLKAFTERYEAFCKKHHYNYQKNKPALLFEESKQLVAVFPKEKSYKLLIQQSIQQLRLASEHIEIIRKEMNELASTLPEYETVMSMYGVGETYGPQLIAEIGDVSRFTHREAITAFAGVDPGVNESGQFKQRSNRASKNGSTRLRKTLFQVMSTYLQNKPVNEPVYQFLDRKRAEGKPYLVYMTAGANKFLRIYYGKVKECLRNLEQSQIEES

SEQ ID NO: 167235 - protein, 507 aa, unidentified
MVLVSNEPVNQPGSESCAHATGDCPRTIAPIPFRRFLTEHARPTCGWHGENMPKPKHVQRGSRISPTIRVLEPNAAGIDIGATEVFVAIPSDRDPRPVRRFSTFTDDLNCLVDWLQTCGVDSVAMESTSVFWIPLFQILEDRGFRVCLVNARHVKNVPGRKTDVSDCQWLQYLHSVGLLRASHRPPQTICAVRSICRHRESLVQMATVHIQHMQKALDQINLQLHHVISDITGATGLAIIDAILGGERNPEKLAALRDGRIAASRETIARSLVGDYRHEHLFTLRQSLEAYRQYQQWIAACDGEIERQLRALPGNIANDQKALSRPKDRHKPRRNELRFDLRGHLYRIFGVDLTEVPGISGLTAHTLLTEVGSDLSRFPNPAAFASWLGLCPDNRISGGKILSVATRKVKNRLAIALRMAAQSLHRSQSYLGQYFRRMRTRLGTPAAITAAAHKLARILYHLITTRQQYQEATFAEMDQRARKRQFLRLAKQAANFGFQLTPVGSVP

SEQ ID NO: 167236 - protein, 445 aa, unidentified
MGRRCIGLDVHREFAQVAVWEDGLVRQAGRIALSDEALRMFADSLGPEDEVAIEATCNTQAIVRLLEPHVARVVVSNPQKTRAIAEAKVKTDKVDAEVLAQLLAADYLPSVWIADQATQALRRQVARRAHIVRQRTRLKNRVQAILHRNLIPRCPAADLFGIKGRCWLSAQPLPADESVAVDALLRQLDFHAQELRIIDAELGRVALASLEVKRLMTIPGVDATVALSIVAAVGDFRRFRRPEQLVSYLGLNPRVKQSGGQPASHGRITKQGRAHARGMLVEAAWSAAKTPGPLRAFYQRVCSRRGMQIAVVATARKLAVLCWTMIERGEDYAFARPSLTDKKLRALELRAGMPSRQGRKGKAAAYSLKEVRQRERDLAEQGERAYRQLVTDWQANRPTKPKPDPGVAAANGTRLKRPSVGQAARQASVPEPALRSGVDHALSKA

SEQ ID NO: 167237 - protein, 360 aa, unidentified
MDDGSKATPRITVGLDLGDRYSCLCFLDTESGEVIEEGRLRTTPEALRRRFCSEQWPLRIAIEAGTHSPWVSRLLEQECGHEVLVANPRKTRLIYTNRRKTDEIDAENLARLARLDPKLLYPLKHRGEHSQAHLAIIRSREALVSARTQLVNHVRGAVKSFGSRLPKCPARSFHNKAPEHIPEALWPALGPILETIGSLTERIREYDRQLEAICQEHYPETETLRQVEGVGVLTALTFVLTLEDPYRFEKSRMVGAYLGLVPARDQSGDSDPQKRISKEGDEMLRRLLVSGAHYIIGPFGSDSDLRRHGEKIATRGAKNAKKRAVVAVARKLSVLLHRLWVTGEAYDPLYNIHRRRELAA

SEQ ID NO: 167238 - protein, 430 aa, unidentified
MLNLFFISVGIDVGADFSYMSVALPNQTFVGKPFKIVHENLNSLEKAVQIIKEAEELHSMKCRIIMESTGIYHYPLFRYLSGKGFNVAVINPIITKNSTNMNIRKVENDKYMSKNLALIGLKPDLKTSVMPADAVLDLRNLIREYYNLTDCRTAYANKLKGVLRVSFPQYIGIFSKVTVQTSLALLKKYPSPESFLLAKKKSIIKIIRNTARFGEKYAEEKYHAIIEAAKSAGIFGYFVSSNSTQIDLCVKFIRQYDREIAGVLALMHKLTDRHKNETFVRQIRLVETIPGAGFLSAAAVVCEIGDFSVFKSPKQLFAYFGIDPAVKQYGNSNSTKIAMSKRGSSIARRAVFTIALVGVGLTRKGDANNPTLREYYLKKCRSKLKMVALGAVMHKVCNIIFALLRDNKEFAVISKEEHIAAYQDKHVSAV

SEQ ID NO: 167239 - protein, 411 aa, unidentified
MFEVWIGLDWGDEKHAFALHDRSGRSDKGLFDHSAENLHQWLKDLEERYGGRPVALAIEASRGAVIHALLQYPWLTIYPVNPVTSARYRSAFTPSGAKDDLPDAVVLLDLVRVHSDKLRPLETQDPATVKLAGLVETRRGIVDRRTAVINQLTSLLKTYYPQALQLLGNLNTELAVAFLNRWPDLISLKAAKPGTIKRFYYQHQVRSTELVDERLALIAKALALTTDEARVSVAILQLRQLLDQLEVFHKHIPLLNAEIKNAFASHPEAHLFRELPGAGLQLAPRLCAAFGTDRLIYPDPASLQKYAGIAPVREKSGNQLWTHWRWRAPAFLRQTFVEWAGQTVQYSPWAKVYYERMLKKGKKHAVILRALAFKWIRVLWKCWQDRKPYDEARYLKQLIHRKSPNAAPAGS

SEQ ID NO: 167240 - protein, 461 aa, unidentified
MKHTSNKQKSQEGYSTSSSLPVLFPDTAGIDIGSKSHFVAVPSERDSHSVREFSTFTASLYKMIDWLKKCKIKTIIMESTGVYWISAFELLESNGFDVKLVNARHVKNVSAHKTDVLDCQWLQQLGTFGLVKGAFRPADAILPLRAYLRQRDMLIKSAATHILHMQKALTQMNLHLHNVISDITGITGMAIIRSIVAGVTDPKVLAGFRHERCHNPKEIIEASLEGNYRAEHLFSLKQALELYDFYTQKISECDLQIKAQAKQFETKCDSEKLDQLKKKSIRKEVKKPKKHEYPFNLTSELIRMTGVDLTKIPAIGASTALTVVSEIGLDMSRWRSAKSFASWLGLCPGNKVSGGKKLSGKTKPCANRVAIALRNAANTLYRAECAFGAFLRRMKARLGSPKAITALAHKLAKLIYIMLKYGHEYVEKGVEFYEEMYQKRREASLKKKAAELGYELVSKAA

SEQ ID NO: 167241 - protein, 350 aa, unidentified
MKKLIRIGLDTSKSVFQLHGIDENEELTLKKKLRRKEVLKFFADLAPTKVGLEACGSAHYWVRELKKLGHDAVLIPPQYVKPYVDRGKNDAADAQAIAEAMSRPKVQKRFVPVKDPEQQAALMLMKVRDQLVGRRTQLANSIRGHAAEFGLVGAKGFAKIEPLLLRLADEQEVPALAKDLFAGLGQELARIERHIEKLDTRLMAFHRGNELSRRLVAIPTVGPIGACLLAAKTPDPNAFRSGRDFAAWIGLTPKDHSTAGKVRMGGITRAGDEALRKTLVLGATALIQQIRKGRSKPSPWLAQLLTRKPPKLAAVALANKTARIAWKLMVSGERYDDRRATTRALVPVAA

SEQ ID NO: 167242 - protein, 403 aa, unidentified
MSICYAGLDWASQSHAVCGIDEGGKILLELEVKHDAEGLAELCRRLKRAGVTAIAIERPSGLVVDALLEAGFAVVPIHPNVVKATRPRYRSHGGKSDASDAYLLADLLRTDGHRFKPLAPQGDEIRTLRALVRGRDDLVATRVQLANQLRELLHSYWAGAAEVFADIDSPIALAFVQRYPTPESAGRLGPKRMAAFCAQHAYSGRRSPEELLHRLHQAAVVPLGEMEMEAKGEVACALARTLVRLVEQIRLITSRIEHQVATVEDGRVLMSFPRAGRVCAAQILAEIGSVRERWDSDEHLAAEAGVAPVTYASGKTKSVTFRWACNHHLRAALTCLADNSRHASAWAADVYARAKARGCDHPHAIRILARAWLRVIWRAWQDRKPYDPSQHGGAKLLLKTAGG

SEQ ID NO: 167243 - protein, 343 aa, unidentified
MNEIKVLGIDLGKDVCSVVGLDETGKVLLRRRMRRDSVLKLAAGMPACVMAMEACCGAHHLGRQLTNQGHEVRLMSPEYVRPYVKAQKNDDRDAEAIAEAATRPTMRFVDLKSDEQLDIQSLHRARDRLVGERTTLINQLRAILLERGIMIAKGRRKLELRLEQLLAGEMAIGRRIRVLIEDMRAEWRALDARIVVFDAEFAELARTDASMKLLSTIPGIGPLNATAFVASVGKAETFGRGRDLAAWLGLVPRQMTTGGKPKLLGISKRGNGYLRRMLIHGARAALPSLAKGKTLLGEWLRGLLSRTHMNTAVVALAAKMARIIWAVLRSGRPFQMAALPSVG

SEQ ID NO: 167244 - protein, 368 aa, unidentified
MKVYNVDNFAVLIGIDWADKKHDICEHPLDSKKYHYSIIKNKPEALHDWAMDLKKRYPNQRIAVVCELKKGPLIYALTKYDHLTLFTVNPSTVAKYRKAFTPSGAKDDPSDAFVQVEILSLHMDKLSVIEPESASVRSLAQLVEYRRNLVQDNVNLSNKITAALKNYYPQVLEWFKEKDTLIFCDFISKWPSLSKVKRAKKQTLLDFFNSHNSHYAHVNDARISSIKSAMPLTEDIGVIEPNQLLVEVLIAQYRVLLKGIETLEKAIKLAYKSQDDKVIFDSLTGAGPQLSPRLFVAFGSNRERYEDASELQKYAGIAPVIERSGKKMWTHWRYSCPTFLRQTFVEWAGLSIRYSFWAKAYYEQEVSK

SEQ ID NO: 167245 - protein, 307 aa, unidentified
MRRHVGIDVSKAELVIHVLPDEQAWTQPNTPQGQRALAQRLAGMDCERIVLEASGGYERAVLQVLRQADLPVVRMPADRPRKLAQALGLHAKTDALDARLLAIAAQHIPTTPTPVVPGHQQSLRELLDLRATLVGQRDAHRRRLEHITSAKVQHRCREVIALLNQQIQTLTQEIEQQGKTCSSLPKVPGLGTILRAVLAARLPELGTLPPRKLAALVGLAPFNHDSGCWKGQRRIKGGRADVRRVLYMATWASIRAKSPLANTYARLRAAGKPAKVAIVACMHKFLRWLNAIARDQAPYAPPVIAGA

SEQ ID NO: 167246 - protein, 391 aa, unidentified
MEARTVNNLPPAGTHDDAICCVLAIELSKKSWIVAVNTPLSDKISRHTLKPSDGKELLDLCERIRTRVAKETKKRVEMVSCYEAGYDGFWLHRLLQAHDIRNHVIDPASLQVDRRARRAKTDRVDAERLLRSLMAYLRGEPKVWSVVRVPSVAEEDDRRLHRERGRLINERIQHVNRIKGLLAIHGIYDYQPLRRDRIQRLQQLHTADGRTLPPRLEAEILRELQRLEIVIGMIKTIEAERDAIASANTETERGSVKKIQHLAKIKSIGPEFATTLVGEVFYRSFDNRKQLASYVGLTPAHFQSGAMSRDQGISKAGNAKARTVMIELAWLWLRHQPDSDLSVWFRDRVGKLKGRIRRITIVAVARKLLITLWRYLETGLVPKGAALKVCD

SEQ ID NO: 167247 - protein, 425 aa, unidentified
MKITQTAQKIKVNFAMDVSVDVHKDTLNFFFETKGKEYVDECSNRTTVIQRKLKEYHEVALEHGIKTLRIICEPTGEYQNKMFRIARKMGFLTCFVNAESVCKFRIVETNDNGKTDTKDPRVIRTLGQLNKTIKHRILDDDYLTLRKLNKVLDEVDEVKKAIRCRISKLLVELFCDYSFEKDFLYGSSGKALVDKYGCNPYRIIKAGYRRFSTYMKKAVPRIRQTTLKRLWDDAQSSALNEQPEEYIEVIEIQLKQLMEDYWKHEARSDAVIERMIEVLNNLREKDPHIPKATKGVINDKHIARLLGETGPLGDFVNWRMLMRYAGLNIRMRQSGKFSGQNKITKKGRPLLRKVLQRIVFPLVRQNWLYGPYYHRKKEIDKMPGNKIVTCVSRHFLKKFYGWYKSGEAFSQQRFFSCETQYRKAA

SEQ ID NO: 167248 - protein, 346 aa, unidentified
MKYCKAKSEIKVLGIDLAKQSFQLHGVDESGQTVLRKKLSRNKLTAFIANLPPCLIGLEACGGAHHWVRTFTNFGHTVRMMAPQFVKPYVKSNKNDAVDAEAICEAVQRPSMRFVPAKRIEQQDIQSIHRIRSLLVIRRTAQANQIRGLLLEYGIIISKGIAYIRTRIPEILEDAENGLTSLFRELLSELYEEMVHLDQRIGTLEQKLQAISLQNKDCQRLLTIPGVGLLTATATVAAVSDITAFKNGRELAAWLGLVPRQHSTGGETTLLGISKRGDSYLRTLLIHGGRTVVRVAGKYQDKRNRWVSELDQRRGKNISAVGVANKNARIAWALLSKKENYNAAAA

SEQ ID NO: 167249 - protein, 418 aa, unidentified
MSEATPTYDLIVSIDRSDKSLAVVLLHPTSGVLGEQTVSTAVEDLDRWWRQLQADHPHAKLVVAFEQPAPNLVAFFAPRGAAAIYALNPSATWAYRRSLVVSHARTDSSDAKHQALFVLHHRADLKEWKPPAQSVVELDRLCEARRKFVDERTAMTNRLQATLKRYYPQALQLIHEDIWRTMNLEFLRRWPSPQALKKSRLATLKSFYHKHGSRSADRWEDRSAVLEALIPLVAEAPLSDLVEVATLVDILEALNTAITRYDSAIAELFAKQPAAQLAQVEAMPGAGPILSPRLYVAFAQFAETCPRAADFAAAVGVAPVTDQSGKMRKVYRRLRCDKHTRQTFVEWAKEACKHSTWAAAYVERRKKAGHGFHVILRGLAYKWIRILWRCWHDAVPYDEAKYLQRLREKGSPLVANTP

SEQ ID NO: 167250 - protein, 457 aa, unidentified
MTGRKRRKLSRRSITSIHANAAGIDIGATFHVVAVPPERAETSVRTFRSFTGDLHQLADWLGEVGITTIAMESTGVYWIPAFEILEARGFEVLLVNARNVKNVPGRKTDVNDAQWLQQLHEHGLLRGSFRPRGELVRLRALLRHRERLIDQAATHIQRMQKALMQMNVQLQHVVTDITGVTGMKIIRAIVGGVHKPDVLAQHRDVRCKQSVETIREALTGNYRLEHLFALRHELQLYDFVQARVTECDVEIEAALGELNHDRTAPDEAIPRVRHASGKNEPKFDVRGALYTLLGADLSQIHGLGPYTVLRLVGECGDDMRKWPTAKHFTSWLTLAPGNKISGGRVLSSKSRRSSNRAAALLRIAAVNVGRTQTALGAFYRRVGARVGKAKAVTATARKLAVLFYNALRFGLAYVDPGTDYYERHYQERVLHNLQRRARQLGYTLVEAAAPSPSTGVS

SEQ ID NO: 167251 - protein, 405 aa, unidentified
MLEPIVKRVAGLDVHKMVIVATVLLTHEDGVTRKETREFGTFRKHRRQLARWLTRCGIELVVMESTGIFWKSIFETLEKAAIKTYVVNARHVKNVPGRKTDVMDSEWLATLARAGLLKPSFIPPKDLRELRLIGRHRMKLHGMLAGEKNRLHKILDDAGIRLGGVVSDINGVSAREMVAGLIENKPVKELVQCARGRLKAKMEELSDSLSESISERHRFLLRKVHAHIRSLENEIKEMDDYLFKAMTPYQEQWGILQTLPGVDKFSSAMLLIEIGTDMEQFGSSGHLASWAGMCPGNNESAGKRKNGRARKGNRSVRRVLCEVANAARKTNSQFKGKYQSLVIRRGHKRTIIALGHKILRVIYSMLKNNQPYWDPGIDYEALTVRRNAPRWLRALNRYGYLPAEA

SEQ ID NO: 167252 - protein, 370 aa, unidentified
MAKRNMFVGMDVHKDSIDISLAEEGRDGEVRHYGGIPGDLEALAKVIKALRAPTRRLRFVYEAGPCGFGIHRYLTAQGEDCVVVNPSSMPKRSGDRIKTDRRDGDALARLHRAGELTAIYIPSDEDEAVRDLVRAREDAVGLSTQAKHRLKAFLLRQGRRYPGRAGWTQPYRRWLADLSFPLAPQHIALQEYRDTIDETERRVERLTDQLRQHTPTWRWAPVVDALQALRGVSFVTAVGLVAEIGDIRRFDHPRQLMAFLGLVPSEYSSGPSVRRGGITKAGNPHARRLLAEAAWAYQGVPRIGRQMLYRQEALPKIVGDIAWKAQLRLTSRFRKLVARGKAKPKVATAVARELTGFIWAIAREVPPPPA

SEQ ID NO: 167253 - protein, 346 aa, unidentified
MDATTVAVDLAKTVFELAISNAQWRIVSRQRLNRKQFTRFLAEMPATHVVMEACGMAHYWGRVAQQHGHRVTLVPPAYVRPYVRRNKTDRADAEAILEAIRSGEMPSVPVKRVEQQALVALHRVREQWMTTRTARINTLRGILREHGVLLPAGAAAAVQAVPRLLEEAETTLPRYLRTVLTRVHEEIRALETRIAELERELRALAAADPIVTRLQTIPGIGLLTATALVGSVGHIHAFKRARQFASWLGLTPREHSSGTRRHLGGISKRGDGYLRCLLTHGARAVLVAAERRTAAAQPLTPLHHWARTVRNRRGHNKATIAVANKLGRTVWAVWHKDTPFAVPDAA

SEQ ID NO: 167254 - protein, 453 aa, unidentified
MAQIKRKISFKPSKSKAALSITHPNAAGIDIGSASHYVAVPADRDDEPVREFSSFTVDLEALADWLKACGVDTVAMESTGVYWIPLFELLESRGFNVMLVNARHVKNVSGRKSDVLDCQWLQQLMTYGLLRGAFRPSDAVCPLRALWRQRGMLLKGQARQVQHMQKALTQMNIQLSNVISDVVGETGQKILRAIVAGERDGQVLAAMKNVRIRASLDEIAKSLQGNWRIEHLFALKQALDMFDFIGTQLTECDREIELQLQSLQAHDGEPAKGKKHGRARNAPKFDLRTQLFRMCGVDLTRIDGIDVTTALAVISETGADMTRFPTVGHFASWLGLCPGTKITGGKVMSGKTKRVANRAAQALRLAAAALRSSQSALGAYFRRMCARMDKPKAVTAAAHKLARLIYTMLTKGEEYTDQGQDYYEERYRQRVLRQLNQRAEKLGMKLVVNEQTA

SEQ ID NO: 167255 - protein, 320 aa, unidentified
MSASSVVVGIDVAKAHVDVSVLGARLDAQRFDNDAEAHSALAAALQPLGVALVVMEATGGYEAALACALQAVGLPVAVVNPRQARDFAKSMGRLAKTDRIDARLLAEFAGVLVRRDDLASFIRPLADAQQQALAAMVTRRRQLVTMLLSERQRLQLAVAVVRPSIEAMITAIRKQLDDVEGQMVTHVLAHHAELDKLLRSASGIGPVASATLIAELPELGRLNRREIAALVGVAPMANDSGNSRGRRRVQGGRFEIRRVLYMATLTAARHNPAIKAFYDRLLAAGKLPKVALVACMRKLLTTLNAMVRTDKPWDRSLHGA

SEQ ID NO: 167256 - protein, 347 aa, unidentified
MAMTIVEAARAVTGGVDTHLDVHVAAALDPVGGLLGTEGFTADPAGYKAMLSWLEGFGEVAKVGMEGTGSYGAGLARFLRHQGIEVVEVDRQSRQARVRHGRSDPIDAVEAARATLAGRASQPKSMDGAVEAIRVLVVAKRSARQARSKALTQMRHLGYTAPDQLRCQLKGLAIPALVTTAASLRPTRSPDPVTAGTKASISSLAHRVRFLDAEIAELDELIEPLLFATAPELLALKGVGPDTAASLLITAGDNPERLRSEAAWAHLCGVSPIQASSGKVTRHRLNRGGDRQANSALWRIVMVRIAHDPDTKAYLERRVKEGRSKREVIRILKRYVAREVYRHLPRG

SEQ ID NO: 167257 - protein, 326 aa, unidentified
MPGDGHVTKAIKEGGDMDVIIDKGCGLDVHKETVVACVMGEGIKKEIRTFSTMTEDLFRLKSWLSEKGITHVAMESTGPYWKPVFNVLEDSFEVILANARHIKNVPGRKTDVKDSEWICKLLRSGLLAASFVPPQAIRELRDLTRYRRKLTQSISAEKNRVQKVLEDANVKISSVVSDTFGVSASRMIDALMAGNLNAESISDLAVGKLKGKKEELKKALVGNFQEHHRFMIQASLNHIGFLEKIIAELDQEIARKLKDYHKEYELLQTIPGVKEQGAASILAEIGADMDIFPSDGHLSAWAGMSPGNNESAGKKKVERRPTAIRI

SEQ ID NO: 167258 - protein, 359 aa, unidentified
MKKEQRKQISFKGQRIFIGIDVHLKSWSVTIASEHTVLKRFTQPPSPEALYSFLTREYPDAEYKSVYEAGFCGFWIHERLMELGIDNIVVNPADVPTTTGEKLRKTDAIDSGKLARSLRAGELKGIYVPDKVSLEIRSLIRLRDSITKDQTRQKNRIKSHLRYLGIEIPQEYCERGRCWNKNFVAWLRSVESTCEYGRLTLDQLICQYEDLRKRRLEMIRLLRNLSRTERFAEPLKWLMSVPGIGQLTGMAFISEIDDISRFKNADHLASYIGMIPMCHSSGEHDGAGDLTLRAHSKLRRVLVEASWVAIRQDATMTQAYTEYCRRMKPSKAIIKIARRLVNRIYFVMKHKKEYVNNVA

SEQ ID NO: 167259 - protein, 409 aa, unidentified
MRIIGMDIHRVFAEAVALEDGETKRLGRIGMTREHLEDFARTLLPSDHVVVEATGNATAVVEILAPRVARVAVANPLQVHLIAKAKIKTDAIDARVLAQLYAAGFLPEVWIPDAATLARRRQVTRRTQLVRQRTRLKSVVQSILHANLIPPCPFADLFGGKGRNWLRAQYLPDDEREAIERHVEEYDRQSDALKGVERDIARAALSDPNVTRLMTIPGIDMVVAVGLMAAIGKIERFDNPDKLVAYIGLNPSVHQSSDGPAHHGRITKRGRANARHLLVEAAWQTVRSPGPLRAFYERVRSKRGNHIAAVAVARKLAVIIWHLLTKGEDYSWVRPSLHAKKLRDLELRAGHPPRRGQKGAGYDYNITQRRREERNRAQQAEGAYRRMTDGWRQRGPRSKPTDATNEERR

SEQ ID NO: 167260 - protein, 348 aa, unidentified
MEYIGMDVHKRESQVCILGEGGAVVVERRIRTERSRLAAVLGERPRARILLEASTESEWVAQTLEALGHEVIVADPNFAAMYASRSRRVKTDRRDARTLAEACRVGAYRPAHRMSAPRREVRAALAARDALVRTRVRYISLIRALLRREGIAVGSGSSGAFLRRLAAITPPAALQAALAPLVTVLEPLNAAIAAADAWITEAMERDPVAGRLCTVPGVGPVTAAAFVATLDEVTRFRGAPQVAAYIGLVPQERSSGDRQHRGGLTKAGNARARWVLVQAAWAIWRDRTPRTATLRAWAERIAARRGKRVAAVALARRLAGILYALWRDGSAYEPQRVGRRPAVPRAAA

SEQ ID NO: 167261 - protein, 350 aa, unidentified
MSQNLNSAVAVIGIDIGKNSFHVVGLDDRGAIVLRQKWSRGQIEARLANMPPCLIGTEACVGAHHLSRKLKALGHDARLMPAKYVRPYSKGQKNDFRDAEAIAEAVQRPTMKFVATKTADQLDLQALHRVRERLVSQRTGIINQIRAFLLERGIAVRQGQRFLRAELPRILATPPDVLSARMVRLISDLAEDWRRLDQRIDCLSSEIAVLARQDAGCERLMSVPGIGPIISSAMVAAIGTGDAFAKGRDFAAWLGLVPKQISTGDRTILGKISKRGNRYLRVLFVQAAWVVLVKPMSWERHGLKHWIEAARKRLHRNVLAIALANKLARIAWGVLAGSGRTFEASKLQAA

SEQ ID NO: 167262 - protein, 344 aa, unidentified
MLYVGLDLSRKRLDWQALAGDGQRVEIGAVPPDADGLAKLTQRLGDADVVAVIESMSGARFVHDRLELAGWDVRIADAAKARGIAPLACKTDTIDTWVLAELARLELVPEIWLPDPEIRAERERARFRLHLVKHRSALKNRVHAILFQHGVANPLSDLFGAAGRVLLERLRLPEPWTSTVGASLALIDVLDEQISACERELRELGAEHRYIPLLLSCPGIGWVLAFTIASEIGDIARFPSPRKLVGYTGLCPRVDQSGERDRRGPLRKNGPNHLRWALVEAAHTAYRHPLYRPLLERKRAQLGKKRGTKIAAIDVARKLTEAIWHMLTRNEPFAPAGATVSLAA

SEQ ID NO: 167263 - protein, 321 aa, unidentified
MTSRGAEKMNNDTIGVDISKDGLDAHRLADGASRRFANDKAGHKAFLRWCAEKALERVVFEPTGPYHRAFERALGQAGVPFAKVNPRQARRFAEATGKLAKTDRLDAAMLARMGALLQLPIRPPRSEIILELKELHLAREALVKDRTAAKNRGKVLVLALLKRHNAQRLEQIERQIAAVEAAMRGIVNADANLCARFDILISIPGISAITAFTLLVEMPELGTLEAGEASSLAGLAPIARQSGRWTGRSFIRGGRAGLRQALYMPALVAMRFNPDLKAKYRQLVAVGKPAKVAIAAIMRKLIVLANALLKANRPWQPKLAA

SEQ ID NO: 167264 - protein, 394 aa, unidentified
MKLVGIDVGKNSHHFCVMDKETGEFNVAPSSFSNNKEGFDFLINSLKPYSKKSILIGMEDTGHYHVALLKFLLSNGYTVALINPKTTDLTRKMEGGITKNDKLDTITICDVLDTPERKKQYRITKVDRFDLYEQRQLTRHHHNLKEELNVYCNRLQKSIDLVFPEFNTLFSSKYGIVYMNLLKTFGSAEAIASTDIRTIRKFFEIKGKGNRISLTPEKLKECAKNSIGISSEVETIQIKHLVSQITLIKEQIAEIDKKIEEFSITNNSPILSIPGISHFSGTSILAELGDIGNYSKPSQIIKFAGVAPYHYESSQYNAQHTGITKKGSKYLRKTLYQIILTVINNNPVFKKYYLLKISQGKGHRCAQGHCIRKLLRIIYHLLETGQSFDPALLR

SEQ ID NO: 167265 - protein, 357 aa, unidentified
MKIVGCDLHARQQSIAMMDSETGEFVEKTLLHKGSAVRDFYAALEGPVVVGIEATGSMQWFLELLEELGIECRVGHPAKIRAAETRKQKHDRRDARLVLDLLLRDRFPEIWMPSTEQRDLRTLLRDRHQWVKMRSRLQHTLQAIALNHGLRQGSRLWSQAGQTALQALPLPAYSSQRRAELLSLYIQLQKRIQKLDQEVEAQVQQRAQARRLLTHPGVGPVTALASEVFLGDPTRFANGNKVGSYIGMIPCEHTSGKRQRLGKMTKQGNALLRYLWTEAAMHAVGKDPELKRFYRRKLIQKGMGKARIAAARKLGIRLWIMMRDQIDYQEFCRRGKLRQSGEAHAGMPDFNSGPALQ

SEQ ID NO: 167266 - protein, 316 aa, unidentified
MTVYTRFLGVDMGKFTFVAAAYEDKATKEYKNTPLGITQFVKDHACVLADALTVVETTGGYELPFIYALVSHGFKVHRADTRKVKNFIRSFGNAAKTDALDAKALAKYAHERGDSLDLFCPTLKDHRDIFALVQRRNDLTRMLVAEKNRSQSPNECAKVKSMITKLITVLSKQIKLVEVQIEAIIDNNPELKKRRDILKTVPGIGKVIAVQLITLLPELGTVCRRKIASLAGVAPRAQDSGRFSGYRRTGPGRSGIKSILFIAAMAARNSKSPLKVFYEKLIQKGKKKMVALTALMRKILTIANARLKSNGTLKHS

SEQ ID NO: 167267 - protein, 355 aa, unidentified
MNKINSNFAGQTIFVGMDIHKTSWNLGIHLNDMFVKNVHQKPNPAIMANYLKQHFPGAHYKAAYEAGKFGFWIQRQLAQLDIECLVVNPADIPKSQKDSLQKTDPRDARNLGLRLQSGVLRGIHIPDEQQEADRVFFRHRKRIWKDLARCKNRIKGCLAFSGIDIPEQYDNASWSHNFINWLKALDCKQQSRRKALDYMISQMEFLRKELLGISNAIRKMMREQRYNTNYYLLRTIPGIGPLTAASILVEIGDIKRFETFYHLNSFVGLLPMEHSSGQSENKLSLTVRKHRQLRSDLVESAWTAKRTDPAMALYFQEQVKRKDTKIVIIKIARKLLNRIRFVLINQQPYEFGIVK

SEQ ID NO: 167268 - protein, 339 aa, unidentified
MDITTIGLDLAKTVFQVHGADRKGQPVLRRKMRRGQVLKFFAGMPPCLIGMEACASAHYWAREIEALGHEVRLIPPQYVKPFVKTNKNDAADAEAICEALVRPTMHFASVKSADQQSALMLHRARELLVRQRTMLINALRGHCSEFGIVVSQGAVRVNELIAIIEDTNDARLPSLAREALGALVAQLHTIKTEVADLERRLKAWHRSHETSRQLATIPGVGVITATALVATIGDGSQFKSGRQLAAWLGLVSRQHSSGGKDRLGRISKRGDGYLRRLLVHGSRAVLRWRRAKPEMHLPWIKGLLARRPTNVVLVAMANKTARVIWAMLRDQQDFDQARA

SEQ ID NO: 167269 - protein, 355 aa, unidentified
MDSTKYIGMDVHKESISLAVRNAAGKVVMESVIETKANMILQFLDGLRGEVHVTFEEGTWAAWLYDLLRPHVARLVVCDPRRNALLLKGNQNDRIDARKLAELLQNNQLRPVYHGDHGLRTLKELVRSYLAITDDLSRVMNRTKAIYRSWGIPCTGKEVYSPRHRGKWLGKIQELGVRRRAEFYYQQLDALRSLRREVRRDLLVESKKHKVWKRLCQIPSIGPIWAAVLLGILQTPHRFRTKRQLWTYSGLGIEVHSSADHQVVKGQLQRKKKPVEVRGLNENCNHDLKNLFKGAAVIASSKPGPFQEFYAALLTKGMRPEMARLTLARKIATIVLIVWKKGVCFDANHLKPQTA

SEQ ID NO: 167270 - protein, 337 aa, unidentified
MEQHRQYVGIDLHRRRSVIVRRNEAGETLETVRIANDPIELSSVLARAGEHPDVILEATYGWYWAADLLSECGATVHLAHPLGNNWGRRRMKNDERDATDLVDLLRLGRLAESWIAPPPLRELRELIRYRGKLVHLRSSLKAQVHAVLAKEGVAVPMSDLFGVKGQRLLDQLGLADAYRTRVESLRELIEHVDRHVAMLEAEIAPVLAGDLSYQAVQRIPGVGPVLGSIFVAEIGDITRFKSARHLCSWAGLTPSHHESDTTVRRGHITKQGSRLVRWAAVEAVAHQHGWNPVSTQHHRVAERRGNKIGRVAAARKLLIYVYYALRDGEVRCLAQTG

SEQ ID NO: 167271 - protein, 487 aa, unidentified
MNEREQAKTRGDGATQRRASGRRSSRSASNARRYNAGQSKPDRSVVAVPGRFVGLDAHKRQVTVCILDAAGEVVQERSLPLVEAGWHLLLEMLQPQDQVALEATTHCWELARRLEPHVARVVVSNPLLTRAIAHAKVKTDRVDARVLAHLLRLEYLPAVWHPDETTLQLRQLSARREALVGQRTALRNRIHSVLAMRLLVPPFGLFTQKGQAWLQELLESEALDEDARLMLQSDLRLLQAVQEQIERLEQRLAEVSYPEESIRLLMTLPGVDLVVAVSLWAAIGDIRRFPSPDHLASYLGLVPSTRQSADRCHHGPITKRGRSQARWMVIQAAQQAARHPGPLGHFFRRLKRRKGHNVAVVATARKLVTIAWHILTKREPYRYAVPRSTEAKLARLRVRATGERRRGGVPKGQKATAKRPGGSRTIKSLDRVYASEGLPPREPLPAGEQRMLRSRRLTPFVESLGHDHILPRRDDSAEKAKKRPTPS

SEQ ID NO: 167272 - protein, 341 aa, unidentified
MKNTTSISIDLAKNVFQVAVFNKHGNLKSNQAMSARKMTLLVAQHPEANICMEACGSAHHWGRQFTKEGHEVYLVPAHIAAKYRSGNKNDPKDVLAIYAAAKQPDTHFVAVRTLEQQDLASQHKLRQGYVKQRTELANRIRGFGMEYGVKFPKGIGNLRRRVPEALEEGENELTDTARRLLRNLLDHLLALDAEIAEVTKLLVEQTKQIPACRELVRIPGIGWLVAGALYVRLGNGSAYRCGRDASASIGLVPGHSGTGGHNKMTGITKRGDKYLRALLVHGARSAVSHVRDKQDGLSVWIRKQLATNTMNKTTIALANKLVRMAWAILSSGGQYREPVAQ

SEQ ID NO: 167273 - protein, 385 aa, unidentified
MFYVGIDIAKNKHDLACIDETGEIAITNFRFANSYQGFHQLKLKLKQLSPITQDVQFALESTGHYNYNIVAFLRELGYNVFAYNPFIIKQFANSQSLRKTKTDSKDALLIARKLRSDVTPEYYQTDKVMDELKELTRYQNRLIHSRSKCKNLYVRLLDIIFPELHGIVKNLHNQFVYELLTNYPSSQKIARAHFSSLLKIKRLTADKAHQIQEAAKQTIGNASPALSLELVQLIESIRHYDKQINQVQEEINLLMVELDSPITSIPGIGTRLGAIILAEIKNIRNFKNPNQLQAFAGLDPAIYQSGQMDNTGHMVKRGSSYLRYALIQAAKLMSVYSPHFKAYLRLKISQGKHYNVAVTLCRQKLTRIIYHLLKANQTFDEAKLR

SEQ ID NO: 167274 - protein, 400 aa, unidentified
MDERQRFSWFLGIDISKETFDACCIASHGERFFNLSASMDRKGFEELIKQLSALSISQEFVLVGMESTACYHINLYSFLISLGYSVIVLNPLLISNFVKLQLRKTKTDKKDASVIAQFLLLNRDSLSQVVLSSEISDLRDLSRQRESLVDQMSSTKSEIKRLLTITFPELEQIAGVFSKSMLRLLCQYPSAASIKQAKRSQIAKILIPGSYGKQTDASVDRILKAARGSVGTSSATKEIILRQKASLLIQLGQHLQELTDILIELCQGRIKGDTDILTSMKGIGKKTATNFLIEMGGDIKQFESHKKVIAMAGLDPALYQSGKIDRKGKISKRGNRHLRRVIWLMTTKVIQFNGRFKKYYLRRINDGLPYKMAVLATAHKLIRVMFAMLRNKTLFDARLN

SEQ ID NO: 167275 - protein, 337 aa, unidentified
MIIIGCDFHPSFQQIAMLDTECGTTTEHKLMHTSGEAERFYRALTSPALVGIETVGNDQWFVQLLQRLGHEVWVGDAAQIRASYVRRQKTDRRDAGHILKLLIEGRFPRIWVPGSQMRDHRQLLVHRHKLVQIRTRVKNELQHLMLNQGMQKKQKLWSTEGRAALRALSLDPWADRRRHDLLHLLGILDVQLEKLDDAVKQVASQYPDVQLLLSQPGVGPITALAFVLTIGDVRRFPRGKQVASYLGLIPRERSSGGKQKMGGISKQGSRLMRFLLVEAAHIAVRFDPDFRKEYSHRCHQKHFIVAKVAAARKLAIRMYWILRTQKPYPQVLSSRAA

SEQ ID NO: 167276 - protein, 417 aa, unidentified
MNQHNNSGKKSEPTTKRVKSRGPVRRDTKDVLAELVGKLKEKLDPKKLAATSAGEKRKRGELRPNLDRLTVGVDLGDQWSNYCILDLEGETLAEGQLRTTQEDLAEFFQALNAARVVFEVGTHSPWVQEVIGGCGHEVLVANPRMMDGSKRRKRKNDRIDANKLARLGRVDPQSLHPIRHRSREVRQDLAVLRARDALVAARTELINAARGLVKSMGTRLPKCSSPSFAEKVEGTIPAELSDALSPLVRMAAALSDCIQEYDEKIEKLGEKYGHTALLRQVKGVGPITSLAYVLTLENPDRFVKSRDVGPYLGLVPKQEDSGEIQPQLGISKTGDTMVRKLLVGSAHYILGPFGPDTDLRRYGLRLCERGGKNAKKRAAVAVARKLAVLLHCLWVSGEVYEPLRQGTSATMAPAVAA

SEQ ID NO: 167277 - protein, 306 aa, unidentified
MDAKYVGIDVSKDRLVRPTGEAFAVARDGEGLADLITRLKPLAPRLVVVEATGGFEMTVSAAIAGAALPLVVINPAQVRHYAQALGRRAKTDAVDAEIIARFAEATRPEPRPLPDEATQALADLVTRRRQIIAMMVAERQRAGRLPKRLKRSCERVVRLLEKELAALDQDIDDTVRGSPAWREKEDLLASVPSVGDITARTLIAELPELGTLDRRKIGSLVGIVPFTRQSGRRQGKAFIGGGRPKVRAALFIATMSAVRHNPIIRAFRERLLAKGKPKMVVMVACMRKLLTILNAILRDRKPWQPA

SEQ ID NO: 167278 - protein, 411 aa, unidentified
MHNRQNYLYVGVDLHKEHHTAVIINCWQEKLGEIQFDNKPSAFSKFLLEVETYVSDGLSVVFGLEDVGGYGRALGKYLVDHEQVVKEVNPALSFLERKSHVTTQKSDSWDAECVARILVNKFNQLPDAKPNDLFWSIQQLVSRRNALVKAQSALKNQLHIQLNHHYPSYKKFFSELDGKTALAFWQQYPSPSCLEGANIKQLTAFLLDVSNNTCSVKKASEILKLVKEDGHTMKEYQETRDFLVRSIVRDIEFKKTEMKYIERELKQLVKLLAYQLETMPGIELVTASALIAEIGDVRRFPNANKLARFAGIAPVYFGSGGKGKTHKSKQGNRALHALFYNLAVQQVQVAKGSKMPRNPVFHAYYQKKLKEGKTKGQALVCIMRRLVNIVYGMMKYKTAYELPVVEEKEVV

SEQ ID NO: 167279 - protein, 425 aa, unidentified
MDEVDEQELHVERVAALDLGKAVLEACVRVPHESRPGRRMQELRGFATTTSALLAMADWFRCWGVTRVVMESTSDYWKGAYYLLEAEGFECWLVNAREVKNVPGRAKTDKADAVWLAKVAERGMCRASLVHPKPIRELRNLTRYRRSLIRDRTREMQRVEKLLEDAQIKITSVVSDVFGVSGRAILHALIDGQRDPAVLAGLAVGRLRPKTAQLAEALRGFFTDHHATILAMMLDNIDRLSAQITALDTTIGDAVDPFAHQVAQLGEITGAGRTAAQELIAELGVDMTRFPSDAHLVSWAKFCPQARESAGKTKNKGRAKGSPWLAATLGNIAASACRTDTFLGARHRRIAKRRGTQKAIVATGNAVLVIAYHLLADPTVRYHDLGADHYDTRINKHRRARNLATQLQALTGQKITIRDGKAIIA

SEQ ID NO: 167280 - protein, 375 aa, unidentified
MLSKRINQNEKSLRALFSAFSAHDHKVLVVVDQPNNIGRLTVAVAQELGIDVRYLPGLAMRQLSRIHAGNAKTDIRDAYIIAHAAKNLPESLRSVDRVEEAFLQLKVLNGIDEDLARSYTRLINQIRSALVGCYPQFEQALRGQIIHRKWVLHLLARYGGPTKIKRLGKAKATAFARRYKARNPEPVLDAIFAAISEQTVAIAGAHYAEMGVAMSAKDALLKLEHRTQIEQEVIELINDIPHTQILLSMPGIGPKTAAQILMTAGDMTDFPTAGHLASYAGLSPRTNQSGTSIMSNSLNRAGNKKLKNALWQSSFASIRFHERSRQFYERKRREGKRHNAAVVALARRRLNVLYAMMRNHKHYHDPAPSQEDLAA

SEQ ID NO: 167281 - protein, 367 aa, unidentified
MENHSIVWVGMDTDAKKNQVSIYRGWDSQPGTEFETGMDGRGIKRLIERLQKEEGEVRCVYEAGPCGYQLYRKLRQAGISCAVIAPSLTPRKPGDRVKTNRRDARNLGRLYRAGELTVIEVPNEQQEAVRDLMRAREDVREDLTRRQHRLSRFLLRQGYLYQEGEKWTKKYWAWLRRIQFEDTNLQTVLEQSIRAVEESQEQLKTLDARVEDNANRPEYAKKVARYKTLRGVKTITAMTLVAEGGDLRRYATAPQFMGSTGLVPSEYSTGDHERRGRITKTGNAHLRRVLVEAAWHYRHRSTTGNAIRKRRRQQPQAVVSIAERADQRLNRKFHRLVDRYNKKPVIAAVAVARELAGFVWAIGQLQD

SEQ ID NO: 167282 - protein, 327 aa, unidentified
MVIGKTVRTNSDGHLELVRWSVQFDEVSFALEDCRHLTRRLEADLLAAGCRVVRVPTKLMAGARRAAREPGKSDPIDAEAVALAALRHPDLPVAELEGPAREVKLISDHRHDLVVQRTRIASQIRWYLHELDPDLLIPSRGLRRHCVVARLRTELDRVDGVVARLARNLLVRCDELNRQINALEVELRELVRRIAPSLLSIPGCGVLSAAVMIGETAGVHRFRDKDAFARFTGTAPVPVWSGASAGKVRLNRGGNRAMNCALHMIAVTQARGVGAGAAYLAKQHARGKDKTAALRLLRRRLSDTVFSALRTDQPASARAPVVTMLAA

SEQ ID NO: 167283 - protein, 340 aa, unidentified
MKVTTFAVDLAKRVFQVHGFSAMGEKVVARRLRREEFLRYFAEHGGGCRVAMEACGSAHYWARELTGLGYEVRVIPAQFTAAFVIGNKRDASDADAIFEASRRAQIRPVPIKSEEQQAIQALHRVRARQVRSRTALMNQLRGLLAEFGYVFAAGAGSLLRGVETVVEQGQLPWLMAEQALELREEWRLLDERIRSVDRRLKALYGQLEVCQRLGEIDGVGVLTATAIVARVDDAGVFHGGRQFSAWVGLTPRESSSGEQRRLGAMTRRGDTYLRTLLMHGARAVVHAARRRSDPRSRWIQELVARRGVHKAIGAVANKNARIIWALLQSGERYRPPGAAI

SEQ ID NO: 167284 - protein, 356 aa, unidentified
MKNHHSFKDSVILGVDTHLDIHVGAVLSYDGKLLGTKVIQTNQVGYEELFDWVLTFGSVERAGIEGTGTYGAGLTRFLIKKGLDVLEINRPDRSKRRLKGKSDPLDAENAARTVLSGSAKAVPKLQSGACEALRIISVARRSAVKAKTQAINQLRALLVSAPQDIRDILWKSKPLECVNACMSFESAEKSPLLLALCCTLRSLAKRWLALAEELTQLDELLDNLTQEYAGSLRRQFGVGPQTAAILLAVAGDNPERLKNEAALASLCGVNPLPASSGKTIRHRLNRGGSREANNALWTIALVRMRSDPRTKVYVQRRTGEGLSTKEILRCLKRYIVRELYPLILTDLGRAQLRALT

SEQ ID NO: 167285 - protein, 315 aa, unidentified
MKKFVIGVDPHPTTHTASALDENGKVVDTLRVENTEEGLTALLGWSNRFPGRRWAIEGASNPFVSAWVASLLAAGEEVANIPPSLTSQYRSRRSAKKNDAVDAQNVARALLANPELMLGRAPCPEQRRLQVLSRTRSRLATQLKANRMALKELPESSPERAVVEEVAGCLAEQVGRLGALLGEVIEEVMPEVLEIRGVGPVLGATILAEVGDVSRFASSDKFAGYCGGPVDRSSGKSSRVRVNPGGNRTMNYVLHMIAQVRLRTDERSRILVERKMREGKTLRAALRVLKTYIARELYRTLKTIRQARDPDLAAT

SEQ ID NO: 167286 - protein, 354 aa, unidentified
MQYIAFDSHKRYTYAVVEEKEKGRVMEKRIEHRRGEIEAFLSQCEVGSPVALETIGSWYWIVDEIEAAGMLPRLVNARKAKMMIASSKKTDRLDAKGLNTLQRTGTLPTVWIPSSELRDIRELYRTRMVLTQMVIRLKNRILSCFSKYGISFDETSDAFNIKGRASLEAALEILPTQTCFAVKELLRQLDLLQEAVKEFEARMLQVQSNDPEIKLLQTIPGVGPILSYVIAYETGDIHRFPSASCFASYAGTTPSVHASGGKVRYGHTASDVNHYLHWAFIEAANVISMRHEVLRFRHTARLYERLRQAKGHGIAVGAVARHLAEATYWILTTKTAYREPNQNKQVVVVSSKEG

SEQ ID NO: 167287 - protein, 400 aa, unidentified
MISTDGVDVFLGLDVGKQTHHGHGLTPAGKKVFDKPLPNSEPKLRAVFDKLKDKFGTVLVVVDQPASIGALPLTVARDAGCQVAYLPGLAMRRIADLYPGEAKTDAKDATVIADAARTMPHTLRSLDLADEVTAELTMLAGFDQDLAGEANRTSNRIRGLLTQFHPSLERVLGPRLDHPAVTWLLERYGSPTALRKAGRRRLVEAVRPRAPRMAQRLVQDIFAALDEQTVVVPGTGTLDVIVPSLAKSLAAVHEQRRALHARIEALLEAHPLSRVLTSMPGIGVRTAAILLTTVGDASTFPTAAHLASYAGLAPATRQSGTSIHGEHAPRGGNRQLKRAMFLSAFAALHDPASRSYYDRCRARGNPHTQALLRLARHRISVLFAMLRDGTFYEPRTPRTA

SEQ ID NO: 167288 - protein, 342 aa, unidentified
MEQSIRCGIDIAKLVFQIHGVNAKSGETVMVKKLARHDMLRFFANKPSMLIGIEACGGAHYWARELTKLGHTVKLMSPQYVAPYRRGGKNDANDAEAICEAVARPNMRFVAVKSESQQAVLVMHRMRDQLVHERTALMNQIRSYLHEFGIVIAQGRAPLAKIFPIIAEDMQLPLLLRQSIAELADRLADLERRIQTLDQRISAWSKQDNAAKALLTLCGVGPVTASAAVATAGNVSVFKNGREFAAWLGLVPKQNSSGGKSKLGAITKRGDRYLRTLLVQGARVVMIAAQKAKLTQKDNPMFDWIYKLLERRPSNVVAVAIAAKQARMLWAIMKKQQNMVMA

SEQ ID NO: 167289 - protein, 494 aa, unidentified
MRTIGIDLGISAAHKAIVLDERGKGITPTLRIASDPVDLARLLDRAREGCQEGEPLRVVMEPTGLSWLPVASYCIQRGVTVYLVNTQQVSALRKLYSKHGKSDRISALILARLPWIHPEALQPLELASGSSLSGQRWCKQREELTERMTAIKNRVQAWERAFWPGLEEVVENLFAPWVRRWRETWYNPWHLTRAETGEVITFLIEVGADPEQAADLAVGLQEVARRAATLYGSLESGSSPYVDYSALQDQVLRELRLLYFCEEELKAVGRQVRPVYRQQHPSRHLETIKGVGEEGAMTYLFFIGNVTRFEDQKAFRGWSGMVPRTDQSGDVDKKGLRVSKAGPDMVKKYAYINADVARQWDPQIAAIYYNQMVHKGKHHVQAVCCCATHLLDRVRAVLRDDRPYELQDVDGTPVTWQQARAIIAERYHVPEEVRRRRRHRTRQERREQQAERKRKRRSRPEPGKRLTPEHHLKHGLTSPHIDILQRKEPAVKPL

SEQ ID NO: 167290 - protein, 385 aa, unidentified
MAPPARPEIVIGLDVGKSSHWACVVTREGELLASKPVLNRENAIDGLYAQYPGALVVVDQVRNIGSLALSRARLAGMPRAYLPGLAAHGASRLFAGDAKTDERDAMVIAKTALGIPDALLPVADRPPEIEAARSLAAQRDFLTCENTRSKNRLRSILLESCPEFEAHADLSDPATLKLMAAVGGPWSISEASPQAVGALTRGCGRAKVAALVESVGSSSRPHPAAVACEDRAVRLLARRISENAAEIESLASEISALLAADETYRCLLTVPGIGPRTASELVISIDIADFPSHDRLASYCGLAPRNRRSGTSISSVSASRQGNKRLKNLLVFSCNCLARSRNRWGGYYARCRDRGMPHGKALKAVARKRLKVIYAIMRDKVPYSA

SEQ ID NO: 167291 - protein, 349 aa, unidentified
MQFYTRPHRFYCGIDLHARLLAVCIFDQAGTIVCQTTLPADKQRLLDTLAPFRPDVAVCVECLFAWYWVADLCAEQQIPFVLGHALYMKAIHGGKTKDDDLDAEKIGRLLRGGNIPTAYVYPKGMRETRDLLRRRNYLVHKRAELIAHIQITNAQYNLPPFTKKLIYARNRAELDVAARFPEGPVRKSIAIDLALVDALDQQLADVELYLERTVKVEEPHTYFLLRTIPGVGKILALVLLYEIHDIHRFAEAGDFLSYARLVRCVHKSAGKTLGHGGKKIGNAHLKWAFSEAVCLLLRCCPAAKAWQQRHDKKHGKKKTLGILAAKLGRAVHTMLSRRQAFDLKRFLGA

SEQ ID NO: 167292 - protein, 401 aa, unidentified
MTTMQDNAQRVKRFRELKATLRTNRDRLLVGLDVAQAAHVVQVRHAHTRVVIPTLTIPNTTRGFAQLWTRIQQAQRATGCREVVCGLEPTGTYHEAIARFLEAQGATVVLISSSVAYWNRRTQDGTWDKHDRKDAANCAELLEQGKVLFYSQPDGPLAELRRLVKCLRRARTELGACKARWRTTLRPALGPMGEPLPNRLRAELPVVLQAWERPVPGRPAVAKGRLPLGLATACADLGAQVTAVQARIAAIEAACMPVAERLPAYALLRTIPGVGPTVGAILLAEIGDIAWFTQFSQLRKLAGLDIIRVQSGQFAGQARISKCGRSLLRWALYHAAMGQARTVAGRARLAAFKAKRHGDRYAGFKAIVELAAKVLRVVWGVWRSGTPYDPRRAGGLRRQPR

SEQ ID NO: 167293 - protein, 420 aa, unidentified
MTQPLSTTDTPAALVGIDWADQQHAVCLQHLGSGRVEASSLKQTPEAIDDWATKLRERFGGRPVAVCLEQSKGALIYALLKYDFFILYPINPAKLAHYRKAISQSEAKDDPTDAELLLKYLSHYREQMHAWKPDDETTRLIRTLVQQRRQAIRLRTRFSNQLRAQLKCYFPQALELLGSDLGTAMACDFLQRWPSLVELKRAHMKTLIDFYYSHNCRRRKLIDARLEKIRHAKPLTDDTAIIEAGVMQVRMLVALLRELIRPIADCDERIEQLMDRHQDAPLFTSFPGAGAAMAPRLLAAFGTDRDAIDSAEMMQTYSGIAPVTRRSGKVSIVHRRWACPKFVRQTFHEFAGHSIPFSHWAKAYYQQQRQRGKRHHAAVRALAFKWIRILYRCWKTRTPYNEDAYCQALQNKNSPLAAAL

SEQ ID NO: 167294 - protein, 311 aa, unidentified
MTQITIGVDISKDTLDVYRLPDGEHRQFGNDPAGHKALIAFTGKKVVRIVFEPTGPYHRAFETALSKKGLRLIKVNPRQARRFAQAAGKLAKTDRIDAANLARMGAVLELEARPPRPENLNELKELYVAREALVKDRTAAKNRQKQLTLPLLRRQNAQRLAQIERQIEAIEAGIKARLQADPALARKLEILTSVPGLATITAFALLIEMPELGSLDGKQAASLAGLAPMTRQSGRWTGRAFMSGGRASVRRALYMPALAAARFNQDLKAKYLQLIEAGKPPKLAIAAIMRKLLVLANALLKGDRYWTGKPA

SEQ ID NO: 167295 - protein, 412 aa, unidentified
MDVIHPRCAGLDISKKDAKVCVRINGAGRRKTSETVTTFGATTRQIMAMRDHLAAQQVTCVVMEATGDYWKPFYYLLEDLSGVEVMLVNARHVKNLPGRKTDVADATWLASLGAHGLVRGSFVPPEPIRQLRDLTRTRTAITRERTREIQRLEKLLEDAGIKLSSVAADLNGASSRAMLEALLAGETDPAAMADLAKKRLRMKIPQLTEALYGRFTSHHAFLTRMHLDLIDQHTAAIEQLTDRIEVVIEPFRRFRDLICTIPGIGGNTADVVVAETGADMARFPTAQHLASWAGTTPGNNESAGKVKSRRTRPGNPYLQGALGTAAMSISHTHDTYLAAKYRRIATRRGPLKANVAVQRALLVAIWNIATTNTTYHDPGGDYFTRLNPRKARNNAVRQLEAMGYHVTLDQAS

SEQ ID NO: 167296 - protein, 411 aa, unidentified
MRLFVGDDWAEDHHDVEVMDEAGKVLAKRRLPEGVAGIAQLHELIGRHLGEDADEAEVIVGIETDRGPWVTALVTAGYRVFPVNPLQASRYRERLGVSGAKSDAGDAHMLADMVRTDSHQLRPAAGDSAEAEGLKVLARTHKTLIWERTRAVQRLRHQLREYYPAALEAYDDLDAPDTLELLGKAPDPARAAKLTRAQVSAALKRARRRNITDKATAILAALRSPQLGQPAAVTAAYAATVRSLIAVITVLNEQVKILQRQVEENFGRHPDAEIYQSQPGMGAILGARVLAEFGDDPHRYADGKARRNYAATSPITRASGKKKVVAARFIHNDRLVDALNAQAFTALRASPGARALYDELRARGIEHNDALRRLANRLVGILHGCLKTRTLYDEATAWSHRQNLPQSSVAA

SEQ ID NO: 167297 - protein, 345 aa, unidentified
MEYFAAIDVSLELSSVCVVDGTGKIICEKKVASEPEALVAWFNDTGLEFTRIGLEAGPLSQWLHAGLTAAGLSAILIETRHVKAALKAMTVKTDRNDARGMAQLMRMGWFRPVHVKTMPAQEIRALLTGRKLLLGKLRDVELGIRGLLRGFGLKVGRVSKGRYEARIRELTAGHPMLEPVAAAMLQARVSLRAEYGKLHRMLLGIVRADATCRRLMTVPGVGPVVAVSYKTAVDDPARFRKSKELGPYFGLTPSKYQSGEVDWTGRISKVGDAMVRTALFEAANVMLSRVTRFSSLKAWALRVAKLRGMKRAKVALARKLAVVLHRMWVDGTDFCWRKMPAAAAA

SEQ ID NO: 167298 - protein, 338 aa, unidentified
MNYMGIDHHKQYSHITLMDERGKKIKSGRVANYCSEVERFLDGSGEVKAVIEAGRSSYTMVDVMDELGIEVTIAHPKQVKAIARAKIKTDKRDSFMLAHLLRTDLIPEIYKRSHKNRGNQRVLRQRAFYVGSITRAKNKIRALLAQQQEEVRDKVSQKKNIFSRDGVKFLKTLNLPDTDKDLLSALLKTFTHLEKMKEETNGLVEKLYQEIPESRLIRSVPGYGIFLSVLVAVEIADIERFSKVSKFLSYAGVIPSTHSSGERSYHGKIVKQGNRWLRWAAVEAVYPGMKADFDIKSFYNRLKKRKGSNPAKVATARRMLTIIYRILKENRLYIPYKR

SEQ ID NO: 167299 - protein, 339 aa, unidentified
MKLYSAIDLHSNNSVLVILDENDKVVHEHRYPNELPVILAQLAPYKKKMQAIAVESTYNWYWLVDGLMEAGYEVKLVNTLAVKIYDGLKYSSDEHDARHLAHLLRLGILPTAYIYPKEERAVRDLLRKRAQLVRGRTVHILSIQNLVIRNSGKGIATNAIRKLDDKALKLFCGGNALLILAIKTSLEILRCLDGQIAVLERKVLEQAKLKPEFKQITSIDGVGPIIGMTIMYESGDIGRFGKVGQFASYARCVESSRWSNGKKKGEGNRKNGNRYLAWAFIEASHHAVHYNERIRKFYQRKKARTNGIIASKAVAHKLARACYHVVREQVPFDEARAFA

SEQ ID NO: 167300 - protein, 409 aa, unidentified
MSTNASSNVIAGLDWAVHTHAVCVIDASGTVLERFEIAHDREGLSELMRRLARFGARVRIAIERPSGLIVDALVEAGHHVFPIHPNAVKASRPRYRCHGAKSDASDAYLLADLLRTDGHRWRELSPQSDSIRALRALVRARDDLVATRVALGNQLRSQLEAFWPGAACIFYDITSPIGLAFLQRYPSPTSAARLSEAALRRFCRSQHYSGRRSPAELLARLDSAAAGLAGPLTADAAGQLVRSMVAVLQPLVEQIAELTRRIERFVESLPDGQIIMSFPRAGHVCAAQILAELGDVRERFPTLDQLAAEAGAVPVTYQSGKTRSVAFRWACNHRLRQAITCLADNSRHANEWARSIYSAARARGCDHPHAVRILARAWLRVIWRAWTDHTTYDPARHLGALKLASSEQG

SEQ ID NO: 167301 - protein, 334 aa, unidentified
MWHVGIDLHRRTVVLAVVNDAGEAMNSITIPCSDTATIVATMRSLGTFRAVIEASGTYRWLYDLLAPHGTVLLAHPLRLRAMVQRRTKTDKLDAQLLANLLRINQIPLAYIPPESYQRLRDLVRCRVRLVRELAEAKIRLRALLGRHNREAPFCVPFGVRGLSWFRAQDFGPIDNLVRDELLARMTHFSGQITLLDGHLHAVAQDFPQVEALCGIHGIALFSALLIVAELGEVERFRTAKQVGAYSGLTARVHQSGGRCHRGSISRQGSPWLRWILVQAAMKAPREDAALKNFYTRIRKRSGAKIARVAVARKLAEICWRRLRRWHRTRAEETA

SEQ ID NO: 167302 - protein, 348 aa, unidentified
MKYYVGLDVSMKTTFISIVNQEKKIVFESEVITDPCTIFSAIKSTKLDIENCAIESGAISHWLVKELLKRKIPVVCVDSRKMAKILSININKTDKNDARLIAEALRCGFYSEVHQKNQEDAEMQILMGTRRSLIEVSTKLKNTIRGHLKIFGIRLGTASNKKFDNLVRSALQNKPEVVQLGLKSLLETFKCTNNEIEFLEKKIEEMAREDEDVMLLTTIPGVGVITAFTFKTCLGDPSRFRRSRSVGAYFGMTPTQYSSGDIVKQGKVSKCGNSEVRSLLNEAAFSIIYSTKSWNRIKAWGLKIKKKKGHKKAMMAVGRKLSVLMYRMLISRKQFEYGVPKDNSQKTA

SEQ ID NO: 167303 - protein, 322 aa, unidentified
MEQITFTQVVSRGCGIDVHKKVVVATVDGEVIKKTTREFSTFTSSLTELREWLLELGITHVAMESTGVYWKPVYHILEPTGIKVLVVNARHIKYVPGHKTDKKDSAWICKLLLAGLLKPSYIPPREQRELRDLTRYRVKLIQGIAANKNRINRILEDCNIKLSSVMSGTDGIVATKLLNKLIEGKEISPDDIDRVYHGNLKASKAELLEACNGLITEHHVYMLGLIKRDIAASEVIISDIDDKVRQMLSPYDNIIELLKGIPGFNLKTAQDLIAEIGLDMSVFPSEKHLCSWVGISPGNNESAGKKKADEPPTGTNQPKRQS

SEQ ID NO: 167304 - protein, 329 aa, unidentified
MSALFCGLDVHKDSTYATILDCDGKIIDQKKIVNEKMLSFLSKYRIEKIGMEASNQVAPLYRQLSREGYHVSVSHPKKTRYIAEAKIKSDRVDSKAIAELVRLDALPPAYMPDEETATLREKVRRRAFLVRERVKLRVKIKNTLTYEGIKPPPDYGLFTQKGITWLHSLNLEPVESYLRIIAPLDEEIKNLSCHLKELASDDEEVKLLETIPGVGYYTALLVKSEIGGVARFADGDRLCSYAGLVPSTHASGGITRHGGITREGSRWLRWVMVEAAMTHVHKYDTSITKAYHRIAERRGRQVATVAAARKLLMCCFSVLKNRRPYHDQA

SEQ ID NO: 167305 - protein, 351 aa, unidentified
MKILAIDLGKFNCVSCLFDTETNTTEFETIKTYRIEFEGLLNRMQPQLVVMETCSITGWVHDLCVEQGYEVLVADPFQEAWGWKNVKGKTDKDDALKLAKLAALGQINPVYVPTPESRQYRQLVKYRKTVVHRVNRIQNNVRALFDQQGVKIPSGHRTWTVAGIEELSQHRKPLSECDLSNLWRGELDLELTMLDHLWEHLASIERQLEELAKSEERVQLLQTIPGVGRKTAEVIVVCLDDPKRFENARQVSAYAGLIPQQHQSGQTNRLGKITKRGSRLLRTALVEAAWAMLRYNEWAAATYARICGGQKTRKKTAITALARKLLVRCWAMLRHNQPWNPELAQPTASTC

SEQ ID NO: 167306 - protein, 323 aa, unidentified
MKPRIFVGIDVSKDKLDIAVKAAETGGAVSTAKRAAEAWTTANTKEGCEALVQRLQAMQPERIAMEATGGYEQRVFRALREAGLPAVIVQPLNVREFARAMGKMAKTDRIDALMIAYFAEIRVPEVLPLPTANQDRIAALRGLRVDLLKTRNQYTNRLENCGAEVRKHIEKLLAGVNSEIAELDAKLSEALKATPEDAARADLLQTVPGVGRVTATTLIGELPELGKLDRRRLGALIGVAPINRDSGRQHGKRSTKGGRGDIRRVLYMAVLTARRCNPVIKAFGERLAAAGKPYKVVMTACMRKLLVILNAMVLAGTGWSLSP

SEQ ID NO: 167307 - protein, 430 aa, unidentified
MKSNTQNAKIEAITEKTLVLGIDVGSEMHYARAFDYRGIEYSKKPFKFSNTEAGFVTFKEWILDLKERHEKDKVIPGMEPTGHYWFNLGKFLQDNEMKPVLVNPHHVKKSKELDDNNPTKNDRKDPKVIAGLVREGRYMIPYLPDGVYADLRTASNIRFQLQAELTRIQNRISRWFNIYFPEYKTVYGKPDAKSGMLILKAAPLPEDILTLGIDGVNQIWRDAKLRAVGKARAKTLIEAAEHSVGSKEGAVSARMEIRMLLEDYESRNTRLQEVMVLIEELVRKIPMTEKLLEIKGVGIRTVSGFLAEVGDISRFNNPKELQKLAGLALVKNSLGKHKGETTISRRGRKRLIYLLFEVAMSLVSKNQEFRELHNYYTTRRLNPLKKMQSLMAIAAKLIRVFYAILTKGVDYDPKKMVSDIKRPAVYLQAA

SEQ ID NO: 167308 - protein, 333 aa, unidentified
MNMHPQGGVANRDQRPNAGVDVCKQHLDVCLGTTEQSVVNEANGWDELIAKFKHANVDLVVVEATGGYERGLVCALQGAGITVARVNPRQARDFAKSMGVLAKTDKVDARTLRDFADVLARHKDRAKYITPMLDEHRLQLAELMARRRQLVDMRVAEGNHLEHASAKQSVRSIKSVLKTLDKQLEAIDREVDDHMDRHFKEQRTLLDSVKGVGPVTILTLTAALPELGNLGRRQISKLVGVAPLADDSGPRKGKRRIWGGRGNVRAVVYMATMVAIQHNPAIKVFHSRLIAAGKPKKVAIVACMRKLLTILNAMLRDQALWDVARHVHSPKTA

SEQ ID NO: 167309 - protein, 379 aa, unidentified
MLKYCVGIDVSKNDLHCCIAIIDQLQKVTIKASKHFINSKTGFTGLSDWINKQHKDRSVPLVMAMEATGVYYEQLALYLFKHQYAISVVLPNKAKRYLQSTGLKSKNDKIDAQGLARMGSEQSLSLWHPLDTFFYELRELTRQQQSLQELKTSVGNQLHASELGMYQIKLVIKQQKNLIASIEKQITVLEDAIEQHLQRDSTVKEKVAGICKIKGLGLMTVAVILAETNGFALFENSRQLVSYAGYDVEENESGTHKGRTRITKKGNSRIRRILHMPAFNMIRYEQTPFLNLFNRTFQKHGQKMKSYVAIQKKLLTIIFALWKNNSVYQPNYGVEFTGEMELVPSSLHTLKESSAYQKAALPQGRPTVENSQFASSLQE

SEQ ID NO: 167310 - protein, 321 aa, unidentified
MGEELKFADVYVGVDVSKARLDVAVWPSQQVFSDTNDAEGIGRLATRISGLNPKIVVLESTGRLEVPMALELGERGVPYRIVNPRQIREFARSMGKLAKTDRIDALILARWAESAQPEAKPLPDPDRRELRALVTRRAQLIENLTREKNRLQGETVPHVRRSIKDSIAWHERQIARLDKELNQFMKNSANFSGQSDRLQSVPGVGPVLTRMIIACLPELGTLNRYQIAALVGVAPLNRDSGKSSGKRFCWGGRVEVRCALYMAALVGTRHNPIIQALYERLRAKGKPAKVALVACMRKLLTILNAMMRDQTCWRQTSPAEA

SEQ ID NO: 167311 - protein, 342 aa, unidentified
MEKSEQIQPHAWILGIDVSKESIDACLIRTSDGQVLESKFHNNLSGFRHLKRWCKEQHCECDSTTLCCMEHTGLYTRLLVHYLLSRDVHVWLESSLQIKRSQGLVRGKSDKIDAQRIARYAHLYQGQAKIMQLGILTLEKLKDLQANRRRLLKALQSLRTSVQELKPFDPAFGKVLEQTNREAIRGLEKSLDKVDEQILSYINDDQELKQKYDLMLTVKGVGKVLAAMLLVYTHGFNRLADSRKLACYSGVAPFVYQSGTSIRGKTGVSKFANNDLKRVLHMAAVSSVQHNSELHQYYKRKVKEGKNKMSVINAVRNKLLHRIVAVVKRGTPYEVKKIAENS

SEQ ID NO: 167312 - protein, 354 aa, unidentified
MAITKQSVGIDISQATFTVCLCQRSEDGKLTFSKILTFGNDSKGFNQLLRWAKGVIASGPELVFLMEATGVYYENLAHHLHKIKKAVHVVLPNTSKHYFSSLNVKTKTDAVDARVLSQFGVERTHKLWNPPPAALLQLRNLTRYYVQLQEQKTALGNIKHSKDASHEVQSFILKSNKKLIAEIDKEIAKTLKEIKRLVETDNSLKEKIRKLSTIKGVGLITIATILAETMGFEQFKSAKQLVSYAGYDVVQRESGTSIKGKTRISKKGNRYIRNALYFPAMVACRFNPTLKEIYTRINQQKPSKMIGQVAIQRKLLILIYTLWKNNTEFIEAYKESSPNPKAETTLDSSIVELL

SEQ ID NO: 167313 - protein, 343 aa, unidentified
MESTIIAVDLAKSVFQIAVSHHPGKVAESHRLTRGKFLQFFAERQPAVVLMEACGTAHYWARQLEALGHRVLLLPPHAIRPYVSRNKTDRTDTKGLLEAHRNDEIHPVPVKSTSQQGLAALHRLRSAWVADRTARINLLRGILREFGFPLPLGGTCVAQAWSLLDEATTTKLPDPLRLALAEACLEIRDLEARIKTVEKQLEVLAAETPVVKRLCSIPGIGLLTATALVAFVGNAERFATSRHFASFLGLTPREHSTGRKRRLGSISKCGDVYLRSLLIHGARSVLFAAKRRKQPDRLRAWSLQVAQHRGHNKAAVALANKMARIAWAVWRNDSSFESRPLAA

SEQ ID NO: 167314 - protein, 358 aa, unidentified
MVDKVTEAAVVGGVDTHKDLHVAAVVDQNNKVLGTQYFSTTRQGYRQMLAWMTSFGTLKRIGVECTGTYGSGLLRYFQNAGLEVLEVTAPDRMERRKRGKSDTIDVECAAHAAFSGIRTVTPKTRDGMIESLRVLKTCRKTAISARRVALQIIHSNIISAPDELREQLRNMTRMQLIRPLGSWRPDASEYRNVTNVYRISLKSLARRYLELHDEIADLDVMIAAIVDELAPELIKRNAIGYESASQLLITAGDNPQRLRSESGFAALCGVSPVPVSSGKTNRYRLNRGGDRAANSALHIIAIGRLRTDAKTKEYVARRVAEGHTKMEAIRCLKRYISREVYTLLRNQNRRINSIPITA

SEQ ID NO: 167315 - protein, 345 aa, unidentified
MLYVGIDVAKNKHDVTALNVPGKTVLKPLTFSNNKAGFELLDLSFRQLNQDCLIALEDTGHYAFNLLNFLHEQGYKVYTYNPLLIKEFAKSLSLRKTKTDKKDAHGIALKLLSDPNREQFQHDNRQVELKILARHIHRLKKKQSDWKVQYTRCLDIIFPELDKIVGKHSEYTYQLLTCYPNPQKRLEAGFDKLIEIKRLTASKIQDILSVAPRSIGTTSPAREFEIIEIIEIIKHYKRLIDKAETCVNDLMAEFNSVITTVTGIGGRLGAVILAEIRNIHAFDNPAQLQAFAGLDSSIYQSGQIDLAGRMIKRGSPHLRWALIQAAKACARFSPAFKAYLKTKLE

SEQ ID NO: 167316 - protein, 386 aa, unidentified
MHQATTFPAPERTCSRGDRAILFVSLELSRSTWVATALAPGSTKMSKYTLVGGDGHKLLELLARLKTRAEQRIAAPVKVVTIHEVGLDGFWIHRLLEANGVESHVVDPASIAVPRRHRRAKTDAIDGETLLRTLMAWQRGEPRVCAMTVPPNPSEEDRRRISRERAKLLQERVRHTNRIRGLLFGQGITNYNPLHKNRRKNLEQLRTGDGRSVPAHLKSAILREIDRLELVLGQIGEVETERDEMLQLTQPSSPAALLMRLKGIGAEFASVLYLEGLFRRFENRRQLAAYAGLTPSPWKSGSIDQEQGISKTGNPRLRTTMVELAWMWVRYQPASALSCWFRQRVGSKRGRIRRISIVALARKLLIALARYLSHGEIPAGAVMTAG

SEQ ID NO: 167317 - protein, 344 aa, unidentified
MEHFAGLDVSVKETSVCIVDGTGKVVREVKVASEPEALLPVLTNPAYHFKLIGLEAGPLSQWLYGALAEAGLPVICVETRHMRAVLKAQINKTDRNDARGMAQMMRAGLYRPVHVKTLRSQKLRMLLTHRKLLQSKAIAIDNDLRATLRNFGLKVGIVGTAKFEARIKELVENLPDLAMLVEPLLTVRRALREQFGILHRRLLAVVRNDEVCRRLMTTPDVGPVVALTYRATVDVPARFRNSKAVGAVFGLTPSKYQSGEINRTGAISRCGDEMMRVMLYEAAQSMLRSNKWSWLKVWAMKIAKHRGMKKAIVALARRLAVIMHRIWVDGTEFRWSREQAAVAA

SEQ ID NO: 167318 - protein, 409 aa, unidentified
MDQLIERCCGLDVHRDTVAACVRGPGPNGKQRQEVRTFGTTAVELWALRDWLKAHGVTHVAMESTGVYWKPVFYVLEEVFTCLLVNAAHIKQVPGRKTDVKDCMWIAQCLEHGLLRGSFVPPAAIREIRDLTRHRKVLIQERTRAANRVHKLLEDAGIKLASVATNILGVSGRAMLEALVHGTTDAEVLADLARGKLRKKLPALRQALAGRFRPHHAFLVSQLLAHVDYLDEAIATVSEEVEGRLAPFAAQLTQLDTIPGINQRTAEVIIAEVGVDMSCFPSDRHLASWAGICPGNNESAGKHKSGKTRKGNRWLRMTLIEAAAAATRTKDSALQARYRRVMRHRGHKKAVVAVAHAMLRAVYHLLADGTTYREPGADYYDRRHTHRVTRRAIQLLERQGYRVVLEPAA

SEQ ID NO: 167319 - protein, 418 aa, unidentified
MTNSLFIGADISLKSNQICVMNFDQKVFFNLKFPNTPEGCDNAIERIKILYDAFGFEKIIVVCEATGVYSFHFANYFSSNVILNNCNTEVYSINAHDSEKYRKSFNDIEKTDPSAAEVLADFARVGRTRNLHPFKGAQYLALQRLTRLRFHLGQNLAREKLYVLSNIYLGFSGLIIADKDEKPFSDMFSTTSCEVLDYFESLDQIINTPIDELTDFIADTGKNRFKNPSNNAKLLTKAVRASYRLDKISYDGITVAIASSINVIKCLEKEIKNIDEAILNTVKGLSPDAYKILLSIRGIGPVYAAGILAELGSVEFFDNDSSIAKYAGLYWNRSQSGNSEKENKKFSRHSNKYLRYYLVEATASCFKFGFPFISDYYHKKYDEVPKHKHKRALVLSARKLVRLIDGLLRKNQLYQQID

SEQ ID NO: 167320 - protein, 317 aa, unidentified
MNATTVAVDLAKSVFQLAVADEHWKIIETQRLTRTQFERWFLNREVNLVIMEACGSAHHWARWLNSLGIEVRLLPAQYIRAYVKRNKTDAADAAALLEAARASDMRPVRVKSVEQQALQGMHRIRSLWMGTRTSRINALRGFCREFGIAIPVGARTGVEAISRILADPNTAVPDLIRGTAKLLVEEIRLLEARIAQLERELAAIAKFSPACTTLLSIPGIGLLTATALVAATSGDVSHFKDARHFSSWFGLTPKEYSSGSSRHLGRISKKGDRYLRMLLTHGARERAACVQGGAGRRARGVWRAPLGIGCAESKQPQ

SEQ ID NO: 167321 - protein, 337 aa, unidentified
MSVYVGIDVHRKRSQVAVVTGDGTVELNKNVVNGSEPMLRLIGDLPPGTPVAFEAAFGWGWLAQLLEDYGFEAHLVHPLRCKAIASARLKNDKVDAATLAQLLRADLLPEAWIAPTAVRQLRALLRHRASLVRLGTQQRNRIHAVAADHGYDRSASYWTGPGRGWLAELDLPPASREIVTDCLAVIDGLAPLIERIDGELHQHAKADPRTKVLRTLPGVGEFTALVMLAEIGDISRFGSARKLASWAGLTPTVRGSDLTVRHGHISKQGSAWLRWVLNQAAQTAKRSPEFAATYSSIAKRRGKKIATIAIARKLLTRAWHLLSELEPADAGTPPQQP

SEQ ID NO: 167322 - protein, 386 aa, unidentified
MPQMNDLSRSLVTLEQDATLIAVIEMGQSSWLVAGIVPGVERQPLKKLAVDESALLKLLNRWREEAEQAGHGIKRIAVVFEAGRDGFWLARWLRARDIEAHVIHASSVAVSREHRRAKTDRLDTELLKRAFLGWLRGERDHCKMVAIPTTNDEDAKRPNRERESLVGEQSRIVNRMKATLTRLGIRGFNPKLKKAAERLDGLRTPEGEPIPPNTLAELRRDMVRRRLVSDQIRQIEDARLERLEHAPGDGPHAMVRLLARVIGVGIETADMLVQEVLSRNMRDRRAVARYAGLTGSPDESGRKRREKGLARSGNARVRRGMIQLAWRFLMFQKDSALAQWFRSRTENARGTRKTMIVALARKLLISLWRLVRDGVLPDGVILRPAH

SEQ ID NO: 167323 - protein, 351 aa, unidentified
MTETITHVGLDVHQRSTAIAVASYDRGTRFIGTVGSDTQELCRTLEKLGGAKSLKVVYEAGPCGYALVRTLRDRGYACDIIAPSKTARRSGDRVKTDRRDALHLAEQSLAGALTPVYVPDKADEAMRDLCRAREDAVYARRRARQRLQSMLLRHGRSYRGKTPWTPAHERYLAQVSFPFPAQELAYVEYRQAVSESHARVERLTASMREQLQYWHMRPVVEALMTLRGIDLLAAMTLVAELGDLRRFAHPRELMSFLGLVPSEHSTGDRRQRGPITRTGNGHARRMLVEAAWNHRYPARITRALQLRQEGQPKLIQDLSWQAQKRLCGRYRALKARGLHANKVCVAVAREP

SEQ ID NO: 167324 - protein, 365 aa, unidentified
MNATAALPVVGIDVAKSVFQLAVADGAWRVIEEHRLTRTQMERWFANRAVGLVVMEACGSAHHWGRWLNALGIEVKLLPALYVRAYVKRNKTDAADACALIEAARCADIVPVKIKSIEQQALQGLHRARSLWMGTRTSRINALRGFCREFGIDIAQGARLGLERIERVLADPHSAVPELIRGTMKLLVEEIRLLEARTAQLERELTILARQSPACTTLLSIPGVGLLTATAMVAATSDSVQHFKDARHFASWFGLTPKERASGTTRMLGRISKRGDRYLRMLLTHGARSVLHAAHRATLAGKQLDPLRQWALGVQGRTNHNKAACALANKLARICYATLRDAQPYGEPVRRPNKKIQRTSFALAA

SEQ ID NO: 167325 - protein, 365 aa, unidentified
MSESITYIGLDVHKRSIAVAVREAGSPVREEQLPNERAAVARWARGWKRRSGGDLLVAYEAGACGYALQRQLERLGIACQVVAPSLVPRKPGERIKTDRRDARKLAEYLQGGHLTPVHPPTPAQEAARDVCRAREDAQQDRMRCRHRLSKFLLRCGQSYTPGRKHWTGSHQAWLAKLSLGEPAAQIVFDDYRLAVAQRDARIDALDRQIEGLAQEAPYRAAVGALRCFRGIDTRTAFGLVTELHSIEHFDRPSRLMAFVGLVPSEASSGERQRRGAITKAGNGHARKLLIEAAWHARHKPAIPAALRKRREGQPPEVIAMADVAPLRLHRRYWRLVQRGKPTTVAATAVARELAGFVWAALRAGA

SEQ ID NO: 167326 - protein, 372 aa, unidentified
MNYNTVYVGMDVHKESFSLCAYTIEAEKASHYQRTEADYKKVLNYLEFLRTIYGDDANFICGYEAGCFGYTLYHQLTANNVKCIILAPTTMLEQRSKKRIKTDRRDAEIIAKCLAQHNYSPVHIPTAKDEETKEFLRMRDDHKLALKKVKQQILAFCLRHNYRYDGKSHWTAAHLKWLKALTPEALYKEILDEYLLTYQTLSDKIERLNKRIEELATQDEYKEAVKKLCCFIGVKTHTALSVLVEVGDFKRFASAQHFASYLGLVPGEDSSGDDQNRLGITKAGNRHVRLLLTEASQCYARGQVGFKSKELKSRQSGNTPAVIAYADKANERLRRRYYKMVLNKYKKHNVAKTAIARELACFMWGMMTDNIA

SEQ ID NO: 167327 - protein, 351 aa, unidentified
MGKIITDFSSVTTVGLDLAKHVFQVHCVDASGRVVVAKSVRRNKLLEFFASLPPCLVGLEACGSAHHWARELVKLGHDARLMPPAYVKAYVRRQKNDAADAAAICEAVTRPSMRFVPLRSLENQAALMHHRVREMLVAQRTQVLNAVRGHLAEIGVIAAQGPKNARDLAKLITADEATLPWLVRAALAPLVRQLDRLDEEIGLADDAIKAMAKADERARSLMSIPGIGPVTASAIAASVQDVSIFSGSREFSAYLGLTPRQNSSGGKERLGRVSKMGNRYLRKLRVVGAHAVLYNRKGHDDALRTWACKLMETKPFKLVAVALANKLARIAFAVMRDQTPYSAKPFSPAQA

SEQ ID NO: 167328 - protein, 353 aa, unidentified
MAEDLSSVIAVIGIDIGKNAFHVVGLDGRGAIVLRQKWSRGQVEARFANMPPCLIGMEACVGAHHLSRQLRALGHDARLMPAKYVRPYSKGQKNDFRDAEAIAEAVQRPTMKFVATKSADQLDLQALHRVRERLVRQRTGISNQIRAFLLERGVAVRQGLRVLRAELPGILARRCDVLSPRMVHLIEDLAGDWRRLDERIESLSGEINALARQDAGCERLMSVPGIGPIISSAMVAAVGAGDAFEKGRDFAAWLGLVPKQISTGDRTILGKISKRGNRYLRALFVQAAWVVLIKPKSWERYGLKPWIEAAKRRLHHNVLAIALANKLARIAWSVLARGRGFEARLIASVTQPV

SEQ ID NO: 167329 - protein, 449 aa, unidentified
MMEPQEIEDEGHERIVERVAAIDVAKASGMVCVRVPHESRPGRRVSRVWEVAATTGAVTGLGDHLACQGIEKVTVESTSDYWRIWFYLLEAAGLEVQLVNAREARNMPGRPKTDKLDSVWLAKCTERGVLRPSFVPPAGIRMLRDYTRLRTDLTQERTRHWSRLEKLLEDALIKVSAVASTMNTKSVRDMIEALIAGERSPRALADLARGRMRAKRAALIEALTGRFDDHHAELAQMLLNQIDALSAQIGTLTGRIEELIGAMPAARGVNADGTTGPGAGTGPGAAVLPALARLDEIPGISLAGAQGILAEIGLDMTRFLTAGHLVSWAKLSPRTIQSGAKNRSGKTGKGNPYLKGILGEAAAAAAGTDTFLGERYRRLVKRIGKLKALVAVARSILVIIWHLLSDPAAHFCELGSAYHASRTSTQRKARGHIRQLEALGYTVTLTQAA

SEQ ID NO: 167330 - protein, 342 aa, unidentified
MNAVTIIGVDLAKRVFHAHGSHSDGSVAFRKRLSRSQVLTFFAKQPRCTVAMEACATAHEWGRAIGELGHEIRLIPPAYVKPFVKRQKNDTSDAEAIAEAAARPTMRFVAVKTEEQQARSMIFRTRDLLVRQRTQLINALRGHLAEHGVIAPQGPANVRLLAAALNDADRSLQSLVRDIGAVYLEQISILNVKIGDLEKVLRREAQRGADTSRLQTMPGIGPITAMAIETFAPPMQTFKRGRDFAAWLGLVPVQHSTGGKQRLGRTSKMGQRDIRRLLIVGAMSVIRWASRRGAPEGSWLSRMLARKPLMLVAMALANKMARTAWAMLIKQENYRIPVMMAA

SEQ ID NO: 167331 - protein, 355 aa, unidentified
MSQEKYIGMDVHQATISVAVMDAQGKLIMECLLETKAATIVEFIQGLQGTLSVTFEEGTSAAWLHDLLKPHVSQLVVCDPRKNALLKDGNKSDRIDARKLAELLRTHQLRPVYHGEHGVRTLKELGRSYLTLTQDVTRVMNRIKALYRSWAIPCSGTAVYAPRHRAEWLAKIVEPGVWVRAQRLYQQLDLLQPLRQAARHDLLSESHKHPAVKLLRQIPSIGPIRAALLVALLQTPHRFRTKRQLWAYSGFAVETHDSGEYRNVRGKLQRNRERITVRGLSDNYNKDLKNLFKGAAISASTRPGPLHDFYVALVAKGIRPTMARLTLARKIVTLTLTIWKKGVSFDPQQLHRQAA

SEQ ID NO: 167332 - protein, 339 aa, unidentified
MRLYVGVDLHANNIFVAVIDKKGKRLEQKRLPNDLAVILEYLKPHQKEIVGIVVESTYNWYWLVDGLMGTGYKVHLANPSAIQQYSGLKHVDDKHDAFWLAQMLRLEILPEGYIYPKEERPIRDLLRKRRHLVKLRTSLLISLQNIISRNCGVQFPVNEMKRLKEGRVSPLLEGNEDLALAGKTSKEAIDPLTRQIHKIEAAIVQRVELKESYQVLLTLPGVGKILALTIMLETGPIARFAQVGDYASYCRKVPSRWTSNEKTKGKGNLKNGNKYLAWAFSEAAEFARRYDAQARAYYTRKMRKTNFMVAHGALAHKLARAAYYLMKDQVPFMPEKLFC

SEQ ID NO: 167333 - protein, 369 aa, unidentified
MGWMPAPDGIEMCQSDVGERHLKEKASMDEVTIVGLDLAKRVFQLHGARQDGGVGFRRKLPRGQLLTFLVKLPRCIVAMEACATAHYWAREIAAVGHGVRLVPPAYVKPFVKRQKNDAADAEAIAEAASRPTMRFVEPKTEHQQARAMVFRTRDMFVRQRTQMVNALRAHLAEHGLIAAKGIGNVQELRRIVETAETGIDGLIIETAHLYLEQIEQVSSHISKLEKALKAEADHSDRSKRLMTMPGVGPVTAMAIEAFAPSLSVFRRGRDFAAWLGLVPKQNSSGGKQVLGHTSKMGQRDIRRLLIIGAMSVIRWFSRNTPEADTWLGCLLRRKPRQLAAIALANKMARSLWAMETRQEMFRDPRLVAA

SEQ ID NO: 167334 - protein, 341 aa, unidentified
MKSVGVDLHKQSISVCVMVKDGQKRKVEQRRSLRCADQEGIRRLFEQLGSFQVVVEATSSYEWFFLLIEDLADRCVLAHPKKLRVIAESKHKSDKIDAQVLAEFLLVDMIPESYRPTPRIRQHRVLVRHRNAVQKQITAVKCKLRHKASFYNADIAALFTARGLLHLAKIAMSHADRFECRALQDQLAFLKEQLKAADKELESFAQTAPVAEREARAVLATMPEVGPVTTDVILSETGDVRRFRGAKRIVAYAGLDPGFRESAGKGKQLSITKEGSRLLRWALIETAWRLVRKTARWRALFDRLRATTGHKKKAIVGVARRLLCVLFAMLRDGKAYRLAIG

SEQ ID NO: 167335 - protein, 353 aa, unidentified
MEGYAERQFVGIDLHRRRSVIVRMTSAGERLETVRIDNDPVALALEIAKAGPDPEVVLEATYGWYWAADVLAAQGARVHLAHPLGVKGFTYRRVKNDVRDAADLADLLRMGRLPEAWIAPPAVRELRELVRHRAKLVALRTGLKAQLHAVLAKQGVAVRVSDLFGVAGRALLETVSLDPVYRGRVNSLLRLIDAYGFEIAAVSTRLTADLAREPGYQALLTLPGVGPVLAGVFFAEIGDVHRFPTAAHLVSWAGLTPRHRESDTTVHRGSITKQGSTLVRWAAVEAVQKTPADAGWLVARRHQLAARRGANIATVATARKLLTLVYYALRDGHVRALSPRPRPQPRPLAAASA

SEQ ID NO: 167336 - protein, 348 aa, unidentified
MKHYAGLDVSVKETSVCIVDENGKLCRERKVVSHPDDLVAILSDPAFSLERVGVEAGPLSQWLFEGLAKAGLPVFCIETRHTKAFLDALQQNKSDRNDARGIAHMMRVGLFKDVHVKTLTSQKRRALLTTRSLLQEKAIDLENEMRGLLRNFGLKVGHASGGTFERRILELVEHDTELAEIMEPLLAGRRKLREGLAKLEKRVLSEGKQDEVCRRLMTVPGVGPIVSLAYVATIDIPSRFRHSRSVGAILGLTPVLKQSGEMSRVGHVSLRGDAMMRRLLYEAAQSMMTRVVKWCWLKAWAMNIAKRHGSKKAKVALARRLAVVMHRMWVDGSEFRWTREDTVSTVAA

SEQ ID NO: 167337 - protein, 355 aa, unidentified
MSGEKYIGLDVHQATISVAVMNSQGKLIMESILETKASTILEFLAGLGGTLALTFEEGTWAAWLYDLLKPHVAHLIVCNPRKNAALKQGNQSDKIDARKLADRLRLNDLKPVYHGETGVRMLRELARSYLTVVKDLSRVMNRLKALYRSWAIPCAGRDVYYTRHRSEWLGKIPEAGTRRRAEQLYQQLDMLQHLRQQARRELLAESRKHTITAKLRQIPSLGPIRSGLAVALIQTPHRFRSKRQLWTYSGLGLETRDSGEYHFVKGQVRRRKKQVFIRGLNKDYNHDLKGLFKAAAMRASIQPGPFQEFYQRSLAKGIKPTMVRLTLARKIAGITLTLWKKGENFDVEKLKSQAA

SEQ ID NO: 167338 - protein, 364 aa, unidentified
MYIGLDVHKESIEIALAPHEGGEVRHYGRIAGDLEAVDKVVSRLKKTHAKLNFVYEAGPCGYALHRHLTRKGFSCSVVAPSMIPKCSGDRIKTDRRDAIMLARLHRAGELTAVFVPRAEDEAVRDLTRSREDAVANHRRSRQQLGALLLRQNIRYTGKSAWTKAHMRWLSEVTMHQPTQQIVFQEYLNATQETDGRVSRIDEQLRIAVEGWRMAPVVNALQALRGVSMNVAATTVAEIGDMTRFDRPRQLMAFLGLVPSQYSSGPRVRMGHITKTGNGHARRVLVEAAWAHRFPAKIARAHQVRQENLPQAVRDIAWKAQLRLCRRYQRLLAKGKTKNVVVTAIARELVGFMWAIAREVKPIAA

SEQ ID NO: 167339 - protein, 367 aa, unidentified
MLYLGIDQHKSQITVNLRAEDGSVILTRQVSTRWEKIRAFFEDLAARAAADGGFMAIVEVCGMNPWLIDMLEEYGCREIVITQPEHRSKRKTDRRDAAMLSNLLWVNRERLAGGNRAPGMRRINPPTAEEAEKRQLTAIRQVLTKKRTAVLNAIHKVLRKHNLEQDRPTKLFQTKKVRAWLAEIPLGEIDRMEVNHLLEQWAMLDEQLGTVDGKIHERVASDEQARLLQSMPGLGDYSALAIASRVGPIERFKSPGSLANYWGLTPGCRNSGEATDRLGSITKQGSKIVRYLLGQAVVKVLRFDGEMRKWYKRIKRRRGSKIARVAVMRRMAVIIWHMIKKKQKYKYESPIKKHREFEPFSGETQAA

SEQ ID NO: 167340 - protein, 479 aa, unidentified
MENNTSAAGKAARLTRKQRKALGRRMWSENPGLEVVHRDAAGIDIGSRAHYVAVGPDRDAEPVRIFGCFTTELQRLAEFLKKCRIKTVVMQSTGVYWIPVYDVLEQAGLEVCLVNARDTKNLPGRKSDVQESQWLLKLHTYGLLRKSFRPTPEIRALRTCWRERAEYVQQAGTCIQRMHKALTEMNVQLGTVLSDLSGTTGMSILRSIVAGERDGRKLAEFRDPHVKASAETIAESLQGTWRPEQLAILKRQLADWDHVQQQVAACDRDLQTMMKQMPDAAVAPAPPAPGNPPKKRRRKKNGKSSRNAPQFDLESELKRMSGVDLTRIDGVKANTIQTVITEAGLDMSKWPTEQHFVSWIGLSPRNDLSGGKVLNRKTRKVVSRLATALRLAATTLRESDSYLGAQFRRFRSRLGAPKAITAMAAKLARLIYRMLRYGQEYVDRGTAHYEEKHRQQQIQFLAKKAAQHGFALVEARTSA

SEQ ID NO: 167341 - protein, 377 aa, unidentified
MREKLRFLGLDVHAETIAVAVAEPDGEVRSLGTIANREESIRKLIRKLGPAEHLRACYEAGPTGFVLYWQLSQLGVECAVVAPSLVPKKPGDRVKTDRRDALKLARSHRSGDLTAVWVPDEDSEALRDLVRQREAAKQDQLRARHRLTKFLLRTGQRPPLGLKAWTERWMRWLAQVRYTQPAQEVTRLDCMNEVEHMAARVKRLEEAILEVVKLAPEPMQELIRGLQALRGMAHISAVTIASELGNISSRFQSARKLMGYCGVFPSEDSSGKRIRRGGITKTGNAHLRRIVVESAWSYRHLPRVGEKLRKRHQGVPAEITEIAWKAQHRLHKRYRTMMNAGKDQRKVMTAVARELLGFIWAIGIKAEAAANRQQLAA

SEQ ID NO: 167342 - protein, 353 aa, unidentified
MLAELVHHVIGVDPDRDWITLAVVDAHTTGVTAHDRFPATAVGYAEAVEFVDGHSVDTERAWAIEGTASYGRGLSVALSRLGEWVIEFDRPTRKTKDGAKSDHLDAVRAARETLGRDRLSEPRAHQGAREAIRVHAVTRAGAVRARTAAINELKAMIVSADEELRGSLRGLRTSQQVARCARFRERASMSIEGRGTRLSMRALARRIEHLNDEIDDHDRALKALLDDTAPQLLTERGIGYITAAAFYLAWSHPGRCRSEAAFARLGGTSPVEATSGQKQTCHRLNRGGDRQLNRALYLVAVTRRRCDPATRAYIARRAADGISERFAIRCLKRFIARRVWRLLEHPESVLDKT

SEQ ID NO: 167343 - protein, 350 aa, unidentified
MNVNHYIGLDVHKKSISYCVKTADGTVVEEGKLRATHLVLREWAEKRREPWHGAMEATLFSGWIYDALKPYATELQMGHPAMMKAIGASKKKNDKLDARKTADLVRCNLLPVCYVAPPEIRELRRMLRYRNVVVAQAVRLKNKMSGLLMEVGAEYNKQRLHGKEYFSELLDTIEEVPESVKDLLRLSRGALEMFQTTQRQLLDQLQKQPLLAQRVTLLKSIRGVGEVTALTWALEVGDPQRLTSVGHAVSYCGLTSALDSSADKQQRGPISKQRNAHLQTVLVEAAKLAPRWNPQLAAIHAREIQRGHRNRATLEVARKLVAYLLAVDKSGKPFQIRTPATVEQEVETTA

SEQ ID NO: 167344 - protein, 313 aa, unidentified
MIYIGIDVAKDSLVGVRIDRSSRVKEVYTLENTEKAIKNFLNTVSSKWKKLTIASEATAEYHRVLALLCLERNIPFRLLNPITTKQFTRATVRKRKTDLTDAHVIAKLAQQGEGNLVTQESFSLAKPAIRTAAKLSILRQQIKLMQQRAEQIGMDAELVKELQICMDTLTAAKVNYEQHVFAGQNKKLATLLQTIPGIGPIGAATLIAEVSNITRFPSGKALVAFCGLDPKVKQSGKGLHHNTQLTKRGSPYMRRAIFFAANVAELHNPELKTYYQKKRDEGKFYKEATIAVARKLLYRVFAVWKRQSPYVAR

SEQ ID NO: 167345 - protein, 334 aa, unidentified
MENIALIGIDLGKNSFHIHCQDRRGKAVYRKKFTRPKLIEFLATCPATTIAMEACGGSHFMARKLEELGHLPKLISPQFVRPFVKSNKNDFVDAEAICEAASRPSMRFVQPRTESQQAMRALHRVRESLVQDKVKTTNQMHAFLLEFGISVPRGAAVISRLSTLLEDNSLPLYLSQLLLKLQQHYHYLVEQIKDLESQLKRKLDEDEIGQRLLSIPCVGTLTASTISTEIGDGKQYASSRDFAAATGLVPRQYSTGGRTTLLGISKRGNKKIRTLLVQCARVFIQKLEHQSGKLADWVRDLLCRKSNFVVTCALANKLARIAWALTARQQTYVA

SEQ ID NO: 167346 - protein, 302 aa, unidentified
MKDITTIGVDLAKNVIQVHGVDQRGKAVLKKQLPRRRFVEFFANLAPCLVGMEACGSAHHWARQLEKLGHQVKLMAPQFVKPYVKTNKNDAADAEAICEAVSRPNMRFVPIKNGEQQAVLALHRARAGFVKARTAQANQIRGLLGEYGIFLPQGIVHVTKRLPAILEDDESELPGAFRRLLVRLGEHLNELDRQVGELEAQIQDWHREDAASRKLAQIPGIGPLTASASVATIGDARSFQNARQLAAWLGLVPRQHSSGGKTLLLGISKRGDAYLRTLLIHGARSGKCQGSCRIGHAAAAAR

SEQ ID NO: 167347 - protein, 411 aa, unidentified
MEIVHTRCCGLDVHKKTVVACVLISQADGLIERQVRTFNTMTADLLALADWLSSMHVTQVALESTGVYWRPVYNVLEDDQRTLLLVNPQHMRAVPGKKTDVKDAEWLADLLRHGLLRASFIPPAPIRVVRELTRYRKTLVQSRADEANRLQKSLEGANLKLASVATDVLGMSGRAMFAALLEGERDPEVLAELARGKLRAKLPQLRQALVGRVQPHHLILISQILAHIDFLEEAVAQVQAEIERCLPPFDEALQLVQTIPGIKEIAAAAILAEIGTDMSRFPSAGHLSSWAGLCPTNKESAGKRMKGPANHGNVWLRAIMGEVAWASIRTKASYFYAQYHRLARRRGKEKAAFAVAHSLLVVIYHVLRTGQPYKELGVDYFDNLDSARIERHHVRRLEQLGYTVTLTPTAA

SEQ ID NO: 167348 - protein, 466 aa, unidentified
MRKDKLVQASRRERKELARRLKSEDPGLEVVHPDAAGIDVGNEAHYVAVRGDRDPEPVRLFECFTADLYRMADWLRRCGVKTVAMQSTGVYWIPLYDVLEEFGFEVFLVNARHTKNLPGRKSDVQESQWLLKLHTYGLLNNSFQPPSDIRVLRTYWRQRAEHTVGMATCIQRMQKALTQMNIQLANVISDLSGRTGQTIVRAILGGERDPKKLAELIDCRIRATKQEVAKSLEGNWRPELLFVLQQQMEMYDIYLRRIAECDQKLQQHLSTFANSSLPVTKESLSRANKNKSRQKNVPQFSLTEELVRITGVDLTRIDGINAMTAQTLISEIGLDMSRWKTEAHFASWLGLCPDNRISGDKVLSRGTRRVINRAARALRIAANTLLKSRSYLGAQYRRLRTKLGAPKAITAMAHRLARLVYRMLKYGHQYIDRGAEYYEQKNRQQQIDFIRKRAAQLGLMVTVAPA

SEQ ID NO: 167349 - protein, 411 aa, unidentified
MNQITSVGIDVSKGFSMVAIRQPGGVIVEPPFRVNHTSRELNALVQRLHILPGEIRIVMEHTSCYWRPIGLTLVNAGFFVSIVNAMLIHDFHDNSIRRVKTDRADALKIANYALTFWTELKPYSPEDELRQLLKMQCRLYERTLSTSVTLRNGLISLLDQTFPEINRMFHPLVKQSNGHVKWVDFVKTYWHKKKIATMTESRFMDSYRRWCKREHYQYYASHARRIYGLAKETVASMPRSESTRQLICQAVDSLNAVYEALHQLRKEMLRLAQQLPEFEAVMSLPGAGNITGPKLMGEIGDVRRFTSKRALVAFARVDAMPYQSGIMDSHSRRMSKRGSPLLRKTLFQMCSICLQLSRVDDPVYLFMDRKRGEGKQFYVYMVAGAAKLLRMYYARAKSVFDADNEENKITA

SEQ ID NO: 167350 - protein, 292 aa, unidentified
MNRYLGVDLQRNCFTVCTLTEDGQSELRKGSIHSLSEFAHTLPATDAVAVEATGNTRYFCQSLKARGCRLVVVNPQQFQVISRSVKKTDAPDAKTLAQFLARDLLPEVRLKEALPAEIASVLQTRAKLVKLRTTLKNKINNLLAGQGILIRRESLSRDKGLEQVLQASVSGLARVELEVLVAPIRPLNDSIRKLEAAIKKQGPKLPGYHNLKSIKGLGEIGTTTLLSTSGDINDFAGEGKLAAYFGIVPRVANSNATARSGRITQRGNKLARTARVQCALMARRYRPYRAPF

SEQ ID NO: 167351 - protein, 354 aa, unidentified
MERYIGLDVHAESCTLVVVSGTGKHLKQEVVETNGAALKQALRAIPGPKRVCLEEGTQSAWLYELLRSEAEDVVVTMPAKRSGSKDDARDAAFLAESLRSGTNLRRVYKGVGPYSELRAAVRSYGMLRSDVLRVKNRLKAIFRSRGLMPPGGEAFHEQKHEAWVARLSKEHRRSAEVLLAELEMLETFWRQAEERLHEASKQHRIVKLLATAPGIGPIRSAQIVATVVTPHRFRSKRQFWAYCGLAIMTRSSADWVRDRTGRWARAQTQQTLGLNRNRCGALKEVFKGAAHLVATRMTSHPLHADYQRLLERGLKPNLAMVTIARRISAAVLAMWKREEEYDPKKHETITTTQA

SEQ ID NO: 167352 - protein, 419 aa, unidentified
MRSIRTKKVKIVNNETLIVTVDISKTTNVGYCRCPNGIEVKPFGFINNGQGFSVFWNRITKMKNTHNLKEIVVGFESTGPYGEPLIHFLKKRNARLIQVNPMHTKRVKELEGNSPNKTDQKDPKVIADIIGLGHALTVVIPEGPAAELRRLTMARERAMQRRISLFNQLQDLEFTIFPEFSQVFKDVKTKSAMYILEHFPSPQDIAKCKIECLVAVLKKVSRGKLNEDRVKEIHEAAKTTVGLKDGQRSILLEIKEICTTIETTEHFIAVIEAEMSQHLKDIPYSKFLLSIKGIGEITVGGLIGEVGDFRCFNTIAEILKYAGLNLFEISSGIHNGQRRISKRGRSLMRKLLFFAAINVVRKGGIMHEQYQKHLEGGMLKMKALIAISRKMLGIMFALVRDHSDYIENYVEIEKLKKAA

SEQ ID NO: 167353 - protein, 338 aa, unidentified
MAIYAGLDVSDKTTHICVVDVDGKVLRRDVVASDPDVLAKWLNKHCTELARVVLETGTLSTFLYHGLVERGVAVECICARHAKGVLSARVNKSDVHDAEGLAQLARTGWYKRVHMKASATHIDRAALRIRAQLITARTSMANQLRGLLKLFGLRMGTARTPGRRAERLSAFYAQRPDLKALFAPLIASMEAIEEQLRASNRLLNDRAKADEVCTRLMGVPGVGPITALTFTATIEDPHRFARSEDVGAYAGLVPRRNQSGERDVSGHISKAGDPMLRKALYEAANVALSQVKRPFALQEWGRKMAEAKGAKRARAAVARKLAALLHSLWLNETEFRWV

SEQ ID NO: 167354 - protein, 452 aa, unidentified
MAKKREKRECKAVVLEPDAAGIDIGAEEIYVAVPPDRDEESVRMFSSFTCDLHALADWLQKCHIRTVAMESTGVYWIPLFQILEARGLEVYLVNARYLKSVPGRKSDVSDCQWIQYLHSVGLLRASFRPAMDICALRSLWRHRASLLQMASEHILHMQKSLSQMNLQIHHVLSDLTGASGQAILDAILAGERNPVLLAQLCNCRVKSPREKVAKALEGDYRPEHVFTLKQSLAGYRYYQKLIAELDREIQRLMQNLPSAAESGQEIPQRTKHSAFQRQGNDPGFDLRGQLYRIAGVDLTDIPGVSAVTAQVILTEVGPDLHRFRNASAFASWLGLCPENRVSGGKILSCKTRRVKSRAALALRLGANSLCRAKGYFGEFFRRMRAKLGTAQAITATAHKIARVLYHVLLTKEAYAETVFHKCDEHTRRRAEMRLRKHAASLGFQLIPVNPAT

SEQ ID NO: 167355 - protein, 369 aa, unidentified
MADYREAFVGIDVAKLRNAIAIADAGREGEVRFFGEVDACVASMRRTIQRIADRFDRLHFCYEAGPTGYGLYRLIRSLGHECTVVAPSLIPRKPGDRVKTNRRDALSLARLLRAGELTAVWVPDAGHEAMRDLVRARSAAVEMLRVHRQQVSAFMLKHGRVYPRKKGWTMRYLRWLQEQVFDHPAHQIALQEMVEAVRISKERVERLERTIEEFVPAWSLAPVVRALQTLRGVDLIVAVTFVTEVGDVSRFESPRQLMGYLGLVPGERSTGDTIRRGGITKAGNSRVRHMLVESAWAYRHPPRVGVKKLYRLEQASPRVREIAWKAQNRLTARYRMLSGRGKRPTVVCTAVARELAGFMWAIAREAQAS

SEQ ID NO: 167356 - protein, 370 aa, unidentified
MGLAFAVSVGVDGPTASCANVELFKSNERAARMKFKRIAIDTSKHVFTIHGVDEQERPILRRDLKRDQFEAFFRKLPGTEVVLEACGGSHHWARVLQGMGHQARLIPPQYVKPFLKRSKNDDKDAEAINEAAARPSMRSVAVKTVDQQAKGMIVKHREMLVGQRTQAINALRGHAMEFGVVAAKGTVKVAPLLAVLAGDMAIPAAARAMFVQMGAHIAALESRIAGLDAELLAMHKAHPVSRLLAEIPGVGPMIATTMALTVEPENFASGRHFAAWLGLTPREHSTGGKQRLGKISKAGNERLRTLLVVGAMSVIRFAKPGSKSASPWLLQLLERKPRKLAAVALANKMARIIWAMMARGEAYRRQPIAA

SEQ ID NO: 167357 - protein, 376 aa, unidentified
MGDRITYVGLDVHKDSIVVAVAEGGLHGEVREYGRIANTAAALARLLRKLGGDGVTPRFCYEAGPCGYGIQRQLSAQRHECVVVAPSLIPKRAGDRIKTDRRDAASLARLHRAGELTAVWVPDAGHEAMRDLVRARLDAVRALRRARQQLSGFLLRQGCHYGRPAWTKLHRRWLAGLRFAQAAHHIVLEDYIQAVEAARERRDRLTARIEAMLPDWALAPVVAALQTMRGMALVNAVTLIAELGDLSRFGNARQLMAYRGLVPSEHSSGASVRRGGITKAGNSAARRLLIEASWTPAFAGAGSTASRRGSAASCCSGRKASPSQSARSPGRRNCGCARDRKLARTGKPANVVTTAIARELAGFVWAIARQVPVPVV

SEQ ID NO: 167358 - protein, 412 aa, unidentified
MQDILTCAMGLDIHRDVIVACLAKGELGTDPEIEIRSFSTLIPEMRKLRDWVLEAECRYVAMESTGIYWQPIYEMLEPCFDGQISILVVNARHMKNVPGRKTDMRDAQWIATLLRAGLLKGSFIPDKTFRELRHLTRYRKSIVRDITAQKNRIDKFLQSSGFRFTAFLSDTFGASGRNIIRHLMEYGNISREALDRCLKTQTRKRIDEILIALNGSLSEHQRGFLRMIFGHLEALEQHRHTVEDAITKEITKHEEALSLLCSIPGIDVTAAAAIIAEIGTDMSAFPDSQHICSWAGLSPGNNESAGKRKSAHINKGNPYLKSMLCEVGWVISGKRSLYLSGWYWRIKQRKGAKRATIALARKLLALIYTMLKTGSPYNEDCFEIRRKQSERKRASRMVNELQKLGYFVVAPG

SEQ ID NO: 167359 - protein, 366 aa, unidentified
MFTERTSVGLDVHARSVAAAAIDSVTGELVQATLTPDYGDVRGWLDRLAGPVAVAYEAGPTGFGLYRHLQAAGVRCEVAAPSKLQRPAGDRVKTDAKDAIHLARLLRLDEITSVAIPTIAQEAARDLVRAWEDCRGDLMRARHRLSKLLLRHGIVYYDGKAWTGKHDIWLRHDALRRLPGDAATRLTFDADYDAVLTVKARRDRLDTAIEEAAADCEFMAIVRRLGCLRGIGTLTAFALAVEIGDWTRFTGNTIGSFVGLVPSEHSSGGSRSQGSITRTGNGHARRLLVEAAWHHRPRYTVGKVLRARWDLAPAAARARGNDGNRRLHRRWVQFIDRRKRSTVADVAIARELAGWCWSLAVLDTST

SEQ ID NO: 167360 - protein, 410 aa, unidentified
MGLYCGIDWATAHHDVAVVDDDGRVVARGRVGNDAAGFAQLLTLLAQAGDTPEDPIPVGIETDHGLWVAALRETGRVIYPINPLAASRYRARYAVSGAKSDATDAVLLANIVRTDATAHRPLPADTELAQVIRVLARAQQDAVWARQQIGNQIRDLLKDFYPAALAAFAELPDGGLARADARTILAAAPTPAQAVALTPARLRRLLAKAGRRRHLDRDVDRLREIFTDTYLHQPPQVEAAMGIQLGALLRQFDAACTAADELTEAAIAHFEQHPDAEIITSFPGLGMLAGARVLAEIGDDRSRFADARGLKAFAGSAPITRASGKKTVVLHRHIKNRRLAAVGPIWALGSLRASPGARRHYDARRAAGDWNHQAQRHLFNKFLGQLHHCLHTGQLYDEHLAFPPPLLLAA

SEQ ID NO: 167361 - protein, 353 aa, unidentified
MKCEKYMGLDVHQAMTVAAVLDAEGKVILETMVATEAAAVLRLVRSLSGPLRVTFEETTQAAWLHEILRSHVTEVVVCDPRRNKLLGEGSKADKVDARKLADLLRTGMLRSVYHGHEATRKLKELVRAYETFSSDTQRTMTRIKAIYRGRGIATPGRGVYQAKQREQWLGKLPEAGLQQRAEWLYEQLDQLKPLRKKAKQAMLTESLAHRAVGLLRTIPQLGPIRAAFIVATVDTPHRFRTKRQFWSYVGLAVVTHMSAEYEMKAGKVVRRRKPVATRGLNPNCNHRLKEVFISASTGGAGTEPYKSYLEKLKNKGMRSEMARLTLARKIAAVALILWKKGKEFDPKELNKTT

SEQ ID NO: 167362 - protein, 354 aa, unidentified
MDNRKYIGMDVHKEAIAIAVLNAAGKLVMESIIETKANTILEFLKGLRGELHLTFEEGTWASWLYDLLQPHVKRVVVCNPRRNALLKEGSKSDRVDARKLAELLYTKMLRPVYHRDNGMRAVKELARSYVTISKDQARVMTRVKALYRSWGIACSGKQIYTVRHRASWLGKIKEPSVRRRAEFYYQQLDGLRSVRRQVRRELLLESGKHKASKLLRQIPSIGPIRAALLLALVQTPHRFRTKRQLWTYSGFGIETHDSAEYRYVAGQLERSKKPQQVRGLNRNYNHDLKNLFKSAATNAVAKSGPLQEFYLALVKRGIRPEMARLTVARKIAAITLAIWKKGASFDAEHLLRCW

SEQ ID NO: 167363 - protein, 356 aa, unidentified
MTTLEKQNCLYVGIDVHKDTHTAVGVSPFGEKLFEVTIGNYKSDFLALENEVKKHSGILSPFFGLEDVRGYGERLAEHLYQSFPVYYVPSILVDRLRQNATHPEKSDSLDALGVAKVMIQSIDTLLPYTISEEGEKAKQLKEISIDREDLVLERTRLKNQVHTLLYRIFNNEYAKVFKDPFSLKALAHWSKSKPKCDPFLLKTMKRKVKRIRDLHYEITDLEKDMDRLLKENYTIQTASGCGVVLASTIIGEIGDIQRFNSPGALSKYAGCSPRERSSGKKTRHVKTRSGNRRLNCAFHRMALSQISRMGNEKARVYFKRKVSEGKSKSQALVCLRRQMVNIIWCMMKNKTEYRNA

SEQ ID NO: 167364 - protein, 349 aa, unidentified
MVADEVEYVIGVDTHRDERVLAVVAAATGAVLARRAVPANARGYLTALRFALKTADGARVWAVEGTGSYGAGLARYLAGRGEKVLEVSRTPRAERRLRGKDDPLDAARTARAALAGETLALPRNGDRREAMRLLLIARRSAVDVRREALGQLRGVIVTAPDRLREELRALPTGKLLDRCSHMRRTSSTRLGEDATRLVLRSLARRIEAATLEAAELERELLGHVRALAPALLDEPGVGTIVAAQLIVAWSHPGRLRSEACFARLAGVAPVPASSGQTTRHRLSRGGDRQLNRALHTIVLHRRQHDPATKDYIARRIAEGKSRRDATRLLKRYLARHLYRLLQKTEPLMT

SEQ ID NO: 167365 - protein, 365 aa, unidentified
MLQKAELSCEADSENYLGGSSETMYFIGLDVHKRTISYCVKDAAGKVHQEGKIGSTRRELDAWVKTVPQPRTIAMEATIFTGWIYDHLLPHAEKVKVAHPLMLRAIAAAKRKNDKIDASKIADCLRCDFLPECHMASTEIRDRRRTLRYRGLLVKQMVQMKNRVSGLLLEKVTHTRQRLHKVGYFAELMSSSEEIDQSIRPLLKLSREHIVRAQKLDYALVSSLERDPMLAERLKRLRTVPGVGPITALTLALEIGDVSRFRSIKQAISYCGLCGAERSSADKVARMPISKQRNKHIQHVLVEAAKLAPRQCHELALLYEKEMQRGNRNRATLAVARKLVCWILAVERRKQDFVPAEKFGGTAAA

SEQ ID NO: 167366 - protein, 526 aa, unidentified
MPATTRRRTALASANSVHLGKPSGVLGPRVQSVGPEHFGIVAVDCAKASSKWMLTDFYGKVLIAPTVVRHGRDAFDRAIAQIRQAKASHQLEDLVVVVERTGRYHRPVKRAFAAAGFDVRVIHPMISRHFRRAAFPNQKTDDTDLQGIIQAACHGYGLVDPHWEPVYSQLQLLVRHRRGLVYKSTKLCCQILEHLESCLPGYARCFDNVFNSGIALVIPRAYGTPRAVVTAGLAGLVELARRENVRVHKSTLIRILAWAEDAPSADREALLHQRLLGELNQDRIATEESIQVIEREIVGLLVQTPYVRLLALAGINVVLAAELAAELGPIEHYPTARVITGRAGLFPGRYQSGPVDYRRGRLVRQGNRRLRQALLMGADTLCRCNDYFRVMAKKWQIQGKDPRDIHVRVAGRLARIAFQMVAGSVAFRHPACQGPPAVLSKLNEFHNEHNINITTTRTNLQHAAAQLPAAEQAREREIWQAKQAEIRAQRGRGPKRLAAILPAVLSRLVGGELVGVIQSNSSGETP

SEQ ID NO: 167367 - protein, 344 aa, unidentified
MVIKDKKFTYFIGIDVSRNELDFAVLHSGKFVLHKEVSNSTDAIALVVSELKLLPRLMISRTVFCMENTGLYCNHILTTLKKFKAHIVQENALHIRNSLGNIRGKYDKIDAIRIAQYAYKNRDELKLWTPRRKEIQQLAHLTSLRFRLIGLQSALKTPLNEQRSFVNKGVLSESILLCKRSLDAVKLDIENVDLRILELIKKDEKLNRLHSIITSVPCIGTVTAVQVIIRTNEFLDIRTAKKFACYAGVAPFRKESGLVTQKARVSQIANKKVKALLHICALGAMRFDPEIKAYYVRKVDEGKPKMSVVNAVRFKLINRIFTCVNQDRLFEKEYKKGQLLLAHL

SEQ ID NO: 167368 - protein, 430 aa, unidentified
MTNRDPIPSDAVLVAIDIAKVRNEVSIEASHHKRRRRLCVLNTRCEHDRLIEVLHGYGKPVICAFEATGNYHRPIAWRLIEADFDVRLVSSMALARTREALHNGWDKNDPRDAQVILHMLRIGATQRYHDPIRAGINDVQELSKTHEAIAKAKTEIQHRILTHYLPLYFPEIERFRGNSRSDWFFAFLDAFPTPASITALPKETFIKTAWGVVGRKVSKERLLGDIYETARTSIGLPLPGDAPAIRMFRMVLAEARSLIRLRSEIERVADDLLSDSADYQALRRIPGIGPIIALTILAEGGDLRRFGHHRQFLKFCGLDLSTQQSGRYRGQTRLSKFGNARLRRTLWIAGQVAIRQKENGFRYKFERYIAKERDNLDLRRKALAAITAKMARVVHAVIQSGFDYRPFVEGRVPGGRTSFCKSREGATATL

SEQ ID NO: 167369 - protein, 459 aa, unidentified
MIAAVVERCVGIDIGKKSLSACVMTGPAHGEARSETRTFGTTVAELKALREWIQKEQCKHAIMESTGSYWKPVYNILEDGVTVALANPQEVKGRKGHKTDAKDAWWLAHLLRHDMVTPSFIPPRKQRQLRDLTRRRKKMLSAASSEKNRIAKVLEDANVKLGSVLTDLFGVSGQRMLEALLEGKAEAQQVAALAHGTVQKKMPQLIAALEEHQMDDHHRRMIGYSVAHLCFLEDQIAELDEDIRTQIREAGYEQSWELLQTVPGVQETTAAVVLAEMGPDTKQFGSEKKVSSWAGLAPGNNVSAGKSKSSSTRPGNGWLKGALTETAWGVARKKDCHLRDKFWRIAAKSRAKAVVAIAHDVLKLAYCVLERGTPYVEEGPHAFSEPQRQRIIRHHVRRLGRLGIRVRTGPQSAKGCRKAKKATAATTAKRRGRPCKCVERGIICTHGGPQQPKSLQQNA

SEQ ID NO: 167370 - protein, 348 aa, unidentified
MQRYIGLDVHATSCSFGVINEQGKKVGQAVVETNGAALVEHIKTIPGRKSLCLEEGTQSAWLYEVLSPHVDQVVVTRVEQKSAGNKDDIRDAFRLAEMLRLGNVLPVFKEKGRFGKLRAQSDLYSKMSSDSVRVQCRLKALFRSRGVPTPDADVFAPEQREQWLKKLPAAYRPAAEVMYRQYDSACRAKQEAAELLKKESHLHPISRMLETAPGMGPLRVAQLMAIVVTPYRFRTSRQLWSYSGLAVEMRSSSDWIRTEQGWQRVNLDKTRGLNRSYNRTAKYIFKGAATSVLQHRMQPLYNGYLRQLEQGTKPPMAKLTLSRRIAATLLAMWKNKEVYDPAKYRCET

SEQ ID NO: 167371 - protein, 361 aa, unidentified
MTSIIYVGMDVHTTNYTLCCYSMEDDRFFAEVQVEPDAKNILKYLARIEKQQSRDCRIVCGYEAGCLGYSLYHQLHAHGIDCVILAPTTMMTKPGKRIKTDRRDARLISKCLAFHTYSPVYIPTEVDDAVKEYIRMRDDANSALTRVKQQIIAFCIRHGKIHDGKSYWTNKHLEWLSSLDLGNKILSEVLQEYLIRYYQLREQVDMYDMRINELAQAEPYRQKVEKLSCFRGIAAHTALSFCVEVGDFRRFATAQQFASYLGLVPGECSSGDKQQYTGITKAGNSHLRKLLVETAQVFGRSATKSGKSVALKERQAKCDSLTVAYADKANARLKKKYFKIAMRSKVNIAKTAVAREMACFI

SEQ ID NO: 167372 - protein, 410 aa, unidentified
MGYETLIRRAHVMTRKNTLKSLPTDTEFRVVGLDLAKSDVSVAAIPVDDNTPSLVDRMTYADLLDWAGKISPTLFAMEPCNGYSLLCLQLENLGHEIKVISGWTVSMWINTHLSGQKTDLNDAIALARLAVSDAELTPIRHKSITEIRIQTVQAVRQQLMSQRSKSIVSFKALAQQWGIPCAAGHRNLKKLRESIEAKVDLITRPVANAMLFLLDAVKSLDRQIGQLNQTLQELVMSDERGRLLQSVLGVGTQISARVITVVGNIERFNSPRSLVAYVGVAPRNFITGHKNLTKKKHGNCPDLSHKGQGKISRRGDKLLRSLFIQGAACLYMQFCKDQLPECQLKRWILKQLARQKTYGKLIVSLAAKLIRIVWAVLTYREKFNIQKAGMTRSMWSEMALETPLNKEVPA

SEQ ID NO: 167373 - protein, 415 aa, unidentified
MKIVFPTCCGVDVHKTFLVATIITTPTDSLQPHYQKKRFSTFNSDLNRFADWLLKHDCLDVCMESTGKYWVPVFNILEKRGIRVVIANPKWVKAVKGNKDDTKDSKWIGDLFRIGLVKNSFIPNLDIRILREFTRYRYKLVSMKSSEKNRFQNAFTVCNVALDSVVSDMFGKSATAITDYLTSDECFAPEYCVSLLQRSLKKKAKQVLESIEGYSIADEQKLRIKIIREHHNFLEQMIAKVDTCVNEMVKKYEGEINLLCTIPGIERNSAITIISEVGTHMEQFASSKQLCCWAGLTPGNNKSAGKKKSVQISRAGVYLKPALVQVAHAAVKDNKHPYYKLKYERIAKRRGKKRAIIAIARMILTAIYSMFRTGEVWNPVDLFKIDMPEHLKGQQLAKAIKQATKFLEKQGLTVA

SEQ ID NO: 167374 - protein, 346 aa, unidentified
MKQISTIGLDLAKNVFQIHGADAEGAPVLNRKLRRAEVLRYFEKQPPCLVGLEACGGSHYWAREIAALGHDVRLIPPIYVKPFVKRGKTDAADAEAISEAVTRKTMRFVPIKSADHQAAAMVLKTRALLVRQQTQAINALRGHLSELGVIAAIGTAKVTALIEIVRDEEEFRLPKAARFALAEIADQIEALTRQIDKLERAIVAEAKRDEDMRRLTTIPGVGAITAANIKALVPDPGGFKSGRHFAAWLGLTPKPHSSGGKERLGGISKMGNPTLRSLLVCGATSVLRHVKGNDKALQWLIGLLARRPFKVVAVALANKMARIIWALLTKGGVYRNTGAASSRASA

SEQ ID NO: 167375 - protein, 348 aa, unidentified
MIWIGVDAHKQLHQASAINEEGIVGERRITNEPAQWAALLDWARQWPERVWAVEGAWYRGRGLAQYLATQGEAVHEVNGRWTAGRRRGMRKPGKSDRLDARSVAQLLREERPTLPRVYAEEDELAPVQLWSRLAAELTEDRTRLLNRLHNLLLLCDPQYNSTLPELTSKAGVGAALAYQAPGASALARERERAVRQTAEQLALLESQIAELERKLERVTRGSFRALRQIEGVGAKIAATFIAELGRPRAGFGDQQLAAMAGAAPLEASSAGGTRHRLNRGGNRRLNLALHRIVLTQGRIYPPATAYLARRRTEGKTAREARRALKRHLCRRIVQAWRACFEQSLPAAA

SEQ ID NO: 167376 - protein, 324 aa, unidentified
MYAALDLHEKSIQCVLKDDTGKIVKESKFPKDEEEILEFLDGTHAHVVMESGYNHQHIRDVLKEKGYDVKVAHPLMVKAIAYAKVKNDKVDARTLADLLRADMIPESYVPDEKTREVRDLVRRRHHLVETRTGFKNKVKAELATRWVKHEGDVFTQDGRKFLRSLHIDAVDDYMDTIEFLDGKIGELDVRVKGIAQQDRYAKLLVTVPGISYYSGLLISSEIADISRFPDHEHLCSYAGLVPGMRQSAESSHTTQSKTRSAMLNWIMIQCTRVHVRRCDSSITRFYTELAKRRGEKVAIVAAARKLMRAMYFMLKEEQAFRLDG

SEQ ID NO: 167377 - protein, 319 aa, unidentified
MDTITQVAIIGIDVSRDWLDVHCLPNNQRLRLPNTDEGHGRLCELALSQNALVCFEATGGQEWRLWVALDANGVATRQLPPAQIKAFAASRGTRAKTDRIDAELIAGFMAFRPDAGRDLPHEKIRLLRSLVSKRGQLVETRKRLLAQIKAHEKLGSADTFEALDAELKDLLNQQIAKLEAQLEQVIATDERLSATARILRSVPGIGPVASTMLIAEMPELGQITGEQAAALTGLAPIAHDSGAMRGKRAIGGGRRLLRHVMFQAALVASHHNPVLKTFAQRLRTVGKPHKVVITAVARKLVTIVNALIKSQQKWSVQVA

SEQ ID NO: 167378 - protein, 311 aa, unidentified
MNSEAYIGVDVSKDLLDVKVLPSNKAQQFSNDDPGIKKFITFIKKIDPQLIVFESTGGLEMLAVSSLVEKHLPTVVINPRQIRDFAKATGRLAKTDSIDADTIARFARDIRPEIRPIKDEHTQLLSALNARRRQIVDMLVAEKNRLYSAPKPNIKSIQKHIQYLERTLEDINNDINKTIKKSPTWRENDRILQSFKGVGPVLSATLLCDLPELGTLNRKKIAALVGVAPLNCDSGQFRGRRRIKGGRADVRRKLYMAAVASIRHNPRMKNFYHKLIDAGKPPKLALTACMRKILTILNAMIKNRTYWIATC

SEQ ID NO: 167379 - protein, 366 aa, unidentified
MLIIGCDYHPGFQQIAFVDTDTGELSERRLGHREQAEQFYRELKQRNLAVRVGMESSGHSRWFERLLHELGFELWIGDPAEIRTQRVRKQKTDRQDAQLLLRLLMEGRFPRIWVPDAENRDLRQLLWHRHRLVQMRTRVMNQLHVIPLNEGLRRKQALWRPAGRQDLESIVLAPWASRRRRDLLDLLDQLTPKIQELTQALEVEVEKRPVTRLLRTHPGVGPLTALAFELVIGTPERFHCGKQIASYVGLVPEEKSSGDRRRLGHISKPGNVLLRFLLVEAAQVTVRSQPQWRSKFFHLAMRRGRKIAKVAMARKLAVHLYWMWRQGLDYTQSKKFGSQGRKSSALMLDWPPVRFGSRGCEVRESF

SEQ ID NO: 167380 - protein, 299 aa, unidentified
MDIIIDKGCGLDVHKETVVACVMGSGIKKEIRTFSAMTGDLLRMKGWLTDLGITHVAMESTGPYWKPVFNILEDSFEVILANARHIKNVPGRKTDVKDSEWICKLLRSGLLTASFVPPQAIRDLRDLTRYRQKLIQAASAEKNRIQKVLEDANVKLSSVVSDTFGVSASRMIKAIMSGNFDTDSLAELAVGRLKGKKEKLKEALQGHFRDHHGFMIQASLDHIEYMEKTIAKLDQQINEKLKDYHRERELLASIPGVKEQGSSSILAEIGAAMNVFPSEGPLSAWAGMSPGNKESAGKK

SEQ ID NO: 167381 - protein, 395 aa, unidentified
MSNTQIRVAIDVGCDHHRVAVGLSNDKMLDEFDITHNADGFQNFFNRLEKLQTRYRLPVAVAMEGYNGYARPLDGQIRQHGYKLYSVNNLKLARYKEVFPAPAKTDAIDARKILELFQLADSLPLAKDVLQEVVDTPIENDKLKRLTRRRRQLVGERVRVVNRIQSDLQAVCPGLLSITHDVANRWFLNFLTCQDELPKLAKLNRAGLLEIPAVGRIYAAKIKAWQPNAQFALDVEWVGEMIIQDAKRILSLSTDIKTLDQKIAEIATDSSLAQTIGSIPGFGKTSMAELAGEIGNVERFDSEAGLAMYLGMASLDNSSGKKTGTKTPRQVNTRAKAAMMTAVARNIPCVPQSRSYYNKKRAEGKKHNQAIRSLGRHLVRVIWAMFKHGRTYEIR

SEQ ID NO: 167382 - protein, 372 aa, unidentified
MVASILAKNDCKDKHLCFGLEATGHYGDHLAIFLRETPMLKNISRAVYLLNPKQIKKFRDSYSDIPKTDFTDAFVIADSLRFGRIGMKGSIVEDKYLALQSLTRWRFQTAKDLTREKNRYLQNLFLKFSTFAQLQASSESLFSDTFGNTALQLMEEFDSVDEIAYCPLEELVDFLVEHSKNHFKDPEGLAEELKKAARSSYRLSKAVNNSLNQVMAMQINTIRFLQQQLKETDKYIEKQMTAIPCTLTSVPGIGPVYAAGLIAEIGDVKRFKNEAALAKYAGLTWTKHQSGKFEAENSRLIQGGNKFLRYYFCQAANKVRLHDPDYRSFYQSKLRECKTSPHKRALVLTARKLVRLVYALLRDQRLYKIQTK

SEQ ID NO: 167383 - protein, 468 aa, unidentified
MEHHLGHKQSGKKARHSLSLLERIQPDAAGIDCGAKSHFVAVPPDRDPQPVREFRTFTTELKRLAEWLKQCGVTTVAMESTGVYWIPLYEILEEHGFEVLLVNAHDVHNVRGRKSDVSDCEWLRELHSVGLLRASFRPAAAMVPLRSYLRQREILVEESSTRINRMLKALGEMNLRLDAVLTDVAGSTGLKIVRAILAGERDPARLAAHRDHRCHASQAELVAALTGNYRAEHLFALKQNFAAYEFLLQQLAECDSAIEALLKSLAAQQPPPASALPPARRKTRPQHGQPRFEIRSPLQRLTGGADLSQIDSIGPHAALQLVAEIGTDMRRWNSDKHFTSWLALAPNNKVSGGRRLSSRTPPSANRAAVILRRCAMSLGKTPTALGAFYRRLAARAGKAKAITATARKLAVLVYRMLAGDFVYHDPGATAYHQLHRTRELKSLRKRAKLLGLELLDPATGELLVKPVS

SEQ ID NO: 167384 - protein, 324 aa, unidentified
MFVGIDISKLSFDAAILQDNAYQHRNFNNNADGFSVLLKWVKSFKTPALFCLEATGIYGLALAKYLCQQQQKTIVANPIQTHAFAKMEMSRNKTDKADSKSIARYAQHLDHQGLCDNALYTLKDADFERIQFLVTRLDQLNKMRTQENNRMDVSLDKAAVQSVKTMCRFIDKQLLSVQNKIADIVKHNRQLNEQVELLTSISGLGDKTAWAILAYIGDVSLFDNAKQISSYAGLNPSIEQSGSGINRSRLSKMGCARLRKSLYMPALVAVRHNPLMRALYERLQAKGKPKKVALVAVMRKLLVLAYGVLKSGKPFDINYQQQTI

SEQ ID NO: 167385 - protein, 308 aa, unidentified
MNSNKNYIAIDISKDSLEVKHETFKGSFNYNEEGLKKLLAKAQSMETPIVVCEATGGYERKLMTCLYDNSIAVALVNPARVRAFAKSEGLKAKSDPIDAALLLRFAQNKNLESTPQPSPRQQTLQALMDRRSQLTESLAREKNRLQKCPQCTRKSIEKMIDILEKELAEMDKQVEQLIQEDDLMREYSSIMQSVVGVGTTTAWTILAYLGEITELGRNQLIALSGIAPFNKDSGKYKGKRKIEGGRAKVRKCLYMATRTASVHNEHIKKYVDGLRNRGKPYKCAIVAAMRKLLIHLQILLKNLKKELA

SEQ ID NO: 167386 - protein, 322 aa, unidentified
MNSKGLEVVGIDVGKRMLDVAREGTRRGERHSNDAVEVTRFVRSLDPECDIVVFERSGGYERLLEGQLAAAGVRWAVVHSKRVKAFRIARGIKAKTDAIDCRLLRDFGRDQLDRGELRLGRLGDVTMAALAARRRQFNDMLHAERCRQETATIELVRSSIGRTITTLEVELTAIEAAIAAHIASDQELHLKEDVMCQRIGVAETTARGLLAILPQLGRASAREIAALAGAAPRVHQSGTLHKTRGLEPGRAVVKVILFYPAQTAMRFDPEIKAFAQRLRNRGKPGKVIMVAVMRKMLVRLNAAVRDALASSDMLPPAACAAN

SEQ ID NO: 167387 - protein, 341 aa, unidentified
MKKNIFFIGIDISKADFAASIYKTPDQPIVTKEAIPNNPKGFEMLLLWLNSRLIDRKNCRICMEATGVYSQAIAYYLLFQGFPLSVEPPLKVKRAFDPVGHKTDPVDSKQIAEYAYRFQDELTSWKPRDETLEKIRQLLSVREQFSKQKVALKNAIQAYHKQKVQVTLIKKAHQETLSQIEKQIARIDKELAKLINQDPDTFQKASNLKSIPGYGMLLAAHLLVITENFTKIQQYKQLAAFIGIVPYKHQSGTSVSKRAKIRHFGPIPSRKLLRLAAQSVATHDMTFRRYYLRKVAQGKAKALVLNNISNKLLKVACTIIRNDTRYIKDYRSMHPMYLKSA

SEQ ID NO: 167388 - protein, 423 aa, unidentified
MEVMHERCAGLDVHKKVIVACVRLAIGRKVERECRTFDTTTTGLLALRSWLSASGCTHVAMEATGVYWKPIWNILSDGPFELVVANAAHIKNVPGRKTDMNDAMWIADLVACGLIKASFVPDQPTQELRSLLRTRKQMTREQTSHVQRLQKTLEEANIKLDSVISDIVGVSGRCMIEALIAGETNPVRLADLADRRIRAPRQALREALHGRVTNHHRFLLQLHLGQYDALAAAIAEIDHQVGVLIERVDERVEGGQATFRALIRLLCSIPGVSTLAAVVILSEIGRDMSRFPTAGHLLAWAGLCPSQNESAGKRRSSRLRKGAPWLKTLLIQCAWAASRKQDSYYKAQLNRLKSRRGPKTAICAVAASMLTAIYHMLKDGTEHRDLGTNHFDRRSVDTKAKRLVNQLTKLGFQVRLEPLTQAA

SEQ ID NO: 167389 - protein, 334 aa, unidentified
MENIALIGIDLGKNSFHIHCQDHRGKAVYRKKFTRPKLIEFLATCPATTIAMEACGGSHFMARKLAELGHFPKLISPQFVRPFVKSNKNDFVDAEAICEAASRPSMRFVQPRTESQQAMRALHRVRESLVQDKVKTTNQMHAFLLEFGISVPRGAAVISRLSTLLEDSSLPLYLSQLLLKLQQHYHYLVEQIKDLESQLKRKLDEDEVGQRLLSIPCVGTLTASTISTEIGDGKQYASSRDFAAATGLVPRQYSTGGRMTLLGISKRGNKKIRTLLVQCARVFIQKLEHQSGKLADWVRELLCRKSNFVVTCALANKLARIAWALTARQQTYEA

SEQ ID NO: 167390 - protein, 405 aa, unidentified
MTQTVCGIDVHRDTLVATIIDENTQQPQTREFQNSLTDIQHLKTWLKLHQCNQAVMESTSIYWIALYLSLEETGFKPVLANAHQVKGIPGRKTDQSDSQWLAYLLRAGLIKPSYVPAKHLRELRELTRLRVKYVQNRTQFKNRCQKVLNRVNIRLGSKLSDVFGKSGMEVLKGLMAGKTVESILEDTQNKYLKTKKEEISEVAKGALSENDIFVLQELTQSIENLNIQIHKIDVRMETLANQHDVAVICSVPGVGRLSAATVLAELGDVSRFSNGKQVASWSGLAPSVCQSAGVTVFGGITKQGSRWLRRIMVEVAHVAVRTPGRFRQMFLRITAKKGKKTAFVAVARKMLTIIWHLLVNGEKYVEDGFSKVSIKVKSSYRGHVPLETMVEVLRNAGYTVTANNG

SEQ ID NO: 167391 - protein, 439 aa, unidentified
MPFALPDALFFTGIDWAAETHAVCVLDAAGKIAAEFVIEHSADGIARLIRRLARYGEAGEMPVAIERPDGRLVDLLLEAGHPVVPVKPNAIKTWRDGEVLSGAKSDAGDAAVIAEYLRLRAHKLKAAAPYSDKTKALRTVVRARGDLVEMRVAATNQLAALLDAHWPGAKAIFADVESPISLEFLTCYPTPAAAAHLGEKRMAAFCAKHSYSGRRTAAELLTRLRSAPAGATGEALTEAIRDTVLAAVAVLAALNASVKNLDRSTAAHLGEHPDSAIFTSLPRSGQVNAAQVLAEWGDARPAYEHPDSVAALAGVTPVTSQSGKHRAVHFRWACNKRFRVAITTFADNSRHASPWAAKIYNDARASGKDHPHAIRVLARAWIRVIWRCWLDGTPYDPAKHGAAAALAKQPAKQNRGLRLTQGVSWDGRVGDDDAAFLLG

SEQ ID NO: 167392 - protein, 428 aa, unidentified
MDEVNRNRLEEFRQLRQEVRHSEEYLIVGIDIAKDQHYAFFGTATGKTLLKRIVFSNDHEGFRKLLDHAEALRVQHGLKKVVYGMEPTANYHKPLGEYLINLGRMVVLVSGVTVARNRESLDGRWDKHDGKDSANVADLISQGKCLHYEYPSAELRGLRGLLSLKRRLKKQEHGYKVRIRNQLIAQYFPEMDRDYERLGAEGLSIVRWCLPASEIAQLDVDPFIERVTSRRIRMEKRRRLEEVWEKAGMSIGCDGVPGLDHEAKVMVEGLKQIREMIKETEDKIEELCKPFPEYHCILTIPGFGTDVSAKVLGAVGDPDRFLNGKQVLRLAGFDLSADRSGKDSDKAIPQISKRGKANLRYALYQAALIASLQNRDVMLYYTNKIRGREKEKGIHVKMRVKLAAKLLVIAWTLMKKKEPFNPAYLKAE

SEQ ID NO: 167393 - protein, 380 aa, unidentified
MQGFQSAKEWAVELAAKNEKKQIVLGLEPTGHYWFCLATWMIANGISVVQVNPYAVKQTKEVEDNSQLKDDTKDPKLIANLVKDGNFGMPYLPEKVYAELRRLSMFRDQLNEDRIRAINRMHREMKIYFPEYKEALGRVEGAFSLELLRQTPFPGEIQTLGEDGIRQIWHDAKLRGRGYSRVREIVGYAKTSVGMKDGAEASAMAVKWFVKEIRELDEKLAEIEKLMREKYQEIPYAKNILEISGIGENTLSGILAEMGDISRFDDVKEIQKLSGLGLVACSSGKHKGETKISHRGRKRLRYWLFQAAKSAVAHAEEFKELHVYYTTRADNPLKKMQSLIVIACKLLRIIYGILKNGTVYDPKKMLRDIRRPEKKEVIAA

SEQ ID NO: 167394 - protein, 402 aa, unidentified
MTAVMIGVDPHKGSHTAVAIGGAEQPLGKLRVDASAGQAGELVAWAAEWPERTWAVEGAAGLGRLLAQQLVAAGERVLDVPPKLASRVRLLEAGDTNKNDPNDARSVAVAALRSRAVRDVTAEDHGAVLKIWARRHRDLARARNQVACRLHAVICDLVPGGIRKEITAGHATSVLVKITPAGPIGTARRDLAAQFLEDLRRLDTQLAQTKKQLAAAVRASGTTVTEVFGIGPVNAGTIIGDAGGISRFPSRDHFAAYNGTAPVEVSSGNRKIYRLSLRGSRRMNHAIHMAAITQIRHAHSGGRAYYDRKIAAGKTHKDALRCLKRKISDAIYARLRADAGITNPPAGKGPGGQKGNGSDSSAAGSHPERRLFGQATPGPATTLRPPDPASTPAAAIPAPKRS

SEQ ID NO: 167395 - protein, 473 aa, unidentified
MEKADMKYNQQRKRTGKSERRVATALFERIQPDAAGVDCGQKSHFVAVPPERDPEPVREFRTFTADLQRLAQWLAQCGVKTVAMESTGVYWIPLYEILEQRGFEVVLVNARDVHNVRGRKRDVKDCEWLQQLHRVGLLRASFRPAAAMVPLRSYLRQRAILVEELTARIQRMQKALTQMNLILHTVVSDITGVTGLKIIHAILAGARDPERLAVHRDGRCHASHQELVAALTGNYREEHLFALRQNFTAYQFHLQQIAECDTEIEALLNTLAAQQPPPSAALPAPRAKATRKHAPAFDIRTPLHVLTGGADLSQIHSIGPQAALQLIAEIGTDMSRWPTEHHFASWTTLAPNNKISGGRLLSSRTPPSAHRAAAILRRCAMSLGRTSTALGAFYRRLAVRIGKAKAITATARKLALLVYRVLSGNLVYNDPGATAYHQLNRARELKSLRKRAKLLGFDLFDQSTGELLVNPVS

SEQ ID NO: 167396 - protein, 339 aa, unidentified
MYYTGIDQHKHTSYLTTVDNKGVIIKQANLKNNDYDILNYFHQLGEKSIATVETTGGWYWLSDLLKENNIDLKLAHAKYVKAIAYAKVKTDKVDSQILAQLLRMDFIPEANKIDEDLRPLRDTLRARLRLIQKRTSALNFMHRMLEKFNIQNPSELSEQYKLQYEQFLDQAEFLKEQSLTLEKSLYSELIPDENIQLILGVPGIGKMNAFTAYLEIYDINRFETAKNFLSYCRLAPKASNSGGKVKQSKTPKDGNKYLKVVFSDAAIHAIQHYPVIKKYNNSLLRKKNKQIAKYIISKEIASIVYYTLKTKKSFNNKFKNIELQHIKSFQWPRITSPDV

SEQ ID NO: 167397 - protein, 439 aa, unidentified
MILIREVADAPVIMGISKPAGLKSPCGEVKIMNPLFVGIDVSSKNNVAYLMKPDGSKHSSFSVQNNLGGAKLLSEKIVSALHSMQLNDVVIGLEATSIYGDSLVYALREDGSLGRFQRKIHVLNPKQVRKFKEAYPDLPKNDWVDAFVIADHLRFGRIAKEVYMDDYRYQALRTLTRARFDIIQNLTREKQRFANYLFLKCSGIAQDKDIQNTSATTIALMEHFETVDDLANADLDELTAFISEAGRGRFVDPDATAKAVQAAARGSYRLPKTVNDTVNQAMSVSIASMRALKEQVKVLDKAIEQHLEIIPNTLTSIPGIGKVYSAGIIAEIGDIHRFNAQASVAKFAGLVWHRNQSGDFEAEHSQMIKSGNRYLRYYLLEAANSVRRCDSEFRRYYDLKLKEVNKYQHKRALALTARKLVRLVFRLLKDNRLYIPPEG

SEQ ID NO: 167398 - protein, 344 aa, unidentified
MVTFGVDAHKRTHTIVAVNDRGTPVGQTTVGTTSQDHLVLLRWAARFGAERRWAVEDCRHLSRRLERDLLAAGESIVRVPPKLMAHVRDSARTYGKSDPIDALAVARAAQREPNLPLARLDGPDREVRLLVDHRESLISERTRLICRLRWHLHELDPAWEPKARSLDAQRTLDEVRGRLQDHVGVVARLAVELTERCAELTITIKALEKEITELTTQLAPALLELPGCGALTAAKIIGETAGVDRFKSRDAYARFNGTAPLPVWSSNKARHRLSRTGNRQLNAALHRIALTQARWHPPAKEMIERRKSGGNSGREALRVLKRRLSDAVFQALLHDQTDGLTLAA

SEQ ID NO: 167399 - protein, 358 aa, unidentified
MTTVSKKQKWFNAIRLTPADDLYVGIDAHKKSLHIALWLNDAPAIDFVMPPDSVKLINMLNKLRVALRMVVYEAGPTGYSLARMLQQANIPVSVVAPSKTPRQSAPDSKTDSLDARKLAEYAAKGLLRSIAIPTKYQEAQRQLTRFRQQLVGKQTRVKLQIKGFLLQHGLDQTNGLSHWSCKAIEKLKTIRLSEHLRYCLDMLIKELSFIAEQLKSTEQKIKDAFSEKPICTTVKLLTTHPGVGKTIATQFAAEIFNPKRFSDKTQLAKYVGLAPSVHQSGQTSRYGPILKTGRPQLRCSLIQGAWLWIRKDPNAYNTFCRLIHNTGHKNKAITAMARKLAVHLWKMACDNKPYSCAV

SEQ ID NO: 167400 - protein, 386 aa, unidentified
MPQPKDDLSRSLVALDQHSALIAVVELSLSTWLVGGMVPGIERDPLKKLVPDEDGLLKLLHRWRDEAVKAGHQINRMVVAFEAGRDGFWLARWLRSRGIEAYVIHPTSVAVSREHRRAKTDRLDIALLKRSLLGWLRGEKKHCSMAAIPTLEEEDAKRPNREREQLVGKRTGIVNRMKAALVRLGIRGFNPKLRKAPQQLATLRTPEGGTIPPNTLAELQREMAHLSFINEHIKQIEAARLIQLKQAPQHGSNAKVVQLGRINGIGIETADMLANEVFSRDLRDQRAVARYAGLTGSPDESGRRRREKGLAKAGNARVRRGMIQLAWRFLFHQRNSALTQWYRQSVAAGKKRTTVIVALARKLLIALWRFVTIGDVPQGVILRTAS

SEQ ID NO: 167401 - protein, 353 aa, unidentified
MLYAGVDTHKHYSRVVVTDSSGNGIAQASLQNDRASFQEFFLQFNEPTRAVLEAGRTWGIIYDLLEDIGIEPVLANPVKTRAIAEAKIKTDTIDARTLAHLLRADIVPMVHVPSREARAQKNLLRQRLWLIGLRTMVKNRIHHILDRNHVAIPAYSDIFGKAGRQALDEMDIPTHDNRLLKAHLELLDHIQKQVDNAEKWIREAVGQHPAVAIVRSIPGLGKILSVLVALEIDDIQRFSHPGKLCAYAGLVPTTYASGGKIRHGRLIPTCNRWLRWAFVEAAWIAQRTSPYCHGYFERIKRRKGANSANAALGRRLCEITWHCLTENRLYEERMLGRELARLPSKVLGRNGAC

SEQ ID NO: 167402 - protein, 342 aa, unidentified
MQQSIYVGLDLGSSHCHQTVINHDGVLLSSRVIPTSEQHLRRAFSALGDNVRVHLESGELSTWVSSVIKPMVAEVVVSHSRTLAWIGKDSQKDDSIDARKLAELLRLNRTHPVYCETAEDRRRFKQLVAHHEDLSREQARLKSKIKARLRYLGMIRFDARLFTKSGQSALLNEFKEPSVKQMLAQTFAVLNQLLDTETQAKQAMTQASKQFPEVSLLQTTPGVGIITACRFVAYIQTPHRFSNKRKLWRYCRLGITRRESNGKRLAHPRLDSAGVGSLKDCSRKIFEAARRTKKDNSFKRAYEQSLLNTKNAVHARLSVQRKILSTLRAMWLRMQPYHDAST

SEQ ID NO: 167403 - protein, 441 aa, unidentified
MSEYFLGIDVSKGYADFILLDNKKNIIEKNFQLDDTFEGHHHLYSFLSSFIANTPDAYIITAVESTGGYENNWVNLLLKLQEDLPVSVARLNPFGVSHSSKADLKRVITDKISALCIAEYLINHRSKVSFAQEDYFAPLRKQWIFIKLLVKQKVQLYNQLESLLYSVNPEVLIFCKYGKSKWVLQLLKRYPSANSLSKASISTLTKIPYITSEKASTLINKAKSSVASVTDKVSSSLLKAVVGQILSLDKSIAEQVKLLEKSCSLPEVELLKSFTGIGTYSAVGLMLEIRAVERFPSAKKLASFFGLHPVYKLSGDGIGGIHMSKKGRKEPRLILFNIARTAITYNPLIKEIYQKHLKSGMTGLAAIGVVMHKILRIIYGMLKHNSEFNAEIDKLNSEKTIKPVIKPLMLKHRRYQSFDSSAPISRKQNKKREEQMKSHNG

SEQ ID NO: 167404 - protein, 314 aa, unidentified
MPQLVQSAGIDCGKRFLDLAVYPGGEQIRPENEPADHQRLVVWFKERGVTRVGLDASGGYERAVRDVLCAAGLEVHILDPARVRHFAKAKGRRAKTDPIDARVIAEFTATLVDTPPVTVEPAREDLAKLIRTRRLLVDKRADMTKAIKDLPDAAKTVVETALASLATAIVELEELIDRQAGADAALAKRVEALCSAPGIGQTTAVAMAVLLPELGRISGCAIAALLGVAPFADDSGDRKGERHIAGGHEDVRQLLYMSILRAATQGQGVLRTFYLCLTGRGKPAKVALTACMRKMIVRLNAMLAAQQTWKEEPA

SEQ ID NO: 167405 - protein, 398 aa, unidentified
MPMLAIGIDVSKSKSAAAILNQDGSVHTEPFEFHHDKPEMDALIKFIKNQNQSVTILMENTGHYHYPVLKAFQAADLPVCLINPYQMKKYGDMELRKAKTDKKDALRIAHYALEKGYSLVPYTPMDQKYEDLRFLARQYDQRMGTLKANKTFLINLLDETMPGITKVLSLTTRDPETSLSVQFIKRFKSFDRIRKMGRTRFLESYDKLSRKSRNRCAGSCGLIIYEMALNSITTRGENEYTLAAQDQCVDLVSESQKAADSIIQKMKTLAETLPEYEVLRAMAGVGDRLGPLILAEIGDIRRFHSGKALNAYAGNDAPPYQSGMFESHNRHISKRGNAALRKYCFEVMQALKLARPQDDPVYLFLVKKEQEGKPYNVAKMAGVNKFLRIYYARAMEVL

SEQ ID NO: 167406 - protein, 412 aa, unidentified
MKPFYRVAGIDVHKSMLAVVVGVADQPEKDWERRKFGTTVSELKHLAAWLQERGVQKVVMESTAMYWRTVWIALEPHFPLELAQAQSNRAPHGRKTDFGDTVRLVRRLWAGELRLSYVPDVEQRRWRMLCQAMQQVQEERTRVRNQIEVLLEEGQIKLSAVVSDLLGASGRLILKALVAGRQTAAEMAEMAFGRLRARSEELTAALEGTLDEICRGLLDQGLKRIEVLDGQQQEQRQWLGKMQREYASVLRRLGQVPGIDVLAGQKILAAVGPTAAAFSSSADLASWVGVCPGRNESAEHSAGEHCPKGYRPLRGLLAQAAWAAVRTKGSYFQELFRRWVPRMGVKKAIWAIAHRLVCIIWCILHRGDTYVERGALALDEAGRQRKKKRLLQGLRQLGYEVTLNLIPEGVGG

SEQ ID NO: 167407 - protein, 411 aa, unidentified
MSAGVITAVGIDVSKYKSTVAARRPGGEVALLPFDVSHDVAGIKKLLEKLHSLEDEDGEIRVVMEHTGMYWRPVALALQQAGFFVSVVNTILIHNFSDNSLRKIKTDKADALKIANYGLTFWMDLREYSTEDETRQMLKIQSRLYERTTTTGTMLRNGLISLLDQTFPGANKLFLNEGRNTKGHVKWVDFVIRFWHKECVAALSLHTFADTFQKWCQRTGYRFSTSDAERIHTAARNAVATLPKNDSTKLLITQAAISLNTVYDSLHALRTEMNRLASLLPEYELVMAMEGVGKITGPQLMAEIGDVRRFSHKGALVAYAGVDAPPYQSGTFDAKNRHVSKRGSPHLRKVLFEIASMILVHGNPDNSVFCFMDKKRAEGKHFYVYTVAGAAKFLRIYYARVKEYLNTQEIA

SEQ ID NO: 167408 - protein, 340 aa, unidentified
MKRLSSLTGLNLNSIEAIGLDVAKEKIDICLFSSQQSLFYRIANNSQAIYQFSTDLTKNGLLKTVPFVLESTWIYHLQCALQLADDWWDVKEINPIITHQQIGYTIRWTKTDTTDSLLLAELWVTKWKKLHSFKRNRKIIELRKKISLLAWVEKTMQAIKAQYDSYIKSARILWINTNDVDFIRKSLDDLNKCKKELEKSIISESVDEGWTRRIEIIDSITWISPLIAKICYTTFASNDFESKKQMLAYVWLDPKLRQSWTKSWSYKMSKRWNAFTRKKLFQAAFCWIQHSKQYKYIYNREIEKWKHHFEAVLTVAKKMIYTIRSLIKKNEVFDPNYCAM

SEQ ID NO: 167409 - protein, 348 aa, unidentified
MAVSIVETRAITGGVDTHADVHVAAALDPIGGLLGVGEFATTPAGYARLLEWLGGFGTVCLVGIEGTGSYGAGLARHVTRAGVRVVEVDRSDRQDRRRQGKSDPLDAVSAARAAQSGRARGAPKGRDGTVEAIRALMVAKRSARSERVQTINQARSLVVTGPDDLRARFARHTAAALVAQTALLRPRPGDVVGYATRIALRELGRRAEFLDEQLGRLDQLIVPLVTAHAPGLLALYGIGPDTAALLLIAAGDHPERLRSEPAWAHLCATAPIPASSGKVTRHRLNPGGDRSANHALWRIVITRMSSHPPTRAYVERRSTQGLSKKEIIRCLKRYVAREIYPHLRAAAG

SEQ ID NO: 167410 - protein, 377 aa, unidentified
MKRVKFVGLDVHAETIAIAIAEQDGEVRSLGAIPNREDSVRKLVRKLGTMEELRFCYEAGPTGYVLYWQLTRMGAKCEVVAPTLVPVKAGDRVKTDRRDALKLARNYRAGELTAVWVPDAAHEALRDVVRAREAAKKDQLRARHRLSKFLLRHGRRPPMGVKVWTIKYLEWVKREVHFEQLAQEATLLDYLHEVEHAAARIARLDGAIEEAVKVAPPKMRAVIEALQALRGVAHVSAVTVVAELGELSRFARAKQLMGYGGIVASEDSSGERTRRGNITKTGNAHLRRVVVEAAWAYRHRPDVGATLRKRQEQVSEEVKEIAWKAQQRLHQRYRKLLAKGKNKGVVVTAIGRELLGFIWAIGIKVETAQKEPLQRAA

SEQ ID NO: 167411 - protein, 448 aa, unidentified
MKKAKSKLEIMNPDAAGIGVGSAVHYVCVPEGSDEQRIQKFSCFTEDLHNISKWLKKCKVTTVAMESTGVYWIPLFQVLESYGLEVKLANARHVKNVPGRKSDVQDCQWLQQLHSCGLIQGSFRPDDQMCVLRGYVRQRKNLIENAAKHINRMQKVLVQMNIHLHKVISDITGVTGMQIIKAIVEGERNPEKLAEFRSVNMKNDKATIAKALTGDYREEHLFVLKQEYEAYNFFQEKIIECDKSIENYYKALETKSDESKELGKEKNKSRRGRANFTLREELYRVTGIDFTKIPGFDVLTVQTIIAEVGINHNKWRSERHFTSWLGLSPANKITGEKVFGTKTRKVINRATNALRMAAYAVGNSKSALGAYCRRLKKRLGAIKAITATARKLACIFYQMLKYGQEYVEKGMSYYETRYKERVVKNLIKKAQEFGYILVQQEELVKGVS

SEQ ID NO: 167412 - protein, 334 aa, unidentified
MKKRYFMGIDVAKATLDFCLLSKNATLLWRGQLRNEAQAIAQFLAQLQARGYKLAQIHFCCESTGVYGQRLAASLHQAALALSVLNPAQVKFFAISVLRRTKNDKVDAEIIARFCRERKPLATRPLRPIESQLKLLVHERESRVNEQTRERNRAKKDPYQIALPKLIRQQRQSRLKQLAKEVAQFDAAIDSLIASDEGLKEKSRLLCSIPGIAKVTAAKLLCELAGKEFHSARQLAAYAGLTPQECRSGYSSYGKTVLCKIGNAFLRKALYLPAAVARRWCKPLRPWIALLESRKLHDLAIRGAIMRKLLHIAFGVLAHQQPFNPLLVFIPKTP

SEQ ID NO: 167413 - protein, 318 aa, unidentified
MNVIGLDVSKDTIDATLITTKGSKDYIKISNSTEGFENLINWIKTKRIRKIAISMEATGIYYEQAAEYLSALYTVYVINPLKIKEYAKSQFSNTKTDKADSKLIAEFASRHLDKLTSFRPSENPILYKLINLLQQLKEQQKETQNRLHTAKDIYIKSTHEAIIELLEEKIDQTSKRIDGMIKQKESLNIEYQNLQTIPAIGKETAVILLRHLTDKNFETANKFVAFAGLSPKIEQSGTSVNKKGRLSRYGHRQLKRALFMPALVAYRMNAFPQLVRNLEAAKKPKMIIIVALMRKLAKIAFYIHKTKKPFDKARHQTV

SEQ ID NO: 167414 - protein, 398 aa, unidentified
MSRIWAGIDSGKGHHHGLALDTDGKTLLSRRVANDEPELLKLIGDVLDLADGRPVTWAIDMTGGEPALLLTLLVNHGQEVLYIPGRLVNRAADGYRGEGKTDARDAYVIADQARMRRDLRPIRPVDEAATELKLLTGRRADLVEDRTRVVNRLRGTLLSMFPALERALEVTNTGPLRLLTGYQTPAAIRRAGVTRLTTWLANRKVRGARALAEAAAEAAERQHTAVPGEKTIAKLVHTLAEEVMALNEQIAEMDKLIEGRFREHELADIVLSVPGIGTVLGAEFLAAVGGSLEEFDSPDALAAFAGVAPAPRDSGKVSGNLHRPITYHRRLQRVFYTSALVSVRYDPNSRKFYDRKRAEGKKHVQAVLALARRRVNVIWALIRDRRCYEVTPPVTAAA

SEQ ID NO: 167415 - protein, 350 aa, unidentified
MYFAGLDAHLKYVTVAVLDRLGTLVLETTVPTREPERLLAVLAPFRPLEVVVETCPFWPWLYDLLVPAGIGFHLAHAKRLRAIATAPQKNDRVDARLLARMLLSGLIPEAYPRPGDQRELLRLLRHRTTLVRFRTRLAGRIHSQLHQQRLLLPREQLLRQATRTWLRETAWPRLTTEQQAIVTTHLELIDHLTPLIQALERRIDTAAGANPTAALLATIPGIASYRSLLLAAELSPLSRFPRVEHLASNAGLAPVTRSSGGHTRHGSIPQGANRWVRGALVSAIPSHVRWAPTSPVTRAYAQLTARLGWRVARVAAARKLLRIVYIMLRRGEPWRGAGRVEVDVRDEVHA

SEQ ID NO: 167416 - protein, 335 aa, unidentified
MKKEIFVGIDVSKDWLDVCSTHNGSVLEEVQIENSKKAILVYFRRLIKTHKLETGQILCCMEHTGIYNAHALESLNRLGICVWVERALQIKQSLGAVRGKSDKVDALRISDYARRHQDKCIVWKPQRKVILTLKMLLGLRTRLLKTIHQWTVPLGEGKKFMDKNEYRLLEKLSRQCLATAKKSLEKLEKQIAQVINQDPGVRHLYRLVQSIDGVGPVIALNMIVITNEFQDHKDSRRFACYAGVVPFEHSSGTSIRRRSRVSHMANKSIKTLLTLGARSAVNKEGELRNYYLRKVEEGKNERSVINAVRNKLIARIFAVVKRDEPYQKNYCSLVA

SEQ ID NO: 167417 - protein, 353 aa, unidentified
MAHLEPARVTVGVDTHKHVHVAAARDQLGRRLGVTIAPASRAGYGELLAWARGLGEVEAWGVEGTGSYGAGLVRFLAAAGQRVLEVNRPDRATRRRRGKSDPVDADAAARTVQAGEANGIPKAQNGTVEMVRSLRVARQTAVKARTQAINAIKALLVNAPAELREQLDGLPTTRLVRQAATLDPGEVATPTAACMLAVRSLAERYQHLGAEIQLLTRELDRLTLQHAPALRALLGIGPEVAAELLVCAGDNPARLHSEAAFAALCGTSPVEASSGKTRRHRLNRGGDRQANAALHRIVIVRLRWHQPTRDYVARRTAQGKTKKEILRCLKRYVAREVFAVLRQLAQQDQPTAA

SEQ ID NO: 167418 - protein, 352 aa, unidentified
MSDKISRHTLKPSDGKELLDLCERIRTRVAKETKKRVEMVSCYEAGYDGFWLHRLLQAHDIRNHVIDPASLQVDRRARRAKTDRVDAERLLRSLMAYLRGEPKVWSVVRVPSVAEEDDRRLHRERGRLINERIQHVNRIKGLLAIHGIYDYQPLRRDRIQRLEQLHTADGRTLPPRLEAEILRELQRLEIVIGMIKTIEAERDAIASANTETERGSVKKIQHLAKIKSIGPEFATTLVGEVFYRSFDNRKQLASYVGLTPAHFQSGAMSRDQGISKAGNAKARTVMIELAWLWLRHQPDSDLSVWFRDRVGKLKGRIRRITIVAVARKLLIALWRYLETGLVPKGAALKVCD

SEQ ID NO: 167419 - protein, 343 aa, unidentified
MSIVILGVDLGKNVCSVVGVDAAGAVIVRRSMRRQTLIDYVAKLPTCVVAMEACCGAHHLGRLFVAHGHEVRLMSPEYVRPYVKAQKNDDRDAEGIAEAASRPTMRFVHLKSQEQLDIQTLHRVRSRLVAERRSLINQLRAILLERGIIFPVGRRKLELGIEAMLAEEDATLSSRMRRLVGELRAEWREQDARIEALNGEFVELARSDAAARRLTSIPGIGVLNATALIAAVGDASSFAKARDLGAWLGLVPRQHTTGGKPRLLGISKRGNTYLRTLLIHGARAALPSLSKSDTPLGRWFKAMIERGVHRNAVVVALANKLARIAWAALRKGATFERSYPVAI

SEQ ID NO: 167420 - protein, 392 aa, unidentified
MYIVGIDIGKNHHEASIVSPKGKQIGRSLRFATTHKGADSLMSFIFKNIGNSPCVFGMEATGHYWYPIYSFLKAKGYTIYVINPIQSDSLRKMYIRQTKNDSIDSFLIAEVIRFGQFGTTSMADENILAMRQLCRYRDSVISSRTEIKLRIGTIMEQIFPEYEKQFSSLWVSTSMGILEKYLTPENIENAPIDELFEIIKDKSHNRLTRAKAISIKEAAADTFGIKIAQDAFSFQLKQLIDRMNFLDKQIEALDIEIMKYYEQFDCYLHTIPGIGMIAAATILAEIGDINRFKSSSALVAFAGIDPTVRQSGEFSSTHNHMSKRGSPYLRHAIFLAATTCSFHNSPLNAYYKKKRDQGKHHLTATGAVARKLTSVIYAVLRDSKPYEPKSFC

SEQ ID NO: 167421 - protein, 327 aa, unidentified
MDQRILGIDVSKDTLDVVLWDERGWRYQVFANTPEGFVRLSHWLTKQEAGFVHACLEATGQYGEGVAEYLYAAGHAVSVVNPFRIKRYGESKLHRNKTDKADASLIAEFCLKENPPLWQPLPEHVKQLRQMVRRLDDLQRNYQQESNRLQSGVNNEWVVADLKDHLQELHMRIQALKAAIQQFVTETPELKHQVDLLVSIPGIGKLTAARLLAEIGDIHSFEDAPQLAAYAGLNPKGARSGSSVKKKTRISKEGRAFLRYILYMPALVARRCNPIIQAFCARLAQKKLPEMAIIAAVMRKLLHLVFGVLKNQQAFDPFFLQRKVFAS

SEQ ID NO: 167422 - protein, 345 aa, unidentified
MEYYAGIDVSLESASLCVVDATGQIVCEAKLASEPEVLIGWFRDLGLAVTRIGLEAGPLSQWLYAGMRDAGLAVELLETRHVRNAFKAMPVKTDRKDARGIAQLMRLGWFRPVHCKSLPAQEVRALLTARKLLQTKNHDVEMSLRGVLRGFGLKVGPTTPRTFAGRIRELVAGHTTLSTVAEALLAARGTLFEQCQKLEKRLRSLAREDGRARLLMTAPGVGTIVALTYAAAIDDPSRFRSSKAVGAHFGLTPKKYQSGKTDVTGRISKIGDGGVRTALYEAANVILTRPVKGSTLRSWAMRVATRAGMRKAKVAVARKLAVVLHRMLADGASFLADKAAVAAAR

SEQ ID NO: 167423 - protein, 320 aa, unidentified
MSPNTTNTMTETNSVVHAGLDIAKAQLQLHLENQQHVLPNTVTGHQRLIRLLRVVAGVHVVCEATGGYERKVVSALHSANLPVSVVNPAQVRHFALAQGQRAKNDPIDAALLTAYGHALRPNATPVPQAVLAELRELVQWRDHLKEQLVRARQPAEHATLAFVRRQQSKEAKHLEKQMAAVEKELAAALARHPRWREQVQRLAELDGVGTLTAVSVLSQMPELGHLNRGQAAALAGLAPWTRQSGPWEGQRHIGGGRAVVRRALYMSAVALARQTGSTLGKFYARLRAAGKPAKVALTAVMRKLLLQMNQVLKYHVPDPA

SEQ ID NO: 167424 - protein, 388 aa, unidentified
MRFAGIDIASQKHVIAIVDELSHVLTKPTPFHEDASGYERLCRLLGSTDDVLIAMEATGHYWQNVFGHLVDCGYTACVINPLRTRRFAQEDLKRAKTDSIDALGIARFAAQKRPAATPPTDLQTLALRETVQLRERLVQDFGDRLRQLHRLVDLGFPEFTRMVRTLDSSLATVLLARYPCAQDFASEQPAKLALLVYDGRHHVGLELAQALVEAADASVGRHHHPAFCSHVRILCEDLDLLRRRISELTKDVAAQVQHHPVASLLTTIDGIGDLTAGQLVATLGDPSRFRSPAALASYVGTVPATSHSGLHTPSRAPISPIGNARLRRALWMPTLTAVEKNPWLRAYYLRLRGRGKLPKVALVAAMRKLLVAVYTVAKRRSGFVRQHP

SEQ ID NO: 167425 - protein, 378 aa, unidentified
MAKANHMTDARVLVGIDISKNRHDVLIAVPGRTRRKRLTVLNTAEDYERLIGTLRSFGLPVTIGFEATGNYHRALMFALGAAGFELKLVSSLALARTREALHNSWDKNDPKDAQVILHMVEIGAVQIFHDPLVAGTCDIQELSKTYEMVARAKTELWHRILTHYLPLYFPEADRFHRSSRGDWFLAFLEAFPSPHMITTMEKDEFIAEAWPVVGRRVGKAALLADIYETSRTSVGLPVAPDSDAIRMFRLVLAQGRSLIQQRNVIEARAVELLEDNPDYRLLRTIPGIGPINALAVLAEAGDLRRFRHHRQFLKFCGMDLATVQSGLFRGWSKISKYGNARLRRTLWLASQAAVLKPANSFRDKFERYISQDRLPGSA

SEQ ID NO: 167426 - protein, 413 aa, unidentified
MTEETFAWFVGVDWGSEKHQVCILDQQGTIVGERHFPHGGSGLAELGDWLLSVAGTVAAVAVGIEVPHGPVVDSLIDRGFVVHAINPKQLDRLRDRFSVAGAKDDRRDGYVLADSVRTDRRLFRRLHVADPRLVELRAWSRLAEELTEERVRLGNRVHHELWRYYPQMTKLTDDIAASWFLELWTIAPTPAKARLLRKSTVAQLLKQHRIRRIDAETVIRTLREPAIKVADGVAEAASVHMRSLIARLHVVNRELREAERQLDKICAEIGATEAASGDGLQRQDVMILRSMPGIGRVNLAALLAEGSGPLSRRDYPALRTLCGAAPVTRRSGKSQVVIMRYAAHVRLRNTVYHWARVASQHDPTSKSRYAALRQRGHSHGRALRGVADRLLGLACVLLQRQTPFDPQFGHPAT

SEQ ID NO: 167427 - protein, 338 aa, unidentified
MKLYGGIDLHSNNSVLVLIDEGDRVIYEKRLRNDLALILRELVPYRKKLTGLVVESTYNWYCLVDGLMEADYRVHLANTAAIKQYEGLKHTDDRHDARWLAHLLRLNILPEGYIYPKQARAVRDLLRRRHRLVQQRVANLLSIQNQFARMGMNGFSAARLKRLQDCELDRLIADGNVRSAVTANLALVRCLNLQIERLEREVLAQVKLAAQFEPLMSVTGIGKILALTIMLETGEIGRFAKVGQFASYARCVNAQRFSNEKKKGSNNAKCGNPYLAWAFVEATNFAIRYSPRIKRFFDRKRARTNKIVAFKACAHKLARAAFHVMRDRAVFDETRAFA

SEQ ID NO: 167428 - protein, 430 aa, unidentified
MKSNTQNAKIEAITEKTLVLGIDVGSEMHYARAFDYRGIEYSKKPFKFSNTEAGFATFKEWILDLKERHEKDKVVPGMEPTGHYWFNLGKFLQDNEMKPVLVNPHHVKKSKELDDNNPTKNDRKDPKVIAGLVREGRYMIPYLPDGVYADLRTASNIRFQLQAELTRIQNRISRWFNIYFPEYKTVYGKPDAKSGMLILKAAPLPEDILTLGIDGVNQIWRDAKLRAVGKARAKTLIEAAEHSVGSKEGEVSARMEIRMLLEDYESRNTRLQEVMVLIEELVKQILMAEKLLGIKGVGIRTVSGFLAEVGDISRFNNPKELQKLAGLALVENSSGKHKGETTISRRGRKRLRYLLFEVAMSLVAKNPEFRELHNYYTTRKLNPLKKMQSLMAVAAKLIRVFYAMLTKGVAYDPQKLVSDIRRPAAYLQVA

SEQ ID NO: 167429 - protein, 424 aa, unidentified
MKVTYQTCCGVDVHKSFLVATIVKTTGGIEPSYQKKRFSTFNNSILEFKQWLLDNHCHDVCMESTGKYWVPVFNLLEDKINVVIANPKWVKAVKGNKDDTKDSKWIGDLFRLGLVKGSYIPCKKVRILREYTRYRYKLVSCRSSEKNRYQNALTVCNVALDSIVSDIFGKSSTSIIDYLLEQSGTSINHEEIASKLLRSLKSKEDAVIESVEGYQMTDAQKYRMRLVRAHMDYITAEINDVDKMIENMISSNPDFENAVQFLCTIPGVKRDSAITIISETGTDMSQFSSSKRLCCWAGLTPGSNESAGKKKSVRITRAGVYLKPALVQCAHAAVKSDKSPYYKKKYESLVKRRGKKRAIIAIDRMILTAIYQMLSTGEQWNPSDLYKIDMPVALVEKQKAKAIKQAKKLLQREGLLPPDEPLAS

SEQ ID NO: 167430 - protein, 383 aa, unidentified
MRTHGTDWDNATDVLAVSLELSAGKWKVALHDGRRESPAIHTVAQPQAAARLQAVLTLIATQRQAWSLPDDVRVVVSYEAGQDAFWICRALQARGIECHVVDPASIPVERHRRRAKTDRLDVTKLVINLRAWLRGERDRMHVVHVPSPQDEASRHLMRERGELQKEVLQHRDRMRKLLATLGCWEDVNSRKFATRLARREVCCHDGAPLPEELHQRLLRECERLALAEQQLAALEKAYHAQLPEPARERIDRLTHLSGIGPVSGSRLALELFWREFANRRQVGACTGLVPQPYDSGESQVDQGISKQGNRRVRALLIETAWTWIRYQPDSALTRWFYQRTQGTGPNRRARRIAIVAVARRLVIALWRYLKDGVIPEGAQLKTR

SEQ ID NO: 167431 - protein, 461 aa, unidentified
MTKQPGKRKKDGAKADATEGLPPLNLHAAGIDVGSAEHYVAVPLDRDAEPVRKFGSFTADLHRMARWLKDCHIKTVVMQSTGVYWMALHDVLESHGFEVNVANARHTKTLPGRKTDVQECQWLQKLHTFGLLNNSFRPPEEIRTLRGYLRQRENLVAAAATCIQHMQKALTEMNIQLANVISDISGTTGLAILSDIVRGERDPYKLAMHKHSRIRASRQEIARSLEGTWRQELLFVLEQSLDLYQTYQQKIQTCDERIDGQLRSMEPKIDPLSEPIPEPRRGKDARGHQSGFDLRGQLYRITGVDLTRIDGIEVQNAQTIVSEVGVDMSRWKTEKHFASWLGLCPDNRISGGKVLKRGTRHVVNRASTALRLAASALLRSQSALGAKFRRLRSKLGAPKAITAMAHMLARLVYRMLKFGHNYVDRGVEFYEAKYQHQQLQRIRKQAAALHMQLVPLTRVVS

SEQ ID NO: 167432 - protein, 373 aa, unidentified
MKKHSKRPQSPRGGAKKKQPRSQASMTIGMDLGDKTSRYCMLDQHGEVVKEGSVATTRKGMVGAFGSMLPSRIALEVGTHSPWVSRLLSGLGHEVIVANPRQLQLITQSSRKDDKVDAKTLARLARIDPELLRPIRHRGEKAQMDLMQIRVRAALVETRTSLVNTMRGLAKSVGERVPTCDPDSLDQARLEGLPKPLQQVLGPLAKQVELLTEQIQECDRKLEQIARSEYSETALLEQVYGVGTLIALTFILTVEDGQRFQKSRDVGCYVGLRPKRGQSGNSDPQLRITKEGDSYLRKMLVQGAHRILAARSPDTDLKRWGLKLGARGGRNAKKRAIVAVARKLAILLHRLWVTGEVYEPLRSSPAGVQGQAA

SEQ ID NO: 167433 - protein, 370 aa, unidentified
MKKNSIVAVELKKPRHRKRAKGRASQRSRSTPAPQQTIGVDLGDKSSCYCVLDAAGEVQSERTVATTKKGMTQTFGRIGPSRIALEVGTHSPWVSRLLRDLGHEVIVANARRVRAITASSRKDDRMDAQMLARLARVDPGLLCPIRHRGEKAQQHLALIKARAALVEGRTALVNTARGLTKSSGERLASCDTDRMGVHQLEGLPAEMQAVLRPVLEVVEAMTEQIQGYDSQLAEIARSEYPETALLEQISGVGPLIALTFVLTLEDPQRFQRSREVGCYLGLRPTRRDSGESQPQLRITKEGDVYLRMLLVQGAHCILGRRGPDTDLKRWGLKLAERRGVRTAAAQPGASRAEDSELRQPGWILRIAEFG

SEQ ID NO: 167434 - protein, 383 aa, unidentified
MKSVCGLDVHKDSVYLCILSEFGELIEKVFGVLTYQLEEMRDLMLHHHVVEVSMESTSVYWIPIWRVLSPHFKLNLANPYFIKQLPGRKSDVKDAQWIAECTMKELIRGSFVPPETIQQLRQYDRRIFDLNEEIVRKLSKLDAVLQRCNIRLSNYVSNVGSKSYKAVVRAISQGITAPEELVKLIHGRIINHHGIDVITASLKGVVSLAEIDMISQLRDELDMAEAHKEKCQAKMLEICEREFPEELKRLQTIPGIKERAATSLIAEIGTDMNKFETANHLASWSGLKPRNDESNKKIKSRSITHGNVYLRKTIIECAWAASRTKGCFFSRFSYHQTQVRKKNKMKVLVAVARKMLIAVWYVLHDNTIYIDFTTDRKTSRTKG

SEQ ID NO: 167435 - protein, 360 aa, unidentified
MNKYFGCDAHKRYSVFVSMNERGQSGVPVRVENNRVLFREFLRELPSRSPIAIESVGNWYWMIEEMEKAGHNPLLVHAAKAKLMMGQINKTDKLDARGLALLLRNGTLPSVWIPPGELRDQRELPRMRMSLVRIRTMLKNRIHTALAKYALDIPEVSDIFGATGRMLLKNRLEDMPPYTRQSVEKQLELLDQVETHIGQCEKQIQVVVKACPAMKLLMTLPGVGMILAVVMALEIGDITRFPGPEHLASYAGTVPRIKSSGGKSFYGKVRPDVNRYLKWALVEAANVAAMNQWRWSDRHVVQLYQRIMKRKGHAKAVVAVAQHLAEAAYWVLRKNESYKEPGQKTPISSTRMSTRSMHET

SEQ ID NO: 167436 - protein, 476 aa, unidentified
MAVDKMNRKQRKELTRQLQSPNPGLEVVHSRAAGIDVGNGAHYVAVRPDRDPEPVRRFECFTGDLYRLADWLQACEVATIAIQSTGVYWIPLYEILEERGFEVYLVNARHTKNLPGRKSDVQESQWLLKLHTYGLLHNSFQPTVEIRVARTYWRQRAEHVRGASTCVQRMQKVLTQMNVQLANVISDLSGLTGQTIVRAILAGELDPKNLAELSHPLIRASREEIAKSLEGNWRPELLFVLKQEMEMYDTYQRRIAECDKELEKHLKSFADNVPSKPIKEEPPSEPRRTSEKTKRPQRGNKAPGNRPQFDLHGELYRISGVDLTRIDGINVLVAQTMISEVGLDMSRWNTEAHFASWLGLCPDNRISGDKVLTKGTRHVVNRAATALRIAATTLLRSRTYLGAQYRRLRTKLGAPKAITAMAHKLARLVYRMLKYGQEYVDKGMQYYEERNRLQQLEHLKKKAAKLGLQIVEAQPA

SEQ ID NO: 167437 - protein, 363 aa, unidentified
MKQLIKKQPRTANRKPERVAGLDLGDCYSHYCVLTGDGELVEEGRLQSTEASLRKQFANEPRMRIALEAGTHSPWVSRLLESFGHEVLVANPRKIRAITSSESKNDRNDAEKLARFAACDPKLLSPIRHRSPERQQDLNLIHARSSLVRARTGLVNALRGLVKSAGGRLAACSPKSFPDKMRTAIPAELQPAASPLVEQIAQLNLAIAGMDRQVEALGDKHPEIKLLRTVPGVGPIVAACYVLTLDRPDIIQDNRQAGAFLGLRPRQSQSGDKNPQHGISKTGNTCLRSLLVQAAHYILGRFGPDSALRRWGLGLAASGGKRGKKRAVVAVARKLAVLLHSMWRNRQPFIPFPQPSTQATVAA

SEQ ID NO: 167438 - protein, 410 aa, unidentified
MAERFVGVDVALREHRIAVLDRDGEAVGPSFTIAASRDGVATLLRTLDARDATAAQTLIGLEASGHLWENLEAALVGAGYRVLVLNPLQTRRYRDVVRRKAKTDDIDAHVIAGLLRSGAAQASYVPDEQIQSLRELARLRARLMADRQDYQRQLIAQLDVVLPEHHAVLGDLLTARARGILAQFPTAQHLAHANPRAIRRAAEDAGARGFSLNDATVVRDSARRSLYSGKAAAARAHVVRTLVSQLERLTSAIDEVDRAATALLPPSEPGTGPSDAELLQTIPGIGPQTAATLLGELGAFTRFTDARALVAYVGFYPVINESGDRAAPPHLSPVGSRIARHSLYLAAVNAVRRSGEWRTIYLRKKAQGKTAKQALVVVAVKLLHAVYAMLKHRQPYNPSRLLVASATIGS

SEQ ID NO: 167439 - protein, 370 aa, unidentified
MKKNSTCSQSWKGRGSWRQGSVTIGMDLGDKNSRYCVLNEKGEIVKEGRLATSKKGLAQEFGALRRCRIALEVGTHSPWVSRYLSQLGHEAIVANARQVQRISQSSRKDDRLDAEMLARLARVDAQLLRPIRHRSESAQMHLMRIRVRAAMVETRTSLINTARGLSKSAGERLPQCDAAHMGVERIALLPAELQRVLGPLLEEVEALSQRISACEAELKQIAQTEYPETRLLEQVSGVGTLIALTFVLTLEDPARFAKSRDVGCYVGLRPKRSESGESQRQLRITKEGDVYLRKLLVQGAHYILSERGPDTNLKRWGQKLASSGGKTGKKRAVVAVARKLAILLHRLWVSGEVYEPLHKAPDRRPWRAAG

SEQ ID NO: 167440 - protein, 348 aa, unidentified
MVLLGIDPHKDTHTVVAVDPTGRQLDQTTVAARSHGHAELLGWARQRWPEARLWAVEDCRHVTGRLEGDLLAAGERVVRVPPRLMAGARQAVRTQGKSDPIDALAVARAALREPDLPAAGHDQASWEVKLLVDHREHLIAERTRTINRLRWHLHQLDPDLEHAARRLPGSDLDRIVAWLDGAPASVQVGIGTELAATIQTLTTRIDQLTGDLRTRVDRLAPNLLDLPGCGVLTAAKLIAETAGVARFRSEACFAMHAGVAPVPVSSGRTDRHRLCRGGNRQLNSAVHRIAITQLRIAGPGQTYYRRRRAQGDGTGEAVRALKRRIARAVYQQLKLAEQRQRSPSPVAA

SEQ ID NO: 167441 - protein, 350 aa, unidentified
MTQHKIIGIDLAKNIFFLFEINHKGKNLCRKKLQRSKLLNYVVSQSPCIIAMEACSGAHYWAREFVKFGHEVLLYPPQHVKSQRRKQKNDYNDAEAIAELALYQRHPAVPHESIEQQDIQSLIRMRRLCVTERTRLINQVRGFIAEYGIVLPKGKTSFRKAIPEVLEDVENQLSPILRELLSRQYERYLYIDGQISWFEDKLNQTVKQFDNAKRLMSIPGFGPLTSQAIAVWLGSGKQFKTGRDASAAMGLVPRQDTTGGNVVLLGITKQGNTYIRSLLVHGARAALRRAKFKSDKLSKWMLDLQERRGPNRAAVALANKLMRIAWAVIAKNEEYQPAQTSCTTNPLQST

SEQ ID NO: 167442 - protein, 310 aa, unidentified
MNKTLVGIDIAKAHFDLYDSLTHKHLRFDNNTSGIKKCTRYLVPLKPTLIVLESTGGYELDLVLSLQETKLPVAVENPRRVRDFGRASGRLAKTDRIDAVLLSEYAAALNPLPQPVKSPQSRKMKALVARRHQLLQMRTAELNRRDHAKDKDIDQSIKTIIAVFEKEIDRIEQQLRTLIEVTPDYRKKLQILTSVPGIAETTATMLLVELPELGQLNRRQIAALVGVAPINRDSGTFRGKRMTGGGRRLVRTRLYMPTVVACHHNPQISAFYKRLVEKGKTKMTALVAAMRKMITIINTMIAKNQSWCLQ

SEQ ID NO: 167443 - protein, 391 aa, unidentified
MIYVGIDVAKDKHDCFITNSDGEVLFKAFTITNNLDGFNDLYQKIETVMKDITKVKVGLEATGHYSYNLLGYLIDKGLPTYVINPLHTNLYRKSLSLRQTKTDKVDARTIASILMSDVNLKSYSDISYHNEELKSLTRYRFDKVKERAKLKSSVSRLICILFPELEKLVPTLHMASVYALLSEFPGAKQVANAHLTRLTNLLSEASKGRYSKDTAITFRDAARTSIGSNMPAKSLELKLTIKLIKELDSEIDEIENEIKIIMDEINSPILSIPGINYRMGAMIIAEIGDFSRFDSPDKILAYAGFSPSTYQSGHLYGAYAHMEKRGSRYLRYALYNAAKYVCHWDPTFTAYLAKKRAEGKHYNVAISHAVKKLIRVIYHLEKTNQQYIKAS

SEQ ID NO: 167444 - protein, 426 aa, unidentified
MKIVYPICAGLDVHKKEIVATVAKTNDQGITQYKEHRFPTFTSDLNRLADWLHKHDCRHVCMESTGKYFIPVYRVLETRGLQPRVAHPKFVRAIPGKKTDSKDSKWIADLFKHGLVPFSFIPPLEIFELRDLTRYRTKLIQARTGEKNRIQNSLTVSNIMLSSVVSDTFGKASSAILKYVLDNPEQKDIDYEKFRNYRMKATANDIAKAMDGVFSPEQANKTKIAFKHLEYINDCLEQLDLAISLLAKRYEQQIKLLTTIPGVTTHSATRIIAEISADMNVFPNSYHLCSWAGLCPGNNESGGKKKSTRISKAGTWLKPLLIQVALGATSNKDCQYFAYKYKVLSKRRGKKKAIIAIARMILTSIYHILKKNVAFDQNLYQEYYHKQTRKCNNISIPKMISFLATQGLSVMTSDGEILGHALAQTG

SEQ ID NO: 167445 - protein, 350 aa, unidentified
MLHAGLDLSRKRLDVCLITEDGEIAGRVAAPPDADGLRGLVRRIAPCGEPVRAVIESMTGARFVHDTLEALGWEVLIADAQKVKGLAPLACKTDMIDAQVLAVLSHRDLVPAIWLPDPRVRREREPARFRLHLVKHKSSLKSRIHSTMITFGHPCPVTDLFGVAGRELLDRLEVPQPWRGTIDASLELIDDLERQIAQLNTELRAGGADHPYVPLLLTVPGIGWVLAFTIAAEIGDITRFPSPKKLCGYTGLCPRVHQSGERDRRGPLTKQGPKYLRWALLEATMHALRHPAYNERYQRNKRRLGRQRGAKVAQIDVARKLTEAIWHMLTNNESFAPTTAPRGAAFRLAA

SEQ ID NO: 167446 - protein, 385 aa, unidentified
MHASASAPATIHVEFGAIFVSLELSRSTWLITSLSPGGGEKMSKHSVRGGDVAGLLDQFAKLRTKAGARTGKTFPIIVIQEAGLDGFWIHRVLEQEGIESHVVDAASILTSRRRRRAKTDRIDGEALLRTLLAYKRGEPRVCAMVQVPTSEEEDRRRLCRERKTLVAERVEHVNRIKGLLFAQGISDYEPLHRNRRQRLEDLTTGDGRSLPVHTKAQIDRELDRLELLLGQIKAVETERDALLAPIGDAAPTPATALAGLRGIGPEFGAVLWLECFFRSFSNRRQVAAYAGLAPTPWQSGSVQHEQGVSKAGNPKLRTTMIQLAWLWLQHQPTSALSLWFKERVQRDGGRGKKTTIVALARKLLVALWKFVSHGVIIEGAVMKAA

SEQ ID NO: 167447 - protein, 348 aa, unidentified
MQVTTLGIDLAKNVFRVHGCDANWKAVVRKQLSRRQLLSFVANLPPCLVAMEACAGAHYWAREIEKLGHQVRLIAPRFVRPYVKANKNDASDAEAICEAASRPSMRFVAIKSTAQQEVQAVHRVRQQLVKARTSLANQVRGLLAEHGIVIGRGFAQLRRALPVIIEDRDNRLSAVMRELLGEIGERLRFIDDRLRKYDLTVQRLFRQDERCQRVAAVEGVGPVTATALVAAVGNATDFRSGRELAAYLGLVPSHRASGGRTVLLGISKRGDGYLRTLLIHGARSALHRIERHRGARASWAARLKFRRGANVAAVALANKNARVLWALLSRGQSYRPAPLFARVPQAGG

SEQ ID NO: 167448 - protein, 351 aa, unidentified
MQYIAFDSHKHYTLASVESVQAPGVIREQRIPHTRGMIRQFLAQCDVGSPVAIETIGNWYWIVEEIEQAGMRPQLTHARKAKLMLGSINKTDRLDVRGLNRLQRNGTLPVVWIPPAAVRDARDLPRTRMVLVRQQTQLKNRIQATLAKYGLAVEGVSDVFGKRGLALVSQHLPALPDHTRFATERLLAQLHALRQEVRAFEQRIQQVIPHTPEITLVRSLPGVGQILATVLALEIGEVARFPSAAQLASYAGCTPRIHASGGKTRFGSLRSDVNRYLKWAFIEAANVCARLSRRYPDRHVSRLYARLVRTKGHPKASGAVARHLAEATYWILTKQTAYHDPQSPTVSSTTA

SEQ ID NO: 167449 - protein, 346 aa, unidentified
MVTGKDIILVVDYHAKNLEVRTFNRATGEERTANVPTTRGNILRLVEEAVAEAADAGGRVRWIMESTTGWARVKELIGDRVQFTLANVLQMPLPPKAYRRKSDKIDTGRMLREELNGSLPRSFQPDRWWRQARRLVDCREDLVRRQTAVKNWISSLLHHETWQDRSGLWSAKGLARLGALKLPASDRFVLEIKLERLEHLGEWIGRVEAKMKQLYDRWPDARAADAIRGIGMVTAVSVLAHIGPIGRFGSAEELISYAGLAPGHRSSDRSSRNGRIGGGGTDGRLRYLLIEAATWLQQIPRYRATHQRVAARRGKDIARIVVARMCLRSLYKMLREKVKFNQAPAA

SEQ ID NO: 167450 - protein, 412 aa, unidentified
MTQSSEYLVRVGIDWASESHQICILDQDGRRTEHTVPHTSAGLAALATELVALSPEDPGRVAVAIEVPRGAVVDTLLERGLHVFALNPKQLDRFRDRHTVAGAKDDRRDAFVLADSLRTDRPAFRRVHLDDPVIVELRELSRLDDDLREELSRLSNRLREQLHRFCPDTLALCPAADEPWFWALLDRALTPPRPKPLSIKAVTAVLKVHRIRRLTVDTVHAALQVPPLRVAPGTLEAACAHIALLLPRLRLVHDQRTRTVGARIETLLAALAKEDVTGEHRDVTILRSLPGVGRLVAATVLAEASRPLAERDYQTLRAHAGAAPVTRQSGKKAIVSMRLACNARLRNAVYHWARVSAQVDPRCRAHYDRLRQAGHEHARALRGVADRSLDVLMAMLTSRTLYDPERRCPKAA

SEQ ID NO: 167451 - protein, 513 aa, unidentified
MHHRRQRSGRSARIPKVVNNFAAADSGSGEQLATAETRLFEPCPTRADRRLPTPPPAPGPSAKRTSPLGGSHIRSRPSQVPAPLRAARIMNSNWNEQPYFAALDWAKDHHDVIVVDRVGTIVADFQFAHTAPGWEQFNCQMQPFGKCPLTIETSVGMAVDQLLQRGYPLYPINPLAAKEYRRRKTPSGSKTDRHDAWSLADALRIDGQGWRPLHAQDEATAILRVLCRDEIGLIETRTALVNQLQATLGDYYPLALDSFDDWANPAAWAFVRTFPTPAELAQAGKRKWQNFLHQHKLWRPQTAPQRLELWAQGQQLNASAATVTAKSLLALSLVKVLDTLQRQIQEYRSRITQAFKKHPDHDIFGSLPGAKQTLAPRLLGLIGSRRELFPDPDSLMCQAGVSPVAYQTGKLRKARIRWACDHFLRHTIHLWVDQSRRKCDWAQTYYQAKKDNGHDHASALRCLGKRWLKVLWRMWQDHTPYDEAKHLRALQHHASFVWQALQNTPTIPQPACE

SEQ ID NO: 167452 - protein, 402 aa, unidentified
MNAVGIDVSKSKSVVAIMRPFGEIVSTPFEIKHTASDIHSLIELINSVEGESRIVMEHTGRYYEVLAHQLLEANLFVSAINPKLIKDFDNDSLRKVKSDKADAVKIARYALDKWQNLKQYNVMDELRNQLKTMNRQFGFYMKHKTAMKNNLIGILDQTYPGVNTYFDSPARSDGSQKWVDFASTYWHVDCVRKMSLNAFIDHYQNWCKRKKYNFSQSKAEEIYGKAKELVPVLPKDAITKLIIKQAVDQLNSASTTVESLRTLMNETASKLPEYPVVMAMKGVGTSLGPQLMAEIGDVSRFTHKSAITAFAGVDPGVNESGTHEQKSVPTSKRGSSDLRKTLFQVMDVLIKTHPQDDPVYQFLDKKRAQGKPYYVYMTAGANKFLRIYYGRVKEYLASLPES

SEQ ID NO: 167453 - protein, 343 aa, unidentified
MVHYVGLDVSLKQTSICVVSETGSIVREGVVDSDPEVIAAFVRSKAPGAVRIGLETGPTATWLWTELKRLGLPVICIDARHARAVLKMQINKSDRNDAAGIARIMQTGWFKEVRVKDLDSHSVRALLASRALLVKIKRDLENQVRGLLKNLGLVIGRAKFNVFAARAEELVEDRPELVAAVRPLLEARKAVEQQVCNLDRKVLKLARRDAQVRRFMTTPGVGPITALCFKATIDDPTRFKRSRSVGAYVGLTSRCHASGEVEWSGRISKSGDAMLRSYLFEAAGVLLTRVPKWSALKAWGTRLAKRNGLCKAKVAVARKLAVILHRMWIDETEFNWSKKEVAV

SEQ ID NO: 167454 - protein, 369 aa, unidentified
MPHVTSIGLDVHARSVAAAAFNPFTGEVVHRDFGTDAAEIAEWALGFEEPRACYESGPTGFHMARELRALGLDCAVAAVSKMQRPAAAARRKNDRRDAEFIARMLATHNIVEVPLPDMAVEAARDLDRALDDATRELRRSRQRLNMFLIRLGHVWDERNADGARKKAWTRAHWRWVSEIRLEGPQRDALEYYVTAARCAESDRRQLERRVVALAGTDRWRATVEALSCIKGVDTLTAFRLAAEAGSFSRFRSAPAFASWCGLIPSEHSSGESERRGGITKAGNALARTALIESAWHYSTCSPRPKAPAPGTDVPPVIRSRADDCTARLHRRREALAAAGKSACKANAAVARELACWVWEIGCRSEGTVL

SEQ ID NO: 167455 - protein, 348 aa, unidentified
MKKVYVGMDLGSKQSAVVAVDSRGKMVDSEVFRTGERNMISFFERLKGSAQVMIEEGELASWVARTIRPHVEKVVVSDPRRNAWVAKAGNKNDPLDAAKLAELLRLGSYSEVWHPEDEGIADFKLVVQRYDECSKKLARTKCQIKALFRRQGVITNGKEVYGAKGRQVALSKIGSGPVRQLMEGEYEMLDFLVRAKAKALRILKQESRKYPVIRRLKKIPGVGPVLAARFVAYVGDPNRFNKRTLASYSCLGIVKRSSDGSSLGRERLSKAGNFALKDLSRTAFERAKVTKRSNGITEFYLKSLARTNSRTNARLNTQRKILAIMLAMWRDGTEYCDEMVTGVAFTGN

SEQ ID NO: 167456 - protein, 322 aa, unidentified
MQQSLCVFGADIAKDSFVSAAHNQVGAPRTVANTSQAITQWLATVPGGSIVAMEATGVHHRLLAQMAHAAGMRVFVLNARDLYFYAKSLSGRAKTDRLDARVIARYAAEHHARLHPWQPCTGVERQLHELLRRRARVTKLLVSLRQTLANVPALRTAGRQLEQEFAAFFKSLDAQLQALVASDIELGSGIARLRTISGFGPQGAVALGALLSSMRFASADALVAYSGLDPRPCDSGKHRGTRRLSKRGPAWLRRQMYLVALAACRSKALGPLYRCIKAKGFASTQALVILARKLLRVAWAVWRSGKPFDPTRLAVNAACAKT

SEQ ID NO: 167457 - protein, 370 aa, unidentified
MLDTTTFVGLDVHARSIKAVSLDVMTGEVRCATFGYDAAAVAEWVRSVDPKARCVYESGVTGFDLQKRLSGLGVDCVVGAVSKMIKPSADRRRKNDRNDAEFLARMLSVGNVVEVWVPDDECEAARDLTRALEDARDDLSRSKQRLSKFLLRHGLVFDERTPTGRRKGNWTRAHWSWIESIRFAEGADNDVLAYYVDAVRRAAEEKSRLEGLVEAEARKPRWRRRVDSLRCLKGVDTASAADLVFEAGEFSRFRNARSFAAWVGLTPSEHSSGESDRRGAITKAGNKHLRKTLVEAAWHYLTCSGRPKDLAKGQAPDRGARRHAAKGVRRLVERRGALLARGVHNNKANVATARELACWVWAVGLMAEEA

SEQ ID NO: 167458 - protein, 411 aa, unidentified
MEAIVERAAGLDVHQGSVVACVIIGAPGHRPVRETRRFGTMSRDLAALREWLLGMGVTHVGMESTGVYWQPVHAALEGDFTVIVGNASHMRNVPGRKTDRTDAEWIADLVRHGLVRASFVPPAEIRVLRELIRHRKALAGGLASERNRTLKLLEGANIKLAGVVSDVFGVSGMLMLKALAEGSAEPAEMAGLAKRRLRRKLDKLTLALDGHLAEHQRLLLRMHLRRLDEIDRDIAEVEAAIGAAMHPFAAQQALLCTIPGVNELTAAAIIAEIGVDMEGFGTAQRLAAWAGVCPANHASAGKQKRRGTRKGNTHLKATLVTAAISASRTKGTYLRDKFHRLKARMPAKKAAMTIAHKILVAVFHMLRRGVAFADLGADYLDRVDKHRTARRLVRRLDALGYDVMLRSKAAA

SEQ ID NO: 167459 - protein, 418 aa, unidentified
MKSMEITAVGIDVSKSKSTVAIRRPGGVIVACPFDISHSSHDLEKLVSILKTTGGDIRVVMEHTSNYWKPIALTLKNAGFYVSVVNAMLIHDFSDNSIRKLKTDRADSLKIANYALTFWNQLPPFNDEDETRLVLKEQSRMYERLASTATSLRNGLIALADQTFPSIDQAFGHAIKNADGHEKWVDFFSIYWHRDCVLRLSIEKFTESYRKWCLRRNYKFRTNTAHKLYALAQDAVPTLPKNNGTKALVLQACKSLNAVCEAKQSTQEEMNRLASLLPEYEVVMQMEGTGPITGPALMAEIGDVRRFKNKKALVAFAGIDAPPFQSGNFESKSRHVSKRGSPHLRRTVFLVANIILTLSHKDNSVFCFMDKKRAEGKHYYVYTIAGSAKFLRIYYARVTEYLRVQERPVAASCPNGNS

SEQ ID NO: 167460 - protein, 362 aa, unidentified
MSQQNKKPSTRKARKSSRDEITIGIDIGDRWSHYCVIDEDANVVEEGRFRTVASSVEKHFEGIPHARIAMEAGTHSIWISQQLQTYGHEVVVANVTELHAIVRNISKSDQVDAEKLARYARLDPRILRPITHRSVEAQQALTIVRARDVLVRMRVVAVNAVRGLVKPCGYRLPPCSTPAFTKRSLEVLPKQLLSILGPLLVQIQSMTEQIKIYDRQILELSRSSYPETKVLETVNGVGNLTAITYVLTINDPHRFKKSRDVGCYLGLRPRRDQSGDHDPQLGITKAGNVYLRKLLTEAANYILGPFGKDSALRRWGQGLAARGGKNARKRAVVAIARKLAVLLHHLWVTQKPYQPFYEQAAA

SEQ ID NO: 167461 - protein, 423 aa, unidentified
MMKLKYSICCGLDVHKNVIVATIVITNADGISEYKQKSFSTFNSDIRKFHSWLIENNCYHVCMESTGKYWIPIFNYLENDIEVCLTHPKYVKAIKGKKTDKKDSKWIADLYKFDLVRCSFIPPKDFRQLREIARYRFKLVCMKSSEKNRIQNCMTVSNVGIASVLSDPFGKTATEIMSYLLTHTSDSIDEKAVRRLIKKGAKAKSDEIIEAIRGYNIESDQAKKLELARSHLEYLDSMITQSEVELYVRMKPYYKFVELVSTMPGMTELSSTIVLAETGVDMGIFDDAKHLCSWCGLSPTNNESAGKKKSVRISKAGDYLKPMMVQCALAAIKSKKQTYFAIKYGRVKKRRGHKKAIIAIARMMIVCIYHMVSEEKPFNPIDYEELMSPKNQIERVILNENNVFAYLESLGYDSSKLVKRNDN

SEQ ID NO: 167462 - protein, 411 aa, unidentified
MQTLVERGCGLDVHQATVVACLLMVRRDGKVQKQMRTFGTTTRELVSLREWLLSEGCTHVALESTGVYWKPIYAILEGALEIVVANAQHIKKVPGRKTDVKDAEWIADLLCHGLLRSSFVPPKPIRELRDLMRYRRKLVESQAAERNRLLKVLETANIKLANVATDVFGMSGRLMLRALITGKATPQEMADLAKGLLRKKIPELQLALEGKLEEHHRFLLELQLQRLEAAEKDLAALEQRIRQKLEPYAAQLALLDEIPGVDWTLAAVIIAELGVDMSVFGSVSQLASWAGVCPGNNESAGKRKSSRIPSGNVYLKSGLLEAANAAARAKGTYLRDKFFRLKARRGYKRAVVAIAHKILVAIYHMLSQKVSYNDLGDLYLDKLNKNHLTRNLVHRLERLGYQVTLTQQKAA

SEQ ID NO: 167463 - protein, 446 aa, unidentified
MARRNRRGKRNRSAQPQRVYPNAAGLDVGATEVYAAVRAERDEEPIRSFPTFTRDLHALADWLSAREVDTVAMESTGVYWIPVYQILEARGFEVVLVNARHVHSVPGRKSDVSDCEWLRYLHSVGLLRGSFRPADEVCAVRSLLRHRDGLIKTAARSVQHMQKACDQMNVHLHHAISDLTGYSGLAIIDAILAGEHDPARLAALAHPRIRASRDTLIKALEGDWRSEHLFTLRHARQTYAHYQQLISECDEEIEARIRAFERTLPPPPATSADLQSPQAPKRSPEAPEPSPQSFNLPAHLTRLFGTDLTLIPGIGSATALVLFGELGSDLSRFPSASQFASWLNLCPQTKITGGRVISSQTGPGVNRAAQALRMSTQSLYRSRSALGDFFRRRRASVGTPQAITDTAHKMARIIYHLVELPRFRGHIKSDAGGGGNDAEYTSTVRA

SEQ ID NO: 167464 - protein, 360 aa, unidentified
MRIIGCDLHARQQTLAMLDTETGEVVNRTLMHEGNQVREFYSELSRPVLVGIEAIGPMQWFLDLLAQLGIECRVGDAAKIRAAEPRKQKHDRRDAELILKLLVEKRFPAIWMPSKELLDLRALLLHRHQWVRLRTQVQNALQAIALANGLRRGPGLWSYDGQAKIAFLPLPPHASLRRSALQAMYGHMEEEIEKLTVQVAEQVEHRSGAQLLMTHPGVGPVTALATDVFLGDAQRFDDGKSLASYVGLIPEERSSGRRRRLGRISKQGNPLLRFLWNEAGAHAARRDPELRRFYRRKLAQKGLGKARVAVARKLGIRLWIMLRDQIDYQEFCRRGQKQSGAACAGMPEVGNGANRHRPVE

SEQ ID NO: 167465 - protein, 459 aa, unidentified
MLDILLTQKKVIMQQKGFLGIDVSKGYADFLLLDEHKKAIEESFQLEDNQKGRQRLSSLTQEWFSKGMEELCCGVESTGGYENNWYSYLKGLSVEMNIRVARLNARAVKAVSDATLKRTITDAVSAHNIASYLISFSEKVNYDKGSQQETQFKEGRQHYSYIRMLQKQKVQLSNQLEKLLYQDFGEILVYCRHGIPAWLLRMLSQYASAETVVKAGLERLSDIKGISADKARALLDKASRSVQVISGQSRHVIAATSKEILHKSGLIQKEKEYLAKMYEQEEAVKLVASIQGIGIESAVALMLEIEDVNKFALAKKITAYFGVNPTFKQSGDGTWGSHMSKKGRSEIRAILYMASLSGIRCNSILKPLYARYRAKGMKHYQAMGVVMHKLLRIIYGVLKNKRSFDPAIDELNAGKAKEKQKKEKQENNNEQKKHRHQAISIDAPLSNRAVQKRKKQIAS

SEQ ID NO: 167466 - protein, 316 aa, unidentified
MNASLSLNLGIDLSKEWIDAYLLPEGETWHVDRTPHALTSWISHLPAGITLAVMEATGGFETIVAALLTDAGIPTAIVNPRQIRDFASALGTRAKTDAIDARVIARFAEAVKPTPRPLPSEQQAELGELVARRRQLVETSTAEKNRLATVQNPLVRRSIQTHIRWLSKQTKDIEDRIKNLIKNSPVWYAKKKILTAECGVGDVTAFTLLAELPEMGMLSRRQAASLAGLAPFTHASGKWRGKSFIQGGREPVRQVLYMCINSAVRFNPVISDFYHRLIAQGKEKRVARTACMRKLLTILNAMIRDNFVAPPNQLPA

SEQ ID NO: 167467 - protein, 447 aa, unidentified
MAKQKESAEFSIVHPHAAGIDVGSRFHWVSVGAGAGQSKKFGVFTEDLHALCQWLRSQAVETVAMESTGFYWKQLFVMLQSYGMEVYLVNASFTKNIQGRKPSDLSDSQWIWKMHSVGLLPASFQPDYFTEELRTYVRHRSRLIESAAQCVNRMQKCLTLMNIQLPIVLSDISGKSGKAIIEAILKGERDGEKLAQLADRRVKADKATLAKALTGFWRAEHLFELKQHWESYHHYQEQLQECDRQIDSLLQSRVHATGQVELVYDEKKKSRGKNDPTFNVAGYAYQLSDGVDLLQIDGVGLGLILTIVSEVGLNLSQFPTAKHFVSWLCLCPNKKVTGGKLISSRTRKNKSRLRKVFKQAAIGVSRKKNSVLAHFYRRMAAKHGKGTAITATARKIAIIVYNMLEKGQAYRPQQLEQYQEKVRTQKIKQIQRTIEKLEVQKHELAFA

SEQ ID NO: 167468 - protein, 339 aa, unidentified
MITTIGLDLAKSVFQAHGIDESGVTVLVKKLHRKQMLPFFSKLPPCLIAVEACGTAHYWARTLSAMGHEVRLIPPSYVKAFVKHGKSDALDAEAICEAAQRPTMRFVPIKTVQQQGILMTHGARSLLVRQRTMLANALRAHLAELGFVANPGIANLAKLADQVMADKAALPSDARAALEMLIRQIMAVSGEVAMLDQQLMAWHAESEASRRLAAIPGLGIITAMAIAATVTDAEQFSSGRQFAAWLGLTPQQHYTGGKTRLGGISKQGDRYLRRLLVVGATAVMRHVKDKPTPMANWIRKLSEKKPFRLVSVALANKLARIAWVVLTRKEAYHPYAHLT

SEQ ID NO: 167469 - protein, 421 aa, unidentified
MSKQNVEIAAFIGLDWADQQHAVCLQYAEDSSRETSTLDQTPEGLQAWIAQLRSRFGGRPVAVAVEQARGALIYALMHVDFLHLYPVNPQTLAKLRKAFYPSGAKDDPGDAGLLLEVLLNHRNHLRVWVPDDVLTRSIQLLTEGRRKLVGERTALTNQLTAVLKMYYPQALDWFGDLHTLRACAFLQRWPCLQQLKTATTSSVRKFYKNQGYRGEDKLKQLIEDIQQAQPLTGDEAVILASTMMVQALVKQIPVLTESIQEYDRKIAALFNAHDDSTLFGSFPGAGPTLAPRLLAVFGSDRSRFEFAAEVQQLSGVAPVTERSGKTYWVHWRFACSKFLRQSVHEFAAQSILKSPWARAYYNQQRQRGASHQAALRALAFKWIRIIFRCWKDRTLYDEAKYCRSLQLRGSNLASHLEAISH

SEQ ID NO: 167470 - protein, 406 aa, unidentified
MRNYIGVDWGDAEDAVWIEDDAGAKVMSRALPHTAEAFAEWGRWLDERRAAGIELWAAIERPDGRIVDFLLDHGVLVFPLNPKALDRARDRFRMSGAKSDPFDARVAASFLRTDHGHLQPLRPSSEAAQELKELTRDYTRQVRQQTRLLNQLTVTLKEYYPRALEVCEELKNRWAQEFLRAYPTPDALHALTERQWQRWARAHRLSAERTAALWVTIQRPQISVPPHVVRGKARRLAVLLEQFVLTAGAVETYRQAVEDFFASMPAAKWAGSLPGGHSGTTVPAVWAELGDAPGRWQTAQHLQGHGGSVPVTERSGKAHVVKFRFACNTHLRAAVHQLAFLSLRHSEWARAYYDRCRRRGHAHHRALRALGAKWLKIIFAMWTRQVAYDEQYHLASIARHQLRQPA

SEQ ID NO: 167471 - protein, 426 aa, unidentified
MKEHIDYLSTLFVGIDIASRIHVISALDFNQDFYIKMKPFENTKDGAGIVEKLIADVLADNHQFKYVVIGIESTGFYGVHLANYLSTSELLAPFSVRVYCLNPKEVKNYKKSFNDIGKNDGIDSFVIADFARVGRIAIKPWRGSQYLALQRLTRHRMHITECITREKTYMLNNIYLKFSQYALLRNGEHPFSNKYGATAEAILTEFTTNEDIVNSSIEELVEFINSKSKERIADPEETAKIVQAAARNSYRLDKCLYEPLTISIASSFNCISSFEKELKAIDKAILQTVQGLNPEEYTVLNSILGIGKVYSAGILAEIGSIKAFQNANQLAKYCGIVWNDNDSGDFESEDSRMSKAGNRYLRYYIIEATGSVINHCPEYKAFYQKKYAETRNHQHKRALALTSRKFIRLLFGLLDKGQLYSPEKSR

SEQ ID NO: 167472 - protein, 453 aa, unidentified
MANGSGVSRGDRNRNARLARLRALVPVSNAIAAIDLADGKQMLVVVDHDSRVVARRMLRCRVWQLGAALEWAAGRAAAAGFAGVTVACEPTGHRWQVVGQLAAERGMPFVCVQTLLVAWARRNEDLTRDKTDDRDAMLIGRLVSELRCYEPEPTDATWNRLRHLGARRGRLVEEATGLEQQMRDLLDCAWPAVLAAAAQPFKSATWCAALDVALARATRAGCDLSRARRLGPARFEAAVRRQLPRWGKTRPCLRIVRAVFAALADSTGVAAVRLGVLERVHLVQRDWQQTGQRLIETETRMVAVLDELGLTELVCSIKGLSAVGAAAILAETGDPTRFATPRSVVKHAGLAPRERASGAYTGRTRIGRAGRPGLRLAAWRAAWVITRSNPVYAARFTHLTTRADNRLSAGQARAAIAAALLRHLHVVVTRREPWNPRIAAGGRPTTSALSTAA

SEQ ID NO: 167473 - protein, 347 aa, unidentified
MMRYYTGRHKFSCGVDLHARTMFLCVLDERGYPRLEKNIKTDPELFLKAIAPFREDLVVAVECMFTWYWLADLCSRENIPFVLGHALYMKAIHGGKAKNDRIDANKIAALLRGGLFPVAYVYPPKMRSTRDLLRRRMFLNRKRAALITHVKCTFAQYNLPEPEQKISRVANRDGIAELIPDPGASRNVQLDLHVLDFYDQTLTKLEQELTVIAKDHDPDAYFRIRTVPGIGKILTLVILYEIHDISRFPTVQDFASYCRLVKPAKESGGKRIGFGGAKIGNVHLKWAFSEAAVLFLRKNEAAKLYRARLAKRHGKAKSLTILAHKIASAVSYILKRKTVFQPETFFA

SEQ ID NO: 167474 - protein, 403 aa, unidentified
MIGVDPHKGSHTAVVIGLAEEPLGELRVRASAGQAEKLVAWAADWPERTWAVEGAAGLGRLLAQQLVAAGERVLDVQPKLASRVRLLQAGDTNKNDPNDARSVAVAALRSKTARPVMAEDYPAVLKVWSKRHRDLARLRNQVACRLHAVLCDLVPGGHPKEISAAQAARILEQAAPSGAVDRARAELAAQFLEDMRRLDAQLRDTRKKLAAAVSASGTTLTEVFGVGPVIAGTITGDIADVSRFPGRDHFASYNGTAPVEVSSGNRKIHRLSLRGNRRINHAIHMAAITQIRHRHSDGRAYYEKKLAEGKTHKEALRSLKRRISDAIFACLLADARRAGQRPARRAREGNQGATLTPARPAHTPNAGSSDKPLPDPGTTIRPGTRAATPSPSKPASKKTRPAT

SEQ ID NO: 167475 - protein, 442 aa, unidentified
MINFALRNPPFAHKLRQKEEIVTNKRLIQRGRYVNPDILIVGIDIGKYKHAAVGTSLHSGFTKPFFIKNNRISYESFESEVKKWKRRFECKEVVIGFESTGHYWKTLAYYLKKRGKFLVEVSTSYTKKSKEMMDNSPLKCDPKDARVIADLVKQGKILTPVLPEGKILALRNVVHTRENLVKEKTSIINRLQKIVDISFPERGEIIGKINGKTSLFLLEEAPFPENIIDKGLECLREEIRKKSMGHYKYEDARKLYQSAIDTIGLKEGRDGSTYELKILLSRLNKLGQEIEEIESNIKDRLRDIEEAKYILDIKGIKEVTAATIISETGGLGNYKNISSVLKVAGLNLFEISSGEHQGEKHITKRGRSLLRHKLYFAALQQTRKGMPFYSFYRRLVEENGVKKNKALIALARKLLRVSFALVRDKTEFISSCEEKTKIKKVA

SEQ ID NO: 167476 - protein, 420 aa, unidentified
MKVTYQICCGVDVHKSFLVATIVKTTGGIEPSYQKKRFSTFNNSILEFKQWLLDNGCHDICMESTGKYRVPVFNLLEDEINVVIANPKWVKAVKGNKDDAKDSKWIGDLFRLGLVKGSYIPCKKVRILREYTRYRYKLVSCRSSEKNRYQNALTVCNVALDSVVSDIFGKSSTSIIDYLLEQSGTSINHEEIASKLLRSLKSKEDAVIHSIEGYQMTDAQKYRMRLVRAHMDYITAEINDVDKMIENMISSNPDFENAVQFLCTIPGVKRDSAITIISEIGIDMSQFSSSKRLCCWAGLTPGSNESAGKKKSVRITRAGIYLKPALVQCAHAAVKSDKSPYYKKKYESLVKRRGKKRAIIAIARMILTAIYQMLSTGEQWNPSDLYKIDIPVALVEKKRQKLSSRLRKQKAMMKFLLVVS

SEQ ID NO: 167477 - protein, 358 aa, unidentified
METTNLRQKVDFTDKNIFAGMDVHEKSWNISIFLEDMFLRSFTQQPSVEALEVLLKRDYPGAKYLCGYESGYCGFSIQRKLTKLGIACQVLHAGDIPQTNKEKLLKRDPVDSKKIGEALSTKKAKPIYIPDEVSEQDRGLVRYRDRVQKDLTRCKNRIRSILYEFGIYLPERFAKGWSNRFIQWLRETEQVIGSTRTTLNHMIEQMVAHRSLLLKVNRDIRALRNSPKYKQKAQYLTSIPGIGPLSAMIILTELMDIRRFGSFRDLNSYVGFYPMEHSTSDKEHKGGIMIRHNKHLRKLLVEDAWVAMRHDPALSLAFNQWSIRMTGKRAIVKVARKLLNRIRYVLINETVYTKGIVK

SEQ ID NO: 167478 - protein, 347 aa, unidentified
MTIVEAARGVTGGVDTHLDAHVAAALDPLGALLGTESFEVNQAGYKSLFAWLEDFGEVQTVGIEGTGSFGAGLARFLRRKGVHVIEVDRQNRAERRRSGKSDPLDAVEAARAALGGRAKSIAKTKDGNVEAIRALVVAKRSARQARVKALVQMRNLIVSAPDQLRSRLKGLSVPTLVAEGAKLRPTRSTDPVTAATKASLSSLAHRIKALENEIAELDALLDELLAATAPGLLALFGVGPDTAASLLVAAGDNPERIHSEAAWAHLCGVAPIPASSGKKTGRYRLDRGGDRQANSALWRIVMVRIAHDPETAAYFERRVKEGRSKAEVVRLLKRYVAREVYRYLPRG

SEQ ID NO: 167479 - protein, 341 aa, unidentified
MKNKSFIGIDISKNVIDASIFCEGTPIKDFPHAVFNNSHKGFGEMCTWLKKNHVVLSNSLFGMEFTGSYSMELEKFLNARKYQFCMLSTHVVKHYPMGPKDKSDKIDSAKIADFLYRYDGTECVKPYKMPDKTMQRLKALTKERKFLVEQRTCFMNRRQLCTTKEAAQLYDGYIKEFSHDIENIELKMQNLLETDDSLSTTYKNLLTIPGIGFVNAMNVIVITRNFTAFETARQYASYIGVAPHFHTSGTSVKWRPRPSARCDGQAKADLSMAASVAVQCDAELQSFYNRKLGGKQDSDTKRKALNAVKFKLVLRMFAIGKQNREWEPLDSKSSNEKLAIS

SEQ ID NO: 167480 - protein, 463 aa, unidentified
MAKLPKQHKPGANAPARPTESIQLAIINHHTAAIDIGSMLMMVSYTDAQGNQRLMETDGYTESIKRLANTLKHAGVTDVAMEATGIYWTALFEVLEEVGLNVTLINPRHFKNVHAQKTDVNDAQWMHQLHAHGLLRASHIAPDLYRELRCYLHERNRAQQQKSDTLNRIHRTLSQMNLKVQHLLSDIEGVAGMAVLRAIAAGETDPEALLQCITTKVKADKEDLLQSLQGYYKPHFINILKGHLRIYDFLQKEMKQFEVFIESVLQQLLPPDEDGEIPMIPAKKTKSRKNQYRFNLKVYLKKILKIDLTQMDGIDEISVLEIISVTGTDMSKWPTAEHFVSWLNLSPRPKISGGKVLGQQKRFTNNKATQAFRIAAQTMWQSKGPLGQLYKRLAAQKGSKCAVKAIARKLAVIFYNMAKHKTEYNPAKVGRDQSKIKEMEIARLKKKAAAYGLTLQPVANTSL

SEQ ID NO: 167481 - protein, 347 aa, unidentified
MKFYTTQHPYYCGIDLHARSLYVCILDANGDTILHREIKALPQPLLDLLAPYIGNIVVGVECMHCWYWVSDFCAEHGIDFILGHALYMKAIHGGKAKNDRIDSYKIAHLIRGGNFPLAYVYPSEMRSARDLLRRRTRIVRHGADLKAHVKNTTSQYNLPPNDLNLRYPNAREAMRDRFDDQFVQRNIDLDLDIIAFYNHELSSIECFIEKHAKHHNGSDYHILTSFPGIGRILALTILYEVGDIARFNTVQDFASYCRLIKCKAESAGKSYGTQGNKIGNAHLKWAFGEIAVLYLRGNDKAKAHLLKLQKRMSKAKALSALAHKVGRCVYYMLKNQKVFDEKRFLAG

SEQ ID NO: 167482 - protein, 347 aa, unidentified
MLIIGCDFHTRSQHIAMLDTETGEVVERRLEHENGEARRSYESLKEPALVGMESTGYALWFAGLLAELGHQLVVGEAGKIRAMEPRKQKHDRRDAAHLLNLVVRGDFPRIWLPSVEDRDVRVLIEHRHQLVQLRTRVKNGLQAVALNYRLARRAKLWTARGRKELAALPLREGMARRRSDLLPLLAQLDNWIEELDQRLEREAEQRTAARLLMTHPGVGPLTALGTVLILGPVERFPDARHVTSYVGLIPSEESSGGRQRFGRLTKQGNHLLRFLVVEAAQTASRSDPGLKRVYRRLTFRKGKPSAKVAVARKLIIRLYIMLRDQIDYAEFCRRGSHAGMLGQVALA

SEQ ID NO: 167483 - protein, 341 aa, unidentified
MVHVGLDLSRTRLDVHVIDEAGAALAVTTAAPDAGGLAVLVERIGGFGGPVYAAIESMNGARFVHDQLELAGWQVEIADALKVKGLAPLACKTDKIDSWVLAELSRRDLVPAIWLPTPAVRGERERARWRLHLVRHRSALKNRIHASLLAFGHPCPVSDLFGVGGRELLHRLELPEPWAADTAAALYLIDELDHQVVECERTLRQLGADHRYVPLLMTTPGIGWVLGYTIAAEIGDISRFASPTKLAGYTGLCPRVYQSGGKDHRGPLAKNGPKYLRWALIEAATHAARHPVYAERYRRTKTRLGRQRGPKVAQVDLARRLAEAIWHMLSTNRPFAPAGAA

SEQ ID NO: 167484 - protein, 407 aa, unidentified
MTRYYIGVDWADTEHAVWVEDEAGAPVATLTVPHTAEGLSEFGRWLYECQAQGIECWAAIERPEGRVVDFLLDHGVVVYPVNPKALDRARDRFRMSGTKSDPFDARVLAAFLRTDHPHLRPLRPSSEPAQELKLLTRDAQRLVRQQTRLLNQLTATLKEYYPRALEVVGDLTTPLARDFLEAYPSPEAVAALTRAQWRRFARAHRLSEARTVALWAVLQPPQLPVPLHVVRAKARLVRVLVAELRATVQGVDEYRKAVDDFFATLPAAEWARSLPGGKSGTTVPTLWAELGDVPARWQSVQHLQAQAGAVPVTARSGKSQHVRFRFACNTHLRAATHTLAFLSLRQSEWARGYYRQYRARGHRHHEALRALGAKWLKIIFVMWQRQIPYDETYHLATIARQHLRQAA

SEQ ID NO: 167485 - protein, 423 aa, unidentified
MENTAARKRKQVPEGYLIIGVDPHKKRHAGVAITQDFTTRDKFKFDNTREGLEVMLRRARMEMVKSDCRGVMFALETGGHYWRNIAYFLDEQGIPFRFINQFTLKRRREGKDLNRRKNDYRDSEVAAQLLCTGEFTESKVPQGVYAELRTAHNAYRRLVKERTRIINLVKGLLDGLFPEFTHVFKDPCGLTALSVLSTCPIPSVIAGMTEDEFVATIKAQHKGRLMRRKLRELHYIARTSIGIEAGARPVSSEISFLVEKLELIKRHIRLIERTLVRLVDETEEGKYLLSIRGLNYIAVAGLLAELGCFKAYRSAKQMIKMAGSNPTESESAGKKGAHTPMSKQGRPVLRYCAWTSVIPMLRLNSDFRAWAKQRRERPAHANPLNGREVVGAALNRLLRLAFALVKNQTYYQVSKPELTLVTV

SEQ ID NO: 167486 - protein, 342 aa, unidentified
MQTITTIGLDIAKSVFQVHGADAEGNVVIRRQLKRRYVLAFFQKLPPCLVGIEACASSHHWSRELQALGHTVRLMPPAYVKPYVKRHKNDAVDAEAICEAVTRPNMRFVATKTREQQSCLTLHRTRHLFIRHQTSVINAIRAHMAEFGIVAPVGRNGVEELLAVVADASDKRLPEIARASVAALGAQLRALKAQILQFDRLIMAWHRSNQASRRLDDIPGVGPALATALVATVADPRAFRSGRNFSAWIGIVPKQHSSGGKDRLGSISKRGDRYLRGLFVAGALAVIRYAKIHGTKRRPWLTALLARRPTKVAAIALANKIARMAWAMMAKGERYKEPVAAT

SEQ ID NO: 167487 - protein, 371 aa, unidentified
MNNIVYVGMDVHKESYTLSCYRFESDEVKYQQKMKPDYKMVLKYLSQIKKRYAEEIEIVCGYEAGSLGYTLYHQLTECGVECKILAPTTMVNIDNKRVKTDKRDSGNIAKCLAYRTYSAVHVPTAEDEAVKEYIRMRDAQKKTLKAIKQQILSLVLRQGCSFEDGKSYWTIKHVNWLKSLDLGVVLQESLSEYLITYDYLTDKLTRLDQRIAELAGTESYREKVGKLQCLIGVKTHTALSVVVEIGDFKRFSGAEKLASYIGLVPGEDSSGGKQNRLSITKAGNSQVRRLLVEAAQGYTRGQIGHKSADLKRRQNGNAPQIIAYADKANERLRRKFYRMTLKNNTNRNVAATAIARELACFMWGLMTDNIA

SEQ ID NO: 167488 - protein, 343 aa, unidentified
MGNFAGLDVSLEETAVCVVDDAGRIVREARVASEPEALVEFFRTSGLVMERVGLEACSLTAWLQQGLSADGLPAICIEARQAKAAMGAMPNKTDRNDARGIAQIMRTGWYRAVHVKSPSCRSWRALLTARRMVLNKRRDVENGIRALLREVGLKVGTPSRKDFPGRVRALVADDAVLASLAASLLAVVEVMTREVERLTKRVLDEVRAEPTCRRLMTVPGVGPLTALAFRATIDRPDRFRKSRDVGAHLGLTPRRYQSGETDVQGRISRCGDELARTALYEAAHSLLIRDTRWSSLRMWGLNVARRRGMARARVAVARKLAVVLHRIWADGSVFRWGKQAAAA

SEQ ID NO: 167489 - protein, 394 aa, unidentified
MAFKIFRKNCCGLDVHKTWIYACMGITDTNGRTEYKQARFSSFTKGLQELADWLAKYDCNDVCMESTGKFWIPVFNILEKTCWVTLAYPKYTKPQKGNKTDHKDAKWICDLYMCDMVNPSFIPPPDIRQLRDLMRYRSKLTNIMTSEKNRALNCLTVSNLKLDDVFSDVFGKSSCSVIRYILEHPGETFQVAPFIDRRCRHPVEEIQAVIDGTISHQQAVKLRECLQHLDELEVHKTNVEKEILCLVQQYPYQLELLQTVLGFSGNIMTAIALISEIGADMSVFPSAKHLVSWAGCCPRNDQSSKKVKSTRISRAGVYLKPLLVQVAIQPFTANADKLSAAGALEIRCQICDGRFLSMWAALFIFLGCPLSPCPKNLHVHNGRIVILASVAWIF

SEQ ID NO: 167490 - protein, 409 aa, unidentified
MQYFVGLDWAAREHAVCVVDGRGAVVAQFTVAHTASGMTELAARLAKLAPVAELRIAIERPTGLVVDTLVEGKFAVVPIHPNVVKAVRPRYSAAQPKTDLGDAYLLADLLRTDGHRFHTLVPLSDETKALRGLVRVRDDLVGQRVAAANQLRCLLEQFWPGAVELFADIDSPIALEFLERYPTPQSAASLGEKRMAAFLARHAYSGRRTAAELVQRLRSAVPSTAGELEAEAKGECVRALVAVLRPLVAQLATLSAAIEHAVDAHPDGKIITPLFRSGRICAAQLLAELGDDRGRFVSADHLAAEGGAAPVTRESGKHRAVTFRWACNLHLRQALSTLADTTRHTNPWARSIYQRARDRGHTHPHAVRILARAWCRVIWTCWQQRTPYDPTKHRAARPFTLRLVDQEAA

SEQ ID NO: 167491 - protein, 347 aa, unidentified
MLHAGLDLSRRKLDVCLLSERGEHLDQLVVPPDVESLRRLARRIDEVHAEPVLAVVESMTGARLVHDTLEREGWAVEIADAQRVKGLAPLACKTDKTDSLVLATLSQRDLVPAIWLPDPGVREVRELARFRMHLVQHKSALKNRIHSTLINFGRPCPVTDLFGAEGRRLLAKLDVPEPWRSNVGASIELIDHLEDQIDQINRRLRAGHADHPYIPLLMSVPGIRWVLAFTIAAEIGDIGRFASPEKLTGYTGLCPRVVQSGEKDRRGPLSKHGPTYLRWALLEATMHALRHPAYSERYQRTKRRLGKQRGAKVAQVDIARRLAHAIWHMLTRNEEFAPRGAAFRLAA

SEQ ID NO: 167492 - protein, 410 aa, unidentified
MDRVVIGMDPHKRSATIAVLNEGEQPLMGGRFGTDREGYRLLLAAGRQFGQRLWAVEGCQGVGRHVAQRLVADGETVVDVPAKLSARARVFSTGQGRKTDATDAHSVAAVALRTPSLRQVRRDDRTVALRLLADRRDELGAARTLVINRLHRLLVELVAGGAKKALTARQARALLADVPAGDVVRETRRRLATELVDELEVIDARIKTATKQLAALVAETGSGLMQLNGIGPSGAARLLGDIGDVSRFPTRGHFASWNGTAPLDASSGEQTRHRLSRAGNRRINRALHIMAVVQLRHPNTDGRRYYDRRVAEGKTPMEAMRALKRRLSDVVYRQLVNDQNQQAADDNDPITEAQWTGSEGHLGATTKSSAAGSNPNTGASDKSLSEPANIDATPTPGASPDRTPARSPSL

SEQ ID NO: 167493 - protein, 355 aa, unidentified
MQPMNYYTGCDAHKKYSVFTTISEAGEIFPAKRVEHDRQKFRSFLETLPTGSCIAIESAGDWYWLVDEMEKAGHKPSLVHAGKAKLMMGNINKTDKLDARGLAILARNGTLPVVWIPPGELRDQRELPRMRLALGGIRTKLKNRIHATFAKYGITFEEVSDIFGRRGRRLLEQAMNELPPETRHSVEEQLQLIDQVEQSIKQAEKRICSVIKEDHAMQILKTLPGVGPILAITIALEMGNVERFPTGEKFASYSGKVPRVSSSGGKTYYGKVRPDVNRYLKWAFTEAANAIVLQQHRLGDCHVLRLYWRIRNHKGHAKAITAVGRHLAEAAYWMLKNDEPYREPGIKKMISSIRG

SEQ ID NO: 167494 - protein, 315 aa, unidentified
MAMPVSVTKPMVGVDVAKNELVIYHAELDVLTAIPNDKAAIKRWLKALPGPVAVAIESTNIYHLEFADLAYEAGCEIYMVGGYELHHYREGVKIRAKTDALDAKLLARYLKNEGHELHPWTPPSALYRQLLSLFRRRAALVQARVALVQSWANEPLLKTAFAEQIAAMQRLETLIEKTIKDHLRDAGLLGQLNRCLKVEGIGFLTGARLLTAFQRGDFRSADAFIAFLGMDLRVSKSGQKDGRRSLSKRGDPEVRRLLHNAAMSASRTSAWRGFYEKQRARGFTTTQALVMLARKLARIVFALLKEQSKYQPKAA

SEQ ID NO: 167495 - protein, 420 aa, unidentified
MDVIVERCAGLDVHRDKVVATVRVPGSGRRQWEKQTQTFEATLAGLAELALWLAEAGVTLVGMEATGVYWKTVFQALEDRFECWLLNAHHLRNVPGRKTDVKDSEWICQLVQHGLVRPSFVPPVEIRRLRDLTRLRRAQTNERTRTIQRLEKVLQDAGIKLTSVASHTYSKSARAMLEALLSGVTDPEQLAELSKGKMRAKIPQLREALESRFQVEHHGIMVAQLLAHIDTLDIALQNLSERIEFVLIPHAEIIELLCTIPGVQTHAAQVLIAECGLNMTLFPTVGHFASWAGVCPGHHQSAGHRGSGRTRPGPRWLTDQLTECAKAAVRTKNTYLAAHYAQLRGRRGEAKAIGAIRHDLLVAYFHIVRDRVPYRDLGPDWQRKRYSIEHRARRLQRQLEALGYAVTLDQVEPPPAEQAA

SEQ ID NO: 167496 - protein, 420 aa, unidentified
MKAYNVDNFAVLIGIDWADQKHDVCEHPLDSGKYHYSVIKSKPEALHDWAMSIKKRYPNQKIAVVCELKKGPLIYALAKYKHLTLFTINPSTVAKYRKAFTPSGAKDDPSDAFVQVEILTLHMDKLSVIEPESASVRSLAQLVEYRRNLVQDSVDLSNKITAALKNYYPQVLEWFNEKDTIIFCDFISKWPSLAKVKRAKKQTLLDFFNSHNSHYVHVNETRIANIKSATPLTEDVGVIVPNQLLIEVFIAQFKVLLKGIESLDKAIKLTYKAQNDRVIFDSLPGAGPQLAPRLLVAFGSNRDRYNDASDLQRYAGIAPVIERSGKKMWTHWRYSCPTFLRQTFVEWAGFSIRYSFWAKAYYEQQKSKGKPHNSIIRSLAFKWIRILFRCWKTSTPYDESKYLEALKRRGSSLLKFAINC

SEQ ID NO: 167497 - protein, 342 aa, unidentified
MQITTIGLDIAKNVFQVHGIDAAEKVVVRKQLRRSKVIAFFEALPPCLVGMEACASAHYWARELRKLGHEVRLMPAKDVKAYVKRNKNDAADAEAICEAVRRPTMRFVGVKSAEQQGRLMQHRTRDLLLRQRTQVINALRAHLAELGVVAAQGREGLKELLAIIADKKDERLPVDARASLIVLAAQLQALQTLIGSIEKRLVVQHRANEASKRLETIPGIGVLGASAIAATVSDPNVFRSGRDFAAWIGLVPRQDSTGGKQKLGPISKQGDRYLRRILVVGAIAVLRYAKQNPEKYPWLTQLLARRPFKVVAVALANKMARMAWALLAKGGTYRAPALAAAA

SEQ ID NO: 167498 - protein, 374 aa, unidentified
MPQSRTLYVGLDVHKESIAVAYVAQDHGAEVISLGTVGTRQCDIDKLLRHLQSKSPQLVFVYEAGPCGYWLSRSLMKKGYVCWVVAPSLIPKKPGDRVKTDRRDARQLARLMRSGDLTPVYVPAVDDEAIRDLSRAREDTLRDLKAATLRLKAFVLRHDIRSTGRANWSPAHLRWLSEVVCPTPAQQMVFQEYVQTVTEQTERLQRLEHELHEQVKTWRFQPVVEALQALRGVQFTVAVTTVAELGDLTRFANPRPLMHYLGLTPSEYASGARRQQGSITKTGHTHARRALVEGAWAYRYPAKVSRHLQLRLENLPKAIQAISWKAQVRLCKRYRQLLAKGKNANQVVVAIARELSAFMWAIAKQVTMAPKDQS

SEQ ID NO: 167499 - protein, 418 aa, unidentified
MFKIFRKNCCGLDVHKTWIYACIGVTDPSGRTDYKEKRFSAFSSGLRELAEWLALYNCKEVCMESAGRYWVPVFNVLEKTCWVSLSHPKYTKPQKGNKTDRKDAKWICDLFMCDMTKPSFIPPPDIRHLRDLMRYRFKLTNMLTGEKNRAQNCLTVSNLKLDDVFSDVFGKSARSITEHILSHPGETFDVTPFVDKRCKHPIEEIQAAIDGSISPEQAIKLREVLRHIDEIEAHKRRIETEILRLAAPYETMLTLIRSAPGFSADPMTAIALISEIGVDMSVFPTAKHLSSWAGCCPRNDSSGGKRKSTRISRAGVYLKPLLVQIANGIVNSNKHPECKERYRRLKARRGHKKAIIAVCRMLLTAIWNILTKVEPYNPYGYLADRKTEPSKTVTTAQALNLMRLRGYVIKDDVVPSTA

SEQ ID NO: 167500 - protein, 323 aa, unidentified
MKEHITKCAGIDTGKRKLDVALDLSADQLQVANTTEGHTKLSAWLRRHKVWRVGIEASGGYEQAVVSKLRGDGFVVVVFQPAQVRAYAKFHLQRAKNDKIDAALIAACTAATKKIHAPPDPRLVAMADHQTLIDQIVDQITRCKNYRESCRDQEPRQFWEDEIKRFRGLFRQQLKQLVAEIRRHPDLSERLDLIASVDGIALRTAVAILVRLPEIGRLSREQVAALAGLAPYDDDSGEQQGIRHIAGGRERLRNALYVAALPASFRWNAELIALYRRLRAARKEHKVALVACARKLLIFANAVVARGTPWQSSAHPSASLPAT

SEQ ID NO: 167501 - protein, 350 aa, unidentified
MNYAQIIQRYYCGVDLHANSLYLKILDGEGQTVYKRNMPNNFAQFKQILTPFLPDIAVGVESTFNYYWLYDGCVEAGIPFYLGHAAYMKAIAGNKQKNDPLDAETIAHLMRSNLFPQAYPYPKEMRAVRDLLRRRHRLVRHRSEAYTHVQLLLRQQGICDFRGRDVKSVSGKQQILKSLTDPDVYYLVNSDMLLIDQLDNLLSEIEKQIKDRAYHHNGTDYNLLKSITGVGDMLALSILYETHDINRFPGAGNYSSYCRVIRIPRTSAGKNKYGKNQKMGNPYLKWAYGQIITHARQSSERINSYYQKLEAKRCAKLARGIMSHKFAVAVYHMLKKKVVFDENRFLKVAS

SEQ ID NO: 167502 - protein, 394 aa, unidentified
MLHAGLDLSRKKLDVCLLSDEGEHLDQLAVPPDVDSLRRLARRVVEVHRQPVCAVIESMTGARIVHDTLEQQGWSVEIADAQKVKGLAPLACKTDKIDSMVLAVLSHRDLVPAIWLPDPRVREERELARFRLHLVKHKSALKCRIHSTLINFGRACPVTDLFGVEGRRLLERLEVPEPWCSNVTASVELIDDLEEQIAGINRRLKDGHADHRYIPLLMSVPGIRWVLAFTIAGEIGEIERFSSPERLAGYTGLCPRVNQSGEKDRRGPLTKHGPTYLRWALLEATMHALRHPAYAERYQRNKRRLGKQRGAKVAPGRHRPPPRPRDLAHAHPQPTLRSPRRRFSSGGLTALLDLRPRASIQYRLILRRGGHRDMSVAPNPRATRGGSHELPTAD

SEQ ID NO: 167503 - protein, 355 aa, unidentified
MNSIKYIGMDLHSATISAAVVNDAGKLNMEATLATEASAVVDFIAGVQGTLHVAFEEGIHAPWLYDLLLPHVAQFLVCNPRQLPRHRGENKNDKIDAQQLAQWLRLGVLKPVYHNPTGLRTLKELVRSYLSLVRDTARVMNRLKALYRARAIPAPGTRVYSPRFREAWLQPLREAGVHYRAQLLYRQLDLLLPLRQEAKRAMIAESRQHGAQKILLSIPTLGPVRVAVLMAVMQTPHRFRRNRKLWTYAGLGLVSRSSANYRIVEGQLTRAGKPALILGLNLNHNHVLKALFKDAAATAVSRPGPLREFYARQLAAGREAEIARVTVARKLATIVLTLWKKGERFNAEHLKPQAA

SEQ ID NO: 167504 - protein, 421 aa, unidentified
MKNSAARKLKQVPAGYLVVGIDPHKKKHAAAAITEDLQVRAKFKFANSGVGFEQALVNARTEMSKAGCRGVIFAIETGGHFWRNFAYSLEERGIPFRLISQLTLKRMRDGRDLNRRKNDFRDAEMAADVFRTGDFTETRLPQGVYADLRSSHSAYYRLVKERTRIINLLKGLLDGLFPEFTQVFKNPCGRTAQIVLSICPSPAAIAGMDADSFVETIRIGRHGRLMRRKLRALHDAARTSIGVKPGADSVAMEISLVVGRYQLIEQQIDSLVKSLRELVDRTEEGKYLLSIPGINYLSTAALLAELGPFKSYHDAKQLVKMAGTNPIQAESGGKRLGKTPMSKKGRPRLRYSAWNAVIPLFSHNPDFRAWAKRLRERPAHANPLNGKEVVGAALNRLLRLAYILVKKQEFYRSPQLAPVMN

SEQ ID NO: 167505 - protein, 307 aa, unidentified
MWIIGCDYHPRFQQIAFVNSDTGEYGTARLEHADGEAERFYRRLVGQRVRVGIEASGQSLWFERLLGELGHELWTGDPAEIRAQMVRKQKTDSRDAEHILKLLWEERFPRVWRPSLVERDLRQLVLHRHRLVQMRTRVKNQLQALAMNQGLCQKKKLWSRAGRAELQALPLLPWAGRRRQELLQLHDQLCELGRPLDQAVRDQAAGEQVQRLMTHPGVGEVTALTFVLTIGDPQRFASGRHLASYLGLIPQEASSGGKQRLGRISKQGNALLRGLLAEAAHIAVRHEPELGRCWRRLAIRRIGRLPP

SEQ ID NO: 167506 - protein, 372 aa, unidentified
MARQTTESLVLETARQLGRLATRVPSPDSCQSRHCGELVSARSGRVQKPGRCEALVNTDNPTAHVGIDVSKATLDVAIEPTHERWQVANDERGLQQLVERLGQLRPERIVLEATGGYELAALAALGSAKLPAVAVNPRQVRDFAKAIGRLAKTDALDAQVLAQFAAVVKPALRPVPDAATRELAGVLARRRQLVEMRSAESNRLQLAVDQVRPEIREHLRWLDKRISQLDRDLHDRLRASPLWREQEDLLRTIPGVGPVLSLTLLAEVPELGTVSHRQLAALVGVAPFNCDSGKWKGTRRIWGGRATVRAVLYMATCSAVRHNRVVRAAYERLLAAGKRKQVALVACMRKLLTICNAVIAQRTPWRYQPLDN

SEQ ID NO: 167507 - protein, 386 aa, unidentified
MPDVTPCLHPGQVRRWVAVDQHKFSIVAAVLPPDGGKPEVCRIETTEKAIRRFIDKLGGPAGLSVCYEAGPGGFALWRLLTKLGVACDVVAPSLIPVRAGDRVKTDRRDAKKLVGLYRAGMLRFVYPPTPELEGLRDLLRARDDVRCARMAARNRVLKQLLRHGRIFREGKTAWTKLHRAWLARQRLDDPLAQEALEQLLIHLDGIERQLATLDARLAEIAAGERWSGQVKTLTRFRGISTLTALGLIAEIGDFARFSHPRELASWLGITPSEYSSGDQQHRGHITLSGNRHARRLLIEAAWHYRHPPRRPAAGPEPEERAWQAQVWLYHRHRHLTEHGKRSTVANVAVARELAGFLWAAMTDQPLRATDTAASSPATKQPEEVAA

SEQ ID NO: 167508 - protein, 344 aa, unidentified
MKKVLIGIDFSKEKFDVAIIVKSTSTQEHSLFDNKVSGYRKMIKWINSVVEDIPCSSWLFCGETTGGYSRMMSDWLYAQGYDVWIENALVIKRTFPLKRLKNDTVDAFMIAEYALRFEDRVQLYEPLSQALTELREIFLYRHHLVRHRCSFEVRRIEKRFTQQKSANKNVISQSARHIITEINKEIAKCDEKIKEYIESDDQLSSIFSIVTSMPGVGTINAVSLMVYTNNFTKFAYNPRKIACYYGIAPFGRDSGTSVHTDPRVGFIANKMLKSLLTQAALASVRTCPQIAKYYQRLIERGKKPMVALNNVKNKMIAIITAMVRTGCMYQPDNICLATKSVNVK

SEQ ID NO: 167509 - protein, 347 aa, unidentified
MSVAATHTLGFDVSDRYSHYCLIDSDGGILEEGRLKTDEAALTKRFEGSPCRVVMEVGVHSPWMSRLFASMGNEVIVANPRRVQLIAQSTRKNDRADAETLARLGRADPKLLGPISHRDAGAQADLASIRGRNALVEARTLLINHVRGSVKSAGGRLPACDAHTFYKKAKVHIPPLLAPSLGPLVDAIEGLTGRIKEMDRLVLELIETRYPEARCLQQVAGVGPLISLCFILTIGDPNRFKTSRQLGPYLGLVPKQRESGESSPALRISKAGNGFLRQLLVNGAQYILGYRGPDCDLRRWGLKRAGSGKAAKKRAVVGVARRLAILLHRLWVTGEVYEPLRHLDVAA

SEQ ID NO: 167510 - protein, 314 aa, unidentified
MTSVSTPASRFIGCDVSKSTIVVFDDTTGRTRTVANQPESLARFAAGLDPSCLVVCEATGGYEVALLDALLAANVPAHRADARKIKAFIRSFGTLGKTDTLDAKAIARYARERGPQLARWQPPDPDRATLQALVLTRDDFVRQRTAFSNRRQAPGAEPVRPHLDDLLACIDRQIKAIELRIAAILKASQPLKRDADILTSIPGIGFKTAADLLALMPELGFLDRRQAAALASLAPHPRQSGNTNAYRRTKGGRPEIKRALFMAAMAASNHHPTLRPFFLKLLANGKKKLVALTALMRKLVIIANAKLRQEHQLS

SEQ ID NO: 167511 - protein, 344 aa, unidentified
MTKYAALDVSMEQTAICVVDENGQKVAEGKVPTDPDAIAGWLAGKAGELVRIGMETGPLAVWLWNELTERGLPIVCLDARHASAALSMMPNKTDRHDAAGLAQIVRTGWFREVRIKSHGAYVVRALLSARDLLVGIRGKIESEIRGLLKTFGVMFGKKVGGFARRAEEIVSGELTAAPEIKAIVETMMEARRSIVERIKVLDARVRAAAKQNAMARLFMTAPGVGAVIALSVASTYDDASRFRRSSSAGAYLGLTPRRYESGEISRNGYISKRGNKLTRTHLYEAANVILTRQTGFSSLKAWGMRIAKGAGFKKAKVAVARKLAVILHAMWKTNEPFRYAAAAA

SEQ ID NO: 167512 - protein, 339 aa, unidentified
MELYAGLDLHSRNTYIGIMDKAFNRVFKKRVPNHLEHILQTLDPFRDQIKGFVVESTYNWYWLVDGLMDAGYSSAHLANPSAIKQYEGLKHSDDQHDAFFLAQLLILGILPQGYIYPKKGRPVRDLARKRMFLVQHKTAHILSLQSLIARCCAMKVRANDMRHLTVKELEGWLKEEYLVLSAQANLDSINFLKQKVKELEKAIIQKVKLNKEFKYLLTVPGIGNILAMTIMLEVGDIKRFPKVGNFTSYCRCVPSRRFSDGKSKGSGNRKNGNRYLSWAFTEAVHLGRRYNERFRRYYNRKVAQANTSLATKALGNKLARICYYIMRDQVPFREELFCQ

SEQ ID NO: 167513 - protein, 416 aa, unidentified
MCYRIAGIDVHKRMLAVVVADVATEGDYEFERRQFGANPDELRRLADWLIAQNVQEVVMESTAQYWRPVWNTLERYWSAQCRGAEGAGPTSGSLLLALAQSNRGPRGRKRDFVDAERLLKRLVAQELVLSFVPDAEQRVWRTVVRRKYQLTRDRVRLQNQLESLLEEAQIKLSSLVSDLFGLSARRMLRALADGETDPAALAALGDRRLHANQEQLCDALGAATDLKSTYRRLVGMALDELQLLERHMSQLDQEMADLLSSHQDTVQRLAEVPGLGVESAHQIIAEVGAAARTFPSEKHLASWIGVCPGEKESAGVSSSNRSPKGNRLMRRLLNQCAHAAVKVKGSIFEIVFRRLLPRLGFKQAIWAIAHRLSRLIWKILHQGVRYEERGPAVNQKSRSARTAKMIQELKNLGLPR

SEQ ID NO: 167514 - protein, 347 aa, unidentified
MDHIGIDVHKRESQICLLAEGGELIERRIRTEPERFAAVLGGRPRARIVIEASTDSEWVARCLESLGHDVVVADPNFAPMYATRTRKVKTDRRDARALADACVLGAYRRAHRLSAPQRHVRGRLLVRDALVRTRTRYISLIRALLRQQGYRVPSGSAEAFATRVRALALPGPLLSLIAPLLAVMRPLNRQLAYSDATIERLAAHDERVQRLRTVPSIGPVTAAAFVATIDDVRRFSHAHQVEAYLGLVPRELSSGDRQHRGAITKAGPPRPRWLLIQAAVSILRRRPPEADALRAWALRIAARRGKQIAVVALARRLAGILYALLRDGTVFTPRRSPHLVAAATLLV

SEQ ID NO: 167515 - protein, 421 aa, unidentified
MGRLKIVYPICCGMDVHRDFLIACIATTNAKGVTDYESKRFSTFSGGLRDLRDWLAERNCTDVCMESTGKYWFPVHNILESTCNVIVSHPKFVKAIKGKKTGKKDAMWIADLFKHDLVRGSFIPPEDIRQLRDLCRYWQKLQWCSTGEKNRAQNCLTVSNFKLDSVFSNVFGKSSSAIIDYMLEHPGESFDVAPFVHHRCKSPIEDIQAAVDGAFNPFQAEKLIIIREHMGNLERLRMLLESLILTLAEPYWNQIQLLLTVPGISEPMTAIRIIAETGADMTVFESSKHLCSWAGLTPQNNESANKKKTTRIGKAGQYIKPLLVQCALAACNPRSDKQPEILRKYQQLKKRRGSKKANIAIARRLLTAIYHMLTKDEPYTPFIAPAKTSIPEKRILTSEQGLAMLRRQGYIFEDDLIEAPA

SEQ ID NO: 167516 - protein, 416 aa, unidentified
MSHILFVGIDVSSKNNVVCCLPEGDSAKPLSRFTVSNDEPGVLAFQERILALMQKHNLSSIRFGLEATGCYSSHLARYLESVLSFSPHEHSVYVFNPSLIKVFKKSHFLDAPKNDRVDAWFIAAKLRSGHLPRAFTWSETNAALQRLCRTRFHVVQNLTRETNFLLTHLFLKFSSYTAGPFGKKTSATSLAVMEHFASVENIIDMSVDDLVAFVARCGKNRFENPQEVAQALQKAARSSYRLPKAMADAVNLAMASNIRIIRSLQEQAKSLQKAIEEHLATIPQTLTSVPGIGPIFAAGLISEIGDIQRFPNQTALAKYAGLSWTESQSGDFKGVESRLIKSGNRYLKYYFIEAAKSVQVHDTVFAQYFSLKAAEPAKYAEKRALALTARKLVRLVDYLLRTNRLYEPREVNRQHG

SEQ ID NO: 167517 - protein, 423 aa, unidentified
MDVMHERCAGLDVHKKMIVACVRLVVDRKVSRECRTFDTSTSGLLALLAWLTEQGCTHVAMEATGVYWKPVWNILSDGAFELVVANAAHIKNVPGRKTDMNDAMWIADLVACGLIRASFVPDEQQQNLRSLLRTRKQVTREQTRHIQRLQKTLEEANIKLDSAITDIIGLSGRRMIEAIVAGETDPARLALLADRRIKASHDELREALRGRVTDHHRFLLQLHLEQHDFLTVAITKVDQQVDMLIARMDEAVKAGQARFRALMILLCSIPGVSMLSARIILAEIGRDMRRFPTAGHLVAWAGLCPGQNESAGKRKSSRLRKGAPWLKTALVQCAVSAVKKKDSYYKAQFNRLKSRRGPQKAICAVAASMLTAIYHMLNDGTGHQDLGAGHFDRRSTDVKARRLVSQLTKLGFQVQLQPLAVAA

SEQ ID NO: 167518 - protein, 356 aa, unidentified
MNQLTTVGLDLAKDVIAACALDLHGAVVQRRVLKREAFQRWAEQLPVCTVAMEACGSAHHWGRWFAARGHTVRLIAPQFVAAFRKGGKNDAADAEAVAIAARQPTMRFVPIKTIDQQTILAWHCAREGWKEERTALMNRVRGLLTEFGIVIARSSDRLLAELPRLTEDPRLPDAMQGLLLEAREQLASLHARLARCEAQITNHARSNTAAQRVSALLGIGPITSSALAATVPDTTTFKSGRQFGAWLGLTPKQHSSGGKTRLGRISLRGNVYLRTLLIQGARSTLQSALRADLSRASRLQRWIIELYGRRGYHKTLVAIANKHARIVWAILAKDERYDASAWQRHPMAQALPAASS

SEQ ID NO: 167519 - protein, 341 aa, unidentified
MEAKVKYCGIDLRSNNSVIVVIDEEDRVVGQKRLPNELARIVVFIVQWRDELAGVVIESTYNWYWLVDGLQAAGFQAHLANTAAIKQYDGLKHGGDEADARHLAQLLRLGILPTGTILPRDERAVRDLARKRIQLVRGRTTHILAIENIMARQFGARMTSNQIKRLSADDIDQMPIEADVRLAMNANLAVIGALDAQIEVLERRLRERVKPRPEYAFLTSVPGIGQALSTTILLETGPIDCFASVGNYASYARCVDSAHTSNRKKKGEGNVKNGDKYLAWAFVEAANFARRYCPEAKRFYERKKAKTNNIVATKALAHKLARACYHILREGRPFDVTRCFA

SEQ ID NO: 167520 - protein, 350 aa, unidentified
MTMVGGLDVHRQQITFDYVDDDGLVHWGQIRPATRKTLRGWLAEHFRDGDADFALEGCTGWRYVSEELAAAGLGVHLGDPAETAALRGRKKRAKTDRADARLLRTLLVEGRFPESWIPPAHVVEVRTLGRLYCTLMDERRAWQQRIHAQVFHQGCPPIRALLTRAGREALAGAELSAAGRQYVDTALRRIDELSAEIDPLRTQLISFARRQPGCRALQRHYGVGWLCAVIIWAEIGDARRFSSSDQLVRFAGLDVTVYSSDAKRAPGHLSRQGSPELRWAAFEAAKSAARRGSPDHGYYQKLAAKKDGHNGKNPTLAVERKILRRCYHTLRELGDAALALPDIRPQEVAA

SEQ ID NO: 167521 - protein, 349 aa, unidentified
MNNISVIAVDLAKHKFQVHGYGPQDEQRFAKTLTRAAFEKLLREQPPCKLVMEACGSAHFWSRLALELGHQPAQLPAQFVKAFVIGNKTDRNDANAIHEASKRPNVRPVPVKSVEQQDAMLPHLTRQRLLKTRLELTNQLRGVLRERGIAFAKGDAALRRGLRDLRDAEPTRELSPRLLAWVGQALEEWTELEARLSGVERQLQQDYRDSPRCRQLGELPGLGVLTATAVQARVTSVDSFPDSRAFASSLGLVPSEHSSGEKQRRGGIHRRGDPYLRLLFIHGGRSVVQSVLRKQRAGIVLDVFEQWVLGVYQRRGYNRAAVAVANKNARIVWALLKTGEAYRKPPLAA

SEQ ID NO: 167522 - protein, 440 aa, unidentified
MAIAKLVSVCDDTLPRNAAPRGPFPHVWESKERAMNSPPATAPRFVGLDVHKGSVVVAAIDAAQQVLLPPRRVPRERFVAWAEAHLTPTDVVVLEATTDAWQVHDELRPLVADVTVAHPLLVQLIAATKVKTDGRDAVHLARLLAAGLIPAVWVPPVEVRELRGLLSHRQRLVRQRTQARNRLHAVLHRHHLAPPEGALFAAAQRDWWAALPLGATELLRVRQDLALLASLDTLVGEVERELARLSTVEPWASQAAFLLQLPGIGVVNAMALLAAIGDIARFPTAKKLVGYAGLGAGVHQSGQTRRTGGITKQGRRELRAALVEAAWVAVRTHPRWRAVFTQLEQRRGSGKAIVAVARKLLVVAWHVLQAREADRHADAAQVARKFFSWSERVGKVARGGESAGTLVRRELTRLGIGANLTRVTRGGQVCRVPPASAATG

SEQ ID NO: 167523 - protein, 414 aa, unidentified
MRVIHERCAGLDVHKKTIVACVLKSEGKEIRTFSTMTEDLLRLSDWLQECGCRVVAMESTGVYWKPVYNLLEAADFELMVVNAQHIKAVPGRKSDVRDAQWIAELLRHGLLRPSFIPKRDQRELRELVRYRRSIVEECSREANRIQKVLEGANIKLGSVASDVLGRSGRDMIAAICEGIDDPSVLAGMARGRLREKTDDLLKALRGVIGPHQRFLLRKQLSHLEHLEALVSQLDTEIEARLSPFVKIVELLETIPGIGRRVAEDLISEIGTDMSQFPTDRHIASWAKICPGNRRSAGRAKREHIGGGNPWLRSTLVEAAWGAAHSKNTFLATQYRRLRGRLGERRAIIAVAHSILVIAYHVIKEGKPYRELGANFYDEQRSQQAVVRHLTHRLEALGYEVALQAKEDHPQATAA

SEQ ID NO: 167524 - protein, 382 aa, unidentified
MQTIDTINPTILLAIELSASTWLVAARVPGLEKPRLHRIDGGDTAAFLALISSLQARAARGLDAAIDVVCCFEAGRDGFWLHRLLAAHGVVCHVLEPTSILVNRRARRATTDRLDAEGMLRVLAAYLRGDHQACSMVRVPTPEEEDAKRTHREREKLVQERLRIENRIEALLFTQGIRKRPSLRSWERDLAVLRTGDGREIPRHLRAELDRLRRRLVMTLELIREVEAERDQAAKTKPQDQAYHKIAALSRIRGIGENFAAVLTREVFYRSFDNRRQIASYVGIAPMPYQSGGMDRDRRISRAGNPRARTTMIQLAWLWLRYQPGSELAEWFRERVGPLAGRTRRIAIVAMARKLLIALWRYAETGVIPAGAEIRAETTVAA

SEQ ID NO: 167525 - protein, 337 aa, unidentified
MTGGVDTHADAHVAAALDGIGGLLGVQEFPATPAGYARLLGWLQGFGTVGLVGIEGTGSYGAGLARHIAAAGIRVVEVDRSDRQDRRRQGKSDPLDAVSAARAALSGRASGAPRGRDGQVEAIRALMVAKRTARAQRTQTINQARALIITGPDDIRARFTGHAPAGLVAELAALRPRPGSMVRYHTLLALRELGRRAEFLDAQLERLDELITPLVTARAPGLLRLYGVGPDTAAMLLIAAGDNPSRLRSEAAWAHLCAAAPIPASSGKTQNRHRLNRGGDRQANHALWRIVITRMGSHPPTRAYVARRSREGLSKPEIIRCLKRYAARETYRYLRLR

SEQ ID NO: 167526 - protein, 344 aa, unidentified
MSEAIIIGLDIAKHVFHAHGADERGRAIFSKRISRGKLLDFFAAQPNCTVALEACGGAHHWARQLTQLGHEVRLIPPAYVKPFVKRQKNDAIDAEAICEAAQRPGMRFVAVKSEQQQAAGLVFRTRDLLVRQRTQLINAIRGHLTEYGWIAPKGPSHVATLADLLEEEEMASSLPEAARAMFRLMLDLLAGLDGKIADLDKEIARRAREDEVSRRLMTVPGIGPISATAIAALAPPAETFAKGRDFAAWLGLTPLQRSTGGKRKLGATSKMGERTLRRLLIIGSSAVVLQASKRGAPKGSWLEQMLARKPRMLVTVALANKMARIIWALLVKQENYRAPVAAKA

SEQ ID NO: 167527 - protein, 318 aa, unidentified
MNTKINQSINVGVDTGKTQLDIHIRPLDLFFSVENNDKGIKKALKTIKSHSPERIVIEATGRLEMPFVLACAEAQLPIVRANPVHIKRFAGAIGRRAKNDRLDAELIAHYGEAIKPALTVIKLKNIRLMSDLVIRRNQLLSMQTMEKNRIQILPASLHPTIKPMLTTIKNQITKLEEKLVKLIEDSPEYQAKNTILQSVPGIGNIAAASIISNVPELGYITNKQAASLIGVAPITRESGRYKGKRVIQGGRAQVRTVLYMAMMSAMQCNPIFKATYARLLAAGKPKKVAIIACVRKMVVTLNSMLRDGAMWDENTAKN

SEQ ID NO: 167528 - protein, 403 aa, unidentified
MFVGIDWASRAHELCVVDEEGAVVARFGFAHTERGIIEALERLTSFASPAELPVAIERPDGLLVDRLLEAGHPVVPIHANAFHAARPRWEGAGSKSDPGDAYRLADLLRTDWHRLRALQPLDAATRELRALVRLRDDHLAARVAATNQLAALLGEYWPGAAAIFGRLDSEIALSFLERYPTPASTLRLGEARLAGFLRRHSYSGRRSPAELLERLQAAPQPSQLLDSDVVAGLVRAQLRLVRTLLTTIAELERAIAASLAQHAKAQLLRPLPRIGSISLAQVVAEVGPLLERTANADQAAALCGAVPVTKRSGQQRGVCFRHATNAKARKALTLYADNSRHASPWAEQIYRDARARGCRHPHAVRILARAWLRVIWACWNTNTTYDPARRRGRDRHMQPVTLT

SEQ ID NO: 167529 - protein, 413 aa, unidentified
MDILYTSCAGLDVHKDSVVACVRRLDSKGKVRPQTRTFGTMTGPLLELADWLAELGVTHVAMESTGVYWKPIWNLLEGLFEILLVNARHIKQVPGRKTDVKDAEWIAQLLQHGLLRGSFVPATPQRELRELTRQRRQLIQAKASVANRIQKVLEDANIKLGSVASDVLGVSGRDMLRAIIAGEDDPQVLAEMARRKLRDKIPQLRLALHGRVTAHHRFLLQLLLEEVEQHEAWVARLSERIAQVLPAPFAEAVQRLATIPGIDARAAENILAETGIDMSQFPSDGHLSSWTAICAGNHESAGKRQSGRTAKGNRWLRATLVQCAWAASHTKGTYLAAQYRRLAGRRGKKRALVALAHTLLVIIYHVLKERTTYHELGPDYFDRLDTERLTRTLVRRLERLGHKVTLQPQQPAA

SEQ ID NO: 167530 - protein, 415 aa, unidentified
MASDWSEAVIFVGIDWAEEHHDVHVMNPDGQPLGRARVPEGIDGIARLHALVADHADDPGEVVVGIETDRGLLVTTLAAAGYQVYGINPRAVDRYRDRHAMSGAKSDGADAKVLADLVRTDRHNHRQVAGDSDLAEAIKVTARAHQNLVWARQRQVNQLRSALREYYPGALATFGTDLAHRDVVAVLVKAPTPELGRRLSTAQIAAALRRAGRVRNVDARAAAIRDGLRAPQLAAPDVVADAYGTSAKALISVIATLTAQIDELESALADRFEQHPDADILRSLPGLAVILGARVLGEFGDDPNRYTDAKARKNYAGSSPITKQSGSRKLALARYVRNRRLADAITLWAFSSLQSSPGARMLYDRRRAAGDTHHKALRALSNRWVGILHGCLRHRTPYDEHIAWGHLTDNLPTAA

SEQ ID NO: 167531 - protein, 375 aa, unidentified
MNNNNTLYVGLDVHKESITVAYAINSESVELMGKIGTSPTDIQNLCKRLRSKSSQVSIVYEAGPCGYGLYRRLVKSGFDCMVCAPSLIPKKQGERVKTDRRDAIRLVRSLRAGDLSAVYVPGIEDEAFRDLARAWASARDDLRHARQRLKSFLLVHGVHYVGRADWGPAHRRWLSKYSFESPWRQLAFDEHRRTIEDRQAQCERLESALKEAVTEWRLYPVVEALQAMRGIQFITAVGLISELGDLTRFEHPRQLMSWFGITPSEYSSGGSRHQGSITKAGNSYARKLLVEAAWSYRHPARISPAIQKRQENLPRPVIDRVWDAQLRLCKRYRKLQAKGKNVNITIVAVARELAGFIWDMGRIAMSVAQQPQCHK

SEQ ID NO: 167532 - protein, 343 aa, unidentified
MQAITTLGLDIAKSVFQVHGIDAEGNVVVRRQLKRRYLLAFFQKLPPCLIGIEACASSHHWSRELQALGHTVRLMPPAYVKPYVKRHKNDATDAEAICEAVTRPNMRFVATKTPEQQSCLTLHRTRHLFIRQQTSVINAIRAHLAEFGIVAPVGRHGVEQLLGVVSDANDKRLPDVARACVAALGAHLQRLKVQILEFDRMIRAWHRSNEVSRRLDDIPGVGPALATALVASVADPMMFRSGRDFSAWIGLVPKQNSSGGKDRLGNISKRGDRYLRSLFTTGALAVIRYAKIHGTKHRPWLTALLTRRPTKVAAIALANKIARMAWAMMARGERYKEPAALAA

SEQ ID NO: 167533 - protein, 380 aa, unidentified
MSTIRFLGLDVHADTIAVAVAEPEGEVRSLGTIPNRMESIRKLVAKLGPAKQLRACYEAGPCGYALYWQLTALGVACQVVAPTLVPVKPGDRVKTDRRDAAKLARCFRAGDLTAVWVPDADHEALRDLVRAREDARQDQLRARQRLSKFLLRHGRRPPEEVRKSWTLKHMSWIKTQVHFEQPALEATLLDYVHEVEHMTERIQRLDQAIREAIQKAPPAMRAVVEALQALRGVAQLTAVTVVAELGSLSRFDSPRKLMSYSGLVSREYSSGNRVQRGAITKTGNAHLRRVIIESAWAYQHRPWVGGNLLKRQQGLDPEVKAIAWKAQHRLHSRYKKLAARGKNKPQIVTAVGRELLGFLWAIAVQTEAKFQAKPKAAMRN

SEQ ID NO: 167534 - protein, 496 aa, unidentified
MQSITAPIDSVAVIRAKPDPTSLSAAPPAPSIETARSEIYRHAPERVLLVGLDVGKDVNVMYMRTLAGLEVVPATKLATLTSGYTMFWHLVEQCLTSGVYTLVLIGHEPTGVYHEAWSHQLAGALGTFTAEHPAGPLIRYRLLHPTLVKRARQNKSHRTRKSDAIDAAAMTDLLAEGGGRAVTALADAEWEMRHRAGALNSLIKEQKRQAVHLLRTFDRLWPGALGNTAAYARTHPDLPPLHHLVDSKPLERQRLRLLLTYAITPAQLAAWGVDGIRDFYHSHDASCGEKTARHILQVAQQSLLPPPFASDCMAQQLQSDFTRYTTLEGDIEHLELRLTELLPHTPAAVLTTLPGVSPILAARYLAALGNPARFESAQQIWAFAGLDPVQADSGNRRFSGAISHRGSPFLRYVLYQMGFLAAQHCPDCARLYYRTCKRGKAKTIAILHVANKVNRILWHLLQTQQPYRSPLSPAQETKWRQYVQQQRRRTKHGAAG

SEQ ID NO: 167535 - protein, 399 aa, unidentified
MLIQPNAPVAETDCADIFVALELSKSKWLVGVGAPWKWAISRHQVPGGDLCALLERLAGIRGEAEKRRGGPVVVHLCFEAGRDGHWLYRALKLEGYEVYEIDPGSVAVARRSRRAKSDGLDVEMLVRTLARLVRGEADACRVVRVPSEEEEDAKRPHREYERLDKERTGHRNRIKGLLFAQGIRDFDPTALDWPARLVTLRILPNLRAEIERECRRLAAVTGDIAQIEAEMKARIVLPKKQAARARGAVTAPPTASLTTMPADMGTKIKHLYRLKGIGPHFSTVLGCEVYYRHFRNRRAIGQYLGTAPSPFQSGDMMRDQGISKAGNRRARKAMVELSWLWLQYQPDSALTTWFKQRVGDQKGRVRRIAIVAMARKLAVALWRYLEIGLVPEGAVLKRV

SEQ ID NO: 167536 - protein, 361 aa, unidentified
MGPTVLVGLDVHARQTHATVLDRATGQVSACKLHGSPEEAVLPFLARLGSSIVAVYEAGPTGFGLAREAGRRGLDVRVIAPGSIPRAPGDKVKTDKRDSLRLLRQLVAGELTFVFVPTVADEHFRDLVRAIEDLRGELMRARHRLSKLLLRHGHRYQDGKAWTLKHAAWLRSVHFDDPCAQVTLADYLASVGLLSTRRAALIETLQAQAPSCSHAASIVRLRCFRGIDTLSAAGVCAEISGFERFQRPSMLSGFLGIVPSERTSDRIRRQGSITKAGSEHARRLLVEAAHHYRHQPAVGAELARRQAGQDPRIIEIAWRAQRRLHGRWQRLYIERRKPASLVAVAVARELAAFLWEAATLN

SEQ ID NO: 167537 - protein, 338 aa, unidentified
MELYAGIDLHSNNSFSVVLDAKDRVLYSKRLPNDLNTIVSALESCDGAIRGVAVESTYNWYWLVDGLQGAGFKVHLVNTAAVKQYDGLKHSGDQADARHLAHLLRLGILPEGYIYPREERAVRDLLRKRSQLVRTRTSQILSIQNLLARNLALSVKGNAIKRWDDEDIEALALLPEQTLAVQANVQILRCLDGQITTLEAAIVSRARLRQDYRALRTVSGIGEVLALTIALETGEITRFAGPGNFASYARTVDSRRESNGKKKGEGNAKCGNKHLAWAFVEAANFAVRYDERIKRYYHKKRSKTLAVVAIKAVAHKLARACYHVMRRGEPFDVTRAFG

SEQ ID NO: 167538 - protein, 350 aa, unidentified
MTEAYDGRQVVGMDLHRRRSVLVRMTADGRRLETARITNSAAELRREIAKAGEHPKVVLEATYGWYWAADELAAAGAEVRLAHPLGVKAFSYRRVKNDAKDAGDLADLLRMGRLPEAWIAPPEVRELRELTRYRIKLVRLRSSGKAQVHAVLAKLGIPVTCSDLFGTWGSAWLDGLALAQPYAGKVASLRELIGWLTTEIGLLDAVIADLLGSYRPYYAVRALPGLGPVLAAVAVAEIGDISRFPSPGHLCSWAGLTPRHRESDLKVARGHLTKQGSPILRWAMVEAVQHRPDGSPPRELKDRIVARRGAQARNIAKAAAARKLLTCVFYALRDGQVRSLSARSRADEAG

SEQ ID NO: 167539 - protein, 341 aa, unidentified
MKKLFIGIDFSKGKFDVAIISAEGLVETSARVFNEFKNSVSGYKQLVKWVDKNANGIDSSMWLFCGENTGEYSKPLCNHLYGKGYDMWLENAKSIKDASGIRRLKSDRADAAMIAEYAMRNHDKAVVYEPLSESLAQLREYYLYRQMVVRHRCSFEARRGEKRLMMEKSAAKTVIAQSGKHIVSELNKEIAKIDRKIASLIESSDELSEVYRIVTSVPGIGTQNAVCLMVYTDNFRKFNYDARSIACYYGIAPFGQDSGTSVHVDPHVHYMANRHIKAMLTQAALAAVRFNPIIAQYYQRLIGRGKKMPVAMNNVKNKLLHIVTSMVKNKQVYKPEYRFSA

SEQ ID NO: 167540 - protein, 353 aa, unidentified
MWIIGCDFHPRYQQIAALDQTTGEIVERRLSHEGKEAVAFYEALPRGAVVGMEATCPAQWFERLLDRCGHELRVGDPAEIRASVVRKQKTDTRDARHLLELLLAGRFPRIWVPTPVERDLRQLLVHRHKLVGWRTQVRNQLSALARNQGLLPRTRFWTRQGRQQLESLPLDSWASRRRQDLLRMLDQLDPQIEELNRQVEAEARQRRAAVELMAEPGVGPIVSLAFVLTLGTAQRFPRGKQVASYLGLNPSEHSSGGTQRLGHISKQGNGMLRWLLVEAAWVAARKDPDLERVYKRLAFRRGRKIAAVAVARKLAVKLYWRLRKWEEEKSAQSAPLQGCSGSGLVNAISSPSA

SEQ ID NO: 167541 - protein, 350 aa, unidentified
MQIVSALDVHRRQITFRTLELASGESRRGRISPVAREPLREWLQQFVGAQAEFVLEGTTGWRFVVEEIERAGHRARLADPAETAARRGRKQRAKTDDSDCALLLRLLLAGELPEAWIPPAHILELRTRVRLRKTLIDQRTAWLQRLQAQLFHQGVAAGLKPRTLAGRRELATVDVSPAGREVIELCSRMLDQLDRELAPIDRALGSFARRQPGCRALTDHLYGVGAVTATAILAELGDARRFQSSDDAVRHSGLDVTVWQSDRKRAAGHLSHQGPSLLRWALFEAAQCAARQSSPDHLYYLQIASRLDHNRACLSVARKLCRRAHHILRELGDNALAPPSTARTIVGAAA

SEQ ID NO: 167542 - protein, 454 aa, unidentified
MGKLIERCAGIDIGKRFLVCCVMTGAAHEEPRSETRRFDTTVPGLKRLRNWLHEERVTDVVMESTGSYWIPVFNLLEGHVRVVLANPEEVKNRKGHKTDRKDAGHLADLLRHNHVKSSYIPAEPVRQLRDLTRRRVQLTQDATRERNRVQKLLEQVNVKIGSVLTDVFGVSGLHMLLALLDGRAAPEEIAGLARGSAKRKTPQLIEAIEGNRMSDHVRFLIRGCLRHLACLEEEVEELDTEILRRMQLSTFQKAFTLLQTIPGVGQLSAATILAETGPDLDSFPTVEQMASWAGLCPGNRESAGIQKGPQTTHGNPYLCTALVQCAWAATRKRDSVFRSRFQRLAPRRGEKRAIIAVAHHMLIILYCMLKRGVPFLGAEQAPKQRRRERRAHHHLRCLKASRFLGGDQAEFRGYPARHNQPVSVFGTTGMKQRMQNSYGKGLAIRSAPSLALLP

SEQ ID NO: 167543 - protein, 308 aa, unidentified
MTSNIQYIAIDIAKQTLQVQSDLKSLSLNYDQEGLKQLRAFIKQHEKPMIIAEATGGYERPLMSMLFKYNITVALINPRLARAFAVSEGIKAKTDPIDADMLLRFAKEKSPRPTEYIGAEREELGALMDRRSQLTEHIAKEKNRLDKSPKSICGSIKKMIRLFDKELALIEARITKLINSNEQMHAQSKLMQEVCGVGANTAWSILAYLSEITSLNRNQLVALAGLAPYNRDSGKYKGKRSIQGGRAKVRATLYMAATSASQHNAVIKDYYQGLKARGKPSKMALVAVMRKLLIHLQAILKKQQLVLD

SEQ ID NO: 167544 - protein, 338 aa, unidentified
MEHFVGIDLHSSNSYIAIIDDENRRVFKKKVKNDLENVVQVLEPHRKQIKGIVVESTYNWYWLVDGLMDTGYKVHLANPSAIKQYEGLKHSDDVTDAFHLANLLRLGILPEGYIYPKEERPVRDLLRKRLQLVQQRTALILSFENLLTRNLGTRINVNEVNKLTEEDVEDIFQQEYLVLSGKASIATINFLGTRIQQIEKAVQKVAKLRREYKLLMTVSGIGKILALTIMYEAGPIERFAKVGNYASYCRCVGSKRISNGKQKGKGNRKNGNKHLSRAYVEAAHHARWNYEYVDRYYQRKMAKTNNVVAIKAIAHKLARACYYIIRDQKEFDPGKLFV

SEQ ID NO: 167545 - protein, 372 aa, unidentified
MASIIYVGMDVHTTNFTFCCYTADSDRGFAVAQTEPDYRQVIKYMERVQKQRGEECKFVCGYEAGCLGYSLYHQLTRCGVDCVILAPSTMHQEKGKRIKTDRRDAENIARCLAFSLYSPVYVPTTEDDAVKEYIRMRDDIKADLKRVKQQIIAFTTRHGFAFDGKSYWTQKHLKWLETLVFEHPLYKETLQEYLILYYMLDEKVAVYDTRIEEMSHLEHYEENVQKLCCFRGVAAHIALSLLVEVGDFQRFRSAKHFAAYLGLVPGEHSSSDKQIRTSITKAGNTHLRRLLVEAAQSYNRGAIGKKSAALKARQGGNPAEVIAYADKANERMQRKYYRIAFKSRHNIAKTAIARELACFVWGMMTGNISNAA

SEQ ID NO: 167546 - protein, 339 aa, unidentified
MKVTVFGLDLAKRVFQLHWVDMETGEIGRQQVKRAQLAEFFANRTPAVIGMEACGSAHYWARKFAAMGHDVRLIAGQFVRPFVKTNKTDVADAQAIWEAVQRPGMKFVSVKSEEQQSLLMLHRMRQQLVKMRTMQIQQLRGLLYEFGADLPQGRQAGMERIPVELAKLEGTLPRMAVEAVEQQIKRIEGFDKDIAELEKKLSAWKKENVAVKRLMAIPGVGILTATAAVAVIGNAKAFKNGREFAAYVGLVPRQSGTGGRVKLLGISKRGDTYLRTLLIHGARSVIQHAKEPGPWLTNLLARRPHNTAAVALANKMARTIWALLAHERVYEKDYVATAA

SEQ ID NO: 167547 - protein, 414 aa, unidentified
MSEIVNKSCGLDIHKHFFIATILSISGEKQQQRFARDDDGILTLKNWVISEKCDVVACESTSDFWVPIYDSLIKHLPVIIGNARDMKAFTHKKTDKIDSEVIAQLALNKMIQASRVFPKDHREFRSYVRLRHKLVQKRTDIKNEAHAILAPEMFNLNDVLADIFGKNGISILSGITSGKSTDQIIESLSPNVRKKGILIREILDREISQSAAVRLQVCLDLIKHLDDEVKSLEREIFNYAYGEHKREMEILMSVPGIGELGAATLIAEIDNFKDFSSGDKLASWLGVVPNVYQSADKSYNGKITKRGSKEARWILTQIAQAAARKKNNKLKEFFNRKKKSIGHAKAIIALARKITTIIWHLITNDEMYEDETGYQKGEIQKRKIVETEIFSVDERIKIISGIIAIMGKEEGEST

SEQ ID NO: 167548 - protein, 340 aa, unidentified
MFHVGLDIHTKRISICALDEKGQVVHRSQVRGIQDMVRVLASLPDRFEVCYEASCGYGHFHDLLRPLATRVVVAHPGQLRLIFRSKHKNDRNDAERLAKLLYLGEVPAVHVPALEVRTWRELINCRSQVIAKRTRAKNTVRALLRGAGITPPQHPGLWTKKGLAWLRQLELPTASQQLRRDLLQEEIEGLLRQVRRLEQQLNRQAQQTPAVARLRSIPGVGIRTAEAVTAFLDDPQRFGNAKAVGSYFGLVPCQDQSGDKNRLGHITREGAPVVRQLVAEAAWQALRRSPAVRAYFERVQRGDPQRKKIALVATAHYLVRVMWALLKRGTVWQESEALAE

SEQ ID NO: 167549 - protein, 327 aa, unidentified
MAAVVNHVGGVLGIESFRTTQIGYRQLVSWLQSHGELTLVGVEGTGSYGVGLARYLARAGIDVVEVDRPNRQTRHRKGKSDPIDAVAAARAALSGTASGIPKRRDGNVEAIRVLMIARRSAVDTRIETLNQLRHVVFTATSEIRTKFTGLTAISVANKASALKPRKSDDDPVRHMTLVTIRILGQRIQYLRQETKHLNRLIRPLIRQTAPGLLEVYGVGFNTAAKLLVAAGDNPQRIRSEAAWAHLCGVAPIPASSGKTTRHRLNRGGNRQANSALYHIVLTRMKHDQATRNYVARRLGEGKTMGEISRILKRYAAREVFKHLPRPT

SEQ ID NO: 167550 - protein, 402 aa, unidentified
MRVTFGIDVSKATSEIAIVVNGQAVSHFKITNNQPGFNKLQKSLNDFQNPEIVFEATGLYSRRLRVFLDDYGYRYTQLNPLASKKQLDRLRPNKTDKNDALHLAETQFEIRRALTYQQDPIYQQLLDWSRFYDEITCDSVANKNRLHKALQCTFPEAEGVLNSPTGHLYWHLLQAFPIASMVRQSSSMELSQHIRKFCQLSVPNSQALAARLRQLASESYPCVGEDSGVVMQVRYLATELLRLDDLKNDIIQKMARLAQDLPELAILESIPGISVNTAVRLIGELGDIRRFTSANKLNAFVGIDLRHFESGEYIAVDHISKRGNPYARKILYRTILNMMVSARTKPSHINNYCRERKKQSSGKADFKKIAMGAISRLNRTIYHLILNNQKYDYLKTRPKAES

SEQ ID NO: 167551 - protein, 373 aa, unidentified
MVEHTTTYVAFDNSKETLAVAIADGDARGEVRFWGTIANRAEAVRKLVARLAAKHPALSFCYEAGPCGYGLYRQILSLGHPCTVVAPSLVPTKPGGHIKTDRRDAITLASLFRAGELQAVWVPDADHEAMRELIRARLTAMQEVRRSRQLLLSFLLRHDRATPTRHHWTRAHRSWLARQSFAHPAEQIVFEELIQRIEVACARQDRHEDAIRSLLSAWSMAPVVTAIQALRGVALMSAVTLAAEVGDFGRFATPRQLMAWLGLVPKEHSSGSKVARGNITKAGNTRARRVLVEGAWTYRLPARMGEDITRRNDGLPEAIRAAAWKAQVRLCTRYRRMQNTGKPQKIIVVAIARELAAFVWAISRMVQPAATQA

SEQ ID NO: 167552 - protein, 403 aa, unidentified
MSIFVGLDWGGSSHAVCIVDATGRSLEHFVVAHDRDGLDRLVARLRRHGPPEETPIAIERPSGLLVDVLVAAGFLVTPVHPNIVKACRPRYRAVAAKSDPGDAFILADILRTDGHRLTALKPQSDAIKALRALVRGRDDLVATRLVLANQLRALLESFWPGAAVLFADIASPIALAFLQRYPTPEAAHRLGEKRMAAFLAQNQYCGRRHAGDLLARLRAAPAGMAAEAEADAKGELVRALAGTLESLVAQIARLSSRIEHAVAQLPEGRIVMSFPRAGKICAAQITAELGDVRARFQSEDHLAAEAGVAPVTYQSGKSRGVGWRWACNKRLRAAVTCFADNSRHASPWAANIYRQARLRGCRHPHAVRILARAWLRILWRAWQDNLPYDANKHLAAKAFIANG

SEQ ID NO: 167553 - protein, 347 aa, unidentified
MRFYQVKHRHYCGIDLHARTMHVCVVDAEGRKLLHENVPASRQALVECVAPFREDLVVAAECIYCWYWLADACAEEGIAFVLGHALYMKAIHGGKTKSDRIDSEKIVQLLRGGLLPQAYVYPREMRATRDLLRRRLYLVHQRAELLAHVQLTHHQYNLESPGARLSYRANRAGVAERFLEADARRSVAIDLGLIEQYDATIRSMELHLEHRAQEQRGEDFLLLQTWPGIGRILALTLLYEIHDVARFAKVQHFCSYARLVRCAHESAGKTVGHGGKKIGNVFLRWALGEIAVSSLHHSDAAKKLHERLVKKHGKGKALSILAHKIGRGIYFMLARRHAFAEEKLMAA

SEQ ID NO: 167554 - protein, 418 aa, unidentified
MTDDVSWFVGIDWASQKHRVCLLDAEGRCVGERDIAHGGSGLSELCAWLLEKTGVEPGQIAVAIEVPHGPIVETLLERGFRLYAMNPKQVDRFRDRFTVAGAKDDSRDAHVLGDALRTDRHALRRLSVEDPVVIELREWSRMADDLQQERTRLANRVREQLWRYYPQALELADDLAADWFLELWQQIPTPAKAARISEKTIARFLKAHRIRRFDAAAALRILRQQPLSVAPGTVEAASTHIRTVAARLRLVNRQIKEAHAKLDELCAKLEASAESEPGQTREQRDVAILRSSPGIGRIILATLLAEAPEPLRRRDYHALRALSGVAPVTRRSGKQCFVLRRLACNKRLENALYHWARVAMQHDPISRRRYAELRSRGHGHARALRGVADRLLYLLCTLLERQTLFDPDYKTSPLAVAA

SEQ ID NO: 167555 - protein, 361 aa, unidentified
MTIVEPVSVCDVTGGVDTHLDVHVAAALDGIGGLLGVESFETSGAGNDKLLAWLRSFGDVAQVGVEGTGSYGASLARSLRAAGVAVVEVDRPNRQARRRTGKSDPADAVEAARAALSGRAQGAGKTRDGNVEAIRALVVAKRSARSTRIKSLNQIRHLGFTAPDELRDRLRGVSRDHLGGVAAALRPRLGGDPVMTATKTAMRILGRRVLALDEELATIDALLAPLVATTAPSLLEVHGVGVDTASTLLVAAGDNPQRLRSEAAWAHLCGVAPIQASSGKVTRWRLNRGGDRQANGALWVVVITRMSSDPRTRLYVQRRLAEGRSKPEIIRILKRYVAREVYRHLPRGSSSRGGGSGSIIG

SEQ ID NO: 167556 - protein, 378 aa, unidentified
MKKGRSNSDKVVVSSSTNPKSLKERPMNQIKYIGMDVHKATTVIVVLNTAGKAIAEAVIETTSSSIVDFLKSQRGTLHVTLEEGTQAAWLYDLIRPHVANVVVCDPRKIPKQGTKADKIDAKRLAELLRTHALTPVYHGEQSTKDLKERIQSYTSVVEDGTRIKNRLKALFRGRGIDCSGSSIYNPEERKQWLLKLDTSAVRARANRLWEELECVERLCEEAEQELMAEARKHAAFKILRSIPGIGPVRAAVILGVAGTPHRFRSKRQFWTYCGLSVVTETSSEYTVVNGRVGRSKKRPLVRGLNRNYSRTLKGTFKSAAKTTASGPWKSHFEFMVANGKRESLALLTLARKIASITLALWKKGERYDQTKLKLLHAA

SEQ ID NO: 167557 - protein, 341 aa, unidentified
MNYVGVDLHKERSWFYVTNEQGKRIDSQSIANLPEVLRAYYETLPRPFTLAVETTYNWYYFVDLAEEYADKVYLANSYELKAFAKRNKKTDKIDARLIADVLRKGYLPTVALPDRQVRAIKELLHCRMGIVGERTRNTARLKSLLDRHGQMSTGDYTSLKCLNGIPVDKLSEPCRIAAENWIEQIVALNAREYRIGRQLQAIAESDNDARNLESIPGIGSFGALLIKSEIGDISRFATFNRLCAYAGLAPRTFQSADKEYHGPLNKNRRKHLQWILIEGSHHFSKSSAERTEKYEAIAKRKAPNVARVVLARDLLKIVYRVLKDKRPYYTRTVASLALNGA

SEQ ID NO: 167558 - protein, 478 aa, unidentified
MRYIGMDVHRDFCEVAIMEADGRVRSAGRVASTFDELTLFAGSLAPDDVVALEASGAGLIAEIIEPHVAAVLVANTRKLPQISKAKAKTDRLDARTLARLAGPGFLETVWAPDERTRALRRLCARREALVRARTRAKNEAHAVPARNLCGRPPVSDSFGTKGRVWLAGLELPPDERLTLDGCLRQIDFLDGEIAALEAALAVEALGSPEILRLMTVPGVSLHTAAAFMAAVGDIRRFPSARQLVGYLGLDPRVRQSGNGDARHGRISKAGSSLARGMLDEAAWSVAQTPGPLRAFFERIRARKGPQVAATATARKLACLFWCLLTRQEDYAYARPSMTRAKVRQLELAAGAPRRKGVRGIAGNKNAKTQEAERELARQAESAYRRTIADWTTAGPVRKGAGVTPGRASSRPSRGKAAIDTIANESADRHLTFIRRSRASTLPGRSHRARRRVRRPRSPRRRDSEARAARRRSRGCSSR

SEQ ID NO: 167559 - protein, 336 aa, unidentified
MSTHAAQAPMAVGVDVSKDELVVAELFRDGVFRHRSLNNTMAAAESYVSELAERGFDARVIVESTGHHQWPIVLAGADVGLDVRLLNPLQAAARRQGRVRKTKTDRVDAEILAEMAWTERKLPAPFTRSRAAIALRQQLQLLGQLERSIQQLQATLAAQREAAGRAGVAPPATLEGLEASLTGLKAQRRALQHESDALARELADRQIAAALTRLPGITAGCANMLASMLDPTAGRNGWVAFVGLDVSVIQSGKFDGRGKLTKRGMPYLRKRAYQAGWGAAMNTVAGRRYYDALRQRGRKHKEALVIIARKLLRAAHALAQNPDQKVDEERLFALPA

SEQ ID NO: 167560 - protein, 368 aa, unidentified
MPNLNIGVVTSGAHIRQSAVVTPLALVIKLGIDVHAKDYVVVRQVDEAVSQPAQRFNLEGLLGFVRRQVAVAQSVHSCYEAGPFGYVLHRQLSALGVHNLVVRPRDWSTYGERVKTDQRDASALCSCLDRHLAGNQGALAVVRVPSEAEEQARAIARQRQSLVRERVRLTLQGKSAALLRGHQLRGEWWRVSTLSKLAPDLPPELLTLLQRWQQVILLLDAQAQALTEQLEQAAPPELPCGLGSMTWEILSREVGDWHRFRNRRQVASYTGLCPGEHSSGASRQQGSITRHGNPRLRHLLIEAVWRLLRYNPEYRGIAKWRDQFTAVRVTQARKKKIVVAIARQLAVDLWRLGTGRTTPAALGLQIPS

SEQ ID NO: 167561 - protein, 407 aa, unidentified
MTKVFIGVDPHRLSATIEVVDHHETVLATGRFPTDKAGYAAMRKHVAPWPERTWAVEGCNGTGRPLAQRLLADGEHVVDVPAKLSARARLFDTGHNRKTDAHDAHAVAVVAVRTKNLRVLVQDGELDAMRLLVERREELARQRVQTVNRLQRLLSELIPGVAKKDITALQAKGFLASVRPRDAAGKTRRRIAVEHLSDLVALDKKIKSSTKELKAVVIARGSTLMDLPGVGPVVAARILVDVGDVARFADRNRFASWTGTAPLDASSGEQIRHRLSRAGNRKINHMLHIAAATQVRLDTPGRGYFRGKLAAGKTRPEAMRCLKRRISDAVYRQLVADANRAHRQDTDTDEGASPGGHCGASQESSAVDLPPHIDTSDQPLPGPAKPTLQPTPPRRKTTTKGALSHAS

SEQ ID NO: 167562 - protein, 476 aa, unidentified
MNSKTKRANNQVNSVMNVQEQREMVEKANRILSEMKSFTWRDLETQGKFSKNDKLSFISDDMLILGCDIGSETHYVRAIDTRGRELSRKALAFDNNAEGFQKAHDWAVQLAASNDKKQIVLGLEPTGHYWFCLAAWMVSNGISVVQVNPYAVKQTKELEDNSQQKDDRKDPKLIANLVKDGNYGMPYLPEKVYAELRRLSMFREQLTEDRNRSMNRLHREMKIYFPEYKDAFGKIDGAFCMAVLKEAPFPEDILKLGGEGIREIWHQAKLRGRGYSRAAEIVKYAETSIGLKDGTAAGREAVRWFAEKIMELDEELAEIENKLNEKCREIPHAENVLEIPGIGGKILSGILAEMGDISRFDDAKELQKLSGLGLVSCSSGKHKGETRISHRGRKRLRYWLFQAARSAVAHGEEYKWIHAHYTTRAGNALQKMQSLIVIACKLLRVIYTMLKTGKPYDPEKLLKDIRYPENVQTAAA

SEQ ID NO: 167563 - protein, 359 aa, unidentified
MESMEGCRHRVVGGVDTHKDLHVAAVVDEHDRVLGTSCFATTRQGYRQMLAWMESFGEIQRVGIESSGSYGAGLLRFVQRAGIEVLEVTTPDKHDRRRRGKNDDLDAQNAAHAAFARKRTVTPRSRDGMVESLRVLKACRKTAVAARRVALQMIHNTIVCAPDGLRDALRTMTRMQLVRTLAAWRPDLTAYRDVESAYRIGLKSLARRYLELHDEIADLDAMIGAIVADLAPELIARNSIGNTGAAQLLLTAGDNPERLRSEASFAALCGVSPVPASSGKTIRHRLNRGGDRAANSALHIIAIGRLRTDPATKAYVAKRIAEGHSKLDAIRSLKRYIAREVFHIIMRRHGEINQTRIAA

SEQ ID NO: 167564 - protein, 313 aa, unidentified
MSDHLPQTIGIDISKATLDAHAYPAGIDRQFANSAKGHKALITWLAKWPIERISYEATATYHRALEAALADWPCVKLNPERARRFAQATGTLAKTDRIDAMLLARMAATLQPPVRPAKTKEQAQLAELINARDGLVRDRTALKNREKNLTIAILKRQCKQRLDQIERHIEALDSEIASIIAADPALARRHEILTSIGGLGVLTANQLIATMPELGTLENKQAASLAGLAPVARQSGQWKGKSFIRGGRANVRQALYMPALVAARFNPDLKAKYQQLITQGKPAKIAITAVMRKLIVIANTLLKADRLWVKSPA

SEQ ID NO: 167565 - protein, 433 aa, unidentified
MLKLNYMSTLFVGIDVSSKTNAVYAMDFEENKYISSSFGNNQPGADKLVNMIAECMHKHKNLDTVLIVLESTSVYSVHISSFLSTSEVLMPYKPYVFCVNPKATSNYRKSYIGMEKTDPTDAYLIADFGRVGRTKKLEPWRGGQFIALKRLTRHRMHLSECITREKTYMVSNLYLKFSELQLLEGDDKPFGSLYGATSSAVLTEFLSPQEIIDMPEEELLTFLAGKSRNRISDLSKTSELLRKAARDSYRLDKCMYEPLNVSLASSFNCIHAYQKEIKLIEQAIEKCINGMNPNALLILQSIPGIGPIWASGILSEIGDITVFHSSDALAKYAGLYWPKGDSGDFTSEDNKMSKAGNPYLRYYLGEAANSVRKHIPEYADFYARKYAEVTKHQHKRALALTSRKFVRLVFGLLVKNQLYTGEKLDAEYNIKSN

SEQ ID NO: 167566 - protein, 424 aa, unidentified
MEERDEEKSIRAWIGIDWADEKHDVSIYDVASGKQEALIVRQNPEALQEWLGQLRCKYERGYVAVVLEQGRGGLLNALMGCEFLVLYIINPKSLSSFREAFYGSGATSDPVDAELMREMVRQNPSRFRAWRPDDVQTRSLRLLSEGRRDLVNQTTALTNRLTALLKGYYPQALAWVGAPNTAWACDFLEQWPSLQSLQISSRRQILRFYEKHPRAAIDLEEQLKQFQEARVLTQDEAVLESSVLMVQTLVSQLRLLLASIAEFDRKIATLFRKHPDRPIFESFPGAGAALAPRLTAAFGTDRDRFQAATEMQELAGIAPVTEKSGKKLFVHWRYACPKFVRQTFQEFADHSRRWCRWAKAYYELLKKRGKSHNAAVRALAYKWIRILFRCWKDRQPYQDEVYTKSLFKHGSPLTAFLVEAVEKP

SEQ ID NO: 167567 - protein, 340 aa, unidentified
MNTTQIGVDLAKSVFEVAVSHIPGRVHERHRLSRTRFRRFFADRAPTEVLLEACSSAHHWGRELQALGHRVALLPAADVARYRDGNKTDRADAKALLEAARNEAIDRVPVKSVEQQALSALHRLRQGYLQTRTARINALRGHLREFGVTIPLGAAQVLPRARAALAEERLPSYLRHALTEVLEEIATLQAKAAALQDQLDRLARQLPEASLLMSVPGVGILTATALLAFVGDIHRFRSGRDFAAYLGLTPREHSSALSRRLGGITKHGNSYLRMLLIHGARSALRAGHVAACPDDLRTWALALQHRKGHNIAAVALANKLARVCWRVWRDQRPFERRDAA

SEQ ID NO: 167568 - protein, 355 aa, unidentified
MSEKFNSEIAVIGIDIGKNSFHIVGQDRRGSIVLRQKWSRGQVEARLANLPPCLIGMEACTGAHHLSRKLQALGHDARLMPAKYVRPYSKGEKNDYRDAEAIAEAAQRPTMKFVATKSADQLDLQALHRVRERLVGQRTGIINQIRAFLLERSIAVRQGLHFLRAELPGILAKRTDVLSPRMLRVIEDLARDWRRLDERIDALSDEIMMLARQDKGCERLMTVPGIGPIISSAMVAAIGSGDTFSKGRDFGAWLGLVPKQMSTGDRTILGSISRRGNRYLRTLFVQAAWVVLVKIKPEGWERYGLKSWIEAAKQRLHRNVLAIALANKLARIAWAVLHKGRAFECVTNATASRPA

SEQ ID NO: 167569 - protein, 416 aa, unidentified
MSTMEWSEELLFVGDDWAEEHHDVELQDETGRVLGRAKLPEGVAGIARLHAMIGEHLGEDDDAKVVVGIETDRGPWVQALIAAGYQIYAINPLQVARYRERRSVSGAKSDPADAHVICDMVRTDRHQLRPVAGDSVEAEAVKVVTRAHKTLIWERTRHMLRLRHALREFFPAALAAFDDLTAKDALELLGAAPDPASAAALPTERIVAALKRARRHHAAAKAEAITTALRTEHLGQPAVVTAAYAAMVRAQVAILTTLNTEIKTMEEQVEAHFGEHPDAEVYLSQPGLGVLLGARVLAEFGDDKQRYADARARKNYAGTSPITRQSGKRKLVLARYVHNDRLVDALGLQAFSALRSSPGARAYYDQLRARGTGHRAALRQLGNRLVGILHGCLKTSTNYHEDKAWTPATQDQQIAA

SEQ ID NO: 167570 - protein, 345 aa, unidentified
MRPGSRFQGDENKVDCPFLNKFLMNKVSKIFGIDISKDTFDVMDSDGNHYQFSNNFKHFLKFLKLLDSDSHCVMEATGYYHYQLAYFLSEHNIRVSVENPLSIKRFIQMKLSKIKTDKSDAKMICLYGQQMDMKLWKGPSANQLECLQMLSALDIYTKQGTALQNKIQSHQVLSNPSKTVVNSLKRTLKSLQKEMVLIEEQLTDLVKSDHRQTLTKLQSIPGLGRKTAIMLLVVTDGFNRFENASQLCSYTGLTPVIRQSGTSVYAKPRISKIGHAKLRSLLFMCSLTACKHNKACREIFERITNKGKSKKLALMAVCNKLLKQAFAIAKSGLEYDATYRSVLKN

SEQ ID NO: 167571 - protein, 432 aa, unidentified
MVFIEPIAPLVDTLHTQCFHGFACAAPQDQVNRQRRTPAATAKLCVHRTKVVLAAESFVSFIDEMDSSPDSLGIDVPESVLGNRKEEPIMQNDTRIAVDIAKAVFEVAVSDRPGRVSRHARLRRGQFLEFFAQQPGATVVMEACGSAHYWARRIEQLGHRVILLPPHQVRPYVKRSKTDRTDAKGILEASRNEDIRPVPIKTVPQQVLTSLHRLRQGWMTERTARLNALRGLLRELGVFIPVGAENVVPALWALIEDADSDLPDALRPLFAAGCQEIRKIEARIKQVERQLEALAEQLPAVAHLLSIPGIGLLTATALVAFIGDVRRFPSGRHLASYLGLTPREFSSGLKRYLGRISKRGDGYLRMLLIHGARSVLHHARTQQQDRFRIWAHKLSTTHVHNKAAVAVANKLARIVWAVWSRQQPYAQQQPAA

SEQ ID NO: 167572 - protein, 289 aa, unidentified
MASMTRTTVGVTGGVDTHGHSHHAAVIDHVGRHLGDRHFPASPMGYRALAEWLQGHGEVDRVGVEGTGTYGAALARHLREAGILLVEVDRPDRRAQRAHGKSDPLDAYSAARAALSGAASVVPKLRDGPVEAIRALRVARSSAVKARSQATNQIKSLIVTGPAQLREQLRHLPTLKLIAACARLRPGHQLGDTEHATKTALCRPARRHQQLSEEIPEADQELHQLVHQVAPALLALPGVGPEVAGQMPISAGDNLDRIKPEAAFAHLCGAAPIPASSGRTHRHRAQPRW

SEQ ID NO: 167573 - protein, 376 aa, unidentified
MGHHSEAFIRIDTSKLKNAVAIAEGGRDGEVRYLGEIATNDTATRKLVAKLAGKYEALTFCYEAGPTGYGLHRLITSLGHDCSVVAPSLIPKKAGDHVKTNRRDAQSLARNLRAGELTAVWVPDERHEAMRDLSRAREAAIDDLKSKRQQISSLLLRLGLHYPGQKTWGKSHRNWLAGQKLGQREQRIVIEELFGAERQAQDRVGRLEQAIRDAVPEWSLAEIVRALMAVRGIDLIAAVTIMAELGDLSRFASPRELMAYLGLVPSEHSTGDTVRRGGITKAGNRRARRILVEASWSYRYPPRIGRDKQAKVDAAPEPVRAIAWKAQMRLSSRFRMLSKKGKRPTIVVTAIARELCGFIWAIHRAVTSHGATTASR

SEQ ID NO: 167574 - protein, 344 aa, unidentified
MLYVGLDLSRKRLDFDARLGGGELVERGAVPPDADGLAGLVRRLGDAQVLAVIESMNGARYVHDHLEREGWDVRIADAVKAKGLAPLACKTDKIDAWVLAELARLDLVPEIWLPDPAVRGERERARFRLHLVKHRSALKNRIHSILIAHGVASPSSDLFGASGRRMLERLGLPEPWRSTSAASLALIDTLDEEIERCERELRSLGADHRYVPLLMTCPGIAWILAFTIASEIGDIARFPTPVKLVGYSGLTPRVEQSGESDRRGPLRKNGPDHLRWALVEAAHSASRHALYRPILERNRDRHGRKRGTKIAALTIARKLAEAIWYMLTRNQPFAPAGATRPLAA

SEQ ID NO: 167575 - protein, 408 aa, unidentified
MEVLHARCCGLDVHKKTVVACLLTPGLGGKPLREVRTYGTTTRELLALVDWLAANGCTHVAMESTGFYWKPVHNLLESSFELLVVNAHHLKAVPGRKTDVRDSEWIADLLQHGLIRPSFIPSRPERELRELTRYRTTLVRERASEVNRIQKVLEGANIKLASVASNVVGVSGRAMLSAMVAGVVDAEVMAEMARGKLRNKIGTLKEALHGRLGSHQRFLLGAQLRHVDELGQLIDEVSAEVEERLRPSQEDLTRLTTIPGVGRRTAEILLSELGADIARFPSARHLASWAGICPGNHQSAGRSGTGRTRKGSPWLRSALVEAARAAGRGRTYLGAQYHRIAARRGANRAAVAVAHSILVIVYHMLSDRRDYHDLGGNYFDERHREQVSRRLTRRLEALGYSVSLSPAA

SEQ ID NO: 167576 - protein, 390 aa, unidentified
MHVVAHQPEAPGAIRSDLGAIFVSLELSRSTWLITSLSPCAGEKMSKHSVAAGDIGALLARFSEFKQKAFARTGKSFPIIVIQEAGLDGFWIHRVLQSEGIESHVVDPASIATSRRRRRAKTDRIDGEALLRALLAYKRGEPRVCAMVKAPTPEEEDRRRLSRERKTLIGERVEHVNRIKGLLFCQGVSDYEPLRRNRRQRLDELKTGDGRALPDHLKAQISRELDRLELLLEQIKAVEAGQNTLFAAAKAEAPTPAPVTMLLDIKGIGPEFAAILWMEAFFRSFANRKQIAAYGGLAPTPWQSGAVNREQGVSKSGNPRLRTTLIQLAWLWLRHQPQSALALWFKERVTRNGGRFKKTTIVALARKLLVALWKYVTAGIVIEGAVMKAA

SEQ ID NO: 167577 - protein, 361 aa, unidentified
MRIIGCDLHARQQTLAMLDTETGELVNVTLLHEGNEVREFYSKLPHAVLVGIEATGSMHWFLNLMDELGIECRVGHPATIRAAEPRKQKHDRRDAELILKLLAENRFPAIWLPSKELLDLRALLLHRHPWVRMRTRIQNALQAIALANGLRRGPGLWSYDGQAKIAFLPLLPHTAYRRSALQAMYKTMESEIEKLTEQIAEQAANRSGARRLMTHPGVGPVTALATEVFLGDPRRFADGKALASYVGLIPGERSSGRRQRLGKVTKQGSPLLRFLWGEAGAHAVRRDPELKRFYRRKLVQKGLGKARVAVARKLGIRLWIMLRDEIDYQEFCRRGQKQQSGAACAGMPETRNGANGHRPVD

SEQ ID NO: 167578 - protein, 349 aa, unidentified
MTEQRRSYAGECVYVGVDVHKETYTVTCVCHKQIVKPATVQAEPGGLAVSLPRGFPGATLYSVYEAGFSAFVLHRVLTKAGITNMIVNPASIAVAANDKVKTDRRDSKKLAIDLADGRLRGIYVPTEAAELARLLPRTRAQIVEHRATIARQINAKLHQFGLIAPSSRRMISNRYLREMATWTLPPELSVSLTLLAEQWRFATRQLIEMRRLLRDQAKAQEEIEKVYRSVPGIGEVVARTFATELGDMTRFANERALFSYTGLTPSEHSSGTAVRRGSIRRQGSSRVRHLLVETAWRAIPRDKALKEIFDRIAATRGKKRAIVAIARRLTGRIRACFRQGTTYAVGTAA

SEQ ID NO: 167579 - protein, 344 aa, unidentified
MIIIGCDFHPSWQQIAWVDTETGEGGEKKLMHADGEAERFYRQQPEPVLVGLESTGNSHWFVDLLAEMKHEVLVGDAAKIRASQVRKQKTDRRDAAHILELLLKNDFPRIWTPSRQERDQRQLLIHRYKLVTLRARVKNELQHLAMNQGMQKRRSLWSQEGQKLLLDLPLQCWASTRRKNLLELLKQMDQQIAVLDRAVSQAAEQNEEARLLMTQPGVGPITSLAYVLTLGDVSRFPRGKQVASYLGLIPTEYSSAGKQRMGGISKQGNRFMRMLLVEAAQSVVRYDPQFRSEYLHRCHQKPKAVAKVAAARKLAVRLYWMLRTHTPYPEVVRIESSPRGPLAG

SEQ ID NO: 167580 - protein, 385 aa, unidentified
MAQSEDMSKPPTALAQNDTLICVVEMGLKSWLVAGLVPGIERQPLKKLEADESALHRLVLRWKAEAEKAGRPISRITLAFEAGRDGFWLARWLGSRGIEAWVIHPTSIAVSRDHRRPKTDRLDTQMLMRAFLGWLRGEPGHCRMAAIPTLEQEDAKRPTREHETLVGERTRIINRTKSALIRLGIRGFKPGLRKAPERLASLRTPEGVPIPPNTLAEMHRDIARLAVIQSQIAELAVARLERLEHATDAPHAMIRLLARVIGVGVETAEMLVTEVLSRNLRDRRAVARYAGLTGAPDESGSKRHEKGLAKTGNARVRHGMIQFAWRFLLFQKESALARWYRARTENAKGSRKRMIVALARKLLIVLWRFVMTGEPPEGVALRVAA

SEQ ID NO: 167581 - protein, 391 aa, unidentified
MIYVGIDVAKDKHDCFITNSDGEALFKSFTIPNNRKGFETLFQKVQSVSDDLTKVKVGLEATGHYSYNLLGFLLDKGLPTYVINPLHTNLYRKSLSLRKTKTDKVDAHTIASMIMSDVNLKSYSDTSYHNEELKSLTRYRFDKVQERAKLKTSVSRLICILFPELEKLVPTIHMASVYALLSEFPSAHAVASAHLTRLTNLLSESSHGRYGKDTAVMFREAARNSIGSNMPAKSLELKHTIKLIQELTSEIDEIETEIKSIMDEVNSPILSIPGINYRMGAMIIAEIGDFSRFDSPDKVLAYAGMSPSTYQSGQLDNCYSHMEKRGSRYLRYALYNATKYVCHWDESFGTYLAKKRAEGKHYNVALSHATKKLVRTIYAMEKTGQSYSSAP

SEQ ID NO: 167582 - protein, 371 aa, unidentified
MLTDLSQPGAPAPAPTAVLVGVDTHKQAHVAVAITRLGARVAACSVSADGAGYAALLAWARGLGTLEAFAIEGTGSYGAGLASFLRRQAVRVVEVGHCDRRMRRKHGKDDTLDAESAARSLLAGTATAVPKTADGAAEMVRQLKIARDTAVKARSAAMITLKALLVNAPDALRAALESLTDRKLIDRCAELDAGEVRTPAASMRHALRALARRWRLLAEEIATHDVLLDELTAAAAPTLRAAFGIGPDAAAEMLIVAGDNPGRIRSDAAFAKLCGACPVPASSGVTNRHRLFRGGHRQANAALYRIVIVRLRWHQPTLDYVARRTAQGLSTRDIIRCLKRFVAREVYRALLTDHAARAAAILPAEALAIAA

SEQ ID NO: 167583 - protein, 343 aa, unidentified
MVIYVGLDVHLNSIAAVWGKVKDKPRSMTVTPTEEGFKELTKAVGTKEVWAVYEASSCGFEAYDELRALGWKMSIVAPTHITKSAHSKKRKTDLRDAKHLWEVLMSHGELGTELAQIWIPSRELQEEREIVRRRLKLSESSCRVKNGILSLLRMHKIKRPDGMKTAWTRKHLAWLRGLAKDEALGAPVRTVLESYVRELAFVEEEIETLQKAVESLAQEPRYRSAVEKMSEVPGVGILTALTFLVELGDLRRFDNRRQIGSYLGLVPASYESGEASDRKGHITRLGPPRVRKVLNQAAWHLVRLDPLWRKRYEGIASRGGAKTAIVAVMRKLGIELWQRAKSA

SEQ ID NO: 167584 - protein, 346 aa, unidentified
MEHYLGLDVSLKLTAICIVDQTGKIVREGMVPSDPEAIAGFVQSHAPHVARVGLETGATATWLWNELNALGLPVICIDARHAKAALKMQINKNDRNDAAGIARIMQCGWYKQVHVKDRASHAIKALLASRALLVKLKRDLENQIRGLLKNLGQVIGRAKMNVFARRAAELLEDRPDLAVATRPLLRAREAVEQEIADLDRKVLRLARTSAQVQRFMTVPGVGAITALCFLATVDDPTRFKRSRSVGAYAGLTARGYASGETDWTGRISKCGDTMLRSYLYEAANVLLTRVAKWSALKAWGLRLAKRSGLRKARVAVARKLAVILHRMWMDGTDFRWSSQETAQQAA

SEQ ID NO: 167585 - protein, 351 aa, unidentified
MKIIGCDFHPSWQQVAWLDAETGETGEGKLVNGDGEAERFYRGLAEPALVGVEACGNSQWFVDLLQQLGHEVWVGDAAQIRASYVRRQKTDKRDAAHILKLLVENRFPKLWVPSAEQRDVRQLLIHRHKLVEIRTRVKNGLQHLAMNRGMQKKSTLWSAAGQKALRQLPLQNWAARRREDLLGLLKSLDEQVGQLDQAVEETAQRDKMAQLLRTQPGVGPITALAFVVTIGDVSRFRRGKQVASYLGLIPRERSSGGRQRLGAISKQGNRFVRTLLVEAVHNVTRLDESFRKTYQQRCHRMAKGVAKVAAARKLAVRLYWMLRTNTAYPEIVRIENSPPVPLVSPSRRSRP

SEQ ID NO: 167586 - protein, 355 aa, unidentified
MESTKYIGMDVHKDAISIAVLNSSGKLVMESIIETKANTILEFVHGLRGSLYLTFEEGTWAAWLYDLLKPHVTKLVVCDPRRNDYLKQGSKSDRIDARKLAELLRSNLLRPVYHGEHGVRPLKELARSYLTITKDQARVMTRVKAVYRSWAIPCAGKQVYGQRHRLEWLGKIQEAGVRRRAEFYYVQLDALRSLRLVVRRELLLESRKHGASTLLSQIPSIGPIRAALLIALLQTPDRFRTKRQLWAYSGLAIETHDSAENQYVNGQLQRSRKQASIRGLNQNHNHDLKNLFKSASAVAAAKAGPFQKFYDAQIGKGLQPEMARLTLARKIAAITLIVWKKGVSFDARYLNPQTA

SEQ ID NO: 167587 - protein, 356 aa, unidentified
MDKVIREGAVRVGVDLAKRVIQVHAVDATGHVLTSRALPRARFIDWCVRLPAGCVVAMEASSSAHHWARKLVALGLDARIISAQLVEPYRMEGASGKNDANDAAAICEAASRPKMRFIPVKSIEQQSMLCVHRLREGFKEDRTACINRIRGLLAEFGLVFPQSPRELQAVLSDVLEDAGNELGTLARLTLQRAQAQWRELDDHLAWCDERIDAHRRSNPEVQHAATLIGIGPVTASAAIATVGDFKQFKNGAQFGAWIGLTPRQRSSGGKNNLGGITKRGDTYLRTLLIQGAKSAVMTAHRRQDKISSWVLALRERSGWQKAAVALANKNARILWAVMTRGDVFDPNHLSVKPTAC

SEQ ID NO: 167588 - protein, 344 aa, unidentified
MQTMYYIGLDVHKRTISYCVKDASGRVYAEGSLPATRFDLDRWMKTLPQPWTAAMEATVFTGWIYDHLQPHAAALKVAHPLMLRAIAAAKKKNDRIDASKICDCLRCDFLPECYMASTAIRERRRTLRYRNLLVRQMVQMKNKISGLLMEAGVSYNKQRLHRAGYFRELLATNSGIDEGLCSLLRLCRETVVRLQKTESAVVLSLERDSLLMDRVERLMTIPAVGPITALTWALEVGDAQRFSSIKKAISYCGLCGAEKSSANTVQRTPLSQQRNKHLQTTLIEAAKMAPRYSPNLAMLYDKEKQKGNANRATLAVARKLVAYLMAIDRGQRNFQAVETNCIAA

SEQ ID NO: 167589 - protein, 348 aa, unidentified
MQIAVLGIDLGKNSCSAVGLDKAGRVVLRRRLSRHSLIKLATQMPSCVMAMEACCGAHHLGRVLRAHGHHVRLMPPEYVQPYVKAQKNDERDAEAIAEAATRPTMRFVDLKSEDQFDMQTLHRARSRLVSERTALVNQLRAVLLERGITVAQGRRRLARYLTQALDADDTEGTQLSSRIRVLIEDMRAQWHDLDQRIAAFDIEFAAAARSEESARRLSTIPGIGAINATALVAAVGDARRFARARDLSAWLGLVPRQATTGGRPRLLGITKRGNKYLRTLLIHGARAALPLLLTVESPLGNWLRGLSARAHRNTVIVALASKLARIAWAVLRSSTTYNAATGSRLVGA

SEQ ID NO: 167590 - protein, 344 aa, unidentified
MNATTVGVDLAKNVFEIAVADQRGHIDERHRLNRARFDRFFVNRATCRIVMEACGSAHHHARRLRSEGHDVVLLPAQYARAYVRRNKTDAADAAALIEAARCPDIRSVPIKSIDQQALQYLHRLRSQWMGARTSRINFLRGCLREFGVCMPLGAQRAIQSVRDALANPNCPVPALLHDSLIELLTEIDALEKRCKLIERELARLHENDPVVERLLKIPGVGPLTATALRASVVDIQRFPSARHFASWLGLTSREHSSAERRRLGRISKQGDPYLRTLLIHGARAVLIAARCAQRRGSSLDRLRSWALEIQDRRGHNKAAVALANKLARIVWATWRFDRDFENRI

SEQ ID NO: 167591 - protein, 337 aa, unidentified
MNNVAIVAIVLGKHTFHLHAQDDRGHELYHKKFNRTGLARHLASLEPCTVAMEACGGAHYMAREAAKWGHVPKLIAPHLVRPYVKSNKNDFADAMAICEAASRPTMRFVSPKTEAQQASVMLNSQRDAYIKERTASVNRIHAGLLEVGISLSPGFHAIKELPALLEECSFSAQIKQLLLGLRDHFNYLDGQVKALDKQVEHQAAEDDLAARLMTIPCVGPITSSVVAAELGNGQQFKCGRDYLASIGLVPKQHSTGDKTALLGISKRGDRNQRRLLIQCAHVYLMGLERQTGALADWVRQLLARHHSTGWSAPWPTNWRESLVRSPLTTMNSRRGQA

SEQ ID NO: 167592 - protein, 379 aa, unidentified
MYRILKIGMDVHTTNFTLCALESKFGEEDRVLANITVGPDHKNVLDFIRRIKEKMDPKGQDEINVECGYEAGCLGYSLHNQLTACRIKCTILAPTTMHSEKGPRIKTDRRDAKLIAQCLSNGGYHAVHIPTAEDNAIKEYIRMRDDHKIALKKVKQQTNALCLRFGLFYDGSKWTGAHLKWLRALELPELIRETLNEYLATYDELTAKIARFDQRIQELANQEQYREKVKKLECFLGIRTYNALALIVETGDFIRFRKGNVYAAYLGLAPGEHTSAESGGRLGITKAGNSHLRCLLIEAAGGICKGQIGKKSKDLIARQAGNPADVITYADKANTRLRSKYYRLTRHGKKRNVAVAAVARELACFVWGMMTDNIHGNVA

SEQ ID NO: 167593 - protein, 338 aa, unidentified
MSVKDLGIDLAKNVFQLHGVNADGDCVFERRVRRDTLLLMLAKVPPCRIGIEACTGAFYWQREFEKLGHTVKVIAPQYVKPFLMHQKNDRNDAEAICTALRQPNMRFVPPKNELQQDIQALHRARQRLVNHRTALVAQVRGLLLDRGVAIPLAITRFRRLVPGIIEDLNNPLSTMARETIADLFSFLLSIDERVKAFDRKIAAVFRKSEDCQRIAKVCGVGPKTATAIIAGIGDGSEFKNGRHLAAWLGLVPRQHSSGDRRRLMGISKRGDRHLRTLLVHGARAVVRVSAHKSDPFSQWVNALRKRRGAAKAIVAVANKNARIIWSMLRNNEEFRAYA

SEQ ID NO: 167594 - protein, 369 aa, unidentified
MRSVTGSAGPIHLGMDTSRDAIVVGILRPGEETPIVDRIFNDEPSIRRLVGRFPDPGVLRVCYEAGFGGYALHRLFSSMGVDCQVIAPALVPKGAGERVKTDRRDAIRLARLHRAGELTAIRVPSAAEEAVRDLVRARADLVEDRKRAKQRIVAMLLRQGRVFREGAPWTAAHERWLSAQRFDEPALAATYAHYRAGLPARVAELAAIEAELWPWAHREPLAGSVARLVAYRGIGELIALTLAAEIVDWRRFPTATAFMGFTGLTPSEYSSGTRIARGHITKAGPVGVRTVLIEAAWKYHYQPAIRGDLRKRQAGASPATLARSLAAQHRLCGKFRRMSGPGGKPGTVTVVAVARELAGFIWAEMTSQD

SEQ ID NO: 167595 - protein, 340 aa, unidentified
MEIDVLGIDLAKRVFQLHGATRSGLAVHRSKVSRPGLLQAIAALQPKSVVMEACSSAHHWARRLKAMGIEARLISPQYVAPFVKTNKNDRNDAEAIVEAASRPSMRFVGVKTVEQQDMQSLHRLRQLLVHQRTALINQARGILGERGIVVAQSPAAFHRAMPVVLAAEDPELTQFCRALLLELLEHLNAVEARIDAADVKIKAFMASSELCKKIGAIDGVGPITATAIVAAVGDASEFKNGRHLAAWLGLVPRQYSSGGKSRLYGISKRGDTYLRTLLIHGARSVLRYAVGKADVQSKWLRELIERRGYNRAAVAMANKNARVIQALLSSDRNYERPAMA

SEQ ID NO: 167596 - protein, 387 aa, unidentified
MGRVIIGMDPHKRSATIEAIDEHEHILARGRFGTDRDGYRSMLKAGRQHPERIWAVEGCNGIGRHLAQRLIADGETVVDVPAKLSARARVFATGQGRKTDPVDAHSVAVVALRTKGLRQVTADDATVALRLLIDRRDELGRTRTETVSRLHQQLLELVPGGAKQFLSAAQARALLATVRPRDIVGRTRQQLAAELTAELTAIDKKIKAANQQLTQLITETGSSLPRLHGIGPSGAARLLGDIGDVHRFASRGHFASWNGTAPIEASSGDRRHHRLSRAGNRRINRVLHIMAIVQLRHDTEGRAYYRRKLAAGKTPMEAIRALKRRLSDIVYQCMVNDTRAMATGPGGQRGATLQSSAASPIPTAGTSDKSLPGPATKHSRTPTLTRT

SEQ ID NO: 167597 - protein, 322 aa, unidentified
MSSLTLFVGIDVAKDTLDIAVRPTAETWQVANETTGMSTLVAQLETMAPALVILEATGGFEGPLLAALTVTRGPVVRADPRQVRAFAQAIGILAKTDRIDARVLAHFAEAVQPVPRPLPEAATQELRALLLRRRQVVDMLTAERNRLGTVPPRIHQAIQQHIAWLEGQLSSLDDDLPQASQRSAVGHATEAILHSMPGVGPVLSRTLLGQVPELGTLGPKQVAALVGVAPCNCDSGTMRGRGRVWGGRAEVRAVLYMSTLVATRYNPVFKAFYARLLAAGKRKKVALTACMHKLLTIMNAMVRDMTPWQPRKVASASHPRAS

SEQ ID NO: 167598 - protein, 341 aa, unidentified
MTQEMHVLGIDIAKHVFHAVGMDERGKIVLRKRWSRHDLIPFLAKLPPVLIGLEACGGAHDWARRCRASGHEVKRMAPPCVKPYVKSNKNDRRDAEAIAEAVTRPTMRFVPIKDVDQQDIQALHRVRERLISERTALVHEVHGLLHAYGMVIPKGVAKCRQAVVGKLESEKDQLTPLSQEMFWQLGEEFAALEKQLASDQEKLEALATTHPACQRLMTIPGIGPFRATALVAAVSDASAFKNGRQFAAWLGLVPRQHATGGKERLLGRSKRGDSSLRTLLIHGARATLRWVGRKTDRRRQWIRQLSERRGPNRTAVAGANKHARIVWALLTSHQAYEPAKG

SEQ ID NO: 167599 - protein, 384 aa, unidentified
MRHVEQTEAARDRAVVFVAMELSKTSWLLAARASPSGKTSSHRLNGGDVAGLLALLRRLQAREQRQGGHDVEVILGYEAGYDGFWLQRRLSAEGITCWVMDPGSLQVDRRARRAKTDRLDAAMLLRALMAWWRGDRAVCSMVQVPSVEREDARRTHRERQRLIAERVQHVNRIKGLLATQGIYDVQPLRRDRWERLDELRTGDGRELPPRLRREIEREFKRLELVLEQIEATEAERDAAVAVPAADDADAAKVVQLAKLGGIGTELATVLVREALHRSFTNRREVAAYAGLTPSPYASGERHRDQGISKAGNPLLRKAMVELAWLWLRYQPDSALARWFTERVGTVRGRMRKITAVALARKLLVALWRYVRTGLVPEGARLKAA

SEQ ID NO: 167600 - protein, 373 aa, unidentified
MENSITYVAMDTHKKEHKVALHYPCHEEIVRFVVKNTARDIKRLVSKIKKQAMADVKFCYEAGICGFTLKRRIEALGCECAVIAPSLTPQKPGDRIKTDRRDAAKLLAMFKAGLLTEVHAPNKKQEAGRDLTRCRQVAQENLKRVRHQLETFLTRHGYIYTDGIHWTQKHLCWLRSLEFEQSLLRDVFDSYFTEMQHCIQRLASLDKEVERLAESESYKEVVDFLRCFHGIDTLTAITIITEIFDFGRFSRPGELMSYLGLTSSENSSGQKERKGPITKTGNKRVRRLLVETSWHYRHPYSVSSILRQRRKDQPQWVIDIADRAGQRLRKRYWYLVNKGKMPCKATVAIARELTGFIWSVFREYEVRNGKEAA

SEQ ID NO: 167601 - protein, 360 aa, unidentified
MQSKINQTNLFDNQNIYVGLDVHKKQWTVSIFSEEFEHKTFTQPPTADALHSYLIKNFPGANYYSAYEAGFCGYTPHRKLCALGIHNMVINAADIPRSAKEKYVRTDRIDSRKIARELRGGNLKAIHVFDPEHEERRTLSRVRFMLVKDQRKCKNRIKSFLFYYSINIPPEFDNNNWSHAFLNWLRNLNLNTKAGMASLNTLIDDYQAKHLQILAVSKQIKQSIKQVDDNLYMLLRTIPGIGPLTAIALMVEIGDINRFKHLRHLSSYVGLLPYVKQSDENEYVSGIHFRCNPYLRPLLVEAAWVAVRSDPVLLKYYQKHIVNSKPHKVIIKVARKLLNRVRYVMKNRKKYVVNTVAIEI

SEQ ID NO: 167602 - protein, 478 aa, unidentified
MARAHQQVRRVAQAGAGKQGSPATQVADLAITHRHAAGLDIHAAEHFVAVAPEDVPAGFVNPDPKLPAGVRKFGTNTADLEAIADWLKVCGVTTVAMESTGVYWIPLYDLLASRGFEVLLVDPRQTKHAPGRPKTDVVDCQWIRRLHSYGLLTGSFRPGDEIVRWRGFQRQRETLIRYAAQHIQHMQKMLEEMNVKLPEVVSDIVGVTGMKILKDIVRGERDPLQLAKNRHESCKRTEAEIAAALHGNWRPELLFGLKQALKLYEFYQQQLRDCEAQIEACLRSLKDQSDGRPLPPSLRKRKPEKNEVRFGARALLFRMSGVDLTQIEAISETTALVILSELGIDLSAFPHEKNFVSWLGLCPQHRGSGGKIFKRGTRRGANRVARALRMAAQGCHRAQNAMGAFYRRIQGRSGGAKAVVATARKLAERVYRMLKYGQEYVRQSQEAYEQAYQLRLMKSLAKRAAAMGYKLVPETTGS

SEQ ID NO: 167603 - protein, 342 aa, unidentified
MKKIVKQIVGIDVSQDELVTCLGRMYDDWTPELYAKKTFPNTRKGMESLVLWVQKQTDSGASVRFVMEATGVYHEQLAYYLDENDYQLTIVLPNKISNYMRTLQTKTITDKTAAEAIARFGLERKLDNWYRPKGIYRKLKQLTRERYQLVEQRTTIKNQLHAEQTEADSSKDSIKRMKVRIALLDKQEQQIEAELKELIKTDAEVQKIILIVCSLPGVGLLTASAVLGETNGFDLIRNRRQLASYAGFDVQEKQSGTSVKGKSRISKKGNKYLRRAMHMPALAAIRHDQRFKAIFSRLLAKHGIKMKAAVAVQRKLLEMMYTLYKTDKKFDKNYLQKKAEAA

SEQ ID NO: 167604 - protein, 324 aa, unidentified
MIDGILGIDVCKNTLDVSISSYTKVRTKSFTNSPDGWRHLLDWLIAQKIQRVHACLESTGRYSLGIACALYEADHVVSIINPAQIRDFVRTKLGRNKTDGVDASHIREYCELFKPSPWVPPSEAHRRLGELQTIRSGIIAGLTEWKNRKNSGIVDAEAQALADATISHFTSQLGAVDKAIALTIDNDCDLQSKRDLLLSISGVGETLAGVVLAELPGPDVLRSSAEVVAYAGLNPRQHQSGTSIDRATRISKIGNAVLRAALYMPALSAMRYNSAIVALVARLKSRGRLKPKQIVVAAMRKLLVLCFGVLKTGRPFDAAIAMGG

SEQ ID NO: 167605 - protein, 407 aa, unidentified
MIFVGVDWAEAHHDVHVADEAGKRLGKARLPEGVDGIARFHELVGAHVEDPAEVVIGIETDRGLFVTALVAAGYQLYAVNPMSTSRYRDRHSTSGAKSDAGDAQVLSDMVRTDRHHHRPVAGDSEGVEAIKVLARAHQTMVWSRGRQTNLLRSTLREFYPAALVAFDDLTSGDALEVLRVAPTPTLGGGLSRSKIAAALRRGGRQRRVEERAVEIQAALRSEQLHAPAVVANAMGASVAANVAVIAEMSAQTTRLAEELESGFEQHPDAEVVRSLPGLGTILGARVLGEFGDEPNRYATAKSRKNYAGTSPITRASGTKKTVLARHVRNRRLADAIYLWAFAALTASAGARAYYDSRRAAGDGHHQALRALGNRLVGILHGCLIHHTTYEEAIAWAHRPESEFGAAA

SEQ ID NO: 167606 - protein, 429 aa, unidentified
MRTESTPGARGPVFCGVDTHADSHWLCVLDWRGRKVLSRQFPADAAGYEALAGAIAAAGEPACVAMEGTSSYGAGLTRHLASLGMPVREALSPARTQRRRPGQGKCDESDAERAARAAMSGSKLGTPKSQDGWVDGVRYMLAARSGAVKARTSAINTARSLLTTAPEGLRSRFRGMGGPRLMEELPSVRAEGALGAALGALADLWAAARDAALDMELAIEASLEENCPALLAMYGCGPVSAAKLAVAAGDNPGRLRSEASFAAICGACPIPASSGKTVRHRLNRGGDRQANSALHEIARQRVMRDPETAEYAERARGRGKSDREVMRCLKRYVAREAYRALMRPHEIRRPEDASELVAARRAAKVSQVRAASILGTSEKYISMLERGQRELKPIRRAYEAWVEAGLPLDWDRQAFEAERKMDSKKHLAK

SEQ ID NO: 167607 - protein, 387 aa, unidentified
MIYLGIDIAKRLHVTAAISSEGEIIIEPFEFSNDHDGFSKLLSSLHNILKEDLIMGLESTAHYGNNLVVFLFSHGFNITVINPIQTSVMRKNNIRKTKTDKVDALLVAKTLLLNNFRLVSKQDIDLIRLKDLCRFRQKLIKARTTVKIQLTTYIDQVFPELQYFFKSGIHHKACYTLLKEASSPEEIASMHMTHLAALLNKASHGHFKKEKAQELRVLAQKSVGTGNKTLSIQIAQSISQVELYDRQLAEIHLEIEMTMKSLNSVIMSIPGIGYLNGAMILGEAGNITRFSDPSKLLAFAGLDPSVYQSGNFKATNTRMSKRGSKVLRYALINAAHNVVLNNKTFKEYYDLKISQGRSHYNALGHCAGKLVRIIYKMLTCNIEFNLE

SEQ ID NO: 167608 - protein, 467 aa, unidentified
MTPHKDFFLDVCPPAPTPTLLETSALSDALQICHPHAAGIDIGEAEHWAAVPPGCDPQPVRRFGTFTADLDALADWLLACGVTTVAMESTGVYWIPLFELLEARGLQVLLIDPRQAKHVPGRPKTDRLDCQWLQRLHTYGLLAGAFRPADQVCVLRSYLRHRQMLLTYAAHHIQHMQKALQQMNLKLTQVVSDITGVTGMAIIKAILAGERDPQHLAKLRNPHCHHTEDDIAKALQGTWRAEHLFALRQAVELYDVYHQQITQCDQQIKKHLETFTDKSAGQPLPPKARRHKKTNEPRFDARTPLYRMAGVDLTTIEGIEENTALVILSEVGTDMHRWPSVKHFCSWLGLCPQHKISGGKVLSRRVRPGAHRVTVALRLAARTLHHSQSALGAFFRRMKARLGTPKAITATAHKLARLVYSLLQHGSAYVQQGLDAYEAQYRARKVTTMAKQAKALGYTLVPLAAQG

SEQ ID NO: 167609 - protein, 340 aa, unidentified
MSQETYAGLDVSDKTTHIHIVDKEGGFVWRGVVPSDPEAMRRCLVKQAPHLKQAVLETGPLSSFLFHGLDTRGVPVVCVCARHAKRVLAARANKTDALDAEGLAHLARTGWYKRVHMKDPETHLDRATLRVRDTLIKSHRVASGQLRGLLKLFGLKLGAVTTPGKRRERLARLLAGEADLRRILTPLIHMIEALEDELAVMNKQLKARAQADPVVKRLMTAPGVGPITALTFKTSIEDPGRFSRIADVGAYAGLVPRRYQSGARDTQGSISKAGDRTLRQALYEAANVVIARLRRDCALKRWADGLQDSKGAKRARVAVARKLACLLLSLWRSEADFRWA

SEQ ID NO: 167610 - protein, 412 aa, unidentified
MKTVHTKRTGQAGRPSVGADRCVARVVPSLLPKSSNSCQGYPSPHLSQGRASLEQIKSIKEDCLLEAPLIFVGIDVSKAQLDVAIRPSAQSLSVTNDRAGIKSLIKHLKKLRPQLVVLEATGGLERQVLSALIAGEIPVVMANPRHIRDFAKSIGQLAKTDRIDASVIAHYAEAVRPKPRPLPDEASLELRALSARRRQVVDMIVAEKNRLATASKVVKKRITAHIAYLEQELNDADQDLDRFIEKNAAWKENQQILCSTPSIGPVSSRTLLVELPELGALDRKKISALVGVAPFPRDSATLKGRRTIWGGRASVRSALFMATVVATRFNPVIRDFYKRLKAKGKPSKVCLVACMHKLLTILNAMIKNKIRWSENLLTRPLDMKHSCYISGLRLRLARSCTGEFIPSADCGF

SEQ ID NO: 167611 - protein, 317 aa, unidentified
MAQDNAFVGIDVAKHELVVHLYPDGEGWRVTNSASGLRELATRLARVARNRVLRIGFEASGGYERSLAILLESKGFEAYLLDPARVRSFAKAEGKRAKTDPLDAAVIARALATLHTGLKPWRHDPAAQRLAERIRLRDQLMAQMIQSQNLLETTADAAAQRMTRAHVASLKAKIQRLDKIIADLIAENPTLCQRAKLLRSAPGVGPVVAATMLAHMPELGTITGKQAAALAGIAPFDRQSGTSTKPGRCQGGRPAVRRALYLAALSIMRTKKSYLATLGLRLKAQGRPFKVAIIATARKLLVALNAMLKDGQSFLSA

SEQ ID NO: 167612 - protein, 415 aa, unidentified
MYYGLDVHKDFIQVCQLSGDGRQRRNFPIPATSKAIEAFAGTLTSEDQVALEVTFHTWAIHKILEPHVARVVPVNSMQVKAIASAKIKTDKVDAHTLAQLLRADFLPAVRMPSRRAWTLRQMVSHRRFLLKQQTATKNTVHSLLNRQLIPTPDGWTPFARKTREWMRELTLPPAEHFMLNNSLGLLEQLEARVANIDEQLLQQATISQDIKLLMTIPGIDVTVAIGLLAAIDDIGRFPTPQKLASYFGLVPRIRQSASHCYHGPITKAGNSTARALAIEAAQCLAHSSSPLAATYYRVRNKRGHNVAVTALARKLICVVWHLLSQRQPYRYAPIPRTREKLLRVTPDHTRPRSVPQTLEAVYAEAGLPPNTIATSGERRAAASNRRTTTRLAKGSGKTKTAKKIHKEENPALTNS

SEQ ID NO: 167613 - protein, 457 aa, unidentified
MSIAHKSKDNMAIFHALHQSAIGIDVHSNLIVAVFQKGEFGKDCLEGDTWNGTASKSELIRFAKWCKRKSPEVLIMESTGVYWQSLYEALEDEGFKQTQIIVVNARDVKNRRGSKTDLSDAIHLAEIARQGSYRASFVPAKYVRQLRCLWRSYATLKNTRKRLLNILHKQLCQVGCRASSVFSDIRGKTASKILECLISGQNGKSLRQSIVSIIKSSKGKLRSTPAMIYEALQADMNSLVWYSIRKHLTHIKFIDVQLKEAEENLRSNLTPYQRLLSLLSTIPAIKEITSIGIVCELGDDLSQFTSIRKFAKWIGLAPGNNESAGKRYSGRTTPGNKYLKVLLIEAASGIGLMKSGYLHEVHQKLKERRGTKKANVAIAHKLCRIIFNIITQGTCYIEQDKPILKDHRLAKATNALAGLKEVGLECNDVEVLDSSNGEIKVIHKAKKENKQDSFCSC

SEQ ID NO: 167614 - protein, 381 aa, unidentified
MMTTTEMLQNHDTKTPVLLVAIDMGLKRWHLAMMALRGAKRRHQTVDGGDYLALSEAVLKAKQKWGLAEEAPVIVCYEAGRDGFYPYRRLTEMGYRVYVIDAASIEVSRRKRRAKADRIDAAKLVELLHRYESGEKKALRVVNVPSEKTEDLRQLPREREELLAERQQVWNRLSSLLFLQGYREIPGSAHDLKKWLAERQGVGAYLRLRLEREVARLELLESQLKEVERKEGVWLQEHGDEALVGKVAQLAHLGGFGVISAWVLVTEVFGWRGFRNRREVGGALGLTPTPYSSGEEEREQGISKAGNWRARKMLIELTWCWLRYQPDSALTHWYAERFGRGSKRQKRVGIVALARRLAVAIWRYLEYGVVPEGARLKGTTG

SEQ ID NO: 167615 - protein, 341 aa, unidentified
MQIAVLGIDLGKNSCSLVGLDQNGAVVMRRRMRPGSIVGFTRSLSACIVAMEACCGAHHLGRQLVAQGHAVRLMSPEYVRPYVKAQKNDDRDAEAIAEAATRPTMRFVTLKSEAQLDLQILHRARERLVGERTALINQLRAILLERGITVPQGRRKLEQYLAALPEPEDNTSVSPRVRRLIEDMRTEWQALDQRINALDAEFTTRAREDADARRLTSIPGIGVLNATALTAAIGTGETFTRGRDFAAWVGLVPRQVTTGGKPRLLGISKRGNKYLRKLLIHGARAALPALASSGTPLGHWLRALMQRVHKNVAVVALANKLARIAWAVLRRGVAFDAAAAA

SEQ ID NO: 167616 - protein, 456 aa, unidentified
MAQHKRKKSPAEQQLPAQLHAVNLHAAGIDVGAEAHWVAVPVEADPQPVRAFPAHTASLHALAAWLTLCGITTVALESTGVYWIPLFELLETQGFEVILVDPGTMPKNGRPKTDVHDCQWLQRLHTLGLLSAAFRPDDPVVVLRSYLRLRLTLLADAARHIQHMQKALTQMNIKLQHVVSDITGVTGLRIIKAILNGERDPRRLATLRDQRCKEDETTIAQALHGTWREEPLFALHQAVAAYEFCHQQIQEGDAKIAAQLQTFEDRSKGESLPPKPRKRHRNRLSFETRPLLHRMTGVDLTTIEGIDETTALIVLGEIGLDMSRWPSEKQFTSWLGLCPRVRVSGGRVLSSRTRPTANRAAAALRLAAASLHHAKSALGAFFRRMKARLGTPKAITATAHKLARLIYAMLKHGTAYVAGSMAEYEQKYRQRVVHNLSRKARELGYELHPVLGGPPA

SEQ ID NO: 167617 - protein, 538 aa, unidentified
MTQMRYRTNECVLGAPAPQAARCRAANRWHNEGRGGMRPFSHWCVRTRLGAWPARYRRGVVEGTAQAVTSYERVNPFATVLPPRTLSHTMEEILMARKSKKQRLKIVHPSCAGIDIGSREHWVAVDPDCCEEPVRCFSAFTDSLYALADWLQSLGVEIVAMEATGVYWIPLFEVLDARGFQVHLVNSRATRQVSGRKSDVLDCQWIWQLMSYGLLKGAFRPADPVCQLRSLVRQRDNKVKEQSRCIAHMQKALTQMNIQLDNVVSDLMGKTGTAILRAIVAGERDPRKLARLRDRRLRADEATVARSLRGNWREEHLFALAQALAHYDFLCQQIRDCDQATERQLAVLPSLADEPPEPVKPLRNPHRSAAQQAALHQALYHVMGVDLTAIPTLGVDTVLVLASEIGPDLSRFPSASHFCSWLNLAPPTRISGGKPLPGRAPRVSNRAGQALRQAASNARNNHSFIGASHRARLARMDGANAVKATAHQLARLIYAMMTKGQPYVEQGMEAFEARSQNRQIRALQRKARKLGLHLVEAA

SEQ ID NO: 167618 - protein, 411 aa, unidentified
MRVHHNVCCGIDVHKKSVTACLMWGPADKEPQFEIRRFGTMTRDLQKLAEWLKQAGCEAATMESTGSYWKPVWNVLEGQIAKLILANAQHVRALPGEKTDRKDGKRLAELTRHGQVRPSYVPPRAILELRDLTRYRSKLLSGGNSERNRIQKVLEDANIKLGSVLSDLFGVSGQKMLQALIKQDTVDTAKVAQLAHWSLKPKMEAIQQALDGKLRDHHRFLIDASLQHMRFIEEQLMRLDEEIQRRLQPYQEQYALLQTIPGIKETGAARILSEIGPDMSPFPDGDHLSSWGGACPGNNESAGKKFQSKIRKGNPHLLAALTECAWAATKKKDCHFRNKYYRLKSRRGSQRAIIAIDHAMLKCIYVVLSQRQPYQEPKPTSLSEAQKQRKASSLCRQLRALGYDVTIQKAA

SEQ ID NO: 167619 - protein, 363 aa, unidentified
MYYVGLDVHTSSSSLEILGDDGKTFKRLEVKGPWEAMLRQIESLPAPRSICYEASCGYGHLHDRLSKLAQRVAVAHPRQLHLIYRSKRKNNRVDAGKLAKLLYLDMVPQVHVPKLDVRSWRAMIEFRQKLLGRRTAVKNQLRAILRGHGIKAPKNLWYGPGLAWLKNIAELDNFNSLQRDMLLEELGELDGKIKRVEKELAKIAAGHPAVTLLMTIPGVGIRTAEAFVAYVDDITRFSRTSQLGVYFGLVPCQDASADKNRFGHITCDGPSTVRKMLCESAWQAIRHSPAIKAWFDRITGGDDDRRKIAIVAVARKMAVVMGAMMRSGEVWREDYAFPGEGCASPREGCASPREGCASPRKNN

SEQ ID NO: 167620 - protein, 366 aa, unidentified
MKKTNTVRVKGNMIFKGHQLTTGLDLGDRWSCYCVLDEAGEVLLEQKLPTTPEAMKQSFEKIPRSLMALETGTHSPWVSRLLRELGHQVLVAHAQKVQLITKSTRKDDRHDARTLARLARIDPELLGPVRHRSAKAQIHLTVIRARAELVRARTALVNAVRGLVKSYGQRLPKCGTRQVSRELGAGLHAELREVLDPLLKEIESLNERIKEYDERMEKIAKESYPHVELLKQVKGVGTQIALTYVLTLEDPHRFAKSREVGCFLGLKPGRRDSGESQPQMHISKEGDRYLRTMLVQGAHYILGPFGEDSDLRRWGLRLAERGGKNGKKRAVVAVARKLAVLLHRLWVSAEVYEPLRNSQKAIRAVA
